United States Patent Application Publication US 2005/0228172 A9 - sequence listing, part 92

SEQ ID NO: 418368 - DNA, 572 bp, Homo sapiens
tattgttcttcggctcagtaatgttaggacgaaacaaacccttgttattctaattgtttgaattatccagttgagatcctgggcagtcttgtcctgtttaatgactgacaattaggcttcaatggcgttcacgttgacgggtgctggatcgcccggcttggggcgtctcacgtggcttcagccctgccctccctgcggatctggctctggtacccaccgcgctgaaggagggagcgtgggaacacgtgagcctctctgcacagggaggtcccaggactgacaccgacacggaatctcctcaccttccacgggtccctcgggtccccaaatccaaactcacgccgggaagtacctcaacgcacttccgccctggcccaggctggacaaagcccaggtgctgctgagctggaaactcgctcttcaatgaggttcatctttttcygcgccaatgacatctttatgggggaggcattcagttatgcgcccgaggctcagcacctcatgtgcagttgtgggtctgagtcctggatagaagctggtggagggtctgggggttttgttcaccccacact

SEQ ID NO: 418369 - DNA, 568 bp, Homo sapiens
tgctccaagaagcagagaaaagtcatgacattacaatacaaagttgaattgcctgatatgtactctaggtcaaggtctgcagctgagattgcttgccaattcaagataaatgaatttagcgtaaggaccattacaaaaaaaagaaagaaagaaagaaaaggaaatccatgaagccgttgctgcagctataccagcaagcacaaacacctcacactttttgtagcatacgtttgaatttcatattgaaaatgcagcttttgtgtgggtgcagaattactacgagaaaggcatactrtagactttaatgatttgagaaaaactgaagtcattatctgacaacttaaagcaaaaggaaggtgaagaagctaaagctggagagtttaatgccagccaaagatggtttgataattttagaaagagagaggtttggctttcaaaaaatgtcaggataacaggagaagcagcttctgcttaccaagaagtaggagacaagttactagacaccattaagaaaatcaatgagcataaaggctatctgcctgaacagatttttaatgctgatgaaagt

SEQ ID NO: 418370 - DNA, 601 bp, Homo sapiens
cagtgccagaatttgaaccaggccatctggctccatgctgaacttctttaagatccctccaagtgatctgagccccaagaggagatgctgcatggtttgcaaagaaactagagttggacaggacaagagccagatcatgagaacctgaagaccatcgcatctgtcaggatcctttctgtcgtgagcaacagcaaaccaaaaccaggccagcataaatgagaagagacattaatggtgcacttacctggaaagtgtggtgacttcaggcctggcttgatccaagtgcccaggtgacatcaccagagtccagtctctgctctccttctctgtgctacctttattctcaaagcagctctgtccagtaactccaacctyaccatcctccagtttatgattcaaaaatctcaagaaaggtccaccacctttcctcagccattcaagcagaagaccagggtttcctctgtttggatgccagagtccttgcttgaattgcatgcttgttcctgaacccatcactgtggcccaaatggaagctctgattgatccaggctaggatgcatgacccattccctggagcccaaagcaaagtcacatctggagt

SEQ ID NO: 418371 - DNA, 601 bp, Homo sapiens
cagtgccagaatttgaaccaggccatctggctccatgctgaacttctttaagatccctccaagtgatctgagccccaagaggagatgctgcatggtttgcaaagaaactagagttggacaggacaagagccagatcatgagaacctgaagaccatcgcatctgtcaggatcctttctgtcgtgagcaacagcaaaccaaaaccaggccagcataaatgagaagagacattaatggtgcacttacctggaaagtgtggtgacttcaggcctggcttgatccaagtgcccaggtgacatcaccagagtccagtctctgctctccttctctgtgctacctttattctcaaagcagctctgtccagtaactccaaccttaccatcctccagtttatgattcaaaaatctcaagaaaggtccaccacctttcctcagccattcaagcagaagaccagggtttcctctgtttggatgccagagtccttgcttgaattgcatgcttgttcctgaacccatcactgtggcccaaatggaagctctgattgatccaggctaggatgcatgacccaytccctggagcccaaagcaaagtcacatctggagt

SEQ ID NO: 418372 - DNA, 609 bp, Homo sapiens
atgaaattggaagacaggaaaaaacatttaacacagtgctggctaagctgtgggcagacaggcattgccactccctactgtgcagtgctcactagtctcttttttctggagtgtcaatgacagtttacatcagatatgacaaagactctttggcccactgatccagtttccatccacaacacctgatgtacgcatatagaaacttttttttaatctacaacaggaaaccttttgggaaagcctccattttcagcaacagggtattgaatgaataaaaactcagaagtcatatgagaagatgctctgatccacacattagattcactctctgcagtgaggtgcctagaaagctgtttattatttaaaaacaccctgggtaattctgacgttcacctgaggaaatcatcattgtcaaaggaggatgtttaatgacttgaagacaaagtcacatattattgaacaaaaacacaggctacaataaagtgtgcataaagtgagccaagtttcattcaaaaaacttcactcaaatatattgtgtcacacacatacacrctcacaaagatatctgaaaatccctgcgccaaaatatctccagtggttgccccctag

SEQ ID NO: 418373 - DNA, 570 bp, Homo sapiens
ttttgtctcttgcctaaaaaatcccttttttcccataaatcagtccccttatcttagctctccaggtctttacagatgttaaaagaagcatagaaattatagtgagaggcaaccccaatagagagaaaaaaacatcagggaaaatagaaaagcattccccaaagcctcaattatctacattttggttttcccaggatagcaaaagtaacacaataaactatctttcatctctaactgtagaggattaagagacagagagaaaaagaatgaatctctcctctggaaaaacaaaacaaatagaaatgcagaaagagaataaggcaaaatcagtagattctaaggaggcctrggaactatattctaaactaaactgttgcttgatcttggccctcactggaactccttttctgtagtgtttgatttcccagagaagtggaagtatgtcatgaatatctccaaaacatggtacacctcttctccagacaaataatcaggatgcattgtctaagaaggagaaaatcaaacaagcaaacaaacaaaaatcctgaggctaccatagataaattagca

SEQ ID NO: 418374 - DNA, 609 bp, Homo sapiens
gtgctcaggtgcccacacatttctttgttcctagtttgttagagctctttgggcctatgcttctagagaccaagaagacccttgctacatatttcttctcaaacctttttccttctttaccatgtactccccttaaacttsaataaccttcactatagttttgtcattccaaattctaatctctgtaggatagtagtcatcttcaccccggcttccaaacaggatgcagagctaacagaaaaatgaactaaaaggctagataccaaagcaaagactgcgcattatttctccttagcttttatgaccagggctggcttcagcaagtacttggagaaatgaagctgctattctattctaagttttctaagagagattcctaatgtgagggaagaaatctgtatgtatttattcatctcaaaccagagcccttctaatacaaagtcttggacaaagctttctcaatccttgaaaaacattcttttgctaaatacagcctcagatttgtgtctgaggtcatactaaagatatgcccttgcagcctagtagtctgacctttaaaactagcatgcacctcttaaatacagcatgtgctctgggggcactggccac

SEQ ID NO: 418375 - DNA, 609 bp, Homo sapiens
gtgctcaggtgcccacacatttctttgttcctagtttgttagagctctttgggcctatgcttctagagaccaagaagacccttgctacatatttcttctcaaacctttttccttctttaccatgtactccccttaaacttgaataaccttcactatagttttgtcattccaaattctaatctctgtaggatagtagtcatcttcaccccggcttccaaacaggatgcagagctaacagaaaaatgaactaaaaggctagataccaaagcaaagactgcgcattatttctccttagcttttatgaccagggctggcttcagcaagtacttggagaaatgaagctgctattctattctaagttttctaagagagattcctaatgtgagggaagaaatctgtatgtatttattcatctcaaaccagagcccttctaatacaaagtcttggacaaagctttctcaatccttgaaaaacattcttttgctaartacagcctcagatttgtgtctgaggtcatactaaagatatgcccttgcagcctagtagtctgacctttaaaactagcatgcacctcttaaatacagcatgtgctctgggggcactggccac

SEQ ID NO: 418376 - DNA, 478 bp, Homo sapiens
ttacaaaataaaatgtatagcctgatcttatttgtggtggtgtatatccaatatacccctttgtacctcttgcattttttactacagagatacttagtttagattttaacttgtaagaaatctgccctggtgagtttggtaatttgctaggtttggaaattactattatgcaatccaatctgattaaatacaacatttgttctagttaatcacatatatggttaacagagctatctcactaggttggctaaaaagattaaataagctaatataggaaaaggcactatatgaattctaagcactgtgtaaattcttgaaagcaatttaaaaaattctaagcactatgtgttattgttattacattcaaaaattgtttaacacataaaatwcttaggagttcttcaagcatatacgagaaaagagaaaatttatggtaaagaaaagatcccattcaacagacatatggatgcatagggga

SEQ ID NO: 418377 - DNA, 473 bp, Homo sapiens
atagaaatgtcacttttttcaaggagctcatggtctattctaagaaaatggtgttctctattataaatagtttatatatactgaaagttacaaattaaatgttggcaatgcagtatgtgcatgtcatatattcattcctaaactcttatcagtttttgagatgtaacttttgcataaattttgtaaagctcttatcatgttttttgttagacagaaaatttaatatttatttttatgattctgattccttaacattccaaatgtttcatgagagcaaataaagtcccccaaagstttatgagattattttagaactgtgtaaagcttgtttttctctctggagaaacagaaagtcatgtctgtccaagagtaaacaaactccaacaggcaatttgaatttggttcaaaatgaagaatcctcaagattggggttggttctaaacatagagaaacagcatttcttccttcctcat

SEQ ID NO: 418378 - DNA, 583 bp, Homo sapiens
  misc_feature (1)...(583): n = A,T,C or G
tcattagctatttgatattatacaattaaaactatttcttatctgtaaagtggtaaaatctaccatataaagctactttgcaaggctggctgcaggacctgctctaagtcactntatgggatgatttctatgtgtctgaaatctataaaattttaccattctcattttaaaattaagattccttggctcttattagttcatggagatccaattttgaaagtatatttatggatgagtgaagtcaacattttctagtgaataaacttcagaaaaccagtaatacaatttgagtttcatttcataggtttatcatgtagtagctatgcaactttggaccaataacttaatgtttctgagattcagtttctcatccacaaatggcagaaattttatatcctgccgttagtcactcacgggaacttgtgaagactaaataaaataatggatatgaaaatgctttttcattgctgattctaccatctaacagtgctttacatcctatttctagaattgtattattttaaggcaatattgtaaaattgcttyctggaattcttgtattcataaagtaacttatcaccag

SEQ ID NO: 418379 - DNA, 565 bp, Homo sapiens
atggatagtgagaaaaaatgaaaattagcaaacactatcaaaatttaaaagtacaaagattaaaaataatgtagatttttttttttaatttccagaacctttagggagtaacttgttttcttttttctttcatggtttattttagaagtctagattgtaagactaggataaatagtgtaagctatcattatctgcctttgaaaactatttgtttatatgaattggcagataataaggatttagkttttacttctatagtatcaagtagtcacacacaagatggttaaaattataggagaactaaatattttagatagtatacaagattgacattaaaaaaatactgaaataacttacgcttcatttatttagtcattcagcaatacaattttcggtatttggcatgttccattggaaatagaaagataaaaagttatccaaaatttcataaactttatttaattagaatatatagcatagaatgtggaataattagatttgtcataaattatcactgaaaaattttctgtttttaatgcaatttatagcatgaattacaagattt

SEQ ID NO: 418380 - DNA, 565 bp, Homo sapiens
atggatagtgagaaaaaatgaaaattagcaaacactatcaaaatttaaaagtacaaagattaaaaataatgtagatttttttttttaatttccagaacctttagggagtaacttgttttcttttttctttcatggtttattttagaagtctagattgtaagactaggataaatagtgtaagctatcattatctgcctttgaaaactatttgtttatatgaattggcagataataaggatttagttttyacttctatagtatcaagtagtcacacacaagatggttaaaattataggagaactaaatattttagatagtatacaagattgacattaaaaaaatactgaaataacttacgcttcatttatttagtcattcagcaatacaattttcggtatttggcatgttccattggaaatagaaagataaaaagttatccaaaatttcataaactttatttaattagaatatatagcatagaatgtggaataattagatttgtcataaattatcactgaaaaattttctgtttttaatgcaatttatagcatgaattacaagattt

SEQ ID NO: 418381 - DNA, 348 bp, Homo sapiens
taggcctcttgggccagttaaccaagttctgaatgcaaattgaaaactcttgaagtacattaaaagtgctactctagtgaacataagaattacwagaaagcaaaacagccttattgctgctatgcagactttctccacagaaagaaaatgacatcttcttcaaatagcctttgattggaagacgtcatctaggactttcatagctcaagaggaaaaatcaatgcctgacttcaaagtgtcaaagcgcaagtagactcttttgttaggtgctaatgcggctgatgactttaagttaaaggcagtcctcatttaccattgcaaaactctagggcccttaagaattatgcg

SEQ ID NO: 418382 - DNA, 571 bp, Homo sapiens
gcactcaataaacttcagtatagtctaaatataacttttatatgcaccgggaaaccaaaaaattcatgtggctcactttattgcagtagtctataaccaaatctacaaagcttgaaggtatgcctctagctttacattttgatggggcacatagttaaattacttggaatcagttgagtctttttaaggcttggtttaaagtttcttaggttgggcccagagcataatttagtctagggctaatttagccacgttgttaaggctgttctgagaattgtgcctgattctctgtgtattatgaaaattttccactggkgggggacacacaaactccttccagctctctttgagctctggaaatagattactcctttcccgtgggtattgctctggcccttatatctttttctcaaaatgtgtataaatgaatatgcagccaatgacgggggattcctctgcctatatctgtacctctctctctctctctctcaagctctctcctgttagacacataggactctctgaattatgattcctctctctcttcagcaagaatgtctgggtcagttgg

SEQ ID NO: 418383 - DNA, 571 bp, Homo sapiens
gcactcaataaacttcagtatagtctaaatataacttttatatgcaccgggaaaccaaaaaattcatgtggctcactttattgcagtagtctataaccaaatctacaaagcttgaaggtatgcctctagctttacattttgatggggcacatagttaaattacttggaatcagttgagtctttttaaggcttggtttaaagtttcttaggttgggcccagagcataatttagtctagggctaatttagccacgttgttaaggctgttctgagaattgtgcctgattctctgtgtattatgaaaattttccactgggggkggacacacaaactccttccagctctctttgagctctggaaatagattactcctttcccgtgggtattgctctggcccttatatctttttctcaaaatgtgtataaatgaatatgcagccaatgacgggggattcctctgcctatatctgtacctctctctctctctctctcaagctctctcctgttagacacataggactctctgaattatgattcctctctctcttcagcaagaatgtctgggtcagttgg

SEQ ID NO: 418384 - DNA, 571 bp, Homo sapiens
gcactcaataaacttcagtatagtctaaatataacttttatatgcaccgggaaaccaaaaaattcatgtggctcactttattgcagtagtctataaccaaatctacaaagcttgaaggtatgcctctagctttacattttgatggggcacatagttaaattacttggaatcagttgagtctttttaaggcttggtttaaagtttcttaggttgggcccagagcataatttagtctagggctaatttagccacgttgttaaggctgttctgagaattgtgcctgattctctgtgtattatgaaaattttccactggggggggacacacaaactccttccagctctctwtgagctctggaaatagattactcctttcccgtgggtattgctctggcccttatatctttttctcaaaatgtgtataaatgaatatgcagccaatgacgggggattcctctgcctatatctgtacctctctctctctctctctcaagctctctcctgttagacacataggactctctgaattatgattcctctctctcttcagcaagaatgtctgggtcagttgg

SEQ ID NO: 418385 - DNA, 571 bp, Homo sapiens
gcactcaataaacttcagtatagtctaaatataacttttatatgcaccgggaaaccaaaaaattcatgtggctcactttattgcagtagtctataaccaaatctacaaagcttgaaggtatgcctctagctttacattttgatggggcacatagttaaattacttggaatcagttgagtctttttaaggcttggtttaaagtttcttaggttgggcccagagcataatttagtctagggctaatttagccacgttgttaaggctgttctgagaattgtgcctgattctctgtgtattatgaaaattttccactggggggggacacacaaactccttccagctctctttgagctctggaaatagattactcctttcccgtgggtattgctctggcccttatatctttttctcaaaatgtgtataaatgaatatgcagccaatgacgkgggattcctctgcctatatctgtacctctctctctctctctctcaagctctctcctgttagacacataggactctctgaattatgattcctctctctcttcagcaagaatgtctgggtcagttgg

SEQ ID NO: 418386 - DNA, 417 bp, Homo sapiens
ttaaaggaatagggcacactgctttttcttttctacttccatccctctttctttctctttgacttctttgtctctctctttctgtctccctctttgtctcttcctctctttgactttctgtctctctctttctctctctgtctctgattccctctttgtctgtgtctcttcctctctctctctctctgactttctgtctctttctctctttcctttctgctggtctttccctgcctctgccagtcacttctgctgctgttctcccctctccccctttttgatggcttcagcagtgtaagactgccacctccttgggtttttgcactgcrtgcaataactccatgatttccttgtgctatttaatgggggttcccccagaggttagaaactccctttttttccatattgcagcatggg

SEQ ID NO: 418387 - DNA, 566 bp, Homo sapiens
ggggcagcttgtttcttgttggacaatcttttttaaagtgtccctgtaaaccatactgataacaagccctactgagtgattggcctgctccattttctgtcctttctgaaccaccaaggtttgtttgtctgagggtcatgactaaggctgtggcctttctctgatcttgctttgcttatttccttmtaggcaggggagattagaagaggcttatcattaataggaaggggagctatagggatgctaggatatgggggtaagctgaaaggtcctcctgtgggatgtaaattgcaagctttgcatagttgtatattctccttcaatgaaaagaagcttggacataaggtatttcactccatttgccttgcctcttacagaaaaggtcaagctgcaggatagtattgtaatttacacttccctcaggtagccattttttcccatcagagagagaacactggggccaagccataacacagaaaaaaatgagctgcctctttttcaggcttttgtgggtcaaattggtcccagtggcttaggatgcatttcaagggtgagcctgagtgttt

SEQ ID NO: 418388 - DNA, 573 bp, Homo sapiens
aggcatccaacaatgaagaagacaaaatgactcagacagtggatgtcatccagactttgagattcattaccctagtggtggcataatggcttcatagagacagtcctctgtggcagagatggagaccatatccccccaaaatgggtgggcttccatttaccaacactgatatagcttctaccaatgctaagtgtctaaactgccagcaacaaagaaaacgctgaactcctaacatggtaccatttctagaggagcccaactaagtatrtggtggcaacttgattatattgagtcccttccaaactgtaggagacataggtacattttaacaggagcagacacatattctgtgcatggtttgcctttcctttcttcatggcctcaggtcagcactactatccaaagtcttagagaacgtttgctccactagcactggctgataccacaaaactttatttcccaaaaggtaatctactttagaggataatagtaggcttcttaccatgtgattcaccgtttatatcacatattgtgtcttccagaaactgctggcctgataaagtgctcgaaaga

SEQ ID NO: 418389 - DNA, 626 bp, Homo sapiens
ctctctctctttctgtaaccatgtttttgttctgtttctttttttaacttttccraggaattataaaattaacttgtctggtttctaaaataactgctggtcattttattggaattatatctatacatatatatgtataagtttataaatatataaatttaacattattatatataataagcacatacatataggctgtacaattcaatgaatttatattttgagatgcagatttgtttttattgcttaccatgtgtacccctggcacctgtgtcagtgcctggtagagaatagatgctcaaatatatgtgagcattctaaagcatcttcaaatatttattgaaatataaattaaattccaatatactattttttcctctattaatgcttagatgatgaggtacagaacagagaatcctggtgctcatctagggttgaacaatttctagaccagtgtttcagaaggaaagtctagcaagagaaaaacaacatttgcaagacagtatttatcattgccgatgatgaatctaagttgacacacacacacacatacacgatgaaggctgatacacacacacacatacacaatgaagccaagaggaggctgatacagagagaatatgctg

SEQ ID NO: 418390 - DNA, 452 bp, Homo sapiens
gagatatcatataaattaatggaataaaaaagagaagtcagagataaccttacatgcatacaaaacttgatttatagcagacaggccattttagaagagtggaaacaggacagactctttaatgatagtttttcatatagtaaaaacaatatagtaaaaacataaagttttactttggtaaaaacaaaagtaaaaccataacacacamaaaatgttttccacttcacatcatataaaaaaaccaattctggcagattatttttcaatatatgaaaagcaatattttaaaacattagaagaaaatgttttccccagattagaaaataataaaaaacacttttttacaaaagcacataaattatacaagagcagattactttcatcacagtgaaatggaatgtttctggttataatgtgatcccatttaaaaagtaaaatgactaaccaaaggc

SEQ ID NO: 418391 - DNA, 531 bp, Homo sapiens
tttggttttagcataaagaaaatgccctcattttaccacttagaccaggattcattcattcagcgtagcttcagtcactgtgaactgtgccaggcattttcctctatcggggagatagtgcaaataagaccctcatactctaaacaagccttgattagtacctgcctcaggctaggcattgttagcacagtgggcaagtaaataaatttagtccctatgttcatggatattacagtcagatagataaaatrtgcatcaaatccaggaagaaaccagccttctttattccttgtttattatcagagggagtcatcctgaaaggatggactacttggctttacctactatggggcctagatcttcattctgataatggggtcagggacacctgatccaggtatccacacacagcaggtcctgagagggactcttcaagctgagtcctgtgaggatggcagaggagtttgaagtgagaactaactccagcggctcctgcagagagagctgtgagcaagtgctggtctgcagtgg

SEQ ID NO: 418392 - DNA, 607 bp, Homo sapiens
gccaatgtgggaaagtcctctctttgctgccaactggagggagtgaaaatatgtgccttgctaaatgacattgtggtagggagaattctgagctgtcccccaggactcctactcccggtgtatgtgccctgcaaatccctaggatttatgaatgatggggtagtcactccatcatcgggttgttatttggcacagccgactttgagagatcatcctgggtggacctgacctaatcaggtgaacccgtgaacggtatgccagttcctggaaaagtagattaaaagtgagagaggccttcattgtgggggagattctccacagctgcctttaaagatgaaggggctatgtggccagacacatgggtggtcagagctgagaacagctcggtcaagaacctgaatgaacctggaaatggattcctccctagtcaagccttcaaacaacaacataatcagctaacatttgatttcggctttgctgagcagagaatcccctccgtgcctggatttgtgactgacagaaatgtgagctaacagatggatgttgttttaagctactargtttgtagtactttgttaggcagcagcagaaaactaatacatgtttt

SEQ ID NO: 418393 - DNA, 519 bp, Homo sapiens
ggtgcccattctggttaagcaaaaggaccttccctaatcctaatactcgtccccactctttccatctctatccccaaccgctgctactggctgaagatttattagatactagttttgtacctatgcgtcctgccacttgctataaatcgcctttatgcaaatcgaaaaaagctaccctgcctcaagacactttgctgccatctgccaggaaattgttgtaataaatatgcaaaaggataatgactagaatgtgaatggtgccccttagaattgtgcagtacgcaactggcacaactatatgtgacaaccctgttgtttgaaatcacctgaactctcctggaaccctgtgtaaaaatcacaaccaccataggtcagttttgccttttcatgacagtttgccatttcaaaatctaaatcttccaccatgatcagaaattgctgaggggcagtttctaggagagacagagtccccacgcagcagtamctataagattatagggctcttccagcattcagccc

SEQ ID NO: 418394 - DNA, 316 bp, Homo sapiens
ttttctttcaaaataagtgagcaggcttcaagagaaacattaagttaataatartgcaagtattacacagggtaaaaaccggggcagaaagcctgaaaaactcagccttaatcactgctgtgaatttcttctccctcctgcccaatgctgatggcattttattgcggcaatcaacttttaaaatcaagtagttaagtgaaaacaaaatgaaacatactcttctgcctggatagagtcaactggagccacataattgctgggaatgtaacctgtctctccagttgtcaaggagcgggcttcccaccaatctccttcc

SEQ ID NO: 418395 - DNA, 635 bp, Homo sapiens
ctgttttatttcttttaagaacctctgaataaaaaacatctgaaattgaaaaaaaaaagaaattaaatgtgttttgttttaagctgctaagttttgtggcaatttgttatacagcagttgataactaatagtagttccctgcagtctgccttttcattctggtctctctgcacttcagagtgcctgctatgasctacagaaatgacagggagcccacttttttttttttcttttgagatggagattcactcttgttgcccaagctggagtgcaatggcgtgatctcggctcactgcagcctccgtctcccgggtttaagcacttctcctgcctcagcctcccgagtagctgggattacaggcgcccaccaccacgcctggctaattttttgtattttttagtagagacggggtttcgccatgttggccaggatggtctcaaactcctgcgctcaagtgatccacccacctcagccttccaaagtgctgggattacaggcatgagctactgcacccggccagagtccaccttttttaccaagctgccaatttgctgtgtaggtagttccaagggaagaaatgtgtcatggcactattcaaggaccacagagaagagtggggcttgtctttctgccc

SEQ ID NO: 418396 - DNA, 635 bp, Homo sapiens
ctgttttatttcttttaagaacctctgaataaaaaacatctgaaattgaaaaaaaaaagaaattaaatgtgttttgttttaagctgctaagttttgtggcaatttgttatacagcagttgataactaatagtagttccctgcagtctgccttttcattctggtctctctgcacttcagagtgcctgctatgagctacagaaatgacagggagcccacttttttttttttcttttgagatggagattcactcttgttgcccaagctggagtgcaatggcgtgatctcggctcactgcagcctccgyctcccgggtttaagcacttctcctgcctcagcctcccgagtagctgggattacaggcgcccaccaccacgcctggctaattttttgtattttttagtagagacggggtttcgccatgttggccaggatggtctcaaactcctgcgctcaagtgatccacccacctcagccttccaaagtgctgggattacaggcatgagctactgcacccggccagagtccaccttttttaccaagctgccaatttgctgtgtaggtagttccaagggaagaaatgtgtcatggcactattcaaggaccacagagaagagtggggcttgtctttctgccc

SEQ ID NO: 418397 - DNA, 412 bp, Homo sapiens
tagcttctttgtatacacacagaaatgtctattttatagggggcttaggaaggatgtttgttgaatgagtcagggacagaattcatgagtaaatgtcaccagacaatgaatatcttcatggtggctttgtgttcaagttggtttcaatagcatgaaaagctccccgctttggcagctattatcactgtgctctctttcctgtgagggagatacatccccagactcctattaagggggacgctctgccttgccctgactttagctagaagacatttctcrggatatactgttcaatccctgagaggaccctacatgaatttagctttgggatcttagaaaactttattattattatagccccagagtaagattttcatttgcaaataagccagaccccagccatccataacaa

SEQ ID NO: 418398 - DNA, 550 bp, Homo sapiens
cagttttcaatccgactttctaaaaatgatggaaacacatcagcctgtctttttcttgtgaactccaaaattgtataattatttttgctcaaacttccatcacttctactttgggaaaaagttytatttttgtcacatttaggaccagaataaccatcacttagtccttcacctcctctgggtgttttaagatttgatctttgatttttaccagtttgaaaagtaggacaatacctggatacggtatttatgtgctgtttatttctgagagagtgaaagtccttttctctgcctgatggtaaggttgaagtgggggttacaagtcattcagatttctgctagagctcagttgagttgggctggaccacagatttagcatgcctttgcgtagatatctttgtgttggtcttgcttggggctttctgagctccttgggactttgagttgatattcttcaccacatttggaaaaattgtggctcttatttcttcaaaagatttctccggtttcgttctttcttatctttcctgggatttcaactacatgtagg

SEQ ID NO: 418399 - DNA, 550 bp, Homo sapiens
cagttttcaatccgactttctaaaaatgatggaaacacatcagcctgtctttttcttgtgaactccaaaattgtataattatttttgctcaaacttccatcacttctactttgggaaaaagttttatttttgtcacatttaggaccagaataaccatcacttagtccttcacctcctctgggtgttttaagatttgatctttgatttttaccagtttgaaaagtaggacaatacctggatayggtatttatgtgctgtttatttctgagagagtgaaagtccttttctctgcctgatggtaaggttgaagtgggggttacaagtcattcagatttctgctagagctcagttgagttgggctggaccacagatttagcatgcctttgcgtagatatctttgtgttggtcttgcttggggctttctgagctccttgggactttgagttgatattcttcaccacatttggaaaaattgtggctcttatttcttcaaaagatttctccggtttcgttctttcttatctttcctgggatttcaactacatgtagg

SEQ ID NO: 418400 - DNA, 524 bp, Homo sapiens
cttcttcattccaactgcaagccgacttcccttcaacttttaaagagataaatttgtcagtctgtcacataagaagtggagacactccacatttgttcaaatgagactgccaacagatagccagttataaaaaggctttccctcaccccaccagccctccataataatgcatcttttcctcttttataatctacatcctgaggcactgccattcctgacagcatttgtcactgaaatgcacagctgaagcagaatgtctgaatgcagggactgggtgctgggaagttataggctgagagtgagagagctaaacacagccagtgcaacaatcttgttaccaagaatggccaatgtgatagagaccagtgcaagatgccaaggatgatgcagttcacacagaatyacacagagtatatttaaaccaagtccagaagatattgtactctaactatggttttgaaagtgctttctcaataattcagtatggaaagatcaataagggacaagagaacaagaatataatg

SEQ ID NO: 418401 - DNA, 601 bp, Homo sapiens
ttggctgtgtccccacttaaatctcatcttgaattgcagttcccataatccccaggtgtcatgggagggacccagcgggaggtaattgratcatgggggtggttacctccatgctgttctcctgatagtgaattctcgtgagatctgatggttttataagaggcttccctctcaagctctgctttgctctgcacttcctgctcctgctgcaattgtaaatttcttgaggccttccccagccctgcagaactgtgagtcaattaaacttctttcctttataaattacccagtcttgggtatttcttcataggagcatgagaacggactaatacagttgtcctttgctagtgcatagaaatataattcattttcttatgttgattttgtatcctgaaaacggataaattcatttattggttctaatagatttttgtgaattacttaggagtttcaagacacagtctggaaatagagatagttttacttcttcctttccaatcaaagggctgtttatttctttttcttgtctaattacctccattagaatattgaatagaagtgctgaaattggacatccttgtcatgttcctcatctaaggag

SEQ ID NO: 418402 - DNA, 601 bp, Homo sapiens
ttggctgtgtccccacttaaatctcatcttgaattgcagttcccataatccccaggtgtcatgggagggacccagcgggaggtaattggatcatgggggtggttacctccatgctgttctcctgatagtgaattctcgtgagatctgatggttttataagaggcttccctctcaarctctgctttgctctgcacttcctgctcctgctgcaattgtaaatttcttgaggccttccccagccctgcagaactgtgagtcaattaaacttctttcctttataaattacccagtcttgggtatttcttcataggagcatgagaacggactaatacagttgtcctttgctagtgcatagaaatataattcattttcttatgttgattttgtatcctgaaaacggataaattcatttattggttctaatagatttttgtgaattacttaggagtttcaagacacagtctggaaatagagatagttttacttcttcctttccaatcaaagggctgtttatttctttttcttgtctaattacctccattagaatattgaatagaagtgctgaaattggacatccttgtcatgttcctcatctaaggag

SEQ ID NO: 418403 - DNA, 601 bp, Homo sapiens
ttggctgtgtccccacttaaatctcatcttgaattgcagttcccataatccccaggtgtcatgggagggacccagcgggaggtaattggatcatgggggtggttacctccatgctgttctcctgatagtgaattctcgtgagatctgatggttttataagaggcttccctctcaagctctgctttgctctgcacttcytgctcctgctgcaattgtaaatttcttgaggccttccccagccctgcagaactgtgagtcaattaaacttctttcctttataaattacccagtcttgggtatttcttcataggagcatgagaacggactaatacagttgtcctttgctagtgcatagaaatataattcattttcttatgttgattttgtatcctgaaaacggataaattcatttattggttctaatagatttttgtgaattacttaggagtttcaagacacagtctggaaatagagatagttttacttcttcctttccaatcaaagggctgtttatttctttttcttgtctaattacctccattagaatattgaatagaagtgctgaaattggacatccttgtcatgttcctcatctaaggag

SEQ ID NO: 418404 - DNA, 547 bp, Homo sapiens
accctgtctcaaaaacagaacaaacaaacaaaaccaagacaacaaaaaaagcgataagtaaaaatgaaaaacttgtttatatagtagacttctggaagaaactgaatcaaaagtgtatgtaagtaaataagaaagcaaaaagaggctaggagcagtggctcacatttgcaaccycagcactttggaaggctgagatgggaggattgtttgagcccaggagttcaagaccaggcttggcaacacagagagaccccatctctaaaaatataataataatcatgtaaatatgaactaaactaaactgaatatcattttcaacctttgaatttgacaaaaatccatatatttggcagcacatcctatcagtaagactgtagagaaatcagcatactcacaaacgtctgctgaaaatgcaaatagtttccattctcatcatcagctatcaggaacatctgttggcatcagagtattgagtagcagcaatgaatgtgagaggaaaattaaatgacaacttcaaatttctgagagaattaatttctcaccaagt

SEQ ID NO: 418405 - DNA, 581 bp, Homo sapiens
atctgccatagggaaagagtagaagcacacatattgcaagtggaaatcagagttaggggacactccatgggtctctctgattctgagacacccgactgcatggtgagatattgtattagtccattttcacactgctgataaagacatacctgagactgggaaatttataaaagaaagaggtttaatggacttacagttccacttggctggggaggcctcagaatcatggcagaaagcaaggaagagcaagtcacgtcttacatggatggcagcaggcaaagcgagagcttgtgcagggaaactcccctttataaaaccatcagatcttatgagatttattcactatcacaagaacagcataagaaagacctgcccccatgattcaattacctcccaccaggcccctcccacaacaygtgggaattcaagatgagatttgggtggggacacaaccaaaccatatcagacttcttccataagtggttttggctccagatacacagtgaagtcacctgtgatgaccattaagctgactttggaagtcacctgtgagcttccaaaaacacctgcgcctatggttc

SEQ ID NO: 418406 - DNA, 581 bp, Homo sapiens
atctgccatagggaaagagtagaagcacacatattgcaagtggaaatcagagttaggggacactccatgggtctctctgattctgagacacccgactgcatggtgagatattgtattagtccattttcacactgctgataaagacatacctgagactgggaaatttataaaagaaagaggtttaatggacttacagttccacttggctggggaggcctcagaatcatggcagaaagcaaggaagagcaagtcacgtcttacatggatggcagcaggcaaagcgagagcttgtgcagggaaactcccctttataaaaccatcagatcttatgagatttattcactatcacaagaacagcataagaaagacctgcccccatgattcaattacctcccaccaggcccctcccacaacatgtgggaattcaagatgagatttgggtggggacacaaccaaaccatatcagacttcttccataagtggttttggctccagayacacagtgaagtcacctgtgatgaccattaagctgactttggaagtcacctgtgagcttccaaaaacacctgcgcctatggttc

SEQ ID NO: 418407 - DNA, 498 bp, Homo sapiens
caaaattaaatctatggcatgtactcattgatccttcatggagggaactccctttactatttttagttttcaatttatttttatttttaattgacaaataacaattacatgtatttatgggttaaaacgtgatttttatacatttatacattgtggcattaacaaatcaggctaattaaaataatcatcacttcacatatttgtcaygtctttatggtgagaacatttgaaattcaatttttagagcaatttaaaaatatacgatatattattaactacagtcactgatatggtttggctctgtgtctccacccaaatatcatgtcaaattgtaatccccagtgttggaggaggggcctggtgagaggtgattaaatcgtgggagtggacttccttcttgctcctcttgtgatagtcagggagttctcatgagatctgatggtttaaaagtgtgtggcatctccccactcactccttctttctctcctccatcaccat

SEQ ID NO: 418408 - DNA, 556 bp, Homo sapiens
tgcactccttctggaggttctaggggaggatccttcctgcctctcccagctcctggaggctccaggaatccctaggcttgaggccgcatcaattcactgtctgcctccatctccgtgtggcctactyctctccgtgtctcctgttctgtatcttagaaggacacctgtcatttgatctagggccacactaatccaggatgatctcttcttgagatccttgatttaagtatacctgcaaagcctttatttccaaataaggttccattgacaggttctggggttaggatgtggacatatctttttgggagactatggttcaatccatttgtatccagttccttctggaggctctaagggaggatccttcctgcctctcccagctcctgtgggctccaagcatccttgggcttgtagccacatcactccagtctctgcctccatctccatgtggccttctcctctatgtctcctcttctgtctctctctctctctcttttttttttttttttttttgagacggagtttcgctctggttgcccaggctgcagtgcagtgg

SEQ ID NO: 418409 - DNA, 556 bp, Homo sapiens
tgcactccttctggaggttctaggggaggatccttcctgcctctcccagctcctggaggctccaggaatccctaggcttgaggccgcatcaattcactgtctgcctccatctccgtgtggcctacttctctccgtgtctcctgttctgtatcttagaaggacacctgtcatttgatctagggccacactaatccaggatgatctcttcttgagatccttgatttaagtatacctgcaaagcctttatttccaaataaggttccattgacaggttctggggttaggatgtggacatatctttttgggagactatggttcaatccatttgtatccagttccttctggaggctytaagggaggatccttcctgcctctcccagctcctgtgggctccaagcatccttgggcttgtagccacatcactccagtctctgcctccatctccatgtggccttctcctctatgtctcctcttctgtctctctctctctctcttttttttttttttttttttgagacggagtttcgctctggttgcccaggctgcagtgcagtgg

SEQ ID NO: 418410 - DNA, 556 bp, Homo sapiens
tgcactccttctggaggttctaggggaggatccttcctgcctctcccagctcctggaggctccaggaatccctaggcttgaggccgcatcaattcactgtctgcctccatctccgtgtggcctacttctctccgtgtctcctgttctgtatcttagaaggacacctgtcatttgatctagggccacactaatccaggatgatctcttcttgagatccttgatttaagtatacctgcaaagcctttatttccaaataaggttccattgacaggttctggggttaggatgtggacatatctttttgggagactatggttcaatccatttgtatccagttccttctggaggctctaagggaggatccttcctgcctctcccagctcctgtgggctccaagcatccttgggcttgtagccacatcactccagtctctgcctccatctccatgtggccttctcctctatgtctcytcttctgtctctctctctctctcttttttttttttttttttttgagacggagtttcgctctggttgcccaggctgcagtgcagtgg

SEQ ID NO: 418411 - DNA, 589 bp, Homo sapiens
tagactagaatacgttccttacaccaactttcgcttttctatatttcctcaaattcaagcactcagtgccaggagtatctggatgagaccaggttgcgaatccttactagacactgaatctgccattccttgatattagactcccagccccaggactatgggaaatcaatgtctgctgtttataagccatgcaatctaaggtattttgttacagaagtctgaattgactgggatacagtttcttatagcagcattcactctactatatcccttcaaaatggtgcactcagcactgtgggtatccagggagaccaggttgggatgactgttggtgcctacacttcagctgattgragctgaatatcacagcacattgtttgatttagacaggtatttgtcagtcttggtttacattcaaccagttgtagacattcctaaaagtttttcaagccactctttcatctctgctcatcaggtatggtgtggagaggttcagaacacctgccttatccaggtgggtctgctatcatcacagggatccttacaaaagggaagtgggagagtcaaagctacagaaaagacacaggct

SEQ ID NO: 418412 - DNA, 561 bp, Homo sapiens
gaacttatacaaatttgaagtacaaattttctatggttttcttaaacaaatctctcttttgctgctctgtaaaatccataaggtytctgttgttatgaccagtgaccaggaaaatgctgggcatgtgaagacctttgggtaggcatctgttgaatgggtgaattgatgaatgaatgaatgaatgaatgatgtaattaattgctaataagacccaagcacacagtatcaatcatctataaagctggcatatcaaagctttgttatatcccaaaagagttaacccagcacacaaggagggaaacacaacattttatttcattttatttcacctgtgccagttattcagataacctctaaaaactgtttaacattcacagtgtagccaaataaacagatgctggtaaacttaactccataaacggtttcactcaggagacagaggcacattgttttatcagactttcaggatacgcgttgggaatcactgaatcctagagcggccaagggctgtgtgtctcagccctttcagatgtggggtgctctgtctctggagacccctgg

SEQ ID NO: 418413 - DNA, 561 bp, Homo sapiens
gaacttatacaaatttgaagtacaaattttctatggttttcttaaacaaatctctcttttgctgctctgtaaaatccataaggtttctgttgttatgaccagtgaccaggaaaatkctgggcatgtgaagacctttgggtaggcatctgttgaatgggtgaattgatgaatgaatgaatgaatgaatgatgtaattaattgctaataagacccaagcacacagtatcaatcatctataaagctggcatatcaaagctttgttatatcccaaaagagttaacccagcacacaaggagggaaacacaacattttatttcattttatttcacctgtgccagttattcagataacctctaaaaactgtttaacattcacagtgtagccaaataaacagatgctggtaaacttaactccataaacggtttcactcaggagacagaggcacattgttttatcagactttcaggatacgcgttgggaatcactgaatcctagagcggccaagggctgtgtgtctcagccctttcagatgtggggtgctctgtctctggagacccctgg

SEQ ID NO: 418414 - DNA, 561 bp, Homo sapiens
gaacttatacaaatttgaagtacaaattttctatggttttcttaaacaaatctctcttttgctgctctgtaaaatccataaggtttctgttgttatgaccagtgaccaggaaaatgctgggcatgtgaagacctttgggtaggcatctgttgaatgggtgaattgatgaatgaatgaatgaatgaatgatgtaattaattgctaataagacccaagcacacagtatcaatcatctataaagctggcatatcaaagctttgttatatcccaaaagagttaacccagcacacaaggagggaaacacaacattttatttcattttatttcacctgtgccagttattcagataacctctaaaaactgtttaacattcacagtgtagccaaataaacagatgctggtaaacttaactccataaacggtttcactcaggagacagaggcacattgttttatcagastttcaggatacgcgttgggaatcactgaatcctagagcggccaagggctgtgtgtctcagccctttcagatgtggggtgctctgtctctggagacccctgg

SEQ ID NO: 418415 - DNA, 623 bp, Homo sapiens
acatttttgtctgttctgtgytgctataacagaataccacagactggataattgaaaatgaacagaaatttatttcagtcatggttctggagtctgggaagtccaaaatcaaggggctgcatctggtgagggccttcttgctgtctcctcacatggggaaggcatcacatggtgagagagaacaagagatcaaactcacaatctcaaagccttttataatccattcatgagagtagggttctcatcacctaaacacctcccaaaagactccacctcccaacactgttgtattaagaattaagtttccaacacatgctttttaggagacacattcaaaccatatcagatactcataacaaactttttaaacctatattcatgtattccattaggcaaatataggttatatatatatatatatatatatttatatgatattcatatttagtaagtaaatatacaaaatatataaatataggttatatatgatatttatataaaattatatattatatgtaaatatatatttatgtaaatatttatatgcgtatattttatatatttatatataaatatatagaaaatatttcattccaatatatattccattctaatattatata

SEQ ID NO: 418416 - DNA, 554 bp, Homo sapiens
tggggatatccctaaatggtgggaccaatgacaaatcatcagtagtggcgacactaaaaagaacttaccggaaaagaatcttttatatccaatttttagccatctgtgtagattggctcttcstgtctccctcatcctctaaaccttctcagcaaagcctgatgcatacaaagaagtcttgtgtgaattattttgtttgattattcctttacttagtcctttattcatctctggaggaaataaaagagtcgggattctgtgactgattcagcaaggggcaaaagagagacagtgtgtggatgttggacatatgatcgacagaatgaactaatgaactcaagacacgtccccttacccccatccatactttttatttactggaatcctgagaaaagcatccactgtttgtcagtcacagaattgggctttgaatggaatttatccaggacttaatatgaacacacctggaatgttcattagagcatctcttctccaaatatgacatcatgggagtgaatgaagcaaatcattttcttggctacttggcttgtagg

SEQ ID NO: 418417 - DNA, 614 bp, Homo sapiens
gtgagtttgccttccagctaaaataaccttataggaaattgttttgatatttcaataaataagctctttgaataagagccaatacaaataacttttatattaaattctgctggtctatggtagaagtttaatcataggaggtacttccatacactgaatagtcagaaaaaacatcaaaaattctataagaacataataaagctcattcagctcattcatatctagaaggagagcttgaattcatgtaagttggccttttcccaggtcctaggctagtcctcaaatccagcctgcattttctttacgcccacwgctactagaaaaaacatctggcagatttggaatatgaataacatcagagataaccagagaaaatctgctggccataacgagttgaggacaagctataaattgtaagtttgtgtcaattttcatttcctaaaggcagcttttataaaaggcattatttcatcccattaagagcttgggctgacatatgaatgcatcccataaattctttaccataatttgaccccattttgattatttatagccacaaacatttcttgagcagaatttcagaactttatttggaaagacaaattctgatataa

SEQ ID NO: 418418 - DNA, 537 bp, Homo sapiens
caattatattttaaaaaacaaacaaacaaacaaacaaactgccacttacgcagtccattgattttaaacaaagctggcaatgcaagtcaatgggaaaataatagtctttttcaacacatggaattggaaaaactggatacctatatgtataaaaatgaactttgatcccttaccccatactctgcacaagcattaaattaagattaactgagatttgacctgaacgtaaaatctaaaattgygaagcttttacaataaaacaaaggtagacaaagactccttctacaaatacctggcactaaacattaaaaaatcataaattgtgcttcatcaaaaatacatctgctcttcaagatagatgaaaaggcaattcactgactttgagaccaagtatttgtgttcagaatatgtaaaggaattctaaaactcaacataaaaagacaaaaataaaacaaaaactcatgcaaaaaataaaaaaacaaaaaatgagcaaattatttggacaaaaagttcccaaaaaaggaaatgcaaatagct

SEQ ID NO: 418419 - DNA, 581 bp, Homo sapiens
tcaccctgcaagcccgctttcagctcccatctccctggctggcaggatcatccaggtcttcaccacatttttcccaaaacagaggtcatcttttacgtttcataagcaccctatgaaactgccgttcatctatttttttttttttttgagatggagtcttgctctgtagcccaggctggagtgcagtggcacaatctcagctcactgcaacctctgcccccggggttcaagcgattatcctgcctcagcctcccaagtagctggtactacaggtgcatggcacaatgccgggctaatctttgtatttttagtagaaatggggttttacatgttggccaggctggtcccaaactcctgacctcaggcgatctgcccgcctcggcctcccaaagtgccrcgattacaggcctgagccaccgggcccagcatctttaagtcgctttttacaaaggaggaaactaaggcaggaaagaggtgaaacgttctcctggggaacacactgccagcatggggtgggatggaatccccagccccagggtctctgactttgggagtctcttcacacttatttgaaccaaata

SEQ ID NO: 418420 - DNA, 605 bp, Homo sapiens
aactgcaagctcctatgacttcagcatttgaaaagtacttcagatccaaactctcgcttcctgccctgaacggagctcatccccactcccctgtcactctgcataagattccagggtgacattgtsagacgtcgtcattaatctccttttaaaaatgcaaatcccctcagaacatgactctgctcatcgcctgtttaatcagatcgcttccttctcatttgtagctgagaagtgctttgaagagggaagcagggaagagggcaaggaaagaaggggaggatgagaagcaaagtacttttgaagaagaagcacagcaggagaggaagtaggtttgagtgggtacttgttaggacgctggagaggttgagtgtaacaggccagaaagaaagagggagctaagaacaggggtgtcaagagatggggagagggggtcttaggaaggggatgacagtagacagcatgatgtcccgagcactcatgtctgttactcagttcttgggtggaggaggtaaatgtgcatgtgggaagacaggattaggaaactaccatctgagctgtcgggggcctttcttgaatatcagaggagcccagtaccattcttaaaa

SEQ ID NO: 418421 - DNA, 545 bp, Homo sapiens
aaggatatatatatatctgcatcctctggtgcatttcaatcaaatagcttaraattgaatgtggctgtctatataagcaatctaattgttttggattaaagaaaaaaaatgatggctatatacatcattctcatagaattacagttcctcatcaggtttgttctgtagctcctcatcctcattaacagcatttttgcatagtctgtccttatatagcattaaaactgccatcattatactggtaaaattttctgtgccttatacctgtgactttttggatttgagtagattagacattctcttcagtcctcccctcaccccatgagattcattggaaagaaaaaaaaaggaatgaatttgaaagaaggaatttatcttttcttttcaaatggtagtataagtatatttttgtctcatttcctttatgaaaccaatccaaagcaaacaagagaataagaaacaaacaaatgttatctttgatgaagctacagatcccctataaccctggatcacagtagatgcaggaagatagccaagtgtatgaa

SEQ ID NO: 418422 - DNA, 609 bp, Homo sapiens
tggttgggtggcacacattgaaaggaaatgtgtttatcccatgcttagaaagttaagatcaaggttcatgtcctggttttggaagcctacatcatgtttcaatcatggcataggatagaaggaagagtcaataagataaaagctacctggccatctttgcccaaagctgcctggtgaagataagtcaaggtaaaataatcacattaaaatgttctgtaaaatgcacagcctccttgtgagccyggaagatgtcctgctatgctggaccagataacccacaggccaagtccagctgagaaaaatcccagagataacagactgaaaccaatcttcccatttgtttagcacattcctcttcccctttccccagaactttgcccaaaattctagtccaaaaagatgaggaacagtgctacttaaaaagggtggagccagccgggggcctttaaaatgatgctgaaatgaaaaaagaagaacagaacatgatttatgaagatgagaaccggaaagattgtataccacaacgcagccaaaaaccgtgaacaaagttatttctaaggaatcaattaaagacaatattgtttctctgaaatgagaatttaaagaagc

SEQ ID NO: 418423 - DNA, 609 bp, Homo sapiens
tggttgggtggcacacattgaaaggaaatgtgtttatcccatgcttagaaagttaagatcaaggttcatgtcctggttttggaagcctacatcatgtttcaatcatggcataggatagaaggaagagtcaataagataaaagctacctggccatctttgcccaaagctgcctggtgaagataagtcaaggtaaaataatcacattaaaatgttctgtaaaatgcacagcctccttgtgagcctggaagatgtcctgctatgctggaccagataacccacaggccaagtccagctgagaaaaatcccagagataacagactgaaaccaatcttcccatttgtttagcacattcctcttcccctttccccagaactttgcccaaaattctagtccaaaaagatgaggaacagtgctacttaaaaagggtggagccagccgggggcctttaaaatgatgctgaaatgaaaaaagaagaacagaacatgatttatgaagatgagaaccggaaagattgtataccacaacgcagccaaaaaccgtgaacaaagttatttytaaggaatcaattaaagacaatattgtttctctgaaatgagaatttaaagaagc

SEQ ID NO: 418424 - DNA, 581 bp, Homo sapiens
gctgagcttcatctcaaaatcttttctaatctgacatcattccataataaatacatcatcataaacaggcagaacttacacatcaaaggcacctttcagaaacattgcaaatgggacagagaacccagagtgtggtttgtaaatatgattccctacaatgacttaaaagataccaaaatgcattagatgttgccaacggtccaatacggtgactgagaaccagatcattttgtatatacactggaacctttttattggctcaaagtatctccttcctttgttttcaatcatccaattataacccaaaaagaaaaaagaaaactgtcatcctgtcaygtcagatactgtgtcaaggggcaaaggtttaattttttccatgaggtatgtaactaaaaagtcaggcagggcacattgcagtggatgctaactagaactctaacatgccacaatatccttccatagaaacagtcacttttaacaatgtgaccttttctcttgtctttaagggagaaataggagacaacaattttccattcactattataagtaaaagagtggactgacatttgggtcctgaagtg

SEQ ID NO: 418425 - DNA, 583 bp, Homo sapiens
gcacactgtgcctcccaaatgctactaatcatatactctactttttaggtcatttatactcatggtttatctgccccctgacatactcccaaaaagcaagaaatatgttattcatctctgatcttttttttttttttttttttttttttttgagacagggtctctctgttgcccaggctgaaatgcagtggtacgaccttggctcattgcaacttctgcctcccaggctcaggcgatcttcccacctcatcctcccaagtagcygggactacaagcatgcaccgccacgcctggctaatttttgtaaattttatagagatggagtttcgccatgtcatccaggctgatctcaaactcctagactcaagcaatccacctgcttaggccctcccagagtcctgggattataggcatgagccattgcgcccagcccctctgatcctttagggactcccaagatataatagtcaatgaaaagctaaaacagcaaggtaaaaaaaaatagatatagagaaataccatttatttgtgttttaaataaaacacacatatatgcacttatatatgcattcaaaatttttgg

SEQ ID NO: 418426 - DNA, 529 bp, Homo sapiens
aagacagaagtaatgttttgctagtaataagtgattgtttcttcctcctctttgccttggcatgtgacagcttgctggtcccccgggcaaatgcagccgctagggaggggcacccgcatggaggcggtatgcagctggctrcagaacaaacagcagagaagatgtctgagttggaggacattgaggctccaccagccctagggggcacaggagaccagggacacacgaaacagaacagctgcctgactctgccctgggtcacactggcatgggctccatctgttcctgaatgaggagagaggctgaagtgagagcctgacatttgtccttctctcatctttctgtctagcctgtcccttaatcgggctctgataagagcgacaggagactcatataagcaccagctttgggtccttgatgataggttattgtaaatgacatggaggccctttacaaagaatggataaattgctcccaacagaggcaggaggaatgcttgaagccaggagtctgagaccccatctctacc

SEQ ID NO: 418427 - DNA, 646 bp, Homo sapiens
atgtaggtaacaaatgtcccacactggtgtgggatgtcaggatgtggatggtggggaggatgaatgtgtgtttggggaggggctgtgcgggaactctgcacattttaccccatttcatgtcaacctaaaatggctctaaaaatgtctattaattataaaaaaaaaaagaaagaaagaaaaggaaagacaagcagcagagagtggtggtgtgtacctgtaatcccagcgagttgggaggctgaggcaggaggattacttgaggcaaggagtttgagaccagcctgggcaatatagcaagatcccttctctctaaaaacacacacamaaaaaaccccaaaaccaaaaaacaagggcttgcactgggccagaatgcttggtattttgtgctggaagctcactatatttacactaattagagtcagtgcagacaaactgattattcataaaaggaggaagtagttcactcactcaggctggattcactagatccctgttgacagctcaggcctccaggtctggtgaatcccaggcattttgtctttcctttggaagagcatttgtgcttgacctctgccatgactctgtgggttgggcctcctttagctcatccctggaatactctaacagtcttctaaatatttgaaca

SEQ ID NO: 418428 - DNA, 566 bp, Homo sapiens
actactttttgttcagtacacacttactagagaaagcccgacacaggcagggagatgagacccattttcatgaagaagtggaagttgtattcttttatcctgaattaggcacatagttgaagtaataaccatttctgtcttagcaccccagctttggcattgtcctttttgttatggcaaacaaaattctgcagaaggagagaattggatggttgctgaaaaatcttttttttttttggacagaatctggctctgtcactcargctgggtgcagtggtgtgatcacaggtcactgcagcctcgatctcctgggctcaagcaatcctccctcctgagtagctggaactacagttttgtgccaccacatccagataattttttatttttttagacgggatatctctctgttgcccaggctgctctcaaactcctgggctcgcacaatcctctcaaagtgctggaattacaggtgtgagccactgtgcctggcctccactttttaaatcatctccatcactgtaaccttaggtcaccaaaattcaaaatgacattcagctggcctacat

SEQ ID NO: 418429 - DNA, 532 bp, Homo sapiens
acagctttatcacttagtggttgtgaccctgggcaagtcaattaaccctctcagaatctccatttcttcacctattaaatgagaataatagctttcctgcctaccccacagaatcgcaataactaaaataatacacctggaaaggcattgtaaactgtcaagattacccattaagcttggtatccaatttcacccatgtctagctgttagaggtcaaacctttggttagaaatataggtactyagaagacagcacatcacaacatccccatccatgtcataatgccccgttaccaagtgccaccagtagaagcacagacactgaaggggcaaaacctgatccctgtgatccctccaagagatgaagttggagcttcctctttttcaatttccatctttattattttgcttcttagccacagaaccaagtagctaacttatttatttacagtcacacatttcatttttgagcacatttcttatagttatattgcacaaatgccccccatcctcaccctagcaggtgtagtgtg

SEQ ID NO: 418430 - DNA, 513 bp, Homo sapiens
ttccacacctatgcctctcaacagcaccctaaatgtcacccctatgccaccaaatgtactaaattgaagaatcacatgagaacattttataggtcaaagtttctttataactacaatcattaagtatttaccccaacacctttcctgaacacacaccttctataaaactatttagtaacatttctataataaagtcaaagcttaaacatggtgccacaagaaactatcatcttatagcatgaccaaataatttttcaacaactgctttatatatcagacttatggcagtgaaacatacatttcatgttaacatctatagttttacctactcattgtattaatatgtttaatgggcactgatattcaaaatgcttggtrataaaaaatatttcctgacttttacataaaaattttgttttaatgaattttaagactgtatttacattctactaaactagtttagtgatgaacaaggcacagtaggagcatttccttgcaagaatgtaagaattc

SEQ ID NO: 418431 - DNA, 646 bp, Homo sapiens
ctggattttgaatgaaatactaacagcaacaaagacttcaggaaactaatttggagcttctctttaagccaggggcgacacactcaatgaggaggaagtaaggtagatggaaagtgaaatgagctagcaactgcacatcttgaccaaagatagccaacttttaagttttttttgttgttttyattttgtttaaccatgttaggtgtaaactaacactttaataaactggattcagcctatatgggtttcaattcctaggttctgctttaaatattagttttatctcagttccccaccaaagatctcaaatttgttatttccctctcagacctttattttaaaaaaaatttgttgtcctttcagtccaaagaaaaggacattttaaacagtttatgcagcgatgataatgatgaatatgttacttcaataagggtttttgaaagattaaaaataatgtatgtactcaaagaatggttaaacatggactctgaagtctgaacaatcttggtattaatctatttcagccacaatcacatatcagatatatgatcatggacaatatgatcatgtatctcagtttccttatatgtaaaatgagagtattagtagcacctaccttgtaggactgctgggaagatgaaatgag

SEQ ID NO: 418432 - DNA, 574 bp, Homo sapiens
ttgtctactcttgtttagaaatgcaatgcatttcaaaagcattgtttctttggaaaagtataatgtgttttaagacatggtttcttgaaagtgcttatagcaraactctagaactaacaggagacccacatctggggaaagaaaaagcagataaattgggtttaagcatgccttttaggtgcttaagggacttttgtttacattctttctgtacatagcccagagaacaaagtttactggaggaaacttctttctggttatctacttaatcttgtgaacatgattttaataagcaccatccctatgcaggtggttattttctttgcaggaaaacattgacattttcctccaaaatgacaaagaaatttaggcaatattgctggagaatatattttaaaccactggataaattctaagctatttatggctctgcttccaaagcaagacaggagtattaactgctcaataaaccacaaacctcatttttatgcaattctgttaattctataatactcattttcaggacaaaagttatactcatctgtctaaaacattgactcgctttgccagaaat

SEQ ID NO: 418433 - DNA, 574 bp, Homo sapiens
ttgtctactcttgtttagaaatgcaatgcatttcaaaagcattgtttctttggaaaagtataatgtgttttaagacatggtttcttgaaagtgcttatagcaaaactctagaactaacaggagacccacatctggggaaagaaaaagcagataaattgggtttaagcatgccttttaggtgcttaagggacttttgtttacattctttctgtacatagcccagagaacaaagtttactggaggaaacttctttctggttatctacttaatcttgtgaacatgattttaataagcaccatccctatgcaggtggttattttctttgcaggaaaacattgacattttcctccaaaatgacaaagaaatttaggcaatattgctggagaatatattttaaaccactggataaattctaagctatttatggctctgcttccaaagcaagacaggagtattaactgctcaataaaccmcaaacctcatttttatgcaattctgttaattctataatactcattttcaggacaaaagttatactcatctgtctaaaacattgactcgctttgccagaaat

SEQ ID NO: 418434 - DNA, 537 bp, Homo sapiens
aatttataggccacattcatactagggtctttttgtctccaactaaactttttcgtttctattctgatgatataagaaaaatatatattacaagaaagggcatgaattagttggtcattagggaaaaataaacctttttgcaaattaaagtttcattgtcatgcttagcctgtttgttccagctacaatgtgattattcttcctcttatttctatatgtaagagttctatggatcataaagaatctagaaaataacattaacaataatagtaacagcagaaatcccctataaagcacctaccatatgctaagcacaatgttaggcaatttatgaatattttccctccttcctgaaacaacccagtactgataagtaycagtatcacatttcaccgacaataaaattacaggcttaagaagactgaatagcctgtccaaagttattcagctagtaactagaagagctagaaatcaaatcaaagttagctcaaagccctcacccaaagaccaaggagtcagaccagttgtgacatgggc

SEQ ID NO: 418435 - DNA, 537 bp, Homo sapiens
aatttataggccacattcatactagggtctttttgtctccaactaaactttttcgtttctattctgatgatataagaaaaatatatattacaagaaagggcatgaattagttggtcattagggaaaaataaacctttttgcaaattaaagtttcattgtcatgcttagcctgtttgttccagctacaatgtgattattcttcctcttatttctatatgtaagagttctatggatcataaagaatctagaaaataacattaacaataatagtaacagcagaaatcccctataaagcacctaccatatgctaagcacaatgttaggcaatttatgaatattttccctccttcctgaaacaacccagtactgataagtatcagtatcacatttcaccgacaataaaattacaggcttaagaagactgaatagcctgtccaaagtyattcagctagtaactagaagagctagaaatcaaatcaaagttagctcaaagccctcacccaaagaccaaggagtcagaccagttgtgacatgggc

SEQ ID NO: 418436 - DNA, 574 bp, Homo sapiens
cattaaatatgatttaatatgatctgagtgctatataaagttcttctgttatttttctcttcagaaagaactcttcagcaatattttgaaaaataccaaaattactccaggtctcttaataatttttaagacttctcctaggcaagtttactttctttttgtgacaaatttccttatagcaaacttatattttccagatcaaggtgtagcctttttcaatcctattcaaggtaaaaataatcttctcaaaattggctatgcaatgtatataaatttcacttamgttttccaagtaattgtgggcctataaatttctaactggttacatttgggttttatctaaaccattaacttaaatttattgaactagaaaattagaaagtaaaagtagcaaacaaaataaaatgtaaacctaaccaaaaaattccaggtatatatattgatatgtatatgttcagaatatgagggacatgtcatggccatactattaagaaaaacatccaaccagtagtgtacatttacatttaaaggatattttgtaatgacagatatgtatttaataagaaaggaaagt

SEQ ID NO: 418437 - DNA, 601 bp, Homo sapiens
tcaacgatgcctctttaaatattaactgtattacttttcaattatatatgaccatcagagaaaaaaacaattcaatcttagtggagatcattcaggaaatgctttagtggctttaaaaaaaaaaaaaagaaagaaacaaagaaagaaacaatagaaaattctgattactcaraagatggtttctggctccccttcctgaacccataataaacgtgcacagttgagattgatttaagcctaggagtacatgccccaaatcaaaaggaataatccataaatttgcagagcacatatcactgggtcaaatgaagctaaaataataagaaacatatgagaagaaaatatatcaaatggaaagatgtttttccagaccaaccgaactatcccttgggaaagaccaatgtgcattcacattttcaaaaggattaaaagtggccatttttcttaaaaattcaaattaatacttttttatatggcataattatggttctgaatggaaaacacaatggaaccaacaaaaaaatgaaccattccattcatttttatattatcacatatgacctcattctaacacttataggtaattaaaatacaagcaaaa

SEQ ID NO: 418438 - DNA, 520 bp, Homo sapiens
ttgagttagtttgaaacaatctatcaggtttgatatttcctggccctcaagacagtttacagctatagcaaatgtgtgtctttgcttagagcaaatggtagcctgtcccagataacttaaaacctacaggttttagacggggggatgtttgcatcatgttaatcatattcttcccagacagtacatccaaataggtattgcataagcacagtaatgcattaattaatcctgggatagagtacaccatcaaatgacaatctgacatttatctttcatttctcagtattctattaaagcaacagacaccttatattgtyaatgtatgatctttctcacatgagaatgtcttacagaggaatatgcaaaacagcaaagaagagagggaccagctttttattacatgaaactcaatgggagaatgaaacaagcattacataggtgaaaagtaaaaggctgcaaaagcaattaggagagcattacaaaagtagcagatgttcccctctaaattgcatcatgtgta

SEQ ID NO: 418439 - DNA, 541 bp, Homo sapiens
gttttaatcctagggtttatttttttctagaaatatcttgattttgccccggtactacatttagtaattatcacttcacatgagtctcctaatctgtaktctgtttctcattgtttaattagcataatatctagtccacgtacctggtttttctgaaaggcaaataagatgatgcacatggacatgctttaacaattgtagaatacaaaacaaatatagaaattatcaataaatcatgaaatgccttctgatatttctgttatagttattgctatttatctcttgcactgtgatttacatgtttgcatctccatcagatcttcaagtttatcatatgaagacagattcccagattgtgagagttttcaacaagaaccagaacaatttggcattaatatttgtttagttatttcatttaactgtttaatcacacagtcatcacaagaaaaaataaccttatactccatctcttcctacagtcatcaattcctcacacctaagagttccatatgatacaaaggcttactttgactacctcatt

SEQ ID NO: 418440 - DNA, 541 bp, Homo sapiens
gttttaatcctagggtttatttttttctagaaatatcttgattttgccccggtactacatttagtaattatcacttcacatgagtctcctaatctgtatyctgtttctcattgtttaattagcataatatctagtccacgtacctggtttttctgaaaggcaaataagatgatgcacatggacatgctttaacaattgtagaatacaaaacaaatatagaaattatcaataaatcatgaaatgccttctgatatttctgttatagttattgctatttatctcttgcactgtgatttacatgtttgcatctccatcagatcttcaagtttatcatatgaagacagattcccagattgtgagagttttcaacaagaaccagaacaatttggcattaatatttgtttagttatttcatttaactgtttaatcacacagtcatcacaagaaaaaataaccttatactccatctcttcctacagtcatcaattcctcacacctaagagttccatatgatacaaaggcttactttgactacctcatt

SEQ ID NO: 418441 - DNA, 607 bp, Homo sapiens
ggagtgggagcagggaattttctcaacagccccttattctgggagatagttaactcaatgtcaatacactcgtaattcctccaacgtatgagatttttggtttaaatattaaaagcataatattgccagaaaataaatgctgttacttttgttcaaattaaccacttttaagtcaaatataggtatattttttaagtattttctttatctttctaaaaaccaaatgaagaaattaaccagatgaagtgttaacagtagctaaattcgagatraaacagtaagttaaagcattatttttactctcaccaaattaaacaaattagtaaactagcaaggctgctagatatacacaataaattttccctctacagtttgtatcttacatgggagaagtccagtgtatcttatggaaatccaccgcaattagcataatcttccaactttcagatttgtgtgttgctaacgcctctgtaaatttaaactctggaaaaatgcccagaattttttgttaactgaaaaccagacacatccctgaaagatatctcccccttccatagttaatgcacgttttgcttctcaatagttttggcaacaaattttagagttt

SEQ ID NO: 418442 - DNA, 569 bp, Homo sapiens
ttagtgttagaatgcagagacaggaatgcaggtcttttttcctgccagatctttggatttaaactaggaaactcaaaagtaatgctatgcattggatttgaatcctttttctgcagctaactagctgcgtgactttaggcaagttgcttaacctctcccaagttacttgcctctcagtgccttcaactgtaaaataaggatactgctacctattccttacagttgttgtgaagattacaataagacaatgctttgcctgtataacatgaacacaatacatgttggctattgctatcattctggtggtgacagttattaccatcgacggtagayagaatggcccccatccccaaagaggcccatatcataatctctggaacctatgactgttactctatgtgtcaaaagagactttgaagatgtcattaagtatcttgtgataggattattatcctggattattccagatggactcaatgtaattgcaagggtcctcataaggtaaagaaagagaagaggatggaatgacaaatgcagaggtcagacagagagatctgaagatggcacac

SEQ ID NO: 418443 - DNA, 478 bp, Homo sapiens
gtggggaactggaatcctgcccccgtccatgcttcacactgaactttgtcttaattttgagtttgctgacaaaagaatgcttwaaaacatctaacctaatgtaaacttctcattcgccaacaaataaaaagaatggaagacagggtgcccaatttgcccaggacaccaggacactccaggtttgaatagcacctccacaaagagacaataaattacatagtcaccaagctagagacatcacaggtcagcctagggtcccacgttcatatgaagttcagccagtaccagaacgtgcctcctaagagtcttcctactacacagtatttttctcttgtcaacagaaaatgtttcacttatttactttttgtttctatttgtttcaccagcagaggaaaaattccattaaaacctaatagcaggcttggaaaacatttaaattgtcgctggatatttttcctgttttataccacactgattc

SEQ ID NO: 418444 - DNA, 478 bp, Homo sapiens
gtggggaactggaatcctgcccccgtccatgcttcacactgaactttgtcttaattttgagtttgctgacaaaagaatgcttaaaaacatctaacctaatgtaaacttctcattcgccaacaaataaaaagaatggaagacagggtgcccaatttgcccaggacaccaggacactccaggtttgaatagcacctccacaaagagacaataaattacatagtcaccaagctagagacatcacaggtcagcctagggtcccacgttcatatgaagttcagccagtaccagaacgtgcctcctaagagtcttcctactacacagtatttttctcttgtcaacagaaaatgtttcacttatttactttttgtttytatttgtttcaccagcagaggaaaaattccattaaaacctaatagcaggcttggaaaacatttaaattgtcgctggatatttttcctgttttataccacactgattc

SEQ ID NO: 418445 - DNA, 579 bp, Homo sapiens
ctcctaagagtcttcctactacacagtatttttctcttgtcaacagaaaatgtttcacttatttactttttgtttctatttgtttcaccagcagaggaaaaattccattaaaacctaatagcaggcttggaaaacatttaaattgtcgctggatatttttcctgttttataccacactgattctttgccttggatatgaaccaaacactgtagagcttgtttgtatgatccttttgaaaagttatttaggttttttttcttcttcagtagagttatgactaaaactgagatgtgaaaactctctggaactgatccagagaggtataccagagaacacaagaataataccccagtataaataaggtcctggtttctagatgtttttgttttgttttatttatgtttggataatatagcaaaaattatggagtacagaatctacattcatttctagtatgaaatctgagatttcagagcaatttcctacttgtgtctgtagactgccacgtgaaccttagggcawgtatttatagtcttattccatttttaggagcactgcaagttgataagctttacagt

SEQ ID NO: 418446 - DNA, 530 bp, Homo sapiens
tatgttcatgcaaaagagtcctcagaggatagtgagggtgaaatgtggtctgctcatacatgagattatcttattatacaacctatgccattattagaggaagaatcatttgtggggtaaagtaatatggatctctttcctgtagtgtgaagaacagrtgttctacggcctaggaaatttagaggaaactttaatcatgcctgtagatttcagtaataaaaatgtatgacctgtgtttggcataaatggcatcatagtatgacaatcaaatctggattgtatatcttagtttgtatatctaacacacattattttgatttaagtaactgggaaaattagtatttttttaatgtcccaagtatacataatgattaggataagttttttaaatggggaattatgacctaaaataattttttccatggagaatggatgccttggtattaagtaatcatagctttatgtttgtaccaggatgttattgataactgtgagggaagtggtttgggcacctcaccattagcaagagc

SEQ ID NO: 418447 - DNA, 587 bp, Homo sapiens
tgtggtattcaaattagcaagaccttcagcataggcatcacctaggagcttgttagaaatgcagaatctgaggcagtgccatggacctgctgaatctacagtttagtcagctcktaaggttgttggtgtgcatgctaacatttgaggaatgctggtcaagagtctcaaatggaatggagccagtaattgaaattggaaaacagagtacaaagagtgagggatcatgagcctggggtgctgaaataaatcaaagggatcaggatcaaaggaagttatgagtttttgtttgttttaatgatgggagggtggggtaagagaatggatggttggtatcttgagtgatggccatagttagaaccaccattgatgcttcgagttttatgaagtgtgcatgagattacctcatttatgattatgggtggaacagacactgggtactgtggaatctggcagctattaaacatcgaaatagatcacaaacttggaagcctggtaaggtggaagacttgagctgagtcaagtctggggaagtgattgttgttgtctgaagatgaatcagtctcctggggttgcaaaacctatcaaac

SEQ ID NO: 418448 - DNA, 587 bp, Homo sapiens
tgtggtattcaaattagcaagaccttcagcataggcatcacctaggagcttgttagaaatgcagaatctgaggcagtgccatggacctgctgaatctacagtttagtcagctcttaaggttgttggtgtgcatgctaacatttgaggaatgctggtcaagagtctcaaatggaatggagccagtaattgaaattggaaaacagagtacaaagagtgagggatcatgagcctggggtgctgaaataaatcaaagggatcaggatcaaaggaagttatgagtttttgtttgttttaatgatgggagggtggggtaagagaatggatggttggtatcttgagtgatggccatagttagaaccaccattgmtgcttcgagttttatgaagtgtgcatgagattacctcatttatgattatgggtggaacagacactgggtactgtggaatctggcagctattaaacatcgaaatagatcacaaacttggaagcctggtaaggtggaagacttgagctgagtcaagtctggggaagtgattgttgttgtctgaagatgaatcagtctcctggggttgcaaaacctatcaaac

SEQ ID NO: 418449 - DNA, 596 bp, Homo sapiens
agacactggagacttggaaasgtgggagggggtgagtgatgagaaattacctaacgggtacgatgttccctattcaggtgatagctacactgaaagcccagactttaccattacacaatatatccacgtaatagactgcttttccccctaaatctacaaaaacaagacataggaaaataaaaaaggacttaaagagcaagttactgttcttcatatgtaaaccagttttagctaaaaagaaataccccaaactcccttttcattaaaaaacatcatcttaaagtctaattggttacatactagtattatcaaaggtcatatcaacccattagacactgattagacccattaatacacccattacatatattcaatatagtggtgacaaaacctgatgaaaataagcagtatttgtctgtaattttgcctgtctcctctagacataaagattgtcttttttgagtaaaatctctaaggaaaaaggcttatgatgaagaaaggagtccaaggtcagaaaataaacccagtgcaaacagctacaaacttctccaaataaaataagcagttccatctccagatagcttgtcaaattccac

SEQ ID NO: 418450 - DNA, 593 bp, Homo sapiens
atctccctggaattaaagagaaagaccttacaaacccttatccccataacggatttgaataaatacatttcaaaaaacatcagggtatgagaaccaagttatttaaatctgtgtagacccaatggggaaaaaagttactttttttaacctatgagatcaaatttttaatatttagctagtggtttgtagactcttaaagtgtaatgtttaatatctttccacagtgcttgcttgaatgttatcatatttgctaaagtctcaagaattcttttataataccttagtatcaaaaattaagaaagatatataatagtctaaaagtacttaagaaagtcaaatactgcccattctcacttgtcattgggaactaaataatgtgtatacatgtgaatcgagagtgaaataacagacactggagacttggaaaggtgggagggggtgagtgatgagaaattacctaaygggtacgatgttccctattcaggtgatagctacactgaaagcccagactttaccattacacaatatatccacgtaatagactgcttttccccctaaatctacaaaaacaagacataggaaaataaaaaagg

SEQ ID NO: 418451 - DNA, 307 bp, Homo sapiens
ctgagatctacaagtcccttgacctcacccaggcaccgtcttgttctcctcggaggcctgaccctcctgactctgcatggctgagcacctgctgttccccaggcacctctcggtatgccacaggcacagggtcctcgcagcgggcctgtgcagcgggactcctgcagcgagctgtttcckcggcctgcagagtcagcctccctcctgactttcatccacctgcccatttccccttctctgtcgctgttgccctgatcccccagtgtcccctctcttggacatttgcaggagcctccccaggtctccc

SEQ ID NO: 418452 - DNA, 425 bp, Homo sapiens
gaccttgtctaaaaaaaaaaataaataaaacaaataagtaatcagatctggtgaccccgggccctgcattcttatgtgacaattgttggaaactggcctttagatgtggcaggcactccctctgtcatggtcacttcactccactcccttccagtccctatcgccgtgccccagcagctctgcttgttgacgctgcctgtcttgcctctagcctccgaaagtgctgggattacaggcgtgagctgccacgcccggccgcaagtaggagttctaatgaggacacaagtggaacgctaagtgaaaaggactttctccgtcctggagactgcaggcgtggagcggggaggaggggtgaagggagaccaggtttggaaaccaggtggtcagcggtccaaatccyggctctcccgctcattggctgtatg

SEQ ID NO: 418453 - DNA, 645 bp, Homo sapiens
ctcaggggagcacatgtttcatggagctatccagtgacctgtacagcagggagacttgaggggaccatttcacagatgggaagacggaggctgaggggtgaggctatatttgcaaggtggatcttttttgtgtgtgtgagcaattggtcgcgctgtctccctctttagactttacgctgctgaaggcaggcaccgagttctgtggggttcgtggtccatgggcatgcatgcaaatcagtctttgctgagttaatgaataaatgatctggggtgtagcgaggctggggatgtggttgcgggaggggagttctgcagacctgcccagggcctgccagaggctgcacgtgcggattgtggccgccagggggcgctgtgggtccagccttcagggcggccccagattcagggaggccccagcagcccgggtctctctggcggtcccaggggctgggaaacgtctgttgtttgaggctctggacatagcaaagatraaaaatgaaaaactgatgaactaaggctgcaagaactatgttctcttgtatgtttacatgtaaaaatttaacagcttccatacatgaaatagtcatgcaatatatttttgtgaagttacaaggcttgcaaaattcttaatgaaccatgtccaga

SEQ ID NO: 418454 - DNA, 454 bp, Homo sapiens
gctcctggcctgtttgcaaatattttaaaacacaacccctggtaagaagtacatcttrtaaccctgcacacatacatgcgtgtgtacacgcacacacacacacacacacacacacacacacacaaacgaaactataataaaagcttcaggaacttgctccctggtttgccaagggtcgcatggcatactaatcaggacttactggttgcaagtgacagaaagtcaaatcaagggggttcaaatctcagctctaccgcttcctagctgtgtgaccttaggcaagtcacttaacctctctgagcactagttttttaatctgtaaaatagaggccaccttctgtgggcagctggatttcttttctatttaccggcagcagccattgggaattccccaagggccctgtgctgctgggggaatggattttctatcccacccaactgagtctagtcctga

SEQ ID NO: 418455 - DNA, 341 bp, Homo sapiens
ctcaggttgggagatacccaaggacaattaggtggtaaacagaagaatcaagatctgaacctggackgtcttcatcacctgaagctgcctgagaaggagttcagggtctctaaagtagaagccaggatgactaatagctccatataattcatctgggttcataagaaagtgaggaagtctgtctggtaagagcttaagaattttgagagaaattttactagaaatatttatctcgtggtgattgggtctaggtagtcgggtagttactatcattgctgggatctacctctccctaatcatttagtgaacatttattaagcatctaatatgtgtcttctttt

SEQ ID NO: 418456 - DNA, 562 bp, Homo sapiens
tgggttgggaaccgtcgctgagaataaggcacaggtcagccrcctttcccagcatctcctcctcgcaaaccccaagccaaggcaagctggatgaagcgctccctgggcaggcccggctctccgtgtccctccatcacctgaccccgctggctctcgcagaccccttcctccacactcactcctcccggctctccttctataatctcctgacatctcttcaaatccaattattgaattaattgacgtacgaacccagaggcaaaccagaaggggcggaaaacactggggcgggctcagatttatccttcggcctccgcagggcccggccggacgagatttactgggcctcgaacacggcgacagttcaaacctttgattaatcatgtttttctgcctaccccataatttagttgctctttttccctccctgcctttttttttttttttatcagcgaaaacagagacggagtcctcatcagcttcaattacaaatattaaggtcccggacagcactttgacagagaggcggccagccccccacttcgtaccacccccctaaatc

SEQ ID NO: 418457 - DNA, 521 bp, Homo sapiens
tcctccctctttgtgtttggggacttctggaggcctctccctacatttcatagcctgagcagatgtctccacctagccatggttcactagcccatgaaatacagactcattcatcttcacgccccacgaggacatatcagggcccaggaagtcagcctggcttcctagcttcttgcctacccagcccagggtcacggtagagctacaacagcaggacattttacattgctgtcctatacctctaccaccactgctatcctatcccaggtgtcttcaagaacatctcagcccaggctctctgctgcagcccagcaaacctgccctcccaagccctgcatcctccctgcctcggtctcctcagtacatatgccccaacacacagacacacacacatayacacacacacacacacacacacacacacacacacacccctatgcattccttccccatctgcctccaaggttcacattagccatcccttaccccaagataatgcacttcactgagagctctaactt

SEQ ID NO: 418458 - DNA, 583 bp, Homo sapiens
tccacatagaaagaggctttgtcatctgctgagagtgtggaggtcatggagtaaatgatggcttgaggagaatagtgaagatttacaacattcatggagaagaatgtgagagaaatctgagaaaggacaagtgaaataatcaaggggtggtactgtgcgtccaaccaagattgactttgtgagtaggtagttgtgcctagctgtgtggttgtgtgatttctgccagcagtgctcagtctctagatgtaaaagcagagaatgtaagtgacgrcaataatccagagattggttttttgggggggaaggtgggggatggaaataattataggatgggtctatgagggcattcacagtagaggtccagattgtatagggaagtaagggaggccaggagagagatgacagatgaagaaaataggacaaagagcgccctcagctgatgctcacaacaaccctccagacagatagtttaatcagccaaactttgaagatgaggaaattgtggctttgagatattaggtgacttgtatggtgaggtacctagagaagtaaccaagatgagctacaccttttctactgtact

SEQ ID NO: 418459 - DNA, 253 bp, Homo sapiens
aaacttgcaaggcttcacaactaattaagtggtagagctggaacttaaaccaagatcattcaattcaatttctatctytgccattttgcttccttatctgacattagcagatgaagcaatgaagataagaaaaaacaaccatttgcgctcctcaaatgcacaggatcttccacattatgaaattttaagttccttgaatattttctacttaggtaacttttaaaaaaaaatttatcttaagttctggggtaca

SEQ ID NO: 418460 - DNA, 552 bp, Homo sapiens
atgaagaaaatttagtgactcacatcctgtttctactggacagtttctgatgataaaaaaagatgcatgtcttagtctctgacctttaaaaaaattgttttagtatagtggagagacacatggaggaagaaatagacccagaagtaactaatggaaggcagcgtgactgtgaaacagaagaatagagggacaatgtactacatgagttaagaggagaaaggaattctrtaactgggttttatttgctggggagccacgttgagcctgctcctacataggaaaacaccctgttgtgttttgtcatttttctcacagagattcacgcattatcacaataggcttttgctaacagctacagagaaactagagaaaaccaaaccaaacctggtctcaaagatattattgtcccggaaatgctctgagaataagagaaaatcttgtttatatttcctgcctgtggtgttcaaatctatccagggagaggatgatataaattccccaaaataaagtattgtggcttgactctccccatatccctctaaaaagacaaat

SEQ ID NO: 418461 - DNA, 596 bp, Homo sapiens
attttaaaaaatagaagtaattttattactctttttattttagkcaatattttcaaaatagtatcatcttaatatgtaataattcaaaaattattgatgagatgctttacattcagtttttcatagcaagtctttaaaatctggtgtgcgttttacccttacagcacaactcaaattggactagccacctttgacatgctccataatccatcatgtcatgtggttagcagccaccatactggatagtgcaattctacaaggtcaggaccatgcctacctctttagccttctaataagattcatgctataggtatatctaaccaccaggttctccaagttgccattctctctttcccagtcctttattcatgttgagtttttatacaacaaataatttgaaagaagaaaaataagcaaatttttaaataggcaaaagatttgaaaaaacattttaccaaaaatatatacaaatagctaataagcagatgaaaagatactcaacaacattaggcattaggaaaatgcaagtcaaaaccaaaataaaatagcatttcacaaccactagaatagttataatttaaaagacaaacagtaac

SEQ ID NO: 418462 - DNA, 578 bp, Homo sapiens
ggagttaaataatatgtccttttagctctgacccatcatcaactggaagcacatccagaatgatcctgtctgtggtgatggtggtgatgattttgaatcatgccacgagagatagcattgawtaaattgtaagtaggttcaagaagatattaaaacattgactaggtttaaacaaaaaatattgggcactacacatttaaagtatcattgagggaagaatttagggctctttgtgagcagggggcaatcaagtatagctagtagagaacaggctctagtggtagctgacatgaatttgaattcagatgaacctaacacttagtagttgagatgctgggcacgtcatttaacttcatatgccctatttctgcctcatctgtatcatggaaaaaataactacctatcttgcagagtccatctaaggattaaatgcataatatacataattcacttgaaatagtgcctggtcaatagcaagtactcaatacaccatcctcaggctcttaagataagtgtcagtgagtacagtcagtgaaaacaagggactagaaaaccacaggtcacacccagtataacat

SEQ ID NO: 418463 - DNA, 578 bp, Homo sapiens
ggagttaaataatatgtccttttagctctgacccatcatcaactggaagcacatccagaatgatcctgtctgtggtgatggtggtgatgattttgaatcatgccacgagagatagcattgattaaattgtaagtaggttcaagaagatattaaaacattgactaggtttaaacaaaaaatattgggcactacacatttaaagtatcattgagggaagaatttagggctctttgtgagcagggggcaatcaagtatagctagtagagaacaggctctagtggtagctgacatgaatttgaattcagatgaacctaacacttagtagttgagatgctgggcacgtcatttaacttcatatgccctatttctgcctcatctgtatcatggaaaaaataactacctatcttgcagagtccatctaaggattaaatgcataatatacataattcacttgaaatagtgcctggtcaatagcaagtactcaatacaccatcctcaggctcttaagataagtgtcagtgagtacagtcagtgamaacaagggactagaaaaccacaggtcacacccagtataacat

SEQ ID NO: 418464 - DNA, 557 bp, Homo sapiens
caattgccgttacttttaatggcaaaaactgcaattacttttgcaccagcctaatagctattctgggtggtggagacggtatttcacggtggttttgatttgcatttctctgatgattcgtgaagatgaacattatttcatactttttttggccgcttatatgtcttcttttgagaagtgtctctactcatgtcctttgctcatttttaatggggttgttttcagcttgttgatttgtttaagttctttacagattctggatattagacctttctcagatgcatagtttgtgaataytttctcccattctataggtgttctgttttttgatcatttcttttgctatgcggaagctgtttcatttaattaggtcccaattgtcaaattttatttttgttacaattcttgttttttttttgtaagaatttttcactttatcatcaggtaaggccaatgttgagaaggatctttcctggattttttttctaggatttttattgtttgaggtcttacattcaaatctttaatccatctttttttgtatgtgctgaaaggta

SEQ ID NO: 418465 - DNA, 557 bp, Homo sapiens
caattgccgttacttttaatggcaaaaactgcaattacttttgcaccagcctaatagctattctgggtggtggagacggtatttcacggtggttttgatttgcatttctctgatgattcgtgaagatgaacattatttcatactttttttggccgcttatatgtcttcttttgagaagtgtctctactcatgtcctttgctcatttttaatggggttgttttcagcttgttgatttgtttaagttctttacagattctggatattagacctttctcagatgcatagtttgtgaatactttctcccattctataggtgttctgttttttgatcatttcttttgctatgcggaagctgtttcatttaattaggtcccaattgtcaaattttatttttgttacaattcwtgttttttttttgtaagaatttttcactttatcatcaggtaaggccaatgttgagaaggatctttcctggattttttttctaggatttttattgtttgaggtcttacattcaaatctttaatccatctttttttgtatgtgctgaaaggta

SEQ ID NO: 418466 - DNA, 603 bp, Homo sapiens
agtgagcctgtatctctggagtgtgaactcccacaggtgttttttaaatttttttcctccacattctcccttaagtgggacaggatagctagaaaaggctggaattgggtatttcccttctgccaggtcagttaggctctgacaaaactccagaggttaggctctgatcaaatagtttcttcttcgggcagtctatgttaagaacagagtgctctaacagttttcaaaattcttccttttcctcttctcctgccagaagcacaagggcattttcctccaacatttactgtgagaacctggaggtaaaacttacaacagcataaaagaccatcccctccatgactggatcccctggagtttttaactctcagtcttgtcctcgcctagcctccagcaatttaattacagctcaggttktcctaccctggcactggtccctgtggcggtttctactccagtatgtcatggtacactgtatctgccagtctgtttctccagttttggaaacagcagttgtccctgttgatgggtctaagattgttgatttttcactttgttcagatttttacttgttagtatgaaatggtgatgtcccagctcctt

SEQ ID NO: 418467 - DNA, 593 bp, Homo sapiens
gatggctggtaatatttagtttcagtagcattgtcttccattctgaattaactgtataaaagattacccttggaaatggaaagaaacacaatttttttacaagatgatcctatcctactctctctctaacatctcttagcagtggttctcacacttgggtgtgcatcaggatcaccaatggggcttgtttaaacacaggttgctgggccccaccaccagagtttctgattcagtagctctggaccaggaatctgcatctctaacaagttcccaggtgatgctgayactgctggtctgggggccgcactttaagaaccactgatctaaagaaaaaagaaagaaacaaaagctttactgaaatcaaggctgattttaatgtggacaatttataactgataaagtgttaaatcaatggtagaggccttttatataatcattttagatgagaaaataatattggttttattgaaatattcatttatttatttggggccaaataggtccaaggaaaataaagagtcctaggcagggttaagaataccaagtgttgcatttgtttaatacaaatgcaaaatatttctagaaagatgtat

SEQ ID NO: 418468 - DNA, 589 bp, Homo sapiens
gcacattatatacagtactttatggaaaagattgtcaaygctatagaagagaaccctgatagagaaagcatcataaaaatctggaaggattacaccattgaatataccattgttgttatagaaaaaactgtgaaagccatcaagcctgaaacaataaattcctgctgggaaaaactgtgtccagatgctgtacatgacttcacagaatttatgacagagccagtcaaggaaatcatgaaagagattgtggatatggcaaaaaaaaaaaaaaaaaaaaaaaaaaaaaaaaaaagtgggggtgaagggtttaaagatacagaacttggagaaattcaagagctaatagacaccacaccagaggaattaacaaaagataacttcatggagatgagtgcttctgaaccagtagccagacaatgaggaagatgtaggagaagccattccagaaaacaaattgacattagacaatcctgcagaagggttctaattgttcaagagtatttatgacttcttttatgacacagacccttctatgatatgggcactgaaactacagcaaattgtggaaggactggcatcgtatagaaac

SEQ ID NO: 418469 - DNA, 518 bp, Homo sapiens
atattttctgaattgtttttacccacacatcttatgctcaatttaacaaatatttattaagtgcmtagttggcaaggtgacactatggaggagatgaaaaagactaaggtatcatttgtgcccttgaggaattaataatctgacggcaaaagctgacatgtatacaatcaactgtagtatttgaaaggataaagtaagtcctttaatagcaatataaactgctcggctagtattgagagagcaaggctagagggcagagcaatgtgaagcttggattgaagtggcaggatattaaaggcaagacatcagttatgaagctaaagcatatataggcaataacatgataacagcctgaattagtcagtggactgatagaatagaaggaaaaggaataccaggggcatttcactggtagattcaatagtatgtgacaattagatgtgagagtggaaattaggaggagtcaaagataaattcaagttttcttatcagatactgggctaggaaacacaaaataa

SEQ ID NO: 418470 - DNA, 584 bp, Homo sapiens
tttcaaaaacacaccaaaacccaagttttgtttcctcaaatgtttaatgacatttatttattgtatctgaatgatttattatgatattgtgatacagcatcacttaaggttgtttggatttttaaaagctattcccaaaagatttgcaactactttcccctgctatcttggttgcttcctgttctcacagaaatgtgaatgatgtccctcatgtattgcttatttcttgagcttttaggtacaacttggcaaatataccaaatgatagagaggaaaaatgaaggtatttttacattgaaaatttttcactggcraagctcttttcctgaaggaaacatcactcatgtttaggctagattatgtgcgcatcgtgacctagaattggaaacccagtggctactgaactgggggctcctctaaagccaaaccaaaccatttgagcaagaactatggactattcatacagtttatcaaatttagccagatgacagagacagtgtctgacaaaaggttgaatctagtaaaaaaaaaaaaaaaattcacttaggataaaatgtctaatggagattaaaactttaaaatat

SEQ ID NO: 418471 - DNA, 584 bp, Homo sapiens
tttcaaaaacacaccaaaacccaagttttgtttcctcaaatgtttaatgacatttatttattgtatctgaatgatttattatgatattgtgatacagcatcacttaaggttgtttggatttttaaaagctattcccaaaagatttgcaactactttcccctgctatcttggttgcttcctgttctcacagaaatgtgaatgatgtccctcatgtattgcttatttcttgagcttttaggtacaacttggcaaatataccaaatgatagagaggaaaaatgaaggtatttttacattgaaaatttttcactggcaaagctcttttcctgaaggaaacatcactcatgtttagrctagattatgtgcgcatcgtgacctagaattggaaacccagtggctactgaactgggggctcctctaaagccaaaccaaaccatttgagcaagaactatggactattcatacagtttatcaaatttagccagatgacagagacagtgtctgacaaaaggttgaatctagtaaaaaaaaaaaaaaaattcacttaggataaaatgtctaatggagattaaaactttaaaatat

SEQ ID NO: 418472 - DNA, 584 bp, Homo sapiens
tttcaaaaacacaccaaaacccaagttttgtttcctcaaatgtttaatgacatttatttattgtatctgaatgatttattatgatattgtgatacagcatcacttaaggttgtttggatttttaaaagctattcccaaaagatttgcaactactttcccctgctatcttggttgcttcctgttctcacagaaatgtgaatgatgtccctcatgtattgcttatttcttgagcttttaggtacaacttggcaaatataccaaatgatagagaggaaaaatgaaggtatttttacattgaaaatttttcactggcaaagctcttttcctgaaggaaacatcactcatgtttaggctasattatgtgcgcatcgtgacctagaattggaaacccagtggctactgaactgggggctcctctaaagccaaaccaaaccatttgagcaagaactatggactattcatacagtttatcaaatttagccagatgacagagacagtgtctgacaaaaggttgaatctagtaaaaaaaaaaaaaaaattcacttaggataaaatgtctaatggagattaaaactttaaaatat

SEQ ID NO: 418473 - DNA, 584 bp, Homo sapiens
tttcaaaaacacaccaaaacccaagttttgtttcctcaaatgtttaatgacatttatttattgtatctgaatgatttattatgatattgtgatacagcatcacttaaggttgtttggatttttaaaagctattcccaaaagatttgcaactactttcccctgctatcttggttgcttcctgttctcacagaaatgtgaatgatgtccctcatgtattgcttatttcttgagcttttaggtacaacttggcaaatataccaaatgatagagaggaaaaatgaaggtatttttacattgaaaatttttcactggcaaagctcttttcctgaaggaaacatcactcatgtttaggctagattatgtgcrcatcgtgacctagaattggaaacccagtggctactgaactgggggctcctctaaagccaaaccaaaccatttgagcaagaactatggactattcatacagtttatcaaatttagccagatgacagagacagtgtctgacaaaaggttgaatctagtaaaaaaaaaaaaaaaattcacttaggataaaatgtctaatggagattaaaactttaaaatat

SEQ ID NO: 418474 - DNA, 450 bp, Homo sapiens
  misc_feature (1)...(450): n = A,T,C or G
ggtgacaattctgtccccagagaggcactttcttggatgccatcagatagtggtcatttctccttctatgtaacataaaaacaaccactaaccccaaatgattagtctgattattctatgtattcagctgccatcttgaaggggagttattttagaaagaatatattcttctttcttagattctcccttgcttacagttaaataacaaaatcgtataataacttatcacctagaaaattgtgatagtgttcatatttcagaaatttaggtttattatactacrtatagttttaatacttatgtataaatatgtgagaattgggaggtaatacagtggaatagttcttcattgttaaacagaactgtattatgatttttcacanaagataaatagctgtcttttaaaaaaaatcaagattaaatttcaacattctcttctcagaatattgc

SEQ ID NO: 418475 - DNA, 552 bp, Homo sapiens
  misc_feature (1)...(552): n = A,T,C or G
taaatcctcatcataataactaaaaaataacaatttacangatcaatgaccaaaaagcaagagaaaaaatctcataatgctatataaaatgcatgttttattcacttttctgttggcatattatacttcagccaatagrttaataaataaaatacattgtggtatttgtgccataaaaaataaacaaaactggcatactgcaatggtaaatataccactgtgttgctagggtgctctgaatttttaatttcaagataaattgtccagggaattaaaaaccatcacaggtatgtaagggctgtaattgttttgagaagttttaaaatctaagatgtaataaagggatttatacaaatttcttaataattctcttggcaatttgtcttggtggttggtctgaatctagacgctattaagatttgccctagataaaggcacacttgatacaatatatattctctgtattttgatgaaactgtggttgtaaatatttaggtctgaaaactattattcttggattcactgaatgaaaaggacagtatcattaattga

SEQ ID NO: 418476 - DNA, 471 bp, Homo sapiens
tcaccgttctcaactactcatacatgccctgctcttgtttacactgccggtttacactgtttttccawgccatcacagctgatatctcctggtgctatccccaaactgccactcttaactcttgaagtaaataaataatctttgctggcaggactatgctaaatctccttaggcactccctaatcagacattctgagtcatcccaattcttagcccttttatccctgtttttctccttctgttattccacttagtttctcaattcatccaaaaccgtatccaggccatcaccaatcattctatacgacagatgtttcttgtaacatccccacaatatcaccccttaccacaagacctcccttcagcttaatctctcccactctaggttcccacgccgcccctaatcccgcttgaagcagcgctgagaaacatcgcccattctctctccataccacccccaaaaattttcgc

SEQ ID NO: 418477 - DNA, 471 bp, Homo sapiens
tcaccgttctcaactactcatacatgccctgctcttgtttacactgccggtttacactgtttttccaagccatcacagctgatatctcctggtgctatccccaaactgccactcttaactcttgaagtaaataaataatctttgctggcaggactatgctaaatctccttaggcactcyctaatcagacattctgagtcatcccaattcttagcccttttatccctgtttttctccttctgttattccacttagtttctcaattcatccaaaaccgtatccaggccatcaccaatcattctatacgacagatgtttcttgtaacatccccacaatatcaccccttaccacaagacctcccttcagcttaatctctcccactctaggttcccacgccgcccctaatcccgcttgaagcagcgctgagaaacatcgcccattctctctccataccacccccaaaaattttcgc

SEQ ID NO: 418478 - DNA, 471 bp, Homo sapiens
tcaccgttctcaactactcatacatgccctgctcttgtttacactgccggtttacactgtttttccaagccatcacagctgatatctcctggtgctatccccaaactgccactcttaactcttgaagtaaataaataatctttgctggcaggactatgctaaatctccttaggcactccctaatcagacattctgagtcatcccaattcttagcccttttatccctgtttttctccttctgttattccacttagtttctcaattcatccaaaaccgtatccaggccatcaccaatcattctatacgacagatgtttcttgtaacatccccacaatatcaccccttaccacaagacctcccttcagcttaatctctcccactctaggttcccacgycgcccctaatcccgcttgaagcagcgctgagaaacatcgcccattctctctccataccacccccaaaaattttcgc

SEQ ID NO: 418479 - DNA, 471 bp, Homo sapiens
tcaccgttctcaactactcatacatgccctgctcttgtttacactgccggtttacactgtttttccaagccatcacagctgatatctcctggtgctatccccaaactgccactcttaactcttgaagtaaataaataatctttgctggcaggactatgctaaatctccttaggcactccctaatcagacattctgagtcatcccaattcttagcccttttatccctgtttttctccttctgttattccacttagtttctcaattcatccaaaaccgtatccaggccatcaccaatcattctatacgacagatgtttcttgtaacatccccacaatatcaccccttaccacaagacctcccttcagcttaatctctcccactctaggttcccacgccrcccctaatcccgcttgaagcagcgctgagaaacatcgcccattctctctccataccacccccaaaaattttcgc

SEQ ID NO: 418480 - DNA, 588 bp, Homo sapiens
acataaaattgttaccacctagagataactggtgttrattttgtggtgtgatctcttcttgaaatttttatagttataagattatttattctaattaacttgactcatgtactctgctgaattttaattcacagattgtcattcaaaaggagagatgagattttttttctctgtattgtcacttcctacttcattcaatgaaatgttcacatgttaagacttttaaaaccgtactgagtcaactatttcactgttgacatctgcttgtctctgattgcaggacagcctgaggtcaactggaaatacatgtctcccttctgaccaggtgcccagggtctccccattcagttataggtccactgctagaaaggaagaactgataagaggacacctcaagacaatgtgaatagggttttatcctgtgttctaacaacatcccagataacaaagctcttcttgaattgttaagatagaaaaccgatggccataactgagttctcagcagcaagaaatccaaacatttattgatagacaaaatgaaaacaagtggaatctatttagtcagcacacatcaggagagatgaaatg

SEQ ID NO: 418481 - DNA, 532 bp, Homo sapiens
gaaaacaagtggaatctatttagtcagcacacatcaggagagatgaaatgtcaacacaggatctaatattgctcccggggcacatctaaggaaactggtagcacccacacaggtctgtgagtccaatagcattctcagaaacccttccaagccaaggaatgtgaagtgggatggcgagaccaccagcaattacctggaacacagccaaggccctagtgctgaaacgatgttctcgctacctcagcccctaggtgggrctgtgcagaagatggataacagcaggtactgggacagcagctgtaagacaggctgagcagggaggctgcaaggcccagtggtggcagaataaatgcctaaagacgtgcagaagcacagtctaaagtcatactgcacagctgccgctgctgggaagcaataggaggtgccaacccaagacaagcagcagagatggagtggctcttgttgcagaaaagggtagggctaccataggtttaaaaagcaggcagcaggcaatatacttctgcaagggttg

SEQ ID NO: 418482 - DNA, 577 bp, Homo sapiens
ccaccagcaattacctggaacacagccaaggccctagtgctgaaacgatgttctcgctacctcagcccctaggtggggctgtgcagaagatggataacagcagktactgggacagcagctgtaagacaggctgagcagggaggctgcaaggcccagtggtggcagaataaatgcctaaagacgtgcagaagcacagtctaaagtcatactgcacagctgccgctgctgggaagcaataggaggtgccaacccaagacaagcagcagagatggagtggctcttgttgcagaaaagggtagggctaccataggtttaaaaagcaggcagcaggcaatatacttctgcaagggttgcaggcatattgcacccggggtgcaaccacacagtcgcaggtgagataaatagtttatgttttttgtttttgttgttttttacctctaggaacgtttaataatgactttcaacctcagttacattatctgaaagaaccaaggtgtcctatctggggaagaaaagaaaagttaaaccctggctgattttggaattggtgggcaggttattcatgagagggcctgtg

SEQ ID NO: 418483 - DNA, 577 bp, Homo sapiens
ccaccagcaattacctggaacacagccaaggccctagtgctgaaacgatgttctcgctacctcagcccctaggtggggctgtgcagaagatggataacagcaggtactgggacagcagctgtaagacaggctgagcagggaggctgcaaggcccagtggtggcagaataaatgcctaaagacgtgcagaagcacagtctaaagtcatactgcacagctgccgctgctgggaagcaataggaggtgccaacccaagacaagcagcagagatggagtggctcttgttgcagaaaagggtagggctaccataggtttaaaaagcaggcagcaggcaatatacttctgcaagggttgcaggcatattgcaccyggggtgcaaccacacagtcgcaggtgagataaatagtttatgttttttgtttttgttgttttttacctctaggaacgtttaataatgactttcaacctcagttacattatctgaaagaaccaaggtgtcctatctggggaagaaaagaaaagttaaaccctggctgattttggaattggtgggcaggttattcatgagagggcctgtg

SEQ ID NO: 418484 - DNA, 577 bp, Homo sapiens
ccaccagcaattacctggaacacagccaaggccctagtgctgaaacgatgttctcgctacctcagcccctaggtggggctgtgcagaagatggataacagcaggtactgggacagcagctgtaagacaggctgagcagggaggctgcaaggcccagtggtggcagaataaatgcctaaagacgtgcagaagcacagtctaaagtcatactgcacagctgccgctgctgggaagcaataggaggtgccaacccaagacaagcagcagagatggagtggctcttgttgcagaaaagggtagggctaccataggtttaaaaagcaggcagcaggcaatatacttctgcaagggttgcaggcatattgcacccggggtgcaaccacacagtcgcaggtgagataaatagtttwtgttttttgtttttgttgttttttacctctaggaacgtttaataatgactttcaacctcagttacattatctgaaagaaccaaggtgtcctatctggggaagaaaagaaaagttaaaccctggctgattttggaattggtgggcaggttattcatgagagggcctgtg

SEQ ID NO: 418485 - DNA, 542 bp, Homo sapiens
ttggaaatgaaagacaaaaatctatttttttctgaaaatttctaaaataattgaaacactgcctaagaataacaaatgacttcaaaaaagacgaaaaattttcaagtgcagtgatatagatgaaatacactttatttggaatctaccatttccaaggaaggaagactaggatgttaytgattccacactactattaaaacaggccatccttatttctaacagattgcatgtataacttatcagtaatgataaattctttgggatacatgccagtggagagaagcagaaataaagataatccagcaaagcaataatctagaaatcacaaatatgacctttgattgggtggcatgatttttgttttgtattttaacagaagacgcagctactagttattatttcttcagagtaatgaatattcattacagttatcctgcctgaacacattccagtgataagtagaggggctaggaaggcagtcagggctaaaaattcgcaactgaggcaatcatggatgtataagtgccctctaatataaagct

SEQ ID NO: 418486 - DNA, 542 bp, Homo sapiens
ttggaaatgaaagacaaaaatctatttttttctgaaaatttctaaaataattgaaacactgcctaagaataacaaatgacttcaaaaaagacgaaaaattttcaagtgcagtgatatagatgaaatacactttatttggaatctaccatttccaaggaaggaagactaggatgttactgattccacactactattaaaacaggccatccttatttctaacagattgcatgtataacttatcagtaatgataaattctttgggatacatgccagtggagagaagcagaaataaagataatccagcaaagcaataatctagaaatcacaaatatgacctttgattgggtggcatgatttttgttttgtattttaacagragacgcagctactagttattatttcttcagagtaatgaatattcattacagttatcctgcctgaacacattccagtgataagtagaggggctaggaaggcagtcagggctaaaaattcgcaactgaggcaatcatggatgtataagtgccctctaatataaagct

SEQ ID NO: 418487 - DNA, 561 bp, Homo sapiens
aagtttcaagtaagctcaattaaaaatgaaactggagatattactaccaataccacggaaatacaaaatatcatttaaggctatgatgaaaatctttatgtscacaaaccagaaaatctagaggaaatggataaattcctggaagcatacaaccctcccagattaaatcaggaagaaatagaaactctgaatagtatctgtctttctgtgtctggcttatttcacttaacattatatcctccaggcccatctatgttgtcacaaatgatagtattttattctttttcatggctgaatagggtttcactgtgtatataaaccacatattctttatctatttattgtttttccattcattaattgttggatacttagggaaattccatattttcactattgtagatagtgccacaataaacatgggagtgtagttgtctcttctatgtacaaatttcattttcattggataaatacctagtagttggattgctggagcatatggtagttctattttataattttttgagaaaactccatctctttttcatagtggctgcacta

SEQ ID NO: 418488 - DNA, 561 bp, Homo sapiens
aagtttcaagtaagctcaattaaaaatgaaactggagatattactaccaataccacggaaatacaaaatatcatttaaggctatgatgaaaatctttatgtgcacaaaccagaaaatctagaggaaatggataaattcctggaagcatacaaccctcccagattaaatcaggaagaaatagaaactctgaatartatctgtctttctgtgtctggcttatttcacttaacattatatcctccaggcccatctatgttgtcacaaatgatagtattttattctttttcatggctgaatagggtttcactgtgtatataaaccacatattctttatctatttattgtttttccattcattaattgttggatacttagggaaattccatattttcactattgtagatagtgccacaataaacatgggagtgtagttgtctcttctatgtacaaatttcattttcattggataaatacctagtagttggattgctggagcatatggtagttctattttataattttttgagaaaactccatctctttttcatagtggctgcacta

SEQ ID NO: 418489 - DNA, 561 bp, Homo sapiens
aagtttcaagtaagctcaattaaaaatgaaactggagatattactaccaataccacggaaatacaaaatatcatttaaggctatgatgaaaatctttatgtgcacaaaccagaaaatctagaggaaatggataaattcctggaagcatacaaccctcccagattaaatcaggaagaaatagaaactctgaatagtatctgtctttctgtgtctggcttatttcacttaacattatatcctccaggcccatctatgttgtcacaaatgatagtattttattctttttcrtggctgaatagggtttcactgtgtatataaaccacatattctttatctatttattgtttttccattcattaattgttggatacttagggaaattccatattttcactattgtagatagtgccacaataaacatgggagtgtagttgtctcttctatgtacaaatttcattttcattggataaatacctagtagttggattgctggagcatatggtagttctattttataattttttgagaaaactccatctctttttcatagtggctgcacta

SEQ ID NO: 418490 - DNA, 561 bp, Homo sapiens
aagtttcaagtaagctcaattaaaaatgaaactggagatattactaccaataccacggaaatacaaaatatcatttaaggctatgatgaaaatctttatgtgcacaaaccagaaaatctagaggaaatggataaattcctggaagcatacaaccctcccagattaaatcaggaagaaatagaaactctgaatagtatctgtctttctgtgtctggcttatttcacttaacattatatcctccaggcccatctatgttgtcacaaatgatagtattttattctttttcatggctgaatagggtttcactgtgtatataaaccacatattctttatcyatttattgtttttccattcattaattgttggatacttagggaaattccatattttcactattgtagatagtgccacaataaacatgggagtgtagttgtctcttctatgtacaaatttcattttcattggataaatacctagtagttggattgctggagcatatggtagttctattttataattttttgagaaaactccatctctttttcatagtggctgcacta

SEQ ID NO: 418491 - DNA, 557 bp, Homo sapiens
tgctagctctgctgcagtgagtgaatacaggcttgagtactacttcagctcactgtcctaagtgamcacttcaagacttaatggcctaacaactcccagcatcaatattattatcttatttttaacattttaaaaacaaaaattactctgatttggaattttgtatttggaatgcaaaagattacactttttaaataaaacagcacaatcaatgtattctgtgtctacaggatttgagagcaagaggtatatgttattcatctttgtgtcctttgtgtgattatctgaactaaatacatatagatgggctgggtagggggagagaaggagggaggagtagagaagagaaggaagagacagggagaaatagggatgaatggaatttagaaaattttactgagaacctgacaagactaatcttttctttaatgtctacatacacaaaccatcataaaagtaatttatttattatattccaaatattgatgatactgctctggatacaaataaacctatcacatgcttactatgagttccttcaaggtgttgcttctcat

SEQ ID NO: 418492 - DNA, 550 bp, Homo sapiens
gataggtgtgagcattgatacaaagaattatagcacatagtctttattgtcatgatggttgcaatctgaggatataaaactacacatgtgaaaaggtagctaacagtgtgacaatataaatgacaaagaccataatgaataatatggattaaatgcaataggaatttagaagagatgaataacactgagttggagtgttctaagataacttcttggacaatatagttggcaagcaaatccttaggttgggtagatctgggaaaacgaagagagaaaggcatttcatctagaatggaagaaatgtttgttaattaggcacttctatttgttggtgatataccagatattttaatatgcatattcataattattttaattatttgtgaagatgagacagaataggattttttttcttgcaatgactgaatgcaccataacttaatgggttgatggtttyattagttaatcctagaattccactctttcactcactcacccattcactttctctctctctttttattttgatatattttctgtttttcctgtc

SEQ ID NO: 418493 - DNA, 583 bp, Homo sapiens
cagatgactgtcttttcctgtaccattttattttgtcatttctggtaacactttatttctactgtggatggcatcaaagaccttttcttttatagtataatcagtcaactaaatagtactggtaaacatctttgaaagtaattatatttttagagtatggtaatataccatttcaacccttctggkgtgtgtgtgtgtgtgtgtgtgtgtgtgtgtgtgtgtgtgtgtagatttttgcttgttttcttaagacacgacttttgcttttcctttctatttctacttttggccattttgtttcattatcacacttcacacaggagagaagtaggctgtggttcattaaacaccaaacagcatatatctcatatgcacatggtcacactagagatcctggtagcatcaatgtcttaatgtttgttgttgttgttgttattgttgagagagggtctggctctgttgtcaaggatggagtgcaaaggcatgatcttaacacactgcaacctccacctcctgggctcaaaccatcctcccacctcagccatccaagtagctgggactacaggtatgtgccaccacacct

SEQ ID NO: 418494 - DNA, 583 bp, Homo sapiens
cagatgactgtcttttcctgtaccattttattttgtcatttctggtaacactttatttctactgtggatggcatcaaagaccttttcttttatagtataatcagtcaactaaatagtactggtaaacatctttgaaagtaattatatttttagagtatggtaatataccatttcaacccttctggtgtgtgtgtgtgtgtgtgtgtgtgtgtgtgtgtgtgtgtgtgtagatttttgcttgttttcttaagacacgacttttgcttttcctttctatttctacttttggccattttgtttcattatcacacttcacacaggagagaagtaggctgtggttcattaaacaccaaacagcatatatctcatatgcacatggtcacactagagatcctggtagcatcaatgtcttaatgtttgttgttgttgttgttattgttgagagagggtctggctctgttgtcaaggmtggagtgcaaaggcatgatcttaacacactgcaacctccacctcctgggctcaaaccatcctcccacctcagccatccaagtagctgggactacaggtatgtgccaccacacct

SEQ ID NO: 418495 - DNA, 628 bp, Homo sapiens
attccatttgatataaggttcttatatttgaagagttttttaaaaattattatttttaatcagaagccagcttcagtctttgaaatccagattctcttctctaatgtggatcaaaataaattctcccacattgagaagtataaaaaaaatccaggcaaaataaagtaattataagtttattttcactttgcaagcaagggtgggtggaggagtctgggctctacttgatgaytgtggcagtactaacaattaatttaggacgatggtgcgacatgaaaataaaacttcttctgattgaatttcaaggactcttctgtttaactagcttcaagagtcctttttagatcataataaaattatttgccatatggttcagatgtttgtgatcccctctcaatgagaggattatgcatgagataaaatgcctactgtagctgcagccaagcacacagctggttctgataatgccaacaaatggcttcatccatctcaatgtcacgtaggagctggtgcgacgcgagtcagccccgagtacaattaaaatctacatcatctgtgagaaaggtgatggaggttctgacatcagagctgtgccagattcatcctctttccacagtaacagaagaaa

SEQ ID NO: 418496 - DNA, 628 bp, Homo sapiens
attccatttgatataaggttcttatatttgaagagttttttaaaaattattatttttaatcagaagccagcttcagtctttgaaatccagattctcttctctaatgtggatcaaaataaattctcccacattgagaagtataaaaaaaatccaggcaaaataaagtaattataagtttattttcactttgcaagcaagggtgggtggaggagtctgggctctacttgatgattgtggcagtactaacaattaatttaggacgatggtgcgacatgaaaataaaacttcttctgattgaatttcaaggactcttctgtttaactagcttcaagagtcctttttwgatcataataaaattatttgccatatggttcagatgtttgtgatcccctctcaatgagaggattatgcatgagataaaatgcctactgtagctgcagccaagcacacagctggttctgataatgccaacaaatggcttcatccatctcaatgtcacgtaggagctggtgcgacgcgagtcagccccgagtacaattaaaatctacatcatctgtgagaaaggtgatggaggttctgacatcagagctgtgccagattcatcctctttccacagtaacagaagaaa

SEQ ID NO: 418497 - DNA, 594 bp, Homo sapiens
ttttttccatcagtctatagaactgtaaggtagaaaacagcaacatagggaattcctgggcaagatggccgaataggaacagctgtggtctgcagctcccagcaaggcccatgcagaaggtgggtgatttctgcatttccaacagaggtacccggttcttctcattgggactggttagacagtgggtgcaacccatggagggcgagcagaagcagggtggggtgtcgcctcacctgggaagcacaaggggtcagaaaaatccctccttttgccaagggaatccctgagggacsctgccatgagggacggtgctatgcagcctagatactatgcttttcccagggtctttgcaacccacagaccaagagattccctcgggtgcctacaccaccagggccctgggtttctagcacaaaattgggcagccatttgggcagacactgagctagctgtgggagtttttttccgtaccccagtggtgcctggaatgccagcaagacagacccgtttactcccctggaaagggagctgaagccagggagccaagtagtcttcctcagcggatcccacccccatggagcccagcaagctcag

SEQ ID NO: 418498 - DNA, 584 bp, Homo sapiens
tttttttcactgtcataatttcctcagttataattgtgcaaaagtggtttcaatgtgactagggggatttgagaattttaaacttttctccactcgagaaatgggaccactgctctgctttcctatacctgtcacgtctttccagtttctcaaatggtacccacaggtaccatgtccaggtcagagctgtgaccctaaaagaagaagaagagtaccaccaaaaatggggaagataaatggacaaccagatgcgaagaggatgggacctccaaccttgccctgaacattgctctcaactgtgaatttagggatgggaagtaaaattcagaattctgagagacagactggaggagcaatggagcttggttcttcagagaagcccagtggaatttcatagacttccagtttgttatacaataattatcacctgatctcagttgttataatccctgctagtctttgtctgagccattcctttattstcacgaaaacttatcagatgaccttgatcccagggttcagcttccttgatcacctgcaaagatgaggatgaagtcattccttggaatcttgcagagattaac

SEQ ID NO: 418499 - DNA, 598 bp, Homo sapiens
tgaatcacagcatcatattgaaaacactaactgtaacaaacaacatcctatttcatatattactgcaagtggggttttggaagttcagttataagactatgaatgtcttataatagctaagtacctagaattcaaaagaaataagcctaaacagttgtttacrtttaagagccacacagctaaagttttggattatatctttataacgtgttttctgtttgagtttaataataatatattaactcaggttaacctgtcatttaaaaaaattaatataaatcacatctctacaagaaattttataaccatacttattaataaaataaaactaatgtgtattaccatataaatgtgcagaaaatatttagatattttataattcattattagaaaagaaaaaattaaatgttcaaattatagcatttgttactgtattagtgacatactttttggataatataaataattttatgactgttttaaagcatatatttcaaattatataaaatttattatactcttcttattctacaacttggttatgattattttttgcttttatttgcctgaacaatacaataagaagatcaatctcttc

SEQ ID NO: 418500 - DNA, 476 bp, Homo sapiens
ttgccacaagggttacatgcaggaacattaatgtcaacctgtcacttctaatatccatctaatattctctaaattcgatggatccttttgcatatggtgattgttaaacacctttgcataggaacagtttctatgcttttgtactcaaatcttcctctaccttgaatcctttcccatcttcgtgttcaaccttcaatcttctcagaatgaactcctgtcttctattctttcggaagcatagaatctcacrgtcagaagagaccacatctggttcaacccttcatctcttatgtaaaattttatgacatctctagcttcttctttaaacccaccaatgacagaaactactaaaatctagaaataacacctttgaaattctttctttaagagatcaaataaaattttcctgaatcttcacctattgttcctagttatatatatccagattctacaaaataagtcaaagttagattgca

SEQ ID NO: 418501 - DNA, 568 bp, Homo sapiens
tcatgaacttacatcaattaagagcttgaagtgactgagagtatttgcctggaagcatttaaagcccttcttgggaaatttagatgttttatattttactttctttttgattttgctttttccattaaagtgattactatttttaaagagaaaaccgaaaactctagaaagaccatcttttcttcataacaggtagcagaaaacaccatgttattacatttctagcaagagcagtagaggtgacttgttggttttgtgtactgttgctttagaaattgatgtaaggcttcccataaacgtgccagaggaaaagagggacgcaatgggatctgttattgaacatttcagaggcagactcttaccttaaatagggactcactatacattcatgttttcataagtattgggatcatgttcttactttctatcaacctgctattttcatctttcaagcttaagagtaataggctctgtgtgttttgtttttcagtgagcccaacaaatttgtctcartttaaccttcccgggcccagcatgatgcgctcaaacagcatcccagcccaagact

SEQ ID NO: 418502 - DNA, 622 bp, Homo sapiens
aaccaaccaaacaaataaagtaacagcaatagcaacagcaacaagaaagaaagagatgagataaagcagcatgtcgaggaaaactgatccatgacctgttctgtagaaggcaaaggtgaaggaatckgaaagaatactcttgcattataatgcagtgcatactttcttaaagagaagcagcttggtaggagggaaatggtgagagagacagaacagaaccatattatatgaattctagaactttatcttactattttgtgatcttacctttgataagtccaaaactcagttgttttattaattttaatctagaatccaatctcgctttaaaatgtgttatctatgataatataaggtatttgcatacctacaaaacaggttccattttgaatttatcagaaattctctatttaaaagaccttgccagagaaacctacaggattcgtttcatcaaacaagtaattattttataataaacataatggttccaaatctatcttttttgtaggatgggattttgagaaatttctacatatattagaaaggtaaataattcaaaatttgtagtctagctagagcctctattatgatgaccagaaatggttaacgaaatagtgattat

SEQ ID NO: 418503 - DNA, 582 bp, Homo sapiens
gtaatgatacgctccatcaagtgtcagacatctgctgacagctagaacattatctttactctttttctacttacaaagaattgaattgaaaagagttatctttactttccaaactcttttcaataaaagggcttttctacttcatattcccttcaatgaaggaaatacaggtaagccagttagaaataataytccatcacattttatttcacagtaagcttttgtggctttcaggttttgttttaaatattagagaattatacatattgtagtacataactataactcttaagattaagaagtatttgacgattttattaaagctcaaaaataggccagtttccatttgcatgcccttatgcaacaacttgaacccaaaatgttaaaatgaagaggcacttcaatctctcaccacggcctgaggtagaactgcaagtacattatctcaaacttataaaattttattgtgtccctaaaaggatataaggatttaatattttgcaaacgaagtctataataaactatacctatatatggggcaaaatttggaaatccttggccaaaaatgaatttctttttgaa

SEQ ID NO: 418504 - DNA, 510 bp, Homo sapiens
ttaaaatcagtgtttcagtctcctggcatttaatgtgagtttaacttctgaaagaagatggtattttgcaagtaataactccttctgacttgcacatcatgtagagatttgacactcaaaatgccgaatataaagttctgatctgccaagatttttagacttaaagcccaaaaagaggtcactgaaatggtcaatggacaaatattcctcatttttatactttcatgatgacctttgcagatattgttagctgctctattgtaatgatacgctccatcaagtgtcagacatctgctgacagctagaacattatctttactctttttctacttacaaagaattgaattgaaaagagttatctttactttccaaactcttttcaataaaagggcttttctacttcatattcccttcaatgaaggaaatacaggtaagccagttagaaataatattccatcacattttatttcacagtaagcttttgtggctttcaggttttrttttaaatat

SEQ ID NO: 418505 - DNA, 582 bp, Homo sapiens
gtaatgatacgctccatcaagtgtcagacatctgctgacagctagaacattatctttactctttttctacttacaaagaattgaattgaaaagagttatctttactttccaaactcttttcaataaaagggcttttctacttcatattcccttcaatgaaggaaatacaggtaagccagttagaaataatattccatcacattttatttcacagtaagcttttgtggctttcaggttttgttttaaatattagagaattatacatattgtagtacataactataactcttaagattaagaagtatttgacgattttattaaagctcaaaaataggccagtttccatttgcatgcccttatgcaacaacttgaacccaaaatgttaaaatgaagaggcacttcaatctctcaccacggcctgaggtagaactgcaagtacattatctcaaacttataaaattttattgtgtccctaaaaggatataaggatttaatattttgcaaackaagtctataataaactatacctatatatggggcaaaatttggaaatccttggccaaaaatgaatttctttttgaa

SEQ ID NO: 418506 - DNA, 616 bp, Homo sapiens
aatataataaaatttccatatactcaatgtacacaggctgtcatcaaatatatatttccttaactaaaataatctgctatggcaattcaacaaaagttggggaaggagcagataaacagatggaaggatgaatatatattctatgtagaagtgcacagtggaaaaacctagacttcggatttgaaaagaaatggattgcagtgtaggtttcccatcacttaagaactatatgcctcttgagtcccttaagctctaagtatctgctcagtgaaaataagagtatattgcagacactggcagatattaaattacatatatgttaaaaattatgaactatacttatcctgtctcttgggagtcttatcagaagatttactcacaattttgcyaagttattttattttactataagggaattaataaacattttcatgaatcaggatataaaaatgtgattggaaatcaaaaatgaatttggctttataatagtttgaaataaggtgggcattcatatgaattttagaaaggcttttttccatttagttctacagtataaagataattactgcatttgtttttaaatcatttgtgaaggttgaggtgttgagggatataa

SEQ ID NO: 418507 - DNA, 616 bp, Homo sapiens
aatataataaaatttccatatactcaatgtacacaggctgtcatcaaatatatatttccttaactaaaataatctgctatggcaattcaacaaaagttggggaaggagcagataaacagatggaaggatgaatatatattctatgtagaagtgcacagtggaaaaacctagacttcggatttgaaaagaaatggattgcagtgtaggtttcccatcacttaagaactatatgcctcttgagtcccttaagctctaagtatctgctcagtgaaaataagagtatattgcagacactggcagatattaaattacatatatgttaaaaattatgaactatacttatcctgtctcttgggagtcttatcagaagatttactcacaattttgccaagttattttattttactataagggaattaataaacattttcatgaatcaggatataaaaatgtgattggaaatcaaaaatgartttggctttataatagtttgaaataaggtgggcattcatatgaattttagaaaggcttttttccatttagttctacagtataaagataattactgcatttgtttttaaatcatttgtgaaggttgaggtgttgagggatataa

SEQ ID NO: 418508 - DNA, 616 bp, Homo sapiens
aatataataaaatttccatatactcaatgtacacaggctgtcatcaaatatatatttccttaactaaaataatctgctatggcaattcaacaaaagttggggaaggagcagataaacagatggaaggatgaatatatattctatgtagaagtgcacagtggaaaaacctagacttcggatttgaaaagaaatggattgcagtgtaggtttcccatcacttaagaactatatgcctcttgagtcccttaagctctaagtatctgctcagtgaaaataagagtatattgcagacactggcagatattaaattacatatatgttaaaaattatgaactatacttatcctgtctcttgggagtcttatcagaagatttactcacaattttgccaagttattttattttactataagggaattaataaacattttcatgaatcaggatataaaaatgtgattggaaatcaaaaatgaatttggctttataatagtttgaaataaggtgggcattcatatgaattttagaaaggcttttttccatttagttctacagtrtaaagataattactgcatttgtttttaaatcatttgtgaaggttgaggtgttgagggatataa

SEQ ID NO: 418509 - DNA, 617 bp, Homo sapiens
attttcatcatcacaggacaaatgctgtaattaaggtgtgatttttatagaatccttttgataaaatctcaaaattgttttaatttctattttgcaggggtactgctatcagatcaatttaaatctgaattaatctaatatttaataatctcaaaataattattccatccataataaaaaataaaataaaaatttaacttatggccatctattactgtgtacttttatctgaggaagagatagaatgatctactaatagaggtataacactgtatgtgtatgaaaagttggctaattttggtgctaagaatttacttacaaaaagaaaaagaatatacttagtttggtgaaacactgaataatggcgaaactaggtctttctccattattttttttctctccaatttttcagcaatagcaaatagctggcaattattccatgttaatattttgatccagaaatttatgttccagtaaagcgagcacatctccctccttatttttgtaatctargcatgatgtcaagtggcagtttaacaaaagaactgtttttcctttaaaaaaaaaaaaaaacaaaagctgccaatatgtattccatttccctatgccttctgtga

SEQ ID NO: 418510 - DNA, 415 bp, Homo sapiens
aataaacttagtaatgccgagcatgtacttagtcttttggtctaataagtgaataatattgcacaaattaaatcctaccactgagttagcccattcaaaagacacaaacgtactctcagtggataaatgtcttcccgtgtaatcatgccagcagcagaaaatggaatctgtcataaaaaataaattatccaagagtctgaccaygtccacacagcttggcactaaatttcatttttcttgttcttcagctgagaacctaaatacacacttataaagcagtcagaaagattacgttgtttgtcaaagttggattctacagcctcagcattcagatgtatgagactgtagcattcggaaggcctgctgctttttatgtgtcggtttactgtgatcgcacctgtagttagttaggttt

SEQ ID NO: 418511 - DNA, 636 bp, Homo sapiens
gattagtgaatttataaatttgtctggaggcgactagtgttcgtttccttttgctttctggacacagccttcatcccctttggaggatgcagcaaccaggtgccatcttgaaagcagagaccaggtccttactagacaccaaacctgctggcaccttgatctttaacttcccatgttccagaattatgagaaatatatttctattgttcctaaattttttctttaaccccaatttactttgtggacctagacaaagttgataaatctaccagcgactttccaattaaaaggacgatattagtggctatgaactgaatgtttgtgtcctctgcaaatttattcgctaaatccctgacccccaatataactgtatttggaggtagggtctttatggaggtaattaagcataaatgaagtaataagtgtggggtcctgatccaatagcattagtgtcactataagaaaagagaccagagctctctgtctctctgcacttgccagaatgttgatcttgtcatcccagcctccagaactgtgagaaataaatttctgttcttttagccaaaaaataaaataaaattrcccactttatggtattttgtcatagtagcacaaatggacaaagatgctgcctct

SEQ ID NO: 418512 - DNA, 563 bp, Homo sapiens
tgccaggtcccaattctgcaaataatgacgtgttttatatttggcaattcatttcagcacagctttrttgcttgtaaaatgaaacaggataactgcattatgacttttatcatttctcctgactctagtatattgtgccctagattaatatttattggtaaaagatagaataggctaggatattgggtcttcagtaaacatgctttaataataatcaagctggccaataatacaattttctaggaattttgcaagaaatatattatattccaaaatggtgtctagatatgtgtttagattattaaatataactcttaaaatattttggcatttatttcttatcaggtccccgactattccttccttgccccatggatgtagaaggttctagagtatggctcatggatctctggaactattctttagtaccttatattctggaggcagtgagagagggtcttcaggtatagtactcaattttcattgctattttttcttagaaataataagcaaatataaatactttaaaagcataaaaattattgggtattatgcaaaaaata

SEQ ID NO: 418513 - DNA, 570 bp, Homo sapiens
  misc_feature (1)...(570): n = A,T,C or G
tgttatcattagtattaacttttgcacgctgatgggagactgatatatatcctgttttatgttcctttaaacaatttataatgtaatttagaaaccttctcaaatcacattagatccacacaaaaacctgtacatagcagctttattttttaatagccaaagaaaggaaacaaccaaaaatatcccttaataggccagttaataaacaaattctgatacatctatatcatggactactactcagcaatataaagaaatgactattgatacgtgcatcaacttgggtggatcccaggggtattatgctgagtgaaaaaagacagttatagaaggtcaaattttgtataattccatttatataacattccagaaatggcaaaattaaagaaacagagaacagattagtgattgctaagggctaaggatgraggagagagagaggtagtgtgactataggaagagggagatctttagttttgtattttgaatgagatggccatcacatgaatccacatatgtcaatctattaatgtaagtcaatattgtatcccgcaggggcggttnnnnnnn

SEQ ID NO: 418514 - DNA, 498 bp, Homo sapiens
  misc_feature (1)...(498): n = A,T,C or G
ttgtattgcaatgcttattttacttcattttattatttattyatttatttatttaaaacagggtcttgctttttcacccgatctggagtgcagtggcttgatgatggcttactgcatcctctatctcctgggctcaatcaatcctcccacctcaatatcctgagtagctgggactacaggcacatactaccatgcccacctaatttttgtattttttgtagagacagggtttcagtgtgttgcttaggctggtcttgaaccccctggctctagctgtctgcctgcgtcagcctcctaaagtgttgggattacaggcgtgagccaccatgcctcgccttattttaaatataacgtttttataaattggtttgttgtgtaaatttttgtttaatgacttgttgactatattgtaatctgaccacacaaggctagtgtgaatgactcangtaagaggggaatgagatgttggatgatttatcatagatcatatacaaaggg

SEQ ID NO: 418515 - DNA, 629 bp, Homo sapiens
atttgcatatgtatttctgcatcattggacgtgtcttcagggtgaattccaaaaactgtgattgttgggttgaaaggtaattacatatgtagtttgttaggtgttgctaaatatccctctagaagggttgtaccactttgcattcctaccagtaatgcrtgagagtaattttttcccccagggccccaatgacagaatgttctgttgtgtttctaattttttttccagtctgatcggtgaaaaatggtaccttagtattgtcttatttgcaattctctaattacaagtgactttgaacagtttttcctgtttgaaaataatttttgtatcatttttatgagaatggtttgttcaaatatttttgacattttcctttggtttttatttttctctctcaattttaagagttttatatgtgctagggattttagtcatttgtggtatgtgttttgataaattcttccagtttgttaaattcctttagacttagtgggtttttgtgtgtatgcaaactaaaataaaaattatatattgtcatattcaccaatcttgggttttacttctaactcttccatttatttattgtgaactttgttatttgaactctaaaattattagagccaattacc

SEQ ID NO: 418516 - DNA, 585 bp, Homo sapiens
atggtttgttcaaatatttttgacattttcctttggtttttatttttctctctcaattttaagagttttatatgtgctagggattttagtcatttgtggtatgtgttttgataaattcttccagtttgttaaattcctttagacttagtgggtttttgtgtgtatgcaaactaaaataaaaattatatattgtcatattcaccaatcttgggttttacttctaactcttccatttatttattgtgaactttgttatttgaactctaaaattattagagccaattacccaatatcctccagtttttgtaactcatagtctcacctttwgtcagtgggcagagttttataaatcatgtatagagctagatatctatcataggctgtgttccttgagaaagacaaccctgagataagaacttgtgtctaagtagtttatttggagtgggggggtgatcttaagaagcgccaatagggcagtagagaaatgaaacagggaagagcaagaagtcaatacaaaatgcatttaagagcaagttaacgctgaactaacatgcatgttgtgcacatgaggacattgagatacca

SEQ ID NO: 418517 - DNA, 597 bp, Homo sapiens
ctcccacactgaatctggcctagcatttagctagatttaaagaaaagaataaagtagatgtgatgatgtctgagtttaaaagcctaagctttatgacacctagcagtttccactttgggcttcctgagatccctgagatgtgatgtaaaggaacatgagctatcctactgaagaggccacatggagagaaagatctgagtaaatgaaggartatcagtggagataactcctagatgataaacatctaaagaagtgaaagataaaggacccaactacactagcttagaaactagacatgtgagagaggcatcttgaatttctcagcccaaattgaagccatatgagcgagctccaaaggttttaaacaaaatggacaagttatcccatctgagtcctgcccaaacaattcagagactcctgagaattaataaatcactgtttttataaaatgctaagaagttttgagatagtttcacagcaataggtaactgttacagtgatgatggcaagatccttacctttattgactttaaaagtaattcttctaatgttttaagcataatggttttatgtagttttgttttctatggttaaatg

SEQ ID NO: 418518 - DNA, 487 bp, Homo sapiens
aaccatattgctgcctctcatcagtttggatttacattttattactgagtaggcaaaaaatgttaactttttatgagtcctgctagttggtaatctaagtctgtatcaggcactgaaaatttgtaagtttgttactaaaatgatttcattttcctctataaaaatttgttgtaatatattttaaaaatgaagtgacttacrtttgctgaaagctgagatgtgagggtagcaactttttcttgtgatgcaaccagctctctccgcagtttatggatttgctgaatgcaattaaaaaaatcaatggaataggcaagtagatttttacttaaaacccagaattcaaaccaagaaagcaaatgctgtatttagctcattctaaccccattgtatcagcagcaactcctgaaaataaaggatatgaacactgactccacagtaacaagcaaatgtcattcaaaagcaaagtgttatgtgtcaaactctaatc

SEQ ID NO: 418519 - DNA, 487 bp, Homo sapiens
aaccatattgctgcctctcatcagtttggatttacattttattactgagtaggcaaaaaatgttaactttttatgagtcctgctagttggtaatctaagtctgtatcaggcactgaaaatttgtaagtttgttactaaaatgatttcattttcctctataaaaatttgttgtaatatattttaaaaatgaagtgacttacatttgctgaaagctgagatgtgagggtagcaactttttcttgtgatgcaaccagctctctccgcagtttatggatttgctgaatgcaattaaaaaaatcaatggamtaggcaagtagatttttacttaaaacccagaattcaaaccaagaaagcaaatgctgtatttagctcattctaaccccattgtatcagcagcaactcctgaaaataaaggatatgaacactgactccacagtaacaagcaaatgtcattcaaaagcaaagtgttatgtgtcaaactctaatc

SEQ ID NO: 418520 - DNA, 441 bp, Homo sapiens
gttgaacttttggaatgctgtctcagtttgaaagagaattcttgacatagtttattaactgtctagtttttgccccgggcattagattttgttgaaaawaaatggtggtcaactcaaacactctaacaaagtagagaactctaagctggaaacagtagacacttatataatttcaccaaatgtgattctacttcgttcctgttttttttttttttccggaacagatacaccccagtctaaaataacatttgctttacatttataagataatgactatgaatgatttcagaaaatacagcgtctattttattcataaatgaatccaaactcaaagagcatttctcaaattaaatagtctctattacatgattccagtatctttaaaatataatccaggaaactgtaaagtgattgaaattgtttttttaaaccataactcat

SEQ ID NO: 418521 - DNA, 566 bp, Homo sapiens
ttcctttaagcaaaagacagaattaaaagactctaagatgtaaatcataagcaacataaaccaaatagttataaaattatactctaaaaaagatgggtgcatgtaaacttaaaatattgaagtatctttcatacagattgtaggaaacagactccataaaattatagagacctctagccaaggtttagatgtcagaattttattctgtgatttactgatcacaaacaatgtcaaataaagctggggtaacatacagacctctactgataaccacagataattaacattatttacttctactttttctttctttaatgattattaataattttaattatcacaagtcagcaaaacgcttaaacaatgaaaacactgaaacacccagtgataaaagtgtctggcaaacatttttkgctatgcagcttatggaaaggaggactgccataggaatttgcagggtgtttttgacttgacttccagaaaactcctagctctgtttttcttcttcatgctgggctgcaaaatgccagaaaatgagttatgtgcaccattgcatttgggaagct

SEQ ID NO: 418522 - DNA, 605 bp, Homo sapiens
tttgctatgcagcttatggaaaggaggactgccataggaatttgcagggtgtttttgacttgacttccagaaaactcctagctctgtttttcttcttcatgctgggctgcaaaatgccagaaaatgagttatgtgcaccattgcatttgggaagctcccttattctgggaaaagytgaagaatgcataatgttgttgaatagtacaagtctgcttattgccataagcagatccaaagctgaaaaacaatctctcgttttctatgtctacttttggtatagttctagattaattgacacaaaactacctgaactgttttttactgcttttctttcagaaaacataaagcaaagtagtctaaccatcaggatatattttatttgccagaaactcttttaacctgagctttgtcttccctatattttcactacctttaaaaatatgtaaacttagtaatatagtggctaaataataaagtggctaagtggtagaatcctaatagcctttataagaaaactgttttaaaaagcactcttgaataatttacatctcaattttagatttttaaggaaagattttattttttagatcctaataattttaagg

SEQ ID NO: 418523 - DNA, 611 bp, Homo sapiens
tagttgtatgtatttatggggtgcatgtggtattatacaaacatatgctgtgtaacgatcaaatctrggaaagtggaatatcccattcttcatttaggaagaatatcatttcttcctgttaggaacattccaaatcttcttttctagctattttgaaatgtacaataaattattgttaactatagtcactctattgtgctaccaatcactagaccttatttcttctatctaagtgtatttttctttctttctttctttttaatttagtttttcttaggtttcatgaaggtagctttatccaaatattaattattgtatgtatttagaataataatgatgctacatcttttgatgttacacatagatgtaaatggcaatggtttaaatcagaatacaattccccaacaaatggcagtgctggcccaacaggaggaacactaagtcttaatatatttcttttatgtgtttttttcatgtgtgtttacacattcctcactttatccatttgcacaaaaagtacatttacctaaaaactaatcgtgatttcttaatttctagaagctatgggtaattttaatcattgaaaggagagattagaaaaatattacctc

SEQ ID NO: 418524 - DNA, 611 bp, Homo sapiens
tagttgtatgtatttatggggtgcatgtggtattatacaaacatatgctgtgtaacgatcaaatctaggaaagtggaatatcccattcttcatttaggaagaatatcatttcttcctgttaggaacattccaaatcttcttttctagctattttgaaatgtacaataaattattgttaactatagtcactctattgtgctaccaatcactagaccttatttcttctatctaagtgtatttttctttctttctttctttttaatttagtttttcttaggtttcatgaaggtagctttatccaaatattaattattgtatgtatttagaataataatgatgctacatcttttgatgttacacatagatgtaaatggcaatggtttaaatcagaatacaattccccaacaaatggcagtgctggcccaacaggaggaacactaagtcttaatatatttcttttatgtgtttttttcatgtgtgtttacacattcctcactttatccatttgcacaaaaagtacrtttacctaaaaactaatcgtgatttcttaatttctagaagctatgggtaattttaatcattgaaaggagagattagaaaaatattacctc

SEQ ID NO: 418525 - DNA, 614 bp, Homo sapiens
attgttttatggccaagcatatggtcgatcttagagtatcatccatatgcagatgaaaagaatgtatattctcgttgttggatggaatattttatagatgtcttttaggtctgtttggtcaagtgtcaagatttggtcctgaatacctttgttagtttcctgccttgatgatctgtctracactgtcaatggggtgttgaagtctcctgttattattgtgtgtttatctaagcctctttgcaggtctccaagaacttgtttaatgaatctgggtacaccaatgttgcgtgtatatatttaaggtagttaagtcttcttgttaattgaaccctttatcattatgtaatgcccttatttgtcttttttgatcattgttagtgtaaagtgtgttttgtctaaaataacaatagcaacccctgctcttttttgctttccatttgtttgattcttctccattcctgtattctgagcttgtgggtgtcactgcatgtgagatgggcctcttgaagacagcatacagttgcatcttgctactttatccaaatttccacactgtgccttttaagaggggcatttagctcatgtatattcaaggtcaatgttgatatgtgagt

SEQ ID NO: 418526 - DNA, 585 bp, Homo sapiens
gatggtctggaccattcagtgctccctgaatagccgcctgggcagcagaattctgagccttcagcatttcaatggtttctcttagytctataagttcagattcctgtggaataaacagagtttggaagctttagtacccgaaagaaaaataaaatctccctgctcatagttgaattaaaaaggtttgattttatgtagtaacaacctcctggaagatttggatgcttagctgaacttgtcaagctgtacctaataacttctttctcagctaaagtaaaggaggtggttttttgtttgtttgtttgtttgtttttcttattgtcttataaaagagatatgaatagtctttattcctttcaaaggtggcacccagaactcaccagtacaaagtaaagcaggatatcacaccactcatttcagataacacacttactaatattacctatgattacattagatatttagatatcactattgcactgttgcattgtattgtatttattgtcaactgcaaacctgaagttttgtcaaatgaatgatttcagattttgtttgaagtattttgtgcctgcaaaattgattatt

SEQ ID NO: 418527 - DNA, 569 bp, Homo sapiens
ggttaactagtttattaatttgagattataacttgcctattctcaaagtgatatttaaaagcctataaaattatttgcaatgtgaaatggtataattcaaagacagaatctaattaaaaccagtagaataatgtatataacaatatacctcagcctagataattactactgcaaggcactgaaatgaattgaatttcaaggaagctatrgtacaaagggagattgttaggtgtgttttattctcattttctgaccaggagagcataatttagactgaggagaaaactctttggcactaaattcaaggacgaatttattgccaaggtttttaaattggggtcatggaataacaaaagacaaaatcactgttcaaatagacatttctctaaaagctaagggcataacatttaatcatatttcactaaaggcatttcttcagggagctgagataaaagggtatattgctctctggtgattcaacaatcctgagaaaaggcttgtgaagtatagagcagagattcttaaactcccttccccaagttataagtttcatttgtctatttagtcat

SEQ ID NO: 418528 - DNA, 577 bp, Homo sapiens
tcatatattcaacatcattaattgaacatctattttgttgaggtcactgtgttataaagagaatgctaagcacaaagaaggccaaaaagataggatggctatctarctttaagtagcttactatcttcttctcttttaaaacttgtctattatagttaagaagtggacatttattggctttattaaagatgctactgagatttcctagccaccctttcccttccaccaaccacacacacaaacatcaattcgaagaaggcagttgaacccactcagttgcaggtgaagctgagggttggcaagatttccgtctcctccatggctggagaaacctgcccagggatgctgactacataaaaaccggtaagctggattaccattctgccctccatggcagatgcatgtgaccacttgcatgccttatcattcacataagtcattcctcctgctctgggagagtttaaggagtagggcttcaagagcagactagggccctagagaaaaactggggaaaatatgattaatgttctttacatgcaatttttacaaacgtaacatttttgggccctgggtccta

SEQ ID NO: 418529 - DNA, 584 bp, Homo sapiens
gactgaaccactgcactccagcctgcacaacagagtgagaccctggctttaaaaaataaaatgagttgcatatgtagcactcatatttctcttgaaaatgctgctctagtctaaaatcataaagccttatgattggggtatatagttcaggtgaatttccctccctatgagaaaccactaatattggaaaagactcttctctagcttttatgtggtagccaaattggagactttatctccaaccaccatgcacctgactctagctcttcatagtgctggctttcagcctcagaagttccaccaaaatctggcttctgtgtagcattgcttcatcgctgagtccctagccccaccagtaagaggctgaagagaatctctaggcctacattctgctgcaaccagaggaagggctgaaccaggaatgtaagtagcttatcaggaaagatttttgcctgggaagtagggatccctgccccctcaaagagttgctaatgytaggcaaatggccactctaccacaaagagcctataagggagtttggtccagcttctacactgtgaacatcaccctgcaaaacccgctta

SEQ ID NO: 418530 - DNA, 560 bp, Homo sapiens
aaccttgtaattgttttccctcccattggaatatcttaaacaaaaacagaatgttctaattaacccactggagacttataatgatataataaagataacttgctcttgttttgtcatttgaaagtaattaaacaaaagttccttatttagggagtgatcagggcttaaattgtttttttgttttttaagttatattcttggtgttttactggtagacgtagttgaaaatttaaatcattaggaggtaacgtgggggtagctttaaaagttatcatyggtcaggtgcggtggctcatgcctgtaatcccagcactttggaaggccaaggtgggtagatcatttgaggtcaggagttcaagacaagcctggccaacatggtgaaaccccgttgctgctaaaaatataaaaattagccggcggtagtggcgcacgcctctaatcccagctactcaggagactgaggcaggagaatcgcttgaacccgggaggcggaggttgcagtgagccgagatcgcaccactgcactcccgtgtgggcgacagagtgagaccctgtccccc

SEQ ID NO: 418531 - DNA, 556 bp, Homo sapiens
ttgccgctcagtgtggttctggatctacagcatcagggtcatctggaagcttgttagaaatgcagagtctcaggccctacccagacccactgaatcagaatctgcattttaataagatcccaaggtgatctcatgcacattaaaatttgagaagcactgctccaggccagagagaaatgcatggatttccattgtttaaaatacaaaagaataaagaaatgtggtcccaaatcactgggacatctgtcttaatgtctgtgatacagtagcaacaagttacatagttttctttaggcttactgttccattatgcggtgtgtgcctgccaggtttcagaaacacaaaactaaccactaaatttcatccttaccaatgctctttactccaaaactgatgctaaggaatacttctggcttcccaagttttaaatattgaagtgctcttgaaatttaagtgawctataactccttgcttactcacaggaagattgtattagttatctattgctgcataactatcccaaaacttaccaacctaaagtaacaaacacatatca

SEQ ID NO: 418532 - DNA, 585 bp, Homo sapiens
gttataaacatttatgaataaggtagcaaaatataaggaatctcatgggaatttgtttccatgctatttcctcattagcaatgatatatttttatttcatagcttccaggcgtttccattctgtagtccccatattataaaaactgttcaagattttcaagtgcaagtgcaaaaccccaaatacttcacaaaaagaatttagcttatatcaaaataaagccatgcagagaagggagacaattttagcctcctaccattatccttatttccatttggtgtaacttatacaagtagcagatcctttaaaaaacatatataagagcatgtcattttcctacatatgcccttcaacagtggtttctcatcacacataaaataaagccttatggtggctggcaaagccctccatgagatggtctcaggctctctctcccaacctcgagtcctcactyattcctcagaaacagttggtcctttgctgctcctttaacaagtcaagcaagctccctccagcctccagcccttgtacttactcttctcttttccttggtaacttttcccaaatattcacaaggattttctccc

SEQ ID NO: 418533 - DNA, 623 bp, Homo sapiens
agaatcactgcctttgaaaataaactccatgaatgaccttctctctgtgttgttcattgtgtactttcaaggcctagaacagtgcctggcacaaagtaggctctctaataactttttgcttgtgtttttatgttttgagtgaataattttggagagaaattagagtgggtgaggcaggaagagcaaaaactgaagcaagaacaagaacaagacacatgctgtggcctamaacaaaaaaggcaaggaccaagatatcagttccttaaacagatacacatgcaggaaaaactggtaaggttatctgcagacagactgaatcatacttgctttggaatcaacaaatcattaaggcccaaagcatgagaagccatccttctgtttagtctgtttagactttgtgcaaactcgcagggttggcagggaaggcagggggtggtgcccaaagcacctcctcattaccacaggtgtggtttgagaggcattgttgtctgtttaggtaacgtcttaattcaaggaaagccaagctttacagacattatctcatttcaccttccagacagataccccggggtggggtaggtgaggagaatgatttagaattagttggacaaaaagcaggattc

SEQ ID NO: 418534 - DNA, 397 bp, Homo sapiens
gggtccaactcccagcccaggaaaggcatgtgggaaagccagggtacagaggtaagagtttgggagccagggagatgaatgaatscaggttacagttaaactaggggagatgaactgatcttgagtggctgtctagcctatggccctatcaccttgaatgtgcccgatcttgtctgagcagctgtctagatcaacacttaagagtttgaggtttcagttcagtctgatacgtatgtcctagtgctttctttgtcctagcttactctacctggtgctgaagatttagcagtaaaccagggaggcatggtcccagccattatggagcatgttttctaaagggtagtcagacaaatcaatcattataatgaagtgttaggtgaagaggaaatgcatggtt

SEQ ID NO: 418535 - DNA, 561 bp, Homo sapiens
tatgtcctgaatggtattgccttccaggcaataggttgtcttccagggtttttatagctttcagttttccatttaagtctttaatccatgtcaagttaatttttgtacatagtgtaaggaagaggttcagtttcaatcttctgcacgcggctaggtagttctcccagcgccattcattgaatagggaatcttttccccatttttgtcaggtttgtcaaagatcagatagttgtaggtgtgcattcttatttctaggttctctattatgttccatttgtctatagttcttttttttctttgtaccaggatsatgatgttttggttactgtagctctgtagtacagtttgacatcaggtagcatgatgcttccagctttgttctttttgcttaggatttccttggctattcgggctcctttttggttctatatgaattttaaaatacttttctttagttctctgaagaatgttaatggtagtttaataggaatagcattgaatctataaatggctttggacagtatggccatttaaaaaatattgattcttcctatccatgag

SEQ ID NO: 418536 - DNA, 579 bp, Homo sapiens
aggtcagggagaacaattgttctgagacacggctaatcacagacaacctgcwggcaccacaccctgttcccacatacctcgctccacatgtagccccagcagcaggaccttatctgcacaccttatctgcacatagcccctccagtatgaacctataaaacttccctccatcctctgcctcttggcagacagcaccttctttgctgtgctgcctattgcacccttgcaacatatgtttgtactttctttaataaatttgcctttctttacctacaactgtcttggtaaattcttttttcatctgtgacactggctccaaccagtcacacccgggacagatttatttaattacttcattgaatgctaactgtgtacccagccgatctatgtgctggtaggaaggtagtattataccattattaaactagtcctttgtctctccgagaatatttgaacactcaatcatgatttttggttggaactttcatttaaaatgggtgttattctgagggctcacattaccagtatatcagaattgtgttcttccctcgggttttcataaaaacaggtagcaaaatg

SEQ ID NO: 418537 - DNA, 579 bp, Homo sapiens
aggtcagggagaacaattgttctgagacacggctaatcacagacaacctgcaggcaccacrccctgttcccacatacctcgctccacatgtagccccagcagcaggaccttatctgcacaccttatctgcacatagcccctccagtatgaacctataaaacttccctccatcctctgcctcttggcagacagcaccttctttgctgtgctgcctattgcacccttgcaacatatgtttgtactttctttaataaatttgcctttctttacctacaactgtcttggtaaattcttttttcatctgtgacactggctccaaccagtcacacccgggacagatttatttaattacttcattgaatgctaactgtgtacccagccgatctatgtgctggtaggaaggtagtattataccattattaaactagtcctttgtctctccgagaatatttgaacactcaatcatgatttttggttggaactttcatttaaaatgggtgttattctgagggctcacattaccagtatatcagaattgtgttcttccctcgggttttcataaaaacaggtagcaaaatg

SEQ ID NO: 418538 - DNA, 579 bp, Homo sapiens
aggtcagggagaacaattgttctgagacacggctaatcacagacaacctgcaggcaccacaccctgttcccayatacctcgctccacatgtagccccagcagcaggaccttatctgcacaccttatctgcacatagcccctccagtatgaacctataaaacttccctccatcctctgcctcttggcagacagcaccttctttgctgtgctgcctattgcacccttgcaacatatgtttgtactttctttaataaatttgcctttctttacctacaactgtcttggtaaattcttttttcatctgtgacactggctccaaccagtcacacccgggacagatttatttaattacttcattgaatgctaactgtgtacccagccgatctatgtgctggtaggaaggtagtattataccattattaaactagtcctttgtctctccgagaatatttgaacactcaatcatgatttttggttggaactttcatttaaaatgggtgttattctgagggctcacattaccagtatatcagaattgtgttcttccctcgggttttcataaaaacaggtagcaaaatg

SEQ ID NO: 418539 - DNA, 596 bp, Homo sapiens
ctttgttttacttattgcctattatgtggtttgtttttcaaagccttacccttagctcttcacagatattatcaaatataatcatcacaactaccttgagggataattatcataactcttcattttacaaaagaggaaactgatgttcaaagacaggtggttaartaatttacccatgtcacccacacttgtacatggagaagctgaattcaaacccagggctttttgactccaaattgcatgctcttaattatggtagagtatccactggcaactgccatatggcagcggtgaaggagtctaaatgtttaaaggaagagagtgttagaggggagccatggcatgtggctggcttggtgagctgtcacttctctcctgaagccttcccactcccagttagcctgaagtgaagatgctggcacaggcatgtgacagatggtgcaggcctgctctgccgtatgtgtgctgctccctgttcctgggcacacagctgcctgagacaagccttgccagctgggcagctgcctcttggggtgtctccaagggctgttgctcagagagtgcagtccagcattttctctacttcctcttttaga

SEQ ID NO: 418540 - DNA, 545 bp, Homo sapiens
agctacaggaagaaaacaacttatgtgaggtagagctctacctattacctggttgagaggtttctagaacaacttggcacacaggccccaggtaggcagctaatggaagactaaaaggcagaagacatccccagtcttaacataatgtaaacgaaccttcacgttacaacagtttatcttctcatccccttgtctctgcaatgttaccagcagcagcagggggagtcccatttccatctcatttaactgctgaattttgaagttcaaaaaaaatttgctgagtttaataaggtaatgcatgttatattggatgaacctaagtctcactgtccccctcatttccttctcccccttgatcaagtgctccctgtttaccagagtaatgattggctccatcattcactcttcctaacagttttcattaatgttctgaagccytgatcttggacttcagtgcaacagccctgtgttaacgttgtctattccagtggttcttaactgcaggtgatttttgtccctcagggcatattttgccatgcctggaa

SEQ ID NO: 418541 - DNA, 512 bp, Homo sapiens
tgttctgaagccctgatcttggacttcagtgcaacagccctgtgttaacgttgtctattccagtggttcttaactgcaggtgatttttgtccctcagggcatattttgccatgcctggaaacatctttgttgttacaacttgatggcgttgtaacttgctactggcatctagtgcgtagaagccagggatgctgctaaagatcctgcaatgcacacaacagccccacacaaaaaaatcacttggtcccaaagtcaataagtgctcctattaagaaactgctcygctgtaatctgttgtacaagcaagagcaagaatcatgttgttgaaaacaaccattctgggatattttctggtccttggagcacatatttctgggaagaggctctaagaccttttactgataaccctcattagacaggtgattccacttgcttggtctgtctccaatgccttcccctatctgccgcatgtagatcactccatatcgtattatttgcaaccaaggatacac

SEQ ID NO: 418542 - DNA, 549 bp, Homo sapiens
tgcctggccacagcaggtgacatcttctatacatatgcttatcactctgaggggtcagcaatttcactgtaggctgagccatttgtcataagtgacaccattttgagacatttgggatcaagaaacatgattacatatcatcggggaatttagacaattattttcrggggcagtaaaccattagggagaataaatggacggtggaggtgagaaacagacactaagaaaggtgagaggtggaggtgcacaggaagaaaggttgtcttattatgcagatggagtcttccaggtcatctttctgagctgccctcagaagaatagatgaaaagtctgtctgggtctggtgctaactcccagttttttatcttcatagatggttgatctttcctagatatttgatgagatccctagggaggcggtttaagacaattacatttcttttggaaagatgctttcttagtgagataaggaaattccagagacagtccctcccagagcttgggggacaagagggaggcagggggagacaagacaaggtaagagggacct

SEQ ID NO: 418543 - DNA, 576 bp, Homo sapiens
tccattaaattttttttcaattttggaaggcatctttgttcttagtgggaaagcagatgagtagaagtcttgatggataaacaggacgtcaattcaccagaatattcacaaagcaacaaaagaatgacaggatagctttgcatataaagtcaagaggcatgatcacttttcagtttgctaaataacccctcagtcattcaggaagaaatatacacttttcccaaaggatatcaaaagctcctactgtacaattgtgcatgcaaatcaaaagcactggttattttcttcttcccttctrcttgcaatgtttggtcttggcttagtcttgtgggctcaggcatcccctaggtggcttcctctgacctcatccctcccacatgtctaaccactcctttagtgctgccaatgcaatgcccttaaactgccctcagtccacacccaggatcctctctgcttgctccctcatcccttcactcttgttaactttccgagcagtctttatttattcatttcagttattcccgtagatgttattttcatagatccatgcaatgtgtgtgacttgccaagtccaca

SEQ ID NO: 418544 - DNA, 556 bp, Homo sapiens
aaaataatagtaatgttaaaagaaatgaaaataatgttaaatataacattaaaatcacggttgaatttctttgacttgctgtgaggtcatttttgagccagataagaaaattgtttgtcaatacacatcacaggagaaaaactctggtttaggaagaaaactctgtcttgattaagttagaatcaattgtattatatcttgattgattttcttgttttggtttaaattataagtgcttaagtaaataaacccctcatggttacctttcaaagatcatttgatctgcaaaaattttgttcaggtcacaaaatttccattggatatttctttccataygtgtcatactttccctgttactattgactgcaccccatatcatgggccactgaatatgaacattaccatcaaatcatatagtccagggtttctgacaaactgcacaaaaagaagtagaatacattgaattttgatctgaggataagtagtaagttgcaattcaggcattctgtctttccattcattaaacatttattgaccctctactgtgtggcagtcc

SEQ ID NO: 418545 - DNA, 429 bp, Homo sapiens
acaaacactaaggttgaactcataactcttatcctcaccatgctctcaaccccatccctagtagaaaggtcctctctcaccttagaacctctatgggactttacctacttggagatgagaacttggagtatttagcactttcttttgctttagttgttrtaagttttatctctatagtagacctcaggtaggattgtacctatttctaattagtattgccataataccatgcaaaccataaattgaataggcaaatggataaattagtgaaagacaaattctgacctggtgcttactatctatccaggagtaaaagttaagctaaatgaccttctttatttcatattttgttttttgtgtttgtgctgattttcttttaattttatgagataagcaggaactatcaaacccaaagtactattgatccta

SEQ ID NO: 418546 - DNA, 372 bp, Homo sapiens
ttgttttctttctctggaggagaagagaggctggcaacaaaatggcatgttaaaagttataaagaaatatcaaataattcaagggattatagctttaaagctctacaacacacgcatacaacaggacaccagttggttttgcttggttcargagttgcaaagtggtggcccttggatgtgtttcattcagcctccccagtgttcttaaaaacgtgtgtttaaatgcctttagttagacttgcatgctcaaactttccacaattgccatggtcccttcttgctgctcagtactcctttttagtttacttgcctggcatcctgtaggcatttgagttttcagccccagatgaggtggtattctgttagaggaac

SEQ ID NO: 418547 - DNA, 573 bp, Homo sapiens
tatttaaaacttttgcctagatttccattatcaaataaaaagcaaatccaggtttagctaaggagaaacattattcaaaaggactatttcgatgaggggtgggggattgttgcatatggggagagaactttgcaataggacgaatggtcccaccagaagatctgcaagcaccgcaaaggtcagatagaaaggaattttcttttataagaaggaataaacaaggctagaaagaaccagacatggggagagcgatgagcaggaaatgcctttccttgagagtcagccarttctcttaaggggccattcaagggggattggttgttcagcatattgatgctattggcaggcattttatccagattagtcaggggtttacaaacagttcagttaatcatttgtggcaatgaatggaaatttgtagtgtctgtgtctggcctgtcctaggtaaacaaaggggttattcacaagtcttcttaaagtcatatggttaagaagagtggttctgtgtagtaagcccttcctctggacaccaaaggatggaggaatttcttaacctgtgttgtcttccaggca

SEQ ID NO: 418548 - DNA, 568 bp, Homo sapiens
atgttttgataaatatgtttaaaaggtataacaatatttctgtgatttcaggaatatttcgcttttgcatgtaaacttcagtctcaataactatattttcatagtgtaatttctttctattgttacataacgaatacccccaaacttagtggcttaaaacaacagatgtttattatctcacaatttctgatattcagaaatttggaagtgacttagttgtgtggttgtggctcagcgtctcttatgagattgtaattaagatgttccttggagctgcagtcaattaagtcttgatggggcctggagaatctgcttcgaaccttgctcacatggctgttgtcagaagacctctgtttcttgaaatgtgaccatctccctaggattgctacaatatgcagcagcctttcccccagaatgagtaaacccacagagagagagaaagtgggaggcggggggagagagagagmgagcgagcaagtacaggaagccacagtaacttttattgcttatagattccaaaagcatgcagtatcacttctattttattctgtatggtagacaaattgat

SEQ ID NO: 418549 - DNA, 570 bp, Homo sapiens
ttttcagttaatctaagatatatacttggcagctgactaaaataatcttaatttaatctggaaacaacttttgttctaatcaacttcttttttcacattagtgtaattgtccatttttatttattttcctttcacaagttaacttttcttaataagttttgctgttcataattgttgacaattttttcatgtcaagtacattagagaagattaagtattttaaatcattaaaatgcaataaaagaaagagattcaaattctgggtaacattcccttttcaagcttacaaattgactaccaagaattagctgtgaaacttcacaaaaaactctgcccaaatcaaaacatctaagttcctaagggataatcaaatataataaactaatgagaacttccaaaccayggcaatatataaaagaaacaaatgaaattgtaatatgatcataaatttatatataatcttgttcaatgaaaatttgttagaacccaaaggttaatgaggccaacatcaaggtctttgttcagcatattcttaaacacatagaaaattattctcattctcatgtggag

SEQ ID NO: 418550 - DNA, 585 bp, Homo sapiens
ttatggctataggccaacagaccaaggcagaagctataatgtcttttataactcagcctaggaagtcacacactataacttccaccatattctattggtaaacaacaagtctgattctgtataggagtagccttcacaaaaggatgcataagagagatgacaatcatcaggaaccatcctggctgccagttaccagagaaaaggtccaagtctcaaggcaaccacaccagatataaagtatttgtgaaaatcaagataagaaatcatgactttctgactcacaatcttactcacatgaaatgggggtgaagaaaaggggccctatttagaaaagggtataatgattgattgacaaacatttacctgaggaaatccagaaaggctgtggagtaaagataatacttttgttgagaagtattcaggtaaaataagctcatgtggatattccaaaaaggaaaaagagcatattaaaaagaaagaagatggaatactgtgtgtgtgtgtgtgtgtgtgtgtgtgtgtgaatcrtagaattcacaaatatcatgactgatcagatatggaggatatgggtgcagaaagagc

SEQ ID NO: 418551 - DNA, 618 bp, Homo sapiens
  misc_feature (1)...(618): n = A,T,C or G
aacctaaccaacatctacttggccaactcccctcctctattattatgtttaattaaccagaaaaatcataaaaatattcttttgattttctttcarataacataataataagcaatgtgcgccctctgcgggggacctatgggagtgagcaggcctagtgtgacaaaaaagacattttgcagtctattttgttacatgacaaatatatttccaccaaatgatttactctattgtttctatttanaacccaagataacaaatagttgtattttttgtccatatccttgtatctgaaaatttaattagtattttcatcttattttttctgctcccttcattcacttggataaaaatatatatattgaacatttactatgtggcagaaataggtactggggactcaaaaatgcaaaggaagaagttctcattctacaggtgactgctgtctagactaggagtcagatgttgattgattaaatgttctacaggaataccaggatagagagaaagagaagccacaatgataccacagaaagaaagctagacatcttcattcaggtgagagaaagagtggaagaagagaaaactaatccaggtaaaacaatttcaacacaatga

SEQ ID NO: 418552 - DNA, 556 bp, Homo sapiens
ttgtttctgggtgtttctgtgagggtgttgccagaggagattgacatttgaatcagtggactgggagatgaaaacccaccatcaatgtgggcgggcaccatccaactggctgccagcgcagctagaataaagcaggcggaagaaggtggcatacccttgctcactgagtcttctggtttccttctttttccccagtgctggatgcttccttctgctcctcctgccctttgacatcagattcaaggttctttggcctctggacttgggacttgcaccagtggcttgccaggggctcttgggcctttggccacagactgaaggctgcaccgtcagcttccytggttttgaggctttcagtcttggactgagcactggcttctctcttccctagcttacagacagcctgtcgtgggactttggcttgtaattatgtgagccaattttccctaataaactctctttcatgtatacatatatcctattaattctgtccctctagagaaccttgactaataaatgagttttgggtggggaccgtaagatccaaaccatatca

SEQ ID NO: 418553 - DNA, 557 bp, Homo sapiens
atcaaaattttaaaacttttgtgcttcaaaggataatgccaagaaagtaaaaagataacccaaagtatgagagaaaatatttgcaaaagttatctgtgataagaatctgtatccagaatatataaagaatgctcacaactcaataataaatggacaaaaaatattaaaaagggcaaaatatttgaatagatgtttttgcaaacaatatatgcagaatggccaataagaacatgaaaagatagtaaatgccattggtcattagggaaatgcacatcaaacgaaaatgagataccacttcacaaccattaggatggtcttatccaaaaagactgacaatgttatgtggtagagaggatgtagagccttgtacatggctggtgggaatgtaaagtggtacagcatctttggaaaacagtctggcagttcctcaaagggttaaacaaaayaagcaaactgtacttcatatatatgaagttatatatgtatatgaagtatagttctcaagggttgggggatttggagttaaggggaatggaatgaagagtgattgcttatac

SEQ ID NO: 418554 - DNA, 572 bp, Homo sapiens
tgacatttaattgaaagagctaagttattatctcaagacctggaataaacagaagggcatgtctgggttaagayaaggggttgtggagaacaaggttcttattatgtagatgaagtctcataggtggctacccttagaggcagtagatgccaaatgtttcctattcagatacctaaaacatgccagactctcagctagactcttcaggatcggaaaaaatctggaatgaaaatgggattctctacagaatgtatatttcccctacaagagacagctttgtagggccatttaaaaatatgtcaaataaatatattttagggtaaaatagtttcatttctttcagggcctgctatttgtcatatgatggtataccagagtcaggttggaatttgctaacttattgctacaaagagtctgttctatcagtcttaagatctttgttttaaagtgaatgctgatcagttgtgtttgactccccaagaaaggagaatacaatgaggcatgtctgacccccctttttccaattatggcccaaaatagtttttcaggtttctttgaaattcccttggctg

SEQ ID NO: 418555 - DNA, 572 bp, Homo sapiens
tgacatttaattgaaagagctaagttattatctcaagacctggaataaacagaagggcatgtctgggttaagacaaggggttgtggagaacaaggttcttattatgtagatgaagtctcataggtggctacccttagaggcagtagatgccaaatgtttcctattcagatacctaaaacatgccagactctcagctagactcttcaggatcggaaaaaatctggaatgaaaatgggattctctacagaatgtatatttcccctacaagagacagctttgtagggccatttaaaaatatgtcaaataaatatattttrgggtaaaatagtttcatttctttcagggcctgctatttgtcatatgatggtataccagagtcaggttggaatttgctaacttattgctacaaagagtctgttctatcagtcttaagatctttgttttaaagtgaatgctgatcagttgtgtttgactccccaagaaaggagaatacaatgaggcatgtctgacccccctttttccaattatggcccaaaatagtttttcaggtttctttgaaattcccttggctg

SEQ ID NO: 418556 - DNA, 608 bp, Homo sapiens
gtcaactattctcttattttttaatagaatgtctttgtcttatttaacaggtttttttcccatatttcttgtaagaagctctgtgtcactgtttaccttaatgtgtatgtccacagaatcttgctctagtttttgttttaataaaaaagaagtgtccgtatactaaaactatacaaagcatatctaaaattgattatggctctaagtcatgtttttagaggcagtcaggcaaacctaggtgcattttaacattgctcttccaaatggattttactaagaaacagttgagtttcaagcaggaataaaggaaaagcagatcttggagatttaactgttgagcagatgcagtaaatgaggttttggaaataccgctgtcactktagatattttatgctgagttacctatgtgacccaatagctagagctgctgatattaaaatatttttgtaattctgttgaaaatagatgccatgagaactcttaaaaacagagtaacatacttattataagacctattttaaatatttcattctttcctcattttcatgatacctaaattttttgaagactgaaaatgatgagaacttatataaaaaggtacttgtctg

SEQ ID NO: 418557 - DNA, 608 bp, Homo sapiens
gtcaactattctcttattttttaatagaatgtctttgtcttatttaacaggtttttttcccatatttcttgtaagaagctctgtgtcactgtttaccttaatgtgtatgtccacagaatcttgctctagtttttgttttaataaaaaagaagtgtccgtatactaaaactatacaaagcatatctaaaattgattatggctctaagtcatgtttttagaggcagtcaggcaaacctaggtgcattttaacattgctcttccaaatggattttactaagaaacagttgagtttcaagcaggaataaaggaaaagcagatcttggagatttaactgttgagcagatgcagtaaatgaggttttggaaataccgctgtcactttagatattttatgctgagttacctatgtgacccaatagctagagctgctgatattaaaatatttttgtaattctgttgaaaatagatgccatgagaactcttaaaaacagagtaacatacytattataagacctattttaaatatttcattctttcctcattttcatgatacctaaattttttgaagactgaaaatgatgagaacttatataaaaaggtacttgtctg

SEQ ID NO: 418558 - DNA, 464 bp, Homo sapiens
tgctcttaaaaagacccaggggttctctctcttgatcctcaggataattttttcttctttctccaactttaaattggatggaaactcatctaaggcatgcataaaatcaactccactctgaatttagtccagaaagatagtgtttatattcatgttatagttcattttcttgcaatgtagctcatgttaataaaagtatttctgaaaggttgacagcacttctctctttgatgtctaaaatcttcagaattataacatttattctttgaatacatttttggtgtcgaatggagagaaaagagatgtttgtgttagaggaaaagaatatcwatggacagaaaggattgatttatgaactcttagaacaactactatcttttttgatattacagatatagatgtaatttccagctttaaaaaattggcagtattaaagagaatgtataagcaaactattggactaa

SEQ ID NO: 418559 - DNA, 614 bp, Homo sapiens
atatatagggttaaatgaaattcatctgatgaggatttatgatttgtagggcatgactctccagacctcttagataggaatttgggcaagataaaaaaatcagagcttagttctcatggatatgaaaggtttaccagaatgagagcacatgaaaaaattagaaaaacaaaaagtatactaaacaacttcctctgcctacacaagtgagacattagggagcacagtaaggcagtctctgagagattagaaacagctacagctragccctgggagagagtgcccctaggttagggttgtttaggaaatggtgatacaaccagagcacagagtctccttgagttcaagagacaaaacacagcgcttgaggaggtcagggcagctagattttgcaaagcagaatagcacagagaagaaacaacaaaatgcaatttctgctaagagatttccttaactctttgcctgaacactgttctaggttcacatgctttcagacaggtcttttgaggtgggtgttggattaaatgtgggcaacattgggtatggtagcttgggcttggcttgcaatggaaaatttttgaaatgagtcttgaagaatgaagaattgatataataaa

SEQ ID NO: 418560 - DNA, 615 bp, Homo sapiens
acacagctggattgcttacagctccgtgtttgccttatttagccatggcttgaacatttggctgcctttgattggctgaaactctgtgattggtacaagagcaggtggctgagcatggtggctcacacctgcaatctcagcactttgggagaccaaggtgggaggattgcttgagcccaagagctcaagaccagcctgggcaacatagtgagayccccatgtctacaaataattttaaaaattatatcaactgggcttgctgacactcctgtggtcccaagtactcaggaagctaaggtgggaggatcacctgagcccaggaggtggaggctgtggtgagccatgattgcaccactgcactgggagacagagtgagatcctgtctcccccacaccaaaaaaaaaaaaaaaaaaaaaaaagagtaggttagagtctgtttgcacaacgacttgggttaccgttcacttatggaaaaacctttaggctgaacttaaagcatgtaaggaagcagctttaggctgaacttaaggtaacatgtggaagcagtcatggacaatatgtcagcaaatgggcaccaagctctgctgcttggctctcagttattaaacacatcaa

SEQ ID NO: 418561 - DNA, 615 bp, Homo sapiens
acacagctggattgcttacagctccgtgtttgccttatttagccatggcttgaacatttggctgcctttgattggctgaaactctgtgattggtacaagagcaggtggctgagcatggtggctcacacctgcaatctcagcactttgggagaccaaggtgggaggattgcttgagcccaagagctcaagaccagcctgggcaacatagtgagacccccatgtctacaaataattttaaaaattatatcaactgggcttgctgacactcctgtggtcccaastactcaggaagctaaggtgggaggatcacctgagcccaggaggtggaggctgtggtgagccatgattgcaccactgcactgggagacagagtgagatcctgtctcccccacaccaaaaaaaaaaaaaaaaaaaaaaaagagtaggttagagtctgtttgcacaacgacttgggttaccgttcacttatggaaaaacctttaggctgaacttaaagcatgtaaggaagcagctttaggctgaacttaaggtaacatgtggaagcagtcatggacaatatgtcagcaaatgggcaccaagctctgctgcttggctctcagttattaaacacatcaa

SEQ ID NO: 418562 - DNA, 587 bp, Homo sapiens
gaatgagttttgaggaagatttgatttgataagcaagagaattttctgctttgaggttcaattatcctgaggaggatgttcaccctgatgagttacctaaagtttgaatattctgaatctatgaartcattcactagcttacaactttacattcctttgcaagcattgttgggaaggaatattaaagccaggctgatgtagtcctgataattaagctgcgagtgctggcatcccagtttttgcttttgtttttgttttgagacagggtctcactctgtcactcagtttggagttcagtggctcgatcatggctcacagcagccttgaactcctaggctcaagcaatcgtcccacctcagcctcctgagtagctggaactacaggtgtgtgccatgatgtctggcaattttttttccttttttttttctttcgtagagatgggatctcatcatcttggccaggatggtctcagactcctgggctaaagcgatcttccggcctcagcctcccaaagtgctgggattacaggcatgagcatctggcctggcatcccagattttatcatatgctctattactgactgtaaa

SEQ ID NO: 418563 - DNA, 587 bp, Homo sapiens
gaatgagttttgaggaagatttgatttgataagcaagagaattttctgctttgaggttcaattatcctgaggaggatgttcaccctgatgagttacctaaagtttgaatattctgaatctatgaaatcattcrctagcttacaactttacattcctttgcaagcattgttgggaaggaatattaaagccaggctgatgtagtcctgataattaagctgcgagtgctggcatcccagtttttgcttttgtttttgttttgagacagggtctcactctgtcactcagtttggagttcagtggctcgatcatggctcacagcagccttgaactcctaggctcaagcaatcgtcccacctcagcctcctgagtagctggaactacaggtgtgtgccatgatgtctggcaattttttttccttttttttttctttcgtagagatgggatctcatcatcttggccaggatggtctcagactcctgggctaaagcgatcttccggcctcagcctcccaaagtgctgggattacaggcatgagcatctggcctggcatcccagattttatcatatgctctattactgactgtaaa

SEQ ID NO: 418564 - DNA, 604 bp, Homo sapiens
  misc_feature (1)...(604): n = A,T,C or G
gccctaacaaattaacatattaaatggttacctccagcctaaagaatctggcagcatcgatatattaatatatagttttgattatgagacttaaccacagattatgtcctggagccagataggacaaggtacatttggcgtttgcccagctacantggcatgctagtgaccatgagtagacactagccatgactgacaactcctatcctttaagatgatgatcatggtttctggggaggagcccaggtggctaccatagaaggaccctattggatttgtcaagcaccaactgccnactcagtgattatgccagccrtgaaactcacattgttaccttacagtcacagtgaattaatacctatgagaaatgtgagctcacacaaagttttagaatatttactgcattataactcagaatatgaccacactgtttaaatattaggacacacagtggttttcaaaaactgatgcctactacaaatccatccaatcaacacatactcatctagtaaacacctttagatagagcctgtgctaccaagactacaatgatatctagatgactttgttgtcctcacaaagcataaagtcaagcaatagagag

SEQ ID NO: 418565 - DNA, 589 bp, Homo sapiens
tctgtttgacacccaatataattccctgtaattagttgctcattttggaaacataaaaattagaaagataatggatttcttgaattattatttttttttcaaggagagattgaaaatttctgagcctaggaatcttagtgcataaaacctttttaaatgagggaatggaaacatgatatttatatctcactgctctaaaggaaataaaaagtggggtttcttgaaaatgaaaaagggctaacaaaagtattggaagagtagatataaaaagtccactaaggtgagggaacatttgagaactagtggatgattgatgttagttgaaggtaagagagaaatgatttcttgcagtgggtaaagcagtacgcgcttgcaaggagtaatgaaaaatacatgcttgcacatggaaycaaaaaagagcccacattgccaagaaaatcctaagcaaaaggaacaaagctggaggcatcacgctacctgacttcaaactatactacaagtctacagtaaccaaaacagcatggtactggtaccaaagcagatatatagaccaatggaacagaacagaggtctcagaaatagcaccaca

SEQ ID NO: 418566 - DNA, 550 bp, Homo sapiens
acagtacgtttttcagggatgtgtggaagattctaaagccttttgctcttctgctataattaaacataactatatttggaataataatttccttatttattgtgcatgttacctcctttgagacaatcaaawcataattaatatcagtgattatgttttctatgcagcaaacaacttcttgaaagtgaattaaggtagaagaatacaaagggaggttaagattggccatgcaacctaaatgttttccacttctgaatagttctgaaataaatatgcattcatggtctttttgtatgtaacttacagtatgagggcactcaaaccaaaaaatgaacccaattgatagaaaaataatagagatatacaagcattcccaaaacgtttttttcccagaaacccacgtcactcacacaaacaaaaaaaatctagttgactaatgcccagagtatgaataacgattctgaaatttattcagagttcttaaatttctctggatatcatgatcatttccgctctcagtgtcacttaaagatatcctatttatttaaga

SEQ ID NO: 418567 - DNA, 550 bp, Homo sapiens
acagtacgtttttcagggatgtgtggaagattctaaagccttttgctcttctgctataattaaacataactatatttggaataataatttccttatttattgtgcatgttacctcctttgagacaatcaaatcataattaatatcagtgattatgttttctatgcagcaaacaacttcttgaaagtgaattaaggtagaagaatacaaagggaggttaagattggccatgcaacctaaatgttttccacttctgaatagttctgaaataaatatgcattcatrgtctttttgtatgtaacttacagtatgagggcactcaaaccaaaaaatgaacccaattgatagaaaaataatagagatatacaagcattcccaaaacgtttttttcccagaaacccacgtcactcacacaaacaaaaaaaatctagttgactaatgcccagagtatgaataacgattctgaaatttattcagagttcttaaatttctctggatatcatgatcatttccgctctcagtgtcacttaaagatatcctatttatttaaga

SEQ ID NO: 418568 - DNA, 574 bp, Homo sapiens
ccaggtggcctgctggtgctgtgggcactgcttttaatgagttttcagtcctgtgggaacaagagagctgaaagctggctgggcaagagcaggaggaagtgaccacagctcacagcacaggcgccttgccatgccttctgaggagcccaggatggcagtttaagcatggactctaaagtcggactgctttgaccacatacyggctctgagacctcaggaaatcatttaactgtctcaatttacacaactgttaaatgggaataataataacattccatatccactttacagggttctaatatttctgatttttaaaattgtattcacctagaagacataacatagtgcctggtacctaacaagagccatatggtttttcaatagattttttaaataaaataagaaatggacaaacagaatcaaacaaaattgtcctcaaagacatattacatgttctgtgtgttcttttacctttcaacaaaatattttatagaaggaaagaaactaacacaaatggggtcaggtaggaaaaactacttctactttgttgaaatagaggcacctgttataatca

SEQ ID NO: 418569 - DNA, 502 bp, Homo sapiens
caaattcatcatctgtttcagtctttgaaaatgattaaacatcactttctttccctttatagcaagatccaagtgataaccaatccatcagcttatctgccaatrtttaacaacagcattttgcattcattatgtcctacttaaatcattcttttaaaaagaggaataatttaattctgtctcttgacagcagagacattaaatggtgtgagtgtttctctgacaaaacaccaagagcatatccatgaaatcaagccagaagaatgccaatccagaacaagaaatacaacaactagcttccagaaaaatcttttcattttcatatcctgatactaaaacctggaggagacacaacaaaaaaagaaaacttcaggccaatatccttgatgaaaggatttttgcaaaaatcctcaacaaaatacttgcaaactgaatccagcagcacatcaaaaagctaatccaccatgatcaagtagactgcaaccccaggatgcaaggttgg

SEQ ID NO: 418570 - DNA, 502 bp, Homo sapiens
caaattcatcatctgtttcagtctttgaaaatgattaaacatcactttctttccctttatagcaagatccaagtgataaccaatccatcagcttatctgccaatatttaacaacagcattttgcattcattatgtcctacttaaatcattcttttaaaaagaggaataatttaattctgyctcttgacagcagagacattaaatggtgtgagtgtttctctgacaaaacaccaagagcatatccatgaaatcaagccagaagaatgccaatccagaacaagaaatacaacaactagcttccagaaaaatcttttcattttcatatcctgatactaaaacctggaggagacacaacaaaaaaagaaaacttcaggccaatatccttgatgaaaggatttttgcaaaaatcctcaacaaaatacttgcaaactgaatccagcagcacatcaaaaagctaatccaccatgatcaagtagactgcaaccccaggatgcaaggttgg

SEQ ID NO: 418571 - DNA, 502 bp, Homo sapiens
caaattcatcatctgtttcagtctttgaaaatgattaaacatcactttctttccctttatagcaagatccaagtgataaccaatccatcagcttatctgccaatatttaacaacagcattttgcattcattatgtcctacttaaatcattcttttaaaaagaggaataatttaattctgtctcttgacagcagagacattaaatggtrtgagtgtttctctgacaaaacaccaagagcatatccatgaaatcaagccagaagaatgccaatccagaacaagaaatacaacaactagcttccagaaaaatcttttcattttcatatcctgatactaaaacctggaggagacacaacaaaaaaagaaaacttcaggccaatatccttgatgaaaggatttttgcaaaaatcctcaacaaaatacttgcaaactgaatccagcagcacatcaaaaagctaatccaccatgatcaagtagactgcaaccccaggatgcaaggttgg

SEQ ID NO: 418572 - DNA, 502 bp, Homo sapiens
caaattcatcatctgtttcagtctttgaaaatgattaaacatcactttctttccctttatagcaagatccaagtgataaccaatccatcagcttatctgccaatatttaacaacagcattttgcattcattatgtcctacttaaatcattcttttaaaaagaggaataatttaattctgtctcttgacagcagagacattaaatggtgtgagtgtttctctgacaraacaccaagagcatatccatgaaatcaagccagaagaatgccaatccagaacaagaaatacaacaactagcttccagaaaaatcttttcattttcatatcctgatactaaaacctggaggagacacaacaaaaaaagaaaacttcaggccaatatccttgatgaaaggatttttgcaaaaatcctcaacaaaatacttgcaaactgaatccagcagcacatcaaaaagctaatccaccatgatcaagtagactgcaaccccaggatgcaaggttgg

SEQ ID NO: 418573 - DNA, 274 bp, Homo sapiens
acacatgaaaggggatatggggaaatgtagttcagaggagccaagtggttccctgcagagtggagacagaggatgcagggggtgaatctggaaggtagcttgsggtcacaccagagggaacgtcgactacccagcatgttagtttttctccactggccctcacttccactcaccttcctctcttttcttccctgctgtgtgcttggggtgggggtggttcataccaatccatggcttcacctgggttctcttgctgctggcttctggctgggcg

SEQ ID NO: 418574 - DNA, 536 bp, Homo sapiens
tcaggtacctcagtgcaaagtttaatgaggcagtcattcttgaatgcatttcatgaccccctgagtgagtggctccttacgagtaaggcacctggggcttcaggttcatgcaagagtgtgcacccccttagcttctatgccctagscttctggcttgagcaagaagctcaagccctgtggggaactgtggttggtcagacctatggacaggaaatgacaaggtcctgggattgggcatcagagttacatgaaacaggtattggtggaatagtggttcctctgcggaaacattgaatgatgttacaagaagtgggaaagtatgctgggcagacaaaaataacagaggtccactagaaaagtatctttctgatccccatcttgtaaatgaaaaaaatgggactcagaaagtgacatggattgtccaaagtcacaaagctggtaagtgactgaactgggagctgtaactttcatattaatgcaatagattccaaagctcgtgctcttttccttgcacaacactgtgtgcagtgtatgtg

SEQ ID NO: 418575 - DNA, 603 bp, Homo sapiens
tcggtgcctcagtttcttcgtctgcaaatgtcagtaataacacaccagcccacagagccacagtgaacataaaaaagctcacaagcatatcatgagtgcttagaaycatgcctggcacttagtagatgctagaggtgctggctgtggctcttttgaagtctcctcgggggacagaggagagtgcaagaataaggcatgtgatgtggcccaggacatcaacaaagctgaggtcacttcctacagcctcccaggtgtcggcactttcttgtaggggagctgagtacagtggaaatcgaagtcctctctctgcgcagagggctggtaaggtcctgcaggagagtagagctaaaagggtggggaagggacttcaccaggttgaccggcagggcaggggcttgctggcctccccggctctgctccaatgtctttttctagctggggctcactgttgtgttctgcctatgggtgctcctaccagcaccacaggcaccttcccatggctgtccctcttcgtgtgaatttcaaggacaaacaaaaagagcagagagtctggactctctgcagataacagcaacagcagcaatcctttattaagcacctact

SEQ ID NO: 418576 - DNA, 603 bp, Homo sapiens
tcggtgcctcagtttcttcgtctgcaaatgtcagtaataacacaccagcccacagagccacagtgaacataaaaaagctcacaagcatatcatgagtgcttagaatcatgcctggcacttagtagatgctagaggtgctggctgtggctcttttgaagtctcctcgggggacagaggagagtgcaagaataaggcatgtgatgtggcccaggacatcaacaaagctgaggtcacttcctacagcctcccaggtgtcggcactttcttgtaggggagctgagtacagtggaaatcgaagtcctctctctgcgcagagggctggtaaggtcctgcaggagagtagagctaaaagggtggggaagggacttcaccaggttgaccggcagggcaggggcttgctggcctccccggctctgctccaatgtctttttctagctggggctcactgttgtgttctgcctatgggtgctcctaccagcaccacaggcaccttcccatggctgtccctcttcgtgtgaatttcaaggacaaacaaaaagagcagagagtctggactctctgcagataayagcaacagcagcaatcctttattaagcacctact

SEQ ID NO: 418577 - DNA, 574 bp, Homo sapiens
tccatgcaaagtgacttttgcacttgctgttccctatgcctggaatgctcttcctttatagatgctcagggctgctccttcaccttcttcaggtctttgctcaaatgtcacctccttttggtatgtgttcaatgctcccttttccaggacaccttccggactctacaattgcactactctcatccccaactccctccctaccctgcttttgttctccatagcagttatcatcatgggacctactgtcagaggcgtttgaaccagagygactccatcttgaacaggagctggggagaatgaggctgagacctgctgggctgcattcccaggaagttaggcagcctaagtcacagaatgagataggaggtcagcaggactggttcacaagatacaggtcacaaagatccaattcatgaaacaggatgcagcaaagaagctggccaaaaccaagatggcaaggaaagcgacctctagttgtcctcactgctcattatatgctaattctaatgcattagcatgctaaaagacactcccaccagcaccatgacagcttatcaatgccgtggcagcatcc

SEQ ID NO: 418578 - DNA, 635 bp, Homo sapiens
tggggttatggatctttttgaggaagatcacagaggtaaactcctccacagactgcaaagcaataaggttgtaaccccataaagggagagactttattctcaatacatcatatcaagggtgcatattatcaccatgacttaccactgctgatgtagccttcatctcctagctgagggagtgtttgccagaagcttccttcactgtgaagctaatcttttccttccttgccttcctctttgggaggaagtcactagatactgcctacattaagaggtgrggagtaatgctttacctccttgagggagaagtagctacataaatgatttgaaattctgcaaatatgatttgtctattctcccctcatttatttattattgagtcacttattttttatctgtatgggctcatgatatttatttcatactttggattataatctaataccactttattttgtaccgaaattgctctagcttgacccattgtgtgctctttcagttggcaggggatgggggataaagggatcttatatccaaggcctatagtagggactactgaaatgcagaccaaatagggtcccagcaagccctcaggggatctgaagcacttgcaagacctgaaattgaagctttgt

SEQ ID NO: 418579 - DNA, 349 bp, Homo sapiens
gtagggactactgaaatgcagaccaaatagggtcccagcaagccctcaggggatctgaagcacttgcaagacctgaaattgaagctttgtcagcaaggagatattgctgaacttctctgaaaacarctgctgtgcctttctcctgctgaaagaaaaaccagaagttaaaccaatgatcgatgccagtagtggtgaaattttttcttatttttttctctaatgcctttgtaaactgaatcctatagtatattaatagattcaaatcttttataagttcatttatagatattctgtgaaggggagtttcctctcccaaactggactgaagctgggacaggagacagggaag

SEQ ID NO: 418580 - DNA, 522 bp, Homo sapiens
gggtcttgtttttgtttttttttttcctatgccaaattttcctccttttacagtgagttttattcctctctcttaactgaagggctggacatgtcctagcccagactctacccgtgaagacttggcctactgtgagcacctctccgactcccaggaggatatcacctggcgaggtcggggcagggarggactggcacctcagcgtaaaactaccaaccctttggacctggctgtgatgcggctggctgccctggaacagaatgtagaacggcggtacctgcgggagcccctctggccaactcatgaggttgtgctggagaaggccctgcttagcacacctaatggtgcccctgagggcaccactacagagatgtgagtgactcccaccctccattcttggtcttggagagaaagggataagttccctctttagtggatccgctccttctccaaagatcaccactttctccctccagatcatatgagatcacccctcgcattcgtgtctggcgccagaccctc

SEQ ID NO: 418581 - DNA, 564 bp, Homo sapiens
attcattctaccaggtattaggtggccacagggcttcccataccaggtccccaaattccaactggtttatttacagagccctttgtctacatcatctcacttgcagcctccccatgaaagcagcaaaatccccagtgtgaggattcctgatctgcagatgagggagatggttgggtgggagggagaagtgactgaggacagcagtgtcatagattacaaccgctgcgtcctccacctgacccacttaaagaagggaaaggaggagggattggggagggttcactctgcatcgcccgcacactgatgccacggctcacccttccaggctagcacctgcattagccaacactactgggaggtagcagagctgccatccaaccctcctggatggctgcactcttcttcagccctccagcccctggygtgctccgtcccacacagagagagccagcaggaaggagggcagccaggtccctgtaggtgacaagatgagtgagctgtatctaagaactcggcagctcagggttcagaaagagccgaggtgtgagccttcaagagacaggc

SEQ ID NO: 418582 - DNA, 470 bp, Homo sapiens
gaagagtgacaaaaacaaaaagaygaccatgagaagaagggcatttttaaaaaaaaaggattaacagaaggggttaagattgaggcttttggggagcagctggtaaacagaaaaagaaattggctaacaaataatttggatgaaaattatgtagtaaagagattggaaaaaatacggcttcagaacaataatgaaccatttttgataaaagctagttcctggaatggattgcctctcatttgtattatatcaaaagctgtttggtaatttaagggcagctggtgaagatctggtgaaagatcacaaacagaaggactaaaagaaaggactcaaggagaacattctctcagtctgaaaaaaatacagtcggatttgtatgctgaaatgcccccaaaacaaatgattctgagaaatgaaaccactaacagaaatgagttgagaaaatgaacgtaatggagtatctcagagtt

SEQ ID NO: 418583 - DNA, 470 bp, Homo sapiens
gaagagtgacaaaaacaaaaagatgaccatgagaagaagggcatttttwaaaaaaaaggattaacagaaggggttaagattgaggcttttggggagcagctggtaaacagaaaaagaaattggctaacaaataatttggatgaaaattatgtagtaaagagattggaaaaaatacggcttcagaacaataatgaaccatttttgataaaagctagttcctggaatggattgcctctcatttgtattatatcaaaagctgtttggtaatttaagggcagctggtgaagatctggtgaaagatcacaaacagaaggactaaaagaaaggactcaaggagaacattctctcagtctgaaaaaaatacagtcggatttgtatgctgaaatgcccccaaaacaaatgattctgagaaatgaaaccactaacagaaatgagttgagaaaatgaacgtaatggagtatctcagagtt

SEQ ID NO: 418584 - DNA, 574 bp, Homo sapiens
gcttaatttttgctggtctgactgtttcttttctttccaaacattctgtattacagttttctaaaagatctaataatataggtccacagttagaaactgtcaatggttccccactgctcacaggataaagtctaaatgctttatcagtatatacaaggcagtatagagcttatggcgagccccagtgggagaatcataaaataggccttgggattctggagcaagtccatgtcatctgcagtagaagagtaaagcccttttaagaaattgcccttggcatgttactgattcctgctaacaatggagtgttgcccatgtgataatgagtgatcctgaatctggaactacccatcatgagctgggttctattgggcatgcccagtcataaaggcactcacacccagcagagccccagccrgcattgctacctgggggcttgtggactggctggtccataggcacgagatcctgtacagcataacatcttcccatgctgtcacagaaaagagatgcaagattgggcccaagaccatggaatccagtgttgtatcacatatcgcaccactcataagca

SEQ ID NO: 418585 - DNA, 561 bp, Homo sapiens
acatccaggtttgtttccagtttagagatattattaataaagctaccatgaacatttgtgtagaggttgctgtgtgaatataactttttacttctctgtatgagtgaccagaagtgaaactgctgggttatgtggtagttgcatgtttagttgtttaagaaactgtcaagctgctttccagagtggctgtaacattttatattcctaccaacaacgtattgagtgatctagtttctcctcctttttactagcatgtggcatttttcttattctttattttaggtattctgatagaagtatcataatatctcatgtttgaaatttgcatttcccttatggctaatgatgttaaatgttttcatgtgtttatttgccatctggttatcttctttggtgaaatgtctrttcatatttttcctattttctaatgatgtattttgtttactggtgtgttctgaaaattatttatatattctagatagcagttctttgtcagatatgtgatttgcaaatatttttcccatttcatagcttgcatttgcattctcttaacagggtctt

SEQ ID NO: 418586 - DNA, 642 bp, Homo sapiens
tagggagggggtctgctaacataatctcaagacagccggccaccatgctaaccatacaaatgacagttcagtactaaagtggatccctgcactgcagctcaaagagagagagggcttggggtcctgaactaacatgacatccatcagtagtcaggagcagggggagtgtctgactaattagaaacacgaagccagtccacctccactcaaggcctggctcagggagagatcaactttgccttgaacaaaagagcttacagaccaaaaataaagatacyaaacctaaaccccattgcgctgacaggtcaaaactcttaatcctggtgaccttccatgctattcagatgcaggcattgtgatgaaaacgtccctggattcagtttgtaagctaagacgcagacaaccacagatgttccctcaggccattcattaatgcatggggtcattttggcttctctaattttcgtatatctgtaatttggttctcatcctctaaatgcctaacttggtcattctccctgaaaccagttccatgcctagctgtgactgtttttatgccacaaaattttaatctcttcaggtgtcttaatttcagtaaattcaaggaagcagtatcaaatcaactcggagagacaggagtag

SEQ ID NO: 418587 - DNA, 648 bp, Homo sapiens
tactaggaaatcatccccactattatccaaaagcaaatggaccaatgctttaaattgaaaagttataaatgtgctcaatgtatgatcacttcattggaatttaccaaactggttctttctatggtttttacacagtacatggaaggctttgacccataatgactcagtaagatgaatgtttctctcactcccatttccaagtactgtttcctttagtcatctgtttttggagtctctttaaactgaactgagtttcatctttggactgtacatgtggcaacgcacatgatcatcaaatctctctgatgttaaacagatgttgagtttaattttgtgatactctgataaaaaggattaaaagaaggctcacaaaagcaatcaccctaccccccaaaaaaactgaattttaacaataatcaatgagccaaaagatgtggttaagtttatcctagtaagaaacaaaaatattacaaaatgaacactcygtttttgacccaaaacatttttactgacctattaaaactcaaggcattattcagggttagtcaaccggcatagaaaagttttaatattttcctgtaatttcaaaagcacttattaagtttaggtaatgaaaaggttttggaaatagtggtgatagttgcaaaa

SEQ ID NO: 418588 - DNA, 672 bp, Homo sapiens
tcatttattttctcagtcatcagaatwtttttttaaaataaaaagcttaactacagtacattaagcacttagcttacctctaaggatattttagattttaagtaggggggcttaattaaaatgaaaatatgtattcaaatatcatccattaagataatccatccaaacacagaatgtttaagggatccttgaagctcataaggttacactgatttttacaagaataagttaacactctagaagtttaattcttagggtggtgttgcaacacagtgggggtgcaatcacagggagtaatattttaattgcaaaataaatgtgacaaatatccaacttttataactgtaaacttcaaaaagtattatcgacaaatgctactgactacaaaatcacaccacagtggttagaggacctccaagtcttatattgtacaaagttaggtgaggcactttgcaaaattattttgcaaaaaaggttgaaaatgtcaacctttaatagcaagtttgaattaaaatagttatgtacctgaattttaagaccaaaattaacaaaatatatggcaaatatttaattgaatgatatggaaagtaatcaaagaaaatatatttaccatctattttggcacattttttctgtgaccacaacacaagggctaatatattctttatgtcc

SEQ ID NO: 418589 - DNA, 611 bp, Homo sapiens
catttttttcttcctaacctaaagaaagatacgttcattccctcattagctaactacaccattttaaggaatcttttccccttcttcacctttatggtttacactttgactgaatcaacttccaggccaaaatgacattttatagtctgctcataaacttatccacctgacagtagttttgactgctcaaaggaaccactgccaaagtctacttgattcttatggctagattggaagctgattatcaggaatttagggttctattcctgtccggggacccaaccttctttatgcctcattttgcacctcgataaaatgggtaactaagtcctttgaggctgtaatattccctgccaaaggctttaaataagtgtaaggtgttactgctcattgattcacaaagttttttaaggtgttattgctgttacttgagtaacaggaaagaaccttcttgaacttggaaagaccaaccaataacttccattktgactattccttttattttatgaagttcaaatcaataaactttcagtggttttaaatgtaaattattatataagtaatacaaaatcatctaaatctccaaatttgtctataataatatagtatta

SEQ ID NO: 418590 - DNA, 627 bp, Homo sapiens
atagtctgctcataaacttatccacctgacagtagttttgactgctcaaaggaaccactgccaaagtctacttgattcttatggctagattggaagctgattatcaggaatttagggttctattcctgtccggggacccaaccttctttatgcctcattttgcacctcgataaaatgggtaactaagtcctttgaggctgtaatattccctgccaaaggctttaaataagtgtaaggtgttactgctcattgattcacaaagttttttaaggtgttattgctgttacttgagtaacaggaaagaaccttcttgaacttggaaagaccaaccaataacttccattttgactattccttttattttatgaagttcaaatcaataaactttcagtggttttaaatgtaaattattatataagtaatacaaaatcatctaaatctccaaatttgtctataataatatagtattacacatkatagtatttatataatacctcttaaatacttaaacataaaagtttattcaatatagttatagttccaagaatagcctatcatatcttaattcctgaatacagactttcctaatcattggaccttttcatattttatcttattacatttata

SEQ ID NO: 418591 - DNA, 603 bp, Homo sapiens
agttattttgtgttatatttgacctagaatcacattatacctttttaatatttggctgcatagttatagtttttatagttttcacaaacagcaatttacattttattcacaaagataattgattactcatagatttataataattttttaatgatttttaaacatactgtattgtactcctattatgcaattttaagcaattatgatgtagacagtcatatacatgtaaaatttttagtttaaaataatttatcaggagtaattttaaatcaactaattcacatgtattttaatagaaaataaatacaattttagaataatcctgttattttgtatatagtcaaaggaaatggaatcatcatrtcaaggagatatctgcactctgatgtttattgcagtgctatttgcaatagccatgatatagaatcaacctaagtatccaacattggatgaatggataaaataaatgtggtatatagacacatttttatacatttagaataatcctattactgagtgtatagtcaatggaaatagaatcattatgtcaaagatatctctgcagtctgctgtttattgcagtgttatttatgatagaatacg

SEQ ID NO: 418592 - DNA, 603 bp, Homo sapiens
agttattttgtgttatatttgacctagaatcacattatacctttttaatatttggctgcatagttatagtttttatagttttcacaaacagcaatttacattttattcacaaagataattgattactcatagatttataataattttttaatgatttttaaacatactgtattgtactcctattatgcaattttaagcaattatgatgtagacagtcatatacatgtaaaatttttagtttaaaataatttatcaggagtaattttaaatcaactaattcacatgtattttaatagaaaataaatacaattttagaataatcctgttattttgtatatagtcaaaggaaatggaatcatcatatcaaggagatatctgcactctgatgtttattgcagtgctatttgcaatagccatgatatagaatcaacctaagtatccaacattggatgaatggataaaataaatgtrgtatatagacacatttttatacatttagaataatcctattactgagtgtatagtcaatggaaatagaatcattatgtcaaagatatctctgcagtctgctgtttattgcagtgttatttatgatagaatacg

SEQ ID NO: 418593 - DNA, 538 bp, Homo sapiens
ttttgaaggttctcaccaggttatgggttcactctaccttgattgtatcagtatacaacacagatatgtattgaaatatcagattttagcccataaacgtagaattacaaggtatcaattaaaaattaaataaataagctataaaataaaaaataaatgcaatggtttatatatgccttaggtcctgatgtaactgtaatcttgctttactaacagccatttaaaccaagtaatattttgtaaatattgtttatgaaaaacataattaacattaaggtcactctgtgacctataaacagtttatatataattgaaattatactttkgttttctggtgtgtttcaggggcttcctttgaaggataaggtacatgtatgtatgtatgtatgtgtatccatatgtctatacaatacgcacacatatagatacatatacatacatatacacacgcatatacgtatatgttttgtatgagaggaaaagagtaagacacattctcactcatttttgcattttatactgtccttcatacattagc

SEQ ID NO: 418594 - DNA, 641 bp, Homo sapiens
taagtggaatttgtttccttattctaataacagacctggtcatttgaattccttaatatccaatcttaacaaaatgctaataatgctttaaaggctgtagtataattcccctgaatcaactgaaatataattttagaaaaaaaaagtctaatagkgatgagaggtaataatacgtataacatatcttataaatggcatctaagacaaaacaaaattataattatcttcatttcatgatgcaataattgttgccaggaaaagaaaataaggatgtgacagcttaaaagtctatcaactgaaaatgtataactattgctgctgagaaatttcataaaacatattccactcacctccccaaacagcaggctgttcttcaaacatgttggaagactagtagcaaattattctttttgttttgatttatttaaagccagatgagtttattgacaaacatccaactcctctttctatatatatgagtactggctttttagttaaaacaaacacaaaacaaaacaaaaaaggaaaagaaaatattcatatttgttaggtttacgtgaactgtgtattgtaacataaaaacaaaggcaaaatgtgcctttttagtgcattaattatgatccatcgtttactctatgatt

SEQ ID NO: 418595 - DNA, 591 bp, Homo sapiens
tattttcctagctatggtgacgaatttgcaccaatccatctacatagtctcacccagttctccttgtcaccaactgcacacatttgccagccagctggctggggtgaggggtgtatcctgtgccacataacaaagagaagcttgctggcctgcactgggatgaaatccatgacctccaygacctccacttcattaacaatatgggtagctaagtgagctaactggccattgattaaaataaatgtatgcctcaccaagccgaaacactgtcaccaaccttcaatatatgtgttaaattttatgaggaacaaatttcatgaaattcaacactaccatcattacaatgaaactagtatagaattgaaggggaaaatgagctccaaaaagaaattaagtacttaaggctaattcataaatttaggatagtgtttaattcagttgatttaagtcaactttaaaatgaaattcctcttaaaaagaaggacttgaattaaataaaagtctaacaaaatatttttaatgaaaattattgaagacctacaagcaaatatctcttatagacaggaacagcaagtctagcgcttaacaatg

SEQ ID NO: 418596 - DNA, 591 bp, Homo sapiens
tattttcctagctatggtgacgaatttgcaccaatccatctacatagtctcacccagttctccttgtcaccaactgcacacatttgccagccagctggctggggtgaggggtgtatcctgtgccacataacaaagagaagcttgctggcctgcactgggatgaaatccatgacctccacgacctccacttcattaacaatatgggtagctaagtgagctaactggccattgattaaaataaatgtatgcctcaccaagccgaaacactgtcaccaaccttcaatatatgtgttaaattttatgaggaacaaatttcatgaaattcaacactaccatcattacaatgaaactagtatagaattgaaggggaaaatgagctccaaaaagaaattaagtacttaaggctaattcataaatttaggatastgtttaattcagttgatttaagtcaactttaaaatgaaattcctcttaaaaagaaggacttgaattaaataaaagtctaacaaaatatttttaatgaaaattattgaagacctacaagcaaatatctcttatagacaggaacagcaagtctagcgcttaacaatg

SEQ ID NO: 418597 - DNA, 610 bp, Homo sapiens
tccttgtcaccaactgcacacatttgccagccagctggctggggtgaggggtgtatcctgtgccacataacaaagagaagcttgctggcctgcactgggatgaaatccatgacctccacgacctccacttcattaacaatatgggtagctaagtgagctaactggccattgattaaaataaatgtatgcctcaccaagccgaaacactgtcaccaaccttcaatatatgtgttaaattttatgaggaacaaatttcatgaaattcaacactaccatcattacaatgaaactagtatagaattgaaggggaaaatgagctccaaaaagaaattaagtacttaaggctaattcataaatttaggatagtgtttaattcagttgattwaagtcaactttaaaatgaaattcctcttaaaaagaaggacttgaattaaataaaagtctaacaaaatatttttaatgaaaattattgaagacctacaagcaaatatctcttatagacaggaacagcaagtctagcgcttaacaatgataagtttgctcccttgtcatggatgtactttttttttaaatacacatatatacacaaatatcagcagcaaaggaaggg

SEQ ID NO: 418598 - DNA, 581 bp, Homo sapiens
tattttttgcaatgtgttatcctatctaactgtatgtcttagatatgtaagaggaggacttaaaaactaaagaatgttacctagttgccaatacaaaaataaatactggctacagtttacaagacaccaggtaagcaagtatattctgtcacagattttcttgtctttgcctgaagaagaaaaattgtcaaatcctgcaaccaggaatattttcgtttaggaaacagaatwtaacagtaaaaatgtaaggcaataagaaataattagctctccaagaacatagaaagacctgcctagcgcacaaacctccctcttttttatttaaaaagcttagtgattgagttgtgcaagcttgcaagcttccatgcagtgggtccacttacagtcaaattcccaaaggctggactacttgcaatagccttcactgatcccctggctaatgagagctctgagtatgtacttctcttgtgatggcattttcacctttcctgccacatatctttccttaaccctcaggcttactttacttcaatcttcagtctcccgcccacagcaactccctgggatcccttgctgttttt

SEQ ID NO: 418599 - DNA, 575 bp, Homo sapiens
gctgtattgctttttcaatcacaaacacataggtgaattcacaaatatggaatcagcaagaaaacagggatcaactgtgcatacatgtataattatcgaaaatgttttatcaaaatatacattactctaattctccaacataatgttctcgaccagttcattcattcagcatatatactgagcatatacagtgtgaaaggcactgttgtcagcactacagatttagtcatcaacaaaacaggtatagtccctactttsattgatgatacagtatatttttgtaaaagtgaataatatgctaagtgatgatatgcaccataaagaaaaagcaagagaaaaatacagactgacattgatggaacttttttacataaagtgggtgaggaagacctaactcgtatggtggctttatagtagggacctgaaggagacaaaggagtgagccctgtagatatgagagaagagcattcccaagagaggaaactgcaaatgcaaaagcctaggagagtttcatgtttaaagcgttgctcagagagggctaggattttaggagatgaggtcagaaagttagaaag

SEQ ID NO: 418600 - DNA, 528 bp, Homo sapiens
acttttttacataaagtgggtgaggaagacctaactcgtatggtggctttatagtagggacctgaaggagacaaaggagtgagccctgtagatatgagagaagagcattcccaagagaggaaactgcaaatgcaaaagcctaggagagtttcatgtttaaagcgttgctcagagagggctaggattttaggagatgaggtcagaaagttagaaagtattatagagtctttaggacataagcccatgatacccaaaatctcttttataaaaaactttctaattttttttttaaattctttctcctctaaagacatgaattrccttgtgaatgatataaacacgattttgttattaacaagtgattgaggtacttaatccctacttcagggcaacttctgggtccatacaaaaacttacccagaatcacctgctccagtttaagtttcaatattaggacaaggacttgcagtgtctgctgaaactttggtttaacttttcctggggaagtgaaagtaggattttcagcta

SEQ ID NO: 418601 - DNA, 528 bp, Homo sapiens
acttttttacataaagtgggtgaggaagacctaactcgtatggtggctttatagtagggacctgaaggagacaaaggagtgagccctgtagatatgagagaagagcattcccaagagaggaaactgcaaatgcaaaagcctaggagagtttcatgtttaaagcgttgctcagagagggctaggattttaggagatgaggtcagaaagttagaaagtattatagagtctttaggacataagcccatgatacccaaaatctcttttataaaaaactttctaattttttttttaaattctttctcctctaaagacatgaattgccttgtgaatgatataaacacgattttgttattaacaagtgattgaggtacttaatccctacttcagggcaacttctgggtccatacaaaaacttacccagaatcacctgctccagtttaagtttcaatattaggacaaggacttgcagtgtctgctgaaastttggtttaacttttcctggggaagtgaaagtaggattttcagcta

SEQ ID NO: 418602 - DNA, 589 bp, Homo sapiens
gggatggtaattataatgggcactgtgtatctctggkggcagttttacagcatttagcctttgcagaagtagcttttaaacattttagctatttattttttctgtttgcaacatctgtacaaatgatagtaatatgatgtttctttcatgctaatacaaaaaagaaaatgtctgctacatagtgccttctgagctctttgtaaattttagtaggaataatgtaggcactgctgcctcctgagaaatcttaccatattcctcagaagcctatgattacttttttaaaattccgttagcatacatcaccattaccaaacagttaaatttgttattaatttgtgaattaaacttgtgagtttgttgccttgacagaatttggttgttgattttctcttcactgaaatgttggttataatatcagccttcatagccaatcaacaattatctactttctcttgtttggctatagttaactaccctgttttgagaaaattaaataatccttagttctcaccattattcaggaaaccatgtgctatacaatattaaaacagtatttaaaatgttagtataatttttctgttgaaca

SEQ ID NO: 418603 - DNA, 482 bp, Homo sapiens
cacatttctcctgatgcccaattggctttgagttatgaaatgtatggcaatcatagctgcagctattcagtgaatctgcctgtcacttaaccaaactaaagtataaagatgatccaaataaagtttggtaatgcatcttgaagagaacttatgtacccctttgagttacatgtttgtatataaaggagaaagggccacagaatgcatatatgtgggggttcttttttggtccacctgtttccccctgcaattattggtaatgacactaaatatcagtgtatctgtytaaagtccattgtgcatgtcattaactggccttagactacatcttgtctggctaaaataagacctactagtctgtcctggctagttattcaaaattggctgagtccaggactcggggggcataaatgtggtcaatatttacaggtggccttaatcctgctgcttgaaatcctattaatagtagccttagttaaatg

SEQ ID NO: 418604 - DNA, 584 bp, Homo sapiens
aaatactcaaaaaagacttggatagcttggccatggtattatagctagtaaacagtagataaaggatattattcccaggaaaacttaactataacaaaaatatctgtcctgttctccaatcttatgaacaccaggtacttcctaaatccttatattctatttaaaaaaaactgtttgaaagcattaacctaagaatgaaggcaattcccccaaagatcatataatgggaacagttttttcatagatagggtaactatataaattttcatccaatcttgtatgcttgggaatgtgaaaaggggtgctattaataattaggctaggacaacatgagtaaacacagcatttcctgggaaaactggggaaagaacggggaagaggatgtgcattttaaaataaaaactattttaaaagcactgactgagtactctatgtgagttttctcattttactrctcacaactgcaggtatttgtacatcaatttccccaaaagaatacagattctctgagaagataagtgctcaagcaacttctcacaaaattagtaactgatgagccagggatttacagccaattctgtcca

SEQ ID NO: 418605 - DNA, 619 bp, Homo sapiens
cttgttcccagttctttcttattctacttttcaatttaaggaaatttacaagttgttgaattcagaagtctggtatgctccaatcaatatcaacctttccttgtagaataaaaaagtggaccatccagatacccaatttgtcagaataccaaaaagaagaagaaactgtagatatcgttttcatgtctactatatgtgaggctctgggctaggtactttccatacatttctcatttatgctttatagtatctrtgtaagataagcagtgttctatccacagcatttgagaaaactgaagtttagagaagtttaagtagcttgcccaagagagaatgggttataagtagcagagcctgaggttcaaactctgaatttcaaaagtatgcttttttttccttttgcctcatagaagctgttatctcctctgatcttccaatattccagtttctccatttcacttacatctccttgtacacattttagatttaggcaacgattatattagtgatataactgtcttttaatttgacgtttcatagccttcaacagaatcattagtctagaaaatataattatacatattatataatcctttcatatgccaggcaaattttgatt

SEQ ID NO: 418606 - DNA, 578 bp, Homo sapiens
ttcgctcatcatagtagcgtacatttacatgtttatggtttatgtgactttaatagctctcataattattttaacagacagttctagttagcatgaacattttttataaaagctatactctgttctatgaaaagtgagatacagtaactacagaagcctttgtctaagtttaaatgtcrtcaaaattattttattgccagtaatattttataaaaaacagataaaaatttaaatatacttaaaattctttggctattagaatataataattattcttttgattacctcatgagaaattcagaagggtattaggttgtgattcagacaagtgtgtcactttctctacctgcctcaaaaataattattattttcccaggacaaattgctgttatagttggtattaccctgtgcttacttttgcttacatgatatcacattttaacttatgatctatccttgtccttggaaaatatcattcacttaaaagcatacttactacatgcttaacctgtccttaagcatagtcaacacttagggtgtcttttatctctgtctctctagcagatcataaacttggt

SEQ ID NO: 418607 - DNA, 578 bp, Homo sapiens
ttcgctcatcatagtagcgtacatttacatgtttatggtttatgtgactttaatagctctcataattattttaacagacagttctagttagcatgaacattttttataaaagctatactctgttctatgaaaagtgagatacagtaactacagaagcctttgtctaagtttaaatgtcgtcaaaattattttattgccagtaatattttataaaaaacagataaaaatttaaatatacttaaaaktctttggctattagaatataataattattcttttgattacctcatgagaaattcagaagggtattaggttgtgattcagacaagtgtgtcactttctctacctgcctcaaaaataattattattttcccaggacaaattgctgttatagttggtattaccctgtgcttacttttgcttacatgatatcacattttaacttatgatctatccttgtccttggaaaatatcattcacttaaaagcatacttactacatgcttaacctgtccttaagcatagtcaacacttagggtgtcttttatctctgtctctctagcagatcataaacttggt

SEQ ID NO: 418608 - DNA, 483 bp, Homo sapiens
ctgcaggtttcttccaagttctattcattcattcaatctcttgcttatttattttatgaaaattattgttcacktggattttgataacacctgtattttggggagtagagtcattctatgaaaaacatatgttactcttcaaaattctcattggagtattaaatatttggttaaaaaatattctcttctcttgaggaagttatattcagtttccatcctgacatgccacacagtacaatgctgatgccactttactgtagttcaggactagaatacatgagtcaattctgacttgttaagaatttccttcttctcccaaaggaaaacacatgattgctcttggggaatggctggaaatcagatttaaccttttatttaggttttttggaggactgaggagatttggccaaataagtgtatgctttttacaacgtgtctaacagccaaaattttggctaagatgtgaatatgcaagaaaagtta

SEQ ID NO: 418609 - DNA, 616 bp, Homo sapiens
aatacctgcatgacaaaatagtctgtataagaagtccctgtggcatgaaattacctgcactgtacccctgaacttaaagtttaaaaaataaataataaaattagttttttgggtttttttggtatgtgactttcttcaagaaatacaggcacagagttaaaaaatcaaatggaatrtagggattattaaaatgaaaaatagcagccctgtggcttgtattttctcactacctacttcagctacacagtggcaatgtgcttctggtatttacttctattacctaaataatatgcttattgctatttcttcatttatcagtttcaacaggagttttgagtaaagaaaatggagaagtttgtgggagagaaaggtatgtaaataagaacatgacatgagatttaagctaatatattttacagtagaggtgcccatagggtgctttgagagcataaagaacatagacatgttaggtcttccaaattgttttgaagaataactttataatttatgcttttgttagcagtaaacaagagttctcatctttctatattcttatcaacactgcgcagaattcattcaaattcatgctcttctgatgacataaagtggtatctca

SEQ ID NO: 418610 - DNA, 616 bp, Homo sapiens
aatacctgcatgacaaaatagtctgtataagaagtccctgtggcatgaaattacctgcactgtacccctgaacttaaagtttaaaaaataaataataaaattagttttttgggtttttttggtatgtgactttcttcaagaaatacaggcacagagttaaaaaatcaaatggaatatagggattattaaaatgaaaaatagcagccctstggcttgtattttctcactacctacttcagctacacagtggcaatgtgcttctggtatttacttctattacctaaataatatgcttattgctatttcttcatttatcagtttcaacaggagttttgagtaaagaaaatggagaagtttgtgggagagaaaggtatgtaaataagaacatgacatgagatttaagctaatatattttacagtagaggtgcccatagggtgctttgagagcataaagaacatagacatgttaggtcttccaaattgttttgaagaataactttataatttatgcttttgttagcagtaaacaagagttctcatctttctatattcttatcaacactgcgcagaattcattcaaattcatgctcttctgatgacataaagtggtatctca

SEQ ID NO: 418611 - DNA, 594 bp, Homo sapiens
tcaaattcatgctcttctgatgacataaagtggtatctcattggttttttaatttgcatcttcctgattgctagtgattttatgagttttaaacagtatgggcttctgcttctgaacatttccttttcaaggttctttgctcatttttctattggtttcctctgaatatataagtatatgttaaccagtattaattcctcattggttttaggtgttctctcagtttacctatgaaattatctatggtatccttaactgaaaattttcatttttttagcaaaatcaattaattttatgtcttatcatttatgctttttaggccatgtttcagaaagttgttacatgtgtgtctcaaaaatatttgcctaattttttttcttaataacttctttaatctctcagraattcaaatttctatatggtgtgataaggtgcccactttactttctgcccgattcttagatcagtttttgctctatacagtaagccaacaccagtattttcttttactttgtgatgttattatatataacactctcatgtatgtatgagctgttatatatatgtatatatgaactctatgtgcctgcagct

SEQ ID NO: 418612 - DNA, 658 bp, Homo sapiens
cctaccttatatgaaaccttgaacaaatcaccaaggctcttttacgcttaatttgtcaatctagagaatagagataacagttcgtatttaatasagttgaattgaggattaattgtgtgaacacataaaaagggcataatgaacatttaaaaagtcagtattattttattttccattatattcatttcaatcgttgactgtattattcaggccacatggaaaataccctgtataggataatctaatttatgtctaatcatgggtcttacaagaaatgctaaatatgagttaattctgtatcttagttattttatgctgttataacaaagtaccatagactgaatggattataaacagaaatttaatttctcacagtaatgggtgctggaagattaagttcagggtgtcaacctctggtgagggccttctttcaggttatagactgccatcttctttctcgtgtcctcacatggcagaaaggggatgagagaactctctggggttccttttataaaaagggcactaatcacattcatgagggctccatcttcatggcctaactacctaccaaaggttctacctcctagtaccatcacattgcggggtaggattttaacataggaatttggggacaacacaaatattcagtgtattgcat

SEQ ID NO: 418613 - DNA, 580 bp, Homo sapiens
gcaacttaacattgttaagctgacaatgataacctgacttaacattgtcagcttaaaatagtgtgttataagatagtatttgcaagcctcatggtaatctcaaataaaaaataatacaaggggctgggcatggcagytcacacctgtaatcccagcactttgggaggctgaggcgggcggatcacaaggtcaggagatcgcgaccatcctggctaacagggtgaaacccgtctctactaaacaaaatacaaaaaattagccgggcatggtggcgggcacctgtagtcccagctactctggaggctgaggcaggaggatggtgtgatcccaggaggcggacttgagagtgagccgagatcgtgccactgcactccagtctgggagacagagcaagactccatctcaaaataataataataataataataataataataataataataataacaacaataatacaaggaatacacacacaaaaaaagcaagaaattaaatcatatcaccagagaaagtcaccttcactgaaagaaagacagaaaggaaggaaaagaagatcacaaaacagtcataaaataaa

SEQ ID NO: 418614 - DNA, 464 bp, Homo sapiens
cccatccccaccagtggagcaacctctgtgctcargctcacataaagatcatagagcacaagacacctttcccccatctgcacagtgctgcagctgtagccactgctgctgccaccaggggctggggcaggtgagcagaaggctgccagtctggggctgtcagtaacaaccttgtctcctctgtcagcatgatctccaacctcaggctcaagtgtgaagggcaagatccctccctcccttgcatggtgctgttgcactactgccactaagggctggtaagtctaaatgctgcctagggttctctggggccgtgggtagtgatcccacatcacagccactgccaacaccagcacacactgctgaggacccaaagaaataaaaggcacccaaattggaaaagaggaagtcagattgtttttttctgcaaactgacttgatctcatgtccagaaaaaaaaaaaaaaa

SEQ ID NO: 418615 - DNA, 464 bp, Homo sapiens
cccatccccaccagtggagcaacctctgtgctcaggctcacataaagatcatagagcacaagacacctttcccccatctgcacagtgctgcagctgtagccactgctgctgccaccaggggctggggcaggtgagcagaaggctgccagtctggggctgtcagtaacaaccttgtctcctctgtcagcatgatctccaacctcaggctcaagtgtgaagggcaagatccctccctcccttgcatggtgctgttgcactactgccactaarggctggtaagtctaaatgctgcctagggttctctggggccgtgggtagtgatcccacatcacagccactgccaacaccagcacacactgctgaggacccaaagaaataaaaggcacccaaattggaaaagaggaagtcagattgtttttttctgcaaactgacttgatctcatgtccagaaaaaaaaaaaaaaa

SEQ ID NO: 418616 - DNA, 499 bp, Homo sapiens
aaacattggtttaaaacataaataaagcaaaacaaaactctgtattgtctcataaaattgctaagttgctataatttttagtgaatactaaacatgcatcttttcttttataaataaacagaactttgccaatgtggttatgggaaagccagaatgtaagataaaaatttgctcagatttttttcctatcattatttacagctagaaaataaagattgtcatttccctgttggtttttgaggttgctgataatattatcgtaaaaatgatcacaggcctcaaaaggatttactgtgaatttttggtttgaggggtgtcttggagaagaaataaaacagaaatgaatttcaaagctctaagctagtgccggatatattaatacacataaaatttaaaaaatatatctgcggccaggcgtggtggctcacacatgtaatcccagcacttttggaggccraggcaggtggatcacctgaggtcaggagttcgagaccagcac

SEQ ID NO: 418617 - DNA, 626 bp, Homo sapiens
ttagatagatattctttattatgcaactaatttagccaaagtccattaccagcaatcttacattttgacacacagaggtcagatgtggtacataattattttttacttttctgctagaaccacttatccaagcacaagaggtccaccttagaagagacccgagagtctcccttctctgacctcttcttcccctctcttgggtatagttactttagcttttaaaccaaatgcctttcctgcagggtctgttctgcttctttactcaacttcttgttcaaagtgccagtcacttggtttttctttattgttccttttccatcctcagagtctgcagacttaaggagcagacaagcaaggagaggatttcagtacatataggcaattccagaccgaaattataggaagacattaacacatgagcaactttttgtctccactcataggctaaaaggatttgaatagaataagctctctataagctagtcattatgtctttgtttattcattttgtatattacttaataaaatttcwtttgccatcacaagaattttgcacatatctttcaaaatttattcctaggcagtctatggatttgatttatcagaaatggatttataattgtttt

SEQ ID NO: 418618 - DNA, 626 bp, Homo sapiens
ttagatagatattctttattatgcaactaatttagccaaagtccattaccagcaatcttacattttgacacacagaggtcagatgtggtacataattattttttacttttctgctagaaccacttatccaagcacaagaggtccaccttagaagagacccgagagtctcccttctctgacctcttcttcccctctcttgggtatagttactttagcttttaaaccaaatgcctttcctgcagggtctgttctgcttctttactcaacttcttgttcaaagtgccagtcacttggtttttctttattgttccttttccatcctcagagtctgcagacttaaggagcagacaagcaaggagaggatttcagtacatataggcaattccagaccgaaattataggaagacattaacacatgagcaactttttgtctccactcataggctaaaaggatttgaatagaataagctctctataagctagtcattatgtctttgtttattcattttgtatattacttaataaaatttcttttgccatcacaagaattttgcacwtatctttcaaaatttattcctaggcagtctatggatttgatttatcagaaatggatttataattgtttt

SEQ ID NO: 418619 - DNA, 590 bp, Homo sapiens
ttgcacatttggaataacatacctaattcattcactcaagctactcatgctactcaaaatctaacatccttgtatcccataagtgaataatcactttcactgtcctctccttgctggagagatgggaagagtaacttactaattaatgacctcacaatattctccagtttgaacggtctcttaaatttgcagtgaattcaggttcatagtcttcttctgagctagttyagtctccttttgatgattcagtttcttccaggtgattgctcaggtttcctatactgcctattcatcttctggatggcttactgagtggttaggataggcgagaagacaccacaattctggctgaagagtaattcctctagtctgtgatgtcctttgctactctggtccctggatttatgaccactaatttgcaacctgttcaatctagtcctttgggcactgaatagtacccattgccacagtctgatcagaaatttgcaccagtatcaaagaatccactctccctatctctttgttctataccaggccactgcttgtggtcctgccttctccacccttccataatccctcattgtgactta

SEQ ID NO: 418620 - DNA, 592 bp, Homo sapiens
tggggaccacttctctagaatataagaatatctagcttcttgtaaattagtagcaaaaagtcatgaggagataaaatctggaaagaaacaggcattggggagcaatgaaataagtatgcatgaagtaaaatgtgtaaagaaattaaagcaaatttacagcatccacactggcagcagtaaaaggctaatgtaataaagcaaaaaataaaagttgcaccatggaagatgaactcaggggcttttcctgtattaatttatttaaatggaaaagtaagtgaaaatgactaatatgaagggaaaactaaagaatcaayagaaagatcatttgcaatgctgtgtgtagaaaaaattgtaaaaaatataacgagtgatagaacaaataatccttttttgtactaaaggaagtctttatatgaagtacttatgggacaacaaaatcaattttaaaaaacacataaggatttatcattgcaatttttgataattataaggagtgggggaacaatcagattagagttcttgatgaaacactctttttttaaagtgacctttaaaacatttaacaatctatgttggctaatatttgcaaaga

SEQ ID NO: 418621 - DNA, 592 bp, Homo sapiens
tggggaccacttctctagaatataagaatatctagcttcttgtaaattagtagcaaaaagtcatgaggagataaaatctggaaagaaacaggcattggggagcaatgaaataagtatgcatgaagtaaaatgtgtaaagaaattaaagcaaatttacagcatccacactggcagcagtaaaaggctaatgtaataaagcaaaaaataaaagttgcaccatggaagatgaactcaggggcttttcctgtattaatttatttaaatggaaaagtaagtgaaaatgactaatatgaagggaaaactaaagaatcaacagaaagatcatttgcaatgctgtgtgtagaaaaaattgtaaaaaatataacgagtgatagaacaaataatccttttytgtactaaaggaagtctttatatgaagtacttatgggacaacaaaatcaattttaaaaaacacataaggatttatcattgcaatttttgataattataaggagtgggggaacaatcagattagagttcttgatgaaacactctttttttaaagtgacctttaaaacatttaacaatctatgttggctaatatttgcaaaga

SEQ ID NO: 418622 - DNA, 556 bp, Homo sapiens
tagtgacatacaaggtaaaatgcatgcacattgaaagtaggcagactagagttagaattcaggattcaccatttaccagctgtgagacattgaggtcatttgaatattttcctctttaagtaatcatatgtttaataataaaagtagaatccacattgcaaattttttgtgatgactacatttcatacctttttgaaatcagctatcctgttgtgagggctcaaaaaatgctaatcaatgtccaaattgaatgcatagttcagttgtgaaagttttgttcttaaaataatatattctctctttccctctctctcttttttytgtgtctgtgtccgtgtcagaggtggggtggggtgaagcgtgtgtgtgagattcccagctgagaaagtgcgggcttaaagtatttcaaaaattgtaggctgtgtgttaaaatatttatgagggttgttaaattactacttttatgataatagttttgttaattttataatggtattcaacatacaatgtatgatttttgttgtatttcttgcttttttatctcccaagtttagat

SEQ ID NO: 418623 - DNA, 556 bp, Homo sapiens
tagtgacatacaaggtaaaatgcatgcacattgaaagtaggcagactagagttagaattcaggattcaccatttaccagctgtgagacattgaggtcatttgaatattttcctctttaagtaatcatatgtttaataataaaagtagaatccacattgcaaattttttgtgatgactacatttcatacctttttgaaatcagctatcctgttgtgagggctcaaaaaatgctaatcaatgtccaaattgaatgcatagttcagttgtgaaagttttgttcttaaaataatatattctctctttccctctctctcttttttctgtgtctgtgtccgtgtcagaggtggggtggggtgaagcgtgtgtktgagattcccagctgagaaagtgcgggcttaaagtatttcaaaaattgtaggctgtgtgttaaaatatttatgagggttgttaaattactacttttatgataatagttttgttaattttataatggtattcaacatacaatgtatgatttttgttgtatttcttgcttttttatctcccaagtttagat

SEQ ID NO: 418624 - DNA, 554 bp, Homo sapiens
gttgggtcatcatgatagggttagtgtccttataagaagattccagagagctggatggctgtctgtctgccgtgtggggacacaggaagaaaatagctgtctgcaagccacaacgcagactattaccagttattaaatagctagcactcagactctagggcttcctagtcttyagaactgtgagaaataaacttttgttgtttaagctacccagtctatattactaaattataggagcccaaccagaagaagacaccagaatattttctagatcagtagaaaacattgagtgaaacaggaaagcagaaaaagttaaaaaatacagataatagtataaaatgattatggaaaaatatacagttctaatatacaggtgattaaaatactaaacagatttagaatagtttcgcaagcaatatttgaatagatagtagaagagagtttatcaaattaatacaaatcctacgcacaaaaattcaagaagccatgcaaaccccaagtgggatgacctccctgccccaccacacatagcccatagggtacattaaataaaa

SEQ ID NO: 418625 - DNA, 659 bp, Homo sapiens
ggctaaagagtgtgtcttcagagatgcaggaattgaattattaggaatattaattacaatttcagtgtctcagaatagaaggctcagcttaggaaaaaagtggtttaacacgtaagaatattacagtaaagcccaacatactttttaaaaatgaaggccacaggatgatcatggatccatctggaagaatttacatgaatgaaattgggggagggggggcttttttctgttttttggtatttctaagttgagtaatgctataactcctaaaattagaagsctgcagataatataggacctatttggaaagcatagcaaacatttatgtgcaaaaaataaaaatgagatgtgggatggaaaagtgaatttaaacttggcaaaagaggcaaaataatgtaaacatttggaaatatttaggacaggacaaattaggctggatcataataggtgaaaatgtctggagaacaataccactaaatgtaatatttcttcactatgttgtcacacatgggctcataaaatgtacataccaacacaatccagttaaatagcattttattagtttttttttgtaaaattatgactggaggtcatggcaatgagattatcatgtgccttttataacaggtcacataataccttttgtgtacattaaattt

SEQ ID NO: 418626 - DNA, 527 bp, Homo sapiens
ttgagtaatgctataactcctaaaattagaagcctgcagataatataggacctatttggaaagcatagcaaacatttatgtgcaaaaaataaaaatgagatgtgggatggaaaagtgaatttaaacttggcaaaagaggcaaaataatgtaaacatttggaaatatttaggacaggacaaattaggctggatcataataggtgaaaawgtctggagaacaataccactaaatgtaatatttcttcactatgttgtcacacatgggctcataaaatgtacataccaacacaatccagttaaatagcattttattagtttttttttgtaaaattatgactggaggtcatggcaatgagattatcatgtgccttttataacaggtcacataataccttttgtgtacattaaattttaggaaatgttttatctctgcaaacgaatttgtaaattttctatagtcataaaaagaatacaaaaaaagcaaaaaacaaaacattcttgttatggaaagaagaggacatataaaa

SEQ ID NO: 418627 - DNA, 553 bp, Homo sapiens
tatgttgtcacacatgggctcataaaatgtacataccaacacaatccagttaaatagcattttattagtttttttttgtaaaattatgactggaggtcatggcaatgagattatcatgtgccttttataacaggtcacataataccttttgtgtacattaaattttaggaaatgttttatctctgcaaacgaatttgtaaattttctatagtcataaaaagaatacaaaaaaagcaaaaaacaaaacattcttgttatggaaagaagaggacatataaaatatatactataaaaacttaatgggtagatttcatctttcctttgatcaatattgaaaagaatgtatgtcagactaattctcatcttttagcaatctcaataatggacacaactaagcatatttccacctactaaaatattttcttatgttcaattcaaatgctttttctttgtttttttgcagtgaagttaggtgtgaagttgcccgaytataggcaacaaggccatttcttatggggaatgttggttctgttcaataatatatgttcaaaaa

SEQ ID NO: 418628 - DNA, 528 bp, Homo sapiens
taaatcttcagaaagtataaagatgatgagactgaaataaaacatgcatacttcagactttgaaaaaataattagctccagctttctcacagtgggacctattctagagagggttacagaaatctctattttttttttttttttttgagacagagtcttgctctggcaccagcctggttcaagtggttctcctgcctcagcctcccgagtagctgggattacagkcacacgccactatgcccagctaatttttgtatttttagtagagatggggtttcaccatgttggccaggatgatctcaaactcctgacctcgtgatctgccctccttggcctctcaaaatgctgggattacaggcgtgagccaccgcgcctgaccagaaatctctagtctaacatcatgcccatctcacaatcaaatacaacactcgcacatgataacacatacactggcactgatctggggattattccaacaattacagtcctctattttcctacattttattttacttaaattgttttaag

SEQ ID NO: 418629 - DNA, 528 bp, Homo sapiens
taaatcttcagaaagtataaagatgatgagactgaaataaaacatgcatacttcagactttgaaaaaataattagctccagctttctcacagtgggacctattctagagagggttacagaaatctctattttttttttttttttttgagacagagtcttgctctggcaccagcctggttcaagtggttctcctgcctcagcctcccgagtagctgggattacagtcacacgccactatgcccagctaatttttgtatttttagtagagatggggtttcaccatgttggccaggatgatctcaaactcctgacctcgtgatctgccctccttggcctctcaaaatgctgggattacaggcgtgagccaccgcgcctgaccagaaatctctagtctaacatcatgcccatctcacaatcaaatacaacactcgcacatgataacacatacactggcactgatctggggattattccaamaattacagtcctctattttcctacattttattttacttaaattgttttaag

SEQ ID NO: 418630 - DNA, 487 bp, Homo sapiens
ggcaaattttctatttttagtagagacagggtttctccatgttggtcgggctggtctcaaactcccgacctcaggtgatcggtccccctcggcctcccaaagtgctgggattacagatgtgagcaactgtgtccagccaaactcagccattttcttacaagtctggttctttttgttggaggatggtattagaaacygagatgttagtgttaggtgtacactcattgctctgggtgtcatttcttctaggcccactcagctgacaaagaaggaaatatatgtgtgtttaccaatccatatatatatacatataaatatttctatatgtcatcaacatctataatagtataaaaatgagttcatatcgatatctccaattctagtctattaccacatgtacttttctagcaaattctctttgctcatctgtaactttccactgcaacagtgagaaatcaggctcctgccatctgtcatccatttactt

SEQ ID NO: 418631 - DNA, 645 bp, Homo sapiens
aagttaatctttgctttcagtccactgtggtgtaagaggatactttatattattttgatttttaaaaatttattgagacttgttttgtggcctatcatatggtctatgttgaagaatgttccacgtgctgatgaaaacaatgtatattctgcagttgttgagtagaatgttctgtaaatatctgttaaatccatttgctctcaggtataggtaaaagccatcatttctttgttgactttctgtcttgatgacctgtctagtcctgtcagtggagtattgaagtcacccaacattattgtgttgccatctatctcatttcttaggcatagtagtatggttttatgaatttgggagctccagtggtaggtgcatatatatttaagattgtgatattttcctgttaagttaatgcttttattattatcatataatgtccttctttgtttttttttaccctgttgttgttttacaatctgttttgtctgatacaaaaagagcaaatcctgctggcttttagttttcattttcatggaatatctttttccacccttttaccttaagtttmtgtgagtccttatgtgtcaggtgagtctcttggagactcttggagacagcagatacttggttggtaaatttttatccatt

SEQ ID NO: 418632 - DNA, 507 bp, Homo sapiens
gggagctggtatgatattttgggggtgttatagaaccctgttttgtcatattaccagaattacctttctggtttcctctcatttgggtagactattkaaaaaaattgttcttgaatttatttgtgattggcctttttttttttttttttttttagttgttgttttttcctcttaaggattagactttaatatttattttagccgaatttgaattttggtgcttgtgtgggtgaagactgtataattttcttagttgcagagtctttgcatgctgactttctccaatgcctgttgtagtagttgtattttttggtgtgtaggcgagttctctgtatggagttgagatggtaggtatctcttgaaacttatcttgttcccttgtggtgtatagtttatttatttatttatttattattttcctggtgttttatttactgagttgatggtaggtaatcctgggtaggcacctgttgtggctaaggcaggtgggtagatgtaatcctcatt

SEQ ID NO: 418633 - DNA, 460 bp, Homo sapiens
tcttgtttctctagtttctgtgactgcagttttagattgttaattgagatgtttctacctttttaatctggacattcagtgatataaaattccctctaaacactgccttagctgtgttctaaaaattctagtattttgtawctttgttctcactaatttcaaagaatttcttgatttcagctttaattttattagttacctaatagtaattcagaaacaggttaatttccacgtaattgtgtagttctgagtgattttcttagtatcaatttctatttgtatttctctgtgatctgagagtgtgattggtatgattttgctttttttaattcactgaggattgttttatttccaattgtatgatcaattttagagtacatgccatttgcagatgagaagaatgtatattctattgttttggggtggagtattctgtagatatctattagatcaatttagt

SEQ ID NO: 418634 - DNA, 582 bp, Homo sapiens
agctgtttaccatcatgtaatacccttctttgtcttttatgatctttgttggtttgaagtccattttgtctaaaattaggatagcaactcctgcttttttttgtgttttaccatttgcttggtagattgttctccatccctttactttagcctatgtgtgagataggtctcttgtaaacagcataccattgcttctttcttctttatccaacttgaaactttgtgccttttaattggggcatttagctcatttacawtagaagttaatattgatatgtacaggtttgttcctgttttcatgttgttagctggttattatgcagactcgtttgtacaattactttatagtgtcgctggtctttgtacttaagtgtgtttttgtagttgctggtcactatctttcctttccatggttagcacttccttcagaacctcttgtatgccaaatccggtggtaacaaaatcccttagcatttgcttgtctgaaaatgatattatttttccttcacttatgaagcttagtttgggtgaatatgaaactcttggttagaattttttttttttgttttaagaatgctgaat

SEQ ID NO: 418635 - DNA, 582 bp, Homo sapiens
agctgtttaccatcatgtaatacccttctttgtcttttatgatctttgttggtttgaagtccattttgtctaaaattaggatagcaactcctgcttttttttgtgttttaccatttgcttggtagattgttctccatccctttactttagcctatgtgtgagataggtctcttgtaaacagcataccattgcttctttcttctttatccaacttgaaactttgtgccttttaattggggcatttagctcatttacaatagaagttaatattgatatgtacaggtttgttcctgttttcatgttgttagctggttattatgcagactcgtttgtacaattactttatagtgtcrctggtctttgtacttaagtgtgtttttgtagttgctggtcactatctttcctttccatggttagcacttccttcagaacctcttgtatgccaaatccggtggtaacaaaatcccttagcatttgcttgtctgaaaatgatattatttttccttcacttatgaagcttagtttgggtgaatatgaaactcttggttagaattttttttttttgttttaagaatgctgaat

SEQ ID NO: 418636 - DNA, 586 bp, Homo sapiens
cagcataccattgcttctttcttctttatccaacttgaaactttgtgccttttaattggggcatttagctcatttacaatagaagttaatattgatatgtacaggtttgttcctgttttcatgttgttagctggttattatgcagactcgtttgtacaattactttatagtgtcgctggtctttgtacttaagtgtgtttttgtagttgctggtcactatctttcctttccatggttagcacttccttcagaacctcttgtatgccaaatccggtggtaacaaaatcccttagcatttgcttgtctgaaaatgatattatttttccttcacttatgaagcttagtttgggtgaatatgaaactcttggttagaattttttttttttgttttaagaatgctgaatataggccccaatttttttctggcatttagggtctctcctgaaatatccactgtttacttgatgaggtcctctttgtgggtgacctgccccttttcactagatgcctttaacattgcttctttcatttcagccttggagagtttttgcctrtgtggcttggagatggtcttcttgtgtaattt

SEQ ID NO: 418637 - DNA, 490 bp, Homo sapiens
ttcttttctcagcttggtctattctgctattaatacttgtgactgaattataaaactcttgtagtgtgttttacagcttagcctattagtttccwttttttttttttttttttttttgagacagagtctcactctgtcacccaaactggagtgcaatggcatgatcttggctcactgcaacctctggctcctgggatctcccaccttagccttctgaatagctgggattacaggtgcatgccaccacacctggcttatttttttgtatttttagtagagacggggttttatcatgttggacaggctggtcttgaactcctgacttaagtgatccacctgcctcagcctcccaaagtgctgggattataggcatgagccactgcacccagccgcttctttcttataatggcaattttgtctatcagttcctgtatcactttattgtaatccttaaatgccttgcattggttttcagctttctcctgaatct

SEQ ID NO: 418638 - DNA, 490 bp, Homo sapiens
ttcttttctcagcttggtctattctgctattaatacttgtgactgaattataaaactcttgtagtgtgttttacagcttagcctattagtttcctttttttttttttttttttttttgagacagagtctcactctgtcacccaaactggagtgcaatggcatgatcttggctcactgcaacctctggctcctgggatctcccaccttagccttctgaatagctgggattacaggtgcatgccaccacacctggcttwtttttttgtatttttagtagagacggggttttatcatgttggacaggctggtcttgaactcctgacttaagtgatccacctgcctcagcctcccaaagtgctgggattataggcatgagccactgcacccagccgcttctttcttataatggcaattttgtctatcagttcctgtatcactttattgtaatccttaaatgccttgcattggttttcagctttctcctgaatct

SEQ ID NO: 418639 - DNA, 623 bp, Homo sapiens
ccctgtctatacaaaatatacaaaaattagccaggtatggtggcacacacctttagtctcagctacttgggaggctgaggtgggaagatcacctgagcccagggaggctgaggcagcagtgagctgtgactgtgacattgcattcctgcttgagcgacagagtgaaaccctgtcttgaaaaaaaaaacaaaaaacacaaacaaaaaaacccttgctggggcactactgccatcgtttagasagaaaagaagacattctggctgtttgggttgccagtattcttgtgctggttctttctcatctctgtgagctgatgcttctttacctgctgtgtaatttgagtagtcagtagtctgtcttctggatgttttcagagggcctaggctttgtgcagggcttttatttttaactgaattattgtctttaatttcataggtgggtgtattaggaaagtatttttggtgttgaagtttgggcagtgatccagtagatggcacttaagtataatggcctgtaagtaggctctcgttcaacctcatggctcctctgtatttcttcatgatttcagtcgtgcaccttctcagtactatgaaagtgtgggttccttttttgctaatgtgctg

SEQ ID NO: 418640 - DNA, 580 bp, Homo sapiens
ttgcatcacagggcctttcactaggtctccctggggctccaccccagagatatgcagaaccgctacyaatcagtgtgattggcctggggtggagctgtacactctgcacccaagtcaggggtggggcatccttggttatgagtgggaggtgaggagtttacaggggagacatattggtctcttctctgtagggcaactgcagcatgctggagttgtgtttaaagtgctcagagtctttgttcctttcccagttcctgggcaacaaggacagtacctctgctatggcagtggcagaggggcttttggttgcttctgagaactctacctcagagaaactcagatcctctgctactggaaatgctcagccagggggtggggtgtctgtgctgctggcccaagcttgacgaagaacacgggtttgagggctcagaggggaaaagactgggcaactctccatatggtgactgtggcatgctacagtcatgagtgtgagtgaaccttcaggctctttgttcttccccagcctgctcagaccaccatggtagtggccaaagggctgctctgtagccacgaccagtga

SEQ ID NO: 418641 - DNA, 580 bp, Homo sapiens
ttgcatcacagggcctttcactaggtctccctggggctccaccccagagatatgcagaaccgctactaatcagtgtgattggcctggggtggagctgtacactctgcacccaagtcagggrtggggcatccttggttatgagtgggaggtgaggagtttacaggggagacatattggtctcttctctgtagggcaactgcagcatgctggagttgtgtttaaagtgctcagagtctttgttcctttcccagttcctgggcaacaaggacagtacctctgctatggcagtggcagaggggcttttggttgcttctgagaactctacctcagagaaactcagatcctctgctactggaaatgctcagccagggggtggggtgtctgtgctgctggcccaagcttgacgaagaacacgggtttgagggctcagaggggaaaagactgggcaactctccatatggtgactgtggcatgctacagtcatgagtgtgagtgaaccttcaggctctttgttcttccccagcctgctcagaccaccatggtagtggccaaagggctgctctgtagccacgaccagtga

SEQ ID NO: 418642 - DNA, 580 bp, Homo sapiens
ttgcatcacagggcctttcactaggtctccctggggctccaccccagagatatgcagaaccgctactaatcagtgtgattggcctggggtggagctgtacactctgcacccaagtcaggggtggggcatccttggttatgagtgggaggtgaggagtttacaggggagacatattggtctcttctctgtagggcaactgcagcatgctggagttgtgtttaaagtgctcagagtctttgttcctttcccagttcctgggcaacaaggacagtacctctgctatggcagtggcagaggggcttttggttgcttctgagaactctacctcagagaaactcagatcctctgctactggaaatgctcagccagggggtggggtgtctgtgctgctggcccaagcttgacgaagaacacgggtttgagggctcagaggggaaaagactggrcaactctccatatggtgactgtggcatgctacagtcatgagtgtgagtgaaccttcaggctctttgttcttccccagcctgctcagaccaccatggtagtggccaaagggctgctctgtagccacgaccagtga

SEQ ID NO: 418643 - DNA, 624 bp, Homo sapiens
tcagcatagcgaccaggcccttttttgcttcctcagcccaagggcggtcagggtgattccactgaagctgcaatggcagaggggtctacaggctgttcctgggattttcaaaaaaatgcagagcgacctctgactgaagtgttcaggcaggggcagcgtagttgtggtggagtcctaggttgggatgtcccactcagtaaggaaaaacaggaacaggagcccatgtggagaacrgtctggctccttttccttgagacagcttctctacgctaggggtctgccaaagtccctaatcactgtgatccctccagagcctgaggacaacagctgtgaggactggggtagcaaaaatgggggcctgcctctcccactaggagctctgttccaaagaagtacagagctgctgctggccaaagagcccaggtatggctggtgtggctacactagggtcctaggccacttgcaaggtgcagtggaggctaggcctgcatttgctactgtgcagccctctggattcatcccctttcctggggacatgcaagagagcctgacctcctccattgctggagctgtagttgctgatgccaggatgcccagcattatgatatacaaggctcctgggac

SEQ ID NO: 418644 - DNA, 624 bp, Homo sapiens
tcagcatagcgaccaggcccttttttgcttcctcagcccaagggcggtcagggtgattccactgaagctgcaatggcagaggggtctacaggctgttcctgggattttcaaaaaaatgcagagcgacctctgactgaagtgttcaggcaggggcagcgtagttgtggtggagtcctaggttgggatgtcccactcagtaaggaaaaacaggaacaggagcccatgtggagaacggtctggctccttttccttgagacagcttctctacgctaggggtctgccaaagtccctaatcactgtgatccctccagagcctgaggrcaacagctgtgaggactggggtagcaaaaatgggggcctgcctctcccactaggagctctgttccaaagaagtacagagctgctgctggccaaagagcccaggtatggctggtgtggctacactagggtcctaggccacttgcaaggtgcagtggaggctaggcctgcatttgctactgtgcagccctctggattcatcccctttcctggggacatgcaagagagcctgacctcctccattgctggagctgtagttgctgatgccaggatgcccagcattatgatatacaaggctcctgggac

SEQ ID NO: 418645 - DNA, 519 bp, Homo sapiens
gggagcaaatggaggaatctcctgggcccagagttgcaaaggtctgtggcagacatgtggttctcctcagactttcacgcaccatttccccatggtgggggagcctccctgggctccrtgtcatgctcctttctgttatctgtgaatcaagttgtttccttgatgaattctaatgtgtgtgcttgaatgttccagtggaaaaactggtatttactcactgttctttcttctctaagtgtggcacacaccagctgcttctattcagctatcttggttcctccactgtcattaacattttgattgggattgcattgaatctgtaagttgctgtgggtagtatagacgttcattagtaattattctaatccatgagcaagagatacttttttattttcttgtgcctcctttaatttctttgccagtgttttacagttagttttctttgtagagatctttcacttctttgttaaatttattcttatttttttttgtgtgtggctattgtatatgaaattgctt

SEQ ID NO: 418646 - DNA, 519 bp, Homo sapiens
gggagcaaatggaggaatctcctgggcccagagttgcaaaggtctgtggcagacatgtggttctcctcagactttcacgcaccatttccccatggtgggggagcctccctgggctccatgtcatgctcctttctgttatctgtgaatcaagttgtttccttgatgaattctaatgtgtgtgcttgaatgttccagtggaaaaactggtatttactcactgttctttcttctctaagtgtggcacacaccagctgcttctaktcagctatcttggttcctccactgtcattaacattttgattgggattgcattgaatctgtaagttgctgtgggtagtatagacgttcattagtaattattctaatccatgagcaagagatacttttttattttcttgtgcctcctttaatttctttgccagtgttttacagttagttttctttgtagagatctttcacttctttgttaaatttattcttatttttttttgtgtgtggctattgtatatgaaattgctt

SEQ ID NO: 418647 - DNA, 557 bp, Homo sapiens
gagttttatactgagtcaactatgagtraccagggcccaaatcacattctcaggaggtcctgagaacatgtatcgaaggtgtttgggttacaactttgtttcatatattttagggagacgtaagacatcaatcaattcatataaattatacattaatttggttcagaaagataggacaactcaaagcaagggttacatgtcataagtggattcaaagattttctgattggcaatttgtaggaagagttgttacccaacacctggaatcaacagaaaggtgggtctaggttaagacaagtggttgtagaaaccaactttcttattatgtagatgaagtctcagagttggctgcccttagagactatagatggcaaatgtttcctatttagatttctccaaggtgctagattctcagttaacatctttagaattgggagggcttcaaaggagaaagagctatgttaacagacattctttgcagatgtaaatttttctccactaaagacaacttttcagggccatttcaaaatatggcaaagaaacatgttttggtgtaa

SEQ ID NO: 418648 - DNA, 591 bp, Homo sapiens
cccacaaaagacagctttgcagagtcacttaagttggctggtcctgtttcagccatctcaaaatatgtcaaatatatatattttggggtagaatattgtaatttccttcaatatcattaagaatactaaaaattgcaaatcacacaatttttwaaaaatgggtgttaaatattcaagaagtagttagtaactgttttcctcctttcttttttgcttctcactgcttgtacctaaaatggcacaggttcaactcaactaagttattgggcaattctcttcatgaagttctgaagtataaaccaaaaagtatctgaagcaagtctcaatcaatttataaagtttatcatgccaaggttaagaacatatctgtgacacagcctcaggaggtcctcatgaagtgtgcccaaggaggtcagggtacagcttgcttttatacagtttagggagacataatacatcagtcaatacatgtcacatttacactggttctatctggaagtgtagggcaacttgaagtcggggagctttgaggtcataggtagatttaaacatattctgatcggtacacagttattatctatggaaaggaat

SEQ ID NO: 418649 - DNA, 627 bp, Homo sapiens
cataggtagatttaaacatattctgatcggtacacagttattatctatggaaaggaatgtctgggttatgataaagggttgaggagatttagcttttattatgcagatgaagcctccaagtagcaggctttagaaagaatagactgtaaatgtttctagtaagacttaaaatgtgtgttgatggtaatcctggaggggtgtaatgaggaatgtccaatacccacttcctgtcatggcctgaaccagtttttcaggttaaattttggggtgccctggctgaggaggaagtccattaagatggttttggggaggccttcaaattttggttaacacacrcaatttctataggcagtaaatttttttcgatgattttatttctagaaatgtattttgttaccattttctcattaacaataatgtggccagaaatagacaaacagttttacatttggggcgatttatttttgcttcatcattgtgaaagcatcatttcttaagcagatctcttgtcattgcgaggcaggagaatagggtctggaggcaggaaacataaggccaacatgtgttgacttcccagaactgaatcaaaaggaaaactccacctctccacacccaaataacaaaagg

SEQ ID NO: 418650 - DNA, 627 bp, Homo sapiens
cataggtagatttaaacatattctgatcggtacacagttattatctatggaaaggaatgtctgggttatgataaagggttgaggagatttagcttttattatgcagatgaagcctccaagtagcaggctttagaaagaatagactgtaaatgtttctagtaagacttaaaatgtgtgttgatggtaatcctggaggggtgtaatgaggaatgtccaatacccacttcctgtcatggcctgaaccagtttttcaggttaaattttggggtgccctggctgaggaggaagtccattaagatggttttggggaggccttcaaattttggttaacacacgcaatttctataggcrgtaaatttttttcgatgattttatttctagaaatgtattttgttaccattttctcattaacaataatgtggccagaaatagacaaacagttttacatttggggcgatttatttttgcttcatcattgtgaaagcatcatttcttaagcagatctcttgtcattgcgaggcaggagaatagggtctggaggcaggaaacataaggccaacatgtgttgacttcccagaactgaatcaaaaggaaaactccacctctccacacccaaataacaaaagg

SEQ ID NO: 418651 - DNA, 608 bp, Homo sapiens
ttctaaaggaaagaggtttaattgactcacagttccacatggctggggaggcctcataattatggcagaaggtgaaggaggagcaaactcatgtcttacatggtggcacgcaagacagcatgtgcaggggaactcccttttataaaaccatcagatctcacaagacttagtcattctcgcgagaacagcatgggaaaaacctgctcccatgattcagttaactcccacagggtccctcccatgacacatggggattattacaagtcaaggagaaagttgggtggggacacggagccaaaccatgtcaagtgtcatcttagatataaaagtttacatatattattttagcttattgtttctttaatggtaagactgaatatgtaaaacaaaaatagaaaaaaatacagaattaaaaattttatttatggtttgttgctaaaatgkaatactatgtggctattaaagtcaggtattcaaatgacattcaagaacatgccacgagtacttgaaaaatgatgttattgggagtaagagaaactctaacaatacagtcctatattttaacatatatttattacctatatttatgtatttattttcatatattt

SEQ ID NO: 418652 - DNA, 485 bp, Homo sapiens
atggaaatccacattttctgagcacttagaacatgcatatgtcacaatgtgctttataaaatcaatctcattaaatctttataaggctttttagttattactatcagaacatttcaagggttcagaaaagttagaaaagctactaaacctggatgaagtagttttagagttcaaatctggagttttctggcagttatccccttcctttttcattagactaatccattatgyaagtggtacccattatcaactggcagcatgacgtgcaagatgggctgtcacataagactatctaaatctagaaattgcagtagaagagcttaatccttctcagtactccttgaagcctggtgggattccttagagcctcccaactgttactgcttccttctactacagacccagacaaatgaaaacaaaatgaagtgcaaaagcaaagaaaggataggctgaactatgtgatatttaggaagattggactattg

SEQ ID NO: 418653 - DNA, 485 bp, Homo sapiens
atggaaatccacattttctgagcacttagaacatgcatatgtcacaatgtgctttataaaatcaatctcattaaatctttataaggctttttagttattactatcagaacatttcaagggttcagaaaagttagaaaagctactaaacctggatgaagtagttttagagttcaaatctggagttttctggcagttatccccttcctttttcattagactaatccattatgcaagtggtacccattatcaactggcagcatgacgtgcaagatgggctgtcacataagactatctaaatctagaaattgcagtagaagagcttaatccttctcagtactccttgaagcctggtgggattccttagagcctcccaactgttactgcttccttctactacagacccaracaaatgaaaacaaaatgaagtgcaaaagcaaagaaaggataggctgaactatgtgatatttaggaagattggactattg

SEQ ID NO: 418654 - DNA, 528 bp, Homo sapiens
ctagggtaactgacaaaggtggcagtattttaaaggaattagcttctatagatwtcagttgtttttcacaggaaaccagtaaaccagttaatgttttcttgagacaatagtaataaataataatagaagtcttcaagccagaacatgagtagcaatgatactttcacattttatgcttcagtggtttctatggcataaactgaaaaaaagtttctgtctctggatttactatggtactttcaaatggcaaccacagttaaaattatatatagtatgaaaatatataatgcatatatgaagtctgtctctctccccgctctttccctctctccctccccactctatgtatagaaaaacactctcacacacccacacaaatatgtaattttattgtttcaaaattaagaaaatatttcctctgcaccaggaagtcattagaaagaattattgtatctcaaaattgttttgttttctcaataatatcttcaaatctcataaaattatttaaaatgcataatatattatatt

SEQ ID NO: 418655 - DNA, 594 bp, Homo sapiens
atattaatccatgtgtttctataaaccctaatcttcttaatctattatactgttaagtaatatcatcttattaataatgataccataagatataggcatatttaattgtgtaaaaataaaaaaattggaagataaaataggattaataattcattattttaataaggtttttattgagataaaatttacataacataaaaattgccattttacagtgaaaaatgccgtgtcatttagcacgatagtgttgcacaaccaccaccacgatctagttctcaaatatttttatcgcccccaaaagaacccctatactcattaagcagttactccccatcctccctcttctgaaacactggcaaacaccaataggctgtctttattaatctatctactctggacattttatgtaaatgaagtcatacaatatgtgaccttttatatctggctgctctcatttagtgtaatatttttgaggctcatctgcattgtaccatgtgtaagtacttcacttctttttatggatgaatatggtctcctatacatactattttttgtttawttatctgttgacgaacatttgcattgtttctatct

SEQ ID NO: 418656 - DNA, 661 bp, Homo sapiens
aaaaatttgttcaaaagcaacaataaaaaaataagttgattaaaaaaatgtgcaaaacacccaaacatatatctcaccaaagaagatatacatttggcaaataagcataagaaaatctcacatcatgtgtcattagggaaatgcaaattaaaacaatgaggtacctctacaatgtacctgttaggatcaccaaaatgcaaaacactggaaacaccaaatgctggcaaggatgtggaacaagaactatyacacaatgttggtggaaatgcaaattgtgtagccacttcggaagacagttcggcagtttcttcgaaagctgaagatactcttagcatatggcccatgaattgtacctcttggaatttacctaaatgagttcaaaacttatgttcacacaaaaacctgtacattgatgtttatagcagctttattcatggttgtcaaaacttggaagcagccaagacgtccttcagtaagtgaatagtaaaataaattgtcgtacctttaaactacagaatattttttcagcattaaatagaaatgccctatcaatccatgaaaagacaaacaatccttaaatatatattattaagtgaaaaaagccaacctgaaaaagctacataatatatgatttcaactatagggtcattctgaaaaaggc

SEQ ID NO: 418657 - DNA, 661 bp, Homo sapiens
aaaaatttgttcaaaagcaacaataaaaaaataagttgattaaaaaaatgtgcaaaacacccaaacatatatctcaccaaagaagatatacatttggcaaataagcataagaaaatctcacatcatgtgtcattagggaaatgcaaattaaaacaatgaggtacctctacaatgtacctgttaggatcaccaaaatgcaaaacactggaaacaccaaatgctggcaaggatgtggaacaagaactattacacaatgttggtggaaatgcaaattgtgtagccacttcggaagacagttcggcagtttcttcgaaagctgaagatactcttagcatatggcccatgaattgtacctcttggaatttacctaaatgagttcaaaacttatgttcacacaaaaacctgtacattgatgtttatagcagctttattcatgkttgtcaaaacttggaagcagccaagacgtccttcagtaagtgaatagtaaaataaattgtcgtacctttaaactacagaatattttttcagcattaaatagaaatgccctatcaatccatgaaaagacaaacaatccttaaatatatattattaagtgaaaaaagccaacctgaaaaagctacataatatatgatttcaactatagggtcattctgaaaaaggc

SEQ ID NO: 418658 - DNA, 575 bp, Homo sapiens
aataggtcagcattcctagagaagggatatcctattcagatcgtagaactacagatatagttgacaattcattagtaagaaaatctctgtgttagaggtgcctagaaaactaggaaaagcacttgacactcatgaattccatatacagattctcattgcattaagagtgggatttgagatattcatactaaaaagtcagagtataggttaatccctgtgagattcccagctaagattaaaataaatattaataattaataaataatattattaagcattaatgtctctataacctctccagtcatcacctgtaatgtgaaatttcctcttgtgcatagcccccttcactttctaggacttgtgcagtaaaataaaatgtgttttcagatacattttttcatattatatctgatttttagaaatctatagaatacataataatcaagaattatttagatttaactgctatccaccttccgctactgataatcattgcctctcataagttatacctttctttattgaattctgcatgctagtttrtttttcatttttgtctgataagtcattaaata

SEQ ID NO: 418659 - DNA, 556 bp, Homo sapiens
tatctcttaaactataaggtcatccatatataaggctggctgaaaaatccttcacacataaaagtgtgccccataagtgcacacaacagactcccttttcacgtctattgttcacagaagcataaccaagggaaaatattcaaagataagagtctcgtgagtgtagagaagtttcaatccrtgattttgggaaaagctgttcacattaagggtgttatcttcttctggagagaaactttcctggtgagcttaaccttcagagttccaatgggtgcactgttccaagagtgtggaaggatccttctcagttgtgagattatgaacctgaagttcaaggtcctgaagtcttgctgtagtgtagattgcaaggacagtctttctctgatgttctcagaagatctgatcataggcagccctctagcagtacttgccctgggcttgtgatggtggtggacacagggagggactcctctgcctgccaaaacggaagggaaaaataggaaggactttttctagtggttttggcactagctcaatatcaagagaatagagcacc

SEQ ID NO: 418660 - DNA, 556 bp, Homo sapiens
tcaacaaatgtcctatgtatggcttttgaactaataacagttttcactttttcaaagggtggtagaaaaattagaggaagaagaagtaggaggaggaagaaaagggtgaggacaccatggaaagcaaaatgygtgtggtccacaaagtctaaaatatttactgtctgtccatttacagaaaatttgctcaccctcttagcacatagtaaaatcccaagtaatatgtgttaaataaatgcataaatgacatttcagagcattgggcactcaaaagtacagtgacacagatagtaccagatactcacatccacacaaataattaccaatagtacatactaggaattgtggtttctatgagcttgattagttcagagtaaaaaataagagctggaataaataagttttacttatcaaaagaacaagtgttcacaatgaaagtccactgaaatgacacaattaaactataagatggcatattgtcttagtatatatctgagaagattaattttatttgtcaacttgatggggctaagagatgctcagttaactggctaaa

SEQ ID NO: 418661 - DNA, 585 bp, Homo sapiens
cattgggcactcaaaagtacagtgacacagatagtaccagatactcacatccacacaaataattaccaatagtacatactaggaattgtggtttctatgagcttgattagttcagagtaaaaaataagagctggaataaataagttttacttatcaaaagaacaagtgttcacaatgaaagtccactgaaatgacacaattaaactataagatggcatattgtcttagtatatatctgagaagattaattttatttgtcaacttgatggggctaagagatgctcagttaactggctaaaaatacttctgggcatgtcattctgaaagaaattgccatttggatcagtaaagaagattcactcttcccaatgtggccaggcattgtccaattcactggggccctgaatagaacaaaaagggtgaagaaggacaaattatctgtatctttccttgagctgggacacacatcttcccctcargcaaaggaaatcctggttctcaggcctttagactccagggcagaggaacttaacaggagttctccccacccccgccatgttttcaggtcttcagccttgaactgaa

SEQ ID NO: 418662 - DNA, 612 bp, Homo sapiens
tcatcttattttctctttgcattttagtttgaatttatactcatgcatcctcaagatcactaattatttcctgagccatatccagtcarctgatgagtccattaaagattttttaattgttattagctttttatttccagcattttcttcgaatccttttttagtttccatctctctgcttacattacccacctatccttgaatgttgtctaattctacctgtagaatactgactattataaatatacatatgtgtgtgtgataatttcaatttatgtgttacttctgagtcatattcagatgcttgctttgtctcttcagactgttatttcctgagttgttcaatgtcttacaatttttttgttgaaaggtgagcatattgttatcagataataggaactgatgcaaacacacttttactgtgaggctttatgttaatctgactgtgagttgtattgtgtttcatctttgtcacagctgtaggtgtcagtagtttcaaattctgctagcatctactttctttcctcttttgcttttgtgttctcctatgaacttcttaaagtctgagacttgcagctctttcaactgtaatccacggttattaggctgaaa

SEQ ID NO: 418663 - DNA, 612 bp, Homo sapiens
tcatcttattttctctttgcattttagtttgaatttatactcatgcatcctcaagatcactaattatttcctgagccatatccagtcaactgatgagtccattaaagattttttaattgttattagctttttatttccagcattttcttcgaatccttttttagtttccatctctctgcttacattacccacctatccttgaatgttgtctaattctacctgtagaatactgactattataaatatacatatgtktgtgtgataatttcaatttatgtgttacttctgagtcatattcagatgcttgctttgtctcttcagactgttatttcctgagttgttcaatgtcttacaatttttttgttgaaaggtgagcatattgttatcagataataggaactgatgcaaacacacttttactgtgaggctttatgttaatctgactgtgagttgtattgtgtttcatctttgtcacagctgtaggtgtcagtagtttcaaattctgctagcatctactttctttcctcttttgcttttgtgttctcctatgaacttcttaaagtctgagacttgcagctctttcaactgtaatccacggttattaggctgaaa

SEQ ID NO: 418664 - DNA, 610 bp, Homo sapiens
tgatacttggtacactagtgctttatacataactacagaaaccaatatctccatcattcccctgtcagagagcaatagactttattaatatttcttcagtcagaattaggtatccagcattttaggattcctttgaggaatgagtagcagttgtacaggcagtgaccttgttggtacctcattccaggtgatcataaactggtctctatggatacttattatcctacttacccttggcttaaatacatctcttcatagatttcactgcctccctttctttgccctgtatttccactgactttaatattgacattgttgtgccaaagrtaagttttttattccttgagtgtcttgtgataaacctttcctgaatggtggaaatgttcaccttgtaaatctccagaaacatatggtctcatctcttgtactctcaactgcttcactcccagagaggaaaattgtctgcaggtgaggttttctgtttttgttttatttctaagatgtgataataatggtgatggtggtaatgattgtgatgcagactttgggtactgcctactctgtgccaggaactgttctcagtaccttgtttgcaataactcagccaaat

SEQ ID NO: 418665 - DNA, 533 bp, Homo sapiens
tctgtctatatttatagacgaattagatacttgaaattaaaagagaaatttaagtgatctttaaaaattataaatggccaggagagcacacgaacaataaaggggagaaagattctggaaacctagaaatatgattttagtctttgaatctctgcagacccttcataaaaacagaaaaagcaaggaggatatcaaagccaaaaacctatagacattatctactataaaaccaatatttgggaggctgaggcacgagaatcatttgaacctgggaggcgtaggttgtggtgagctgagaccatgccactgcactccagcctgggcaactgagtgagacagtgtctaaaaaaaaataatattagtgggtagggataaattggcagcacatataaagacacacayagtttaagaaactgtagaaaaaaatgggagtaaaccaagaaagacagaaaacaacaaaatcatcatcagatactttctggataccttagcaggccattccattctgggaatagcaacagaaactaggagaa

SEQ ID NO: 418666 - DNA, 642 bp, Homo sapiens
ataaggcaccatagcagtttggagatgcaagttcagccatcttagtcacatacagctttgatatttttcaataaaatattagttttatgaatgtttcgattttgactttcattagataacatacgtagacataattccaataagctatatttatattttataaaggacttctttccttaaatatttaccatagaatttatggccttctgtttttcttgacaaaaagctgactgtaacaattggagaattggcatttcacagtgaaacctcagtcaattccagaataaaattgtagaaaatattgttagatgaatatattccattgtatgatttcgaaattaatgaacaacataatgcttgccacatgygcatgtaatgagattagagaaattagcaaccacttatgcctagatcgatgaaactaccattacattatctataaaggatagcatcttattaaaaaagtgtaacaaatacactcatataatatatttgttgcttttcttatattatgtattataacttaacattttgactccgtcaagtaagttttgttactaattaagagttatggaaaatatagtgtagtatatatttttaaattgtacctatatttctggttcccggccctatctgtatatt

SEQ ID NO: 418667 - DNA, 564 bp, Homo sapiens
acagtgtgaacaacatagtgagaacccatctcttaagaaaaactcctaaactgttttactttttcagaataattttactattttgcattatgctagaaatgtataattgagagttgcttcatgcctacaatagcactyactattcttgtttttatattagccattctcataggtgtgtaatggtacctcatgtggtttcaatttgtatttccctaaaattactaacgagattgaacatctctttatgtccttgtttgctatctatgtagctactttggtgaatcgctttggttggtgtcagagttcagaggcattgggactgataagaaaacattcaacaaattttaagtgtagaatgacgcataatgtttaggaaaaataatttcctctaggatattaaactgacatttggtcttctctctttaaatattttgttattttaatggcatttttattactgaagaagatagttggaaccatattctcttaatacaatgtagctttgaagggcagtcggatttaaggttgtttgtagagaagatggaatatagagcttaatatctt

SEQ ID NO: 418668 - DNA, 525 bp, Homo sapiens
gggcatcttgttatactctctgattagttttaacggtttatttattagtttttctaagtggtccaygtagtaggttgcaaagagtaacaatctcattcatccttcaacatgttccatatgttatttcattttcctttcttatagcattgactaggacttgctcaactaccttaaatgtagtggtgagagtagcaatacttgtcatattctctctcactaaaagaatgcttgccatattattaagtatagtgattgttctaggtttaggtctcaaacataaaacaatggaatacttttttccagaataccaattagcatattccctagaaggggtagatatggcacttgattaatgaatttactcctagcctgcactagaaccacctggatgaacttagtgaaatctgggctttaaccctggaatttttcattgaattggtctgggttaggactcaggcatcagcaagattctcagataatgcttacatgaaacgaccttgataatcactggagcaggtcattaaa

SEQ ID NO: 418669 - DNA, 525 bp, Homo sapiens
gggcatcttgttatactctctgattagttttaacggtttatttattagtttttctaagtggtccacgtagtaggttgcaaagagtaacaatctcattcatccttcaacatgttccatatgttatttcattttcctttcttatagcattgactaggacttgctcaactaccttaaatgtagtggtgagagtagcaatacttgtcatattctctctcactaaaagaatgcttgccatattattaagtatagtgattgttctaggtttaggtctcaaacataaaacaatggaatacttttttccagaataccarttagcatattccctagaaggggtagatatggcacttgattaatgaatttactcctagcctgcactagaaccacctggatgaacttagtgaaatctgggctttaaccctggaatttttcattgaattggtctgggttaggactcaggcatcagcaagattctcagataatgcttacatgaaacgaccttgataatcactggagcaggtcattaaa

SEQ ID NO: 418670 - DNA, 576 bp, Homo sapiens
ttggcaggatgtgaagaaaaaaactcttgtgcactgttggtaggaacatgaattagtacactgtgggaaactgtatggttgtttctcaaaatctaaaactagaaataccacgtaattcwgaaatcccacttctggatatctaccaaaagatttaaaatcagtttttcaaagagatgtctgcactcactcccatggtcattgcagcactattcacaatagccaagttatgggattaatataagagtccatcaacagatttattgtttaagaagatgcagtacatatacagaacagaatactatcaacctttaaaaaagtaactgtcatttgcaaccacatggatggaagtggagaacattatgctaaataaaataagcctgacacagaagacaaatatcacaggtccttacttatatatggaatctaaacaactgaattagaagcagagtagaattgtggttccaaaagatggggttaggggaatggggaaataacaaacacaaggtatagaaatctcagacacgagaaatatgttttcctttttattttttagttctattgcaatgtggtgaatat

SEQ ID NO: 418671 - DNA, 562 bp, Homo sapiens
tctccaaaaaataatgaggcaaaagactaaggtaacactccaaactgaatagcctttgactatctgactttcaaaactatgttaatgtttcacgcactccaaaaaaataattagaatcaagcaggatggggtagggatactccaaaatcgattaacaatatgaaatgaacyaaaatgtactataaataaagaaccaaactgaagagggtggccctaactaaatttggaaattagtattttgattcaatattctaagacaaagaactatatataaaactatcatactcattagtactattgttttctaagagatatgggttagcaattctgaaagtatactatgtgtatgctatgttgagtaagatatatgttagagagatggattacatataagaaaaaggagagctagaaaattctatgatgttggactgaaaaatcgagatatcaacaaatggtttcttttagctagattataaattacatacgaatacactcagttacaaatgtagaaataggtatagaagagtgtttctgtgtctagaaatagatatatttcctagtc

SEQ ID NO: 418672 - DNA, 452 bp, Homo sapiens
gtgtttgaccagaatccattcatgctgcagttactcaggttactattgcccatacasgtcagttccagagtcctcagccttgctcctccaaatatgcaacattgcacttgtgttattgtaacttacttccccacctttgagtcctagagtgactgtctcctaaatgtaccaagacatgagtaagctttaaaacataacaggtcagtgtcaagatggtaagaagcttctgtgttctaatgtaattacatatcccaaaatcatgccattaagatcatccaactaacttcctttcctcaataaatcttcatcaggtttttgaattggctcttagaatgtatccattcattaagtacttacaaggtctcggctccatgccaaccactgttctatatcaactcttcatgaattggtctctgaatccagccaattttgggcgcaccacccaaggagaa

SEQ ID NO: 418673 - DNA, 452 bp, Homo sapiens
gtgtttgaccagaatccattcatgctgcagttactcaggttactattgcccatacacgtcagttccagagtcctcagccttgctcctccaaatatgcaacattgcacttgtgttattgtaacttacttccccacctttgagtcctagagtgactgtctcctaaatgtaccaagacatgagtaagctttaaaacataacaggtcagtgtcaagatggtaagaagcttctgtgttctaatgtaattacatatcccaaaatcatgccattaagatcatccaactaacttcctttcctcaataaatcttcatcaggtttttgaattggctcttagaatgtatccattcattaagtacttacaaggtctcggctcyatgccaaccactgttctatatcaactcttcatgaattggtctctgaatccagccaattttgggcgcaccacccaaggagaa

SEQ ID NO: 418674 - DNA, 533 bp, Homo sapiens
agtacccatctcatctacattgtctcattttatcagtctaccagtgaatcctactggtgtgttaacaaaattctgacaaagaaactatttgattttttaattagtgactgcaaaacaggcatgctatggtttgaatgtgtcctccaaaaaacctatgttgggaacttaatcttcaatgcaacagcattgggaggtggagcctaatgataggtgattagtccataaagctacccttatgaatggattaatgccatttgccagagagggtttattatcatgggagtgggtttcttataaaaaactcgtttggtatcccactctgtcacttgccctcctgccataggatgacacagcaaaaagacccttsccagttgctggcatctcagtactggacttcccagcccctaggactgaaataattttttctttataaatcacccagtctctggtattctgttaagcagcacaaaatggactaagacaaggcatctttcatattttcttatagcagatggtgctcagtaaatgttgct

SEQ ID NO: 418675 - DNA, 547 bp, Homo sapiens
acattatttaaagtgtatcacagaacctgggaatgtaaagagataatgataaggttgaaagtggtactggatttctcattttacacaaagacaagccaatatatattaaatcatcactgatctkaagaaaaaaatgtacatagagaacaaaaacaatcagcaatagtataaaacaagcttatgtcttacaaaatcactagggataaaaggtaataaaatttgaataacttgtccaaactcacataggtaatgactgaaaaactcagagtccaaaccagaattgaaatctagagagtccgaccacttcatagctacattagaaatatacttatctgagaaaacatgcttttaaatgattatttgaagtttagatttatttgttattttatgcaattttatatcaaatttaaaaatagaatccctgtcttgagattttaaatgatttggcagcagaaaattggctgtgtggtctaatacacattcacacctccatagcatgtataacttgctttcaggaataacccctccacctcccaaaaaataaaaa

SEQ ID NO: 418676 - DNA, 545 bp, Homo sapiens
ttctttttgtgctatgctgtatcaccatttcactagtgcctctctcatcgactatatcaggaaagaaagtcatacaccacttctggacaactggctaaaatgaggttatttccaacaayagttgttttgactacttagacaatggaaaacaattccccttagatccagaaaacaagaagcactcactgtattgaaggaaaaggaagaggaacacaaatgataatattaaactataaataatttagatattcctgttgatataatatactgagtttaggaagctctatatttttctgtgaccagcagctagcatttctaattaatctattaggttggtgcaaaagtaattgcggttttaatacatattaaagtgaatttttaggccctaaataaaagacgattataaacaaataaaatatagaagtataaatcataatccaaaagtaggatgtgattttttttaatttatagaattgactgtcatagctccttaacagtgttatttgcccatattcttctgtttctcttccaagggcagagagtaa

SEQ ID NO: 418677 - DNA, 260 bp, Homo sapiens
tgtgtactgtcaagtcattcatctttgaatatatgtaaagacccagtagcattcatgttttgggtcacctaatgcacactgytatattaaatgcttgctgttataactctactcacttcttaacttccacttttagaggaccctttaaaacatatctccattatccctttacatttaatacatttattgaggctttataacttgccagaatctacgctaaatactttcaacaattatcttgttaaaactgcatagtacac

SEQ ID NO: 418678 - DNA, 541 bp, Homo sapiens
aagtgggagacagagtaaaaatagtacaaaagaaacttatatggtaagagaattactgtgataacttctagggggaaaaataaagtggaataaggtaagggaggaggcattgaggatcccagatgtggatttgcctcattaggaagatgtcatttagccaaatatttgaaggagctgagggaaatagccatgcagataccttggggtagcacatttcactaaaggaagcaaccggtacaaagcctcaaagtccaatatagctaagactagtactctgatattcactagttcattcttttagcaaataagtatcaagcgcactctgtgcaagcactgtgctatccttyggagctacaacagtaaaaacacagtgccgaggcaattcttaattccttcctctttcaccttaggagtgcttcctacaccatgagccacaccaccattatcaaagtctgcaaatctattttactctcagaattctctgtaaggaataaataattatgttcaaatatatgggtgttataactgatgaagataattt

SEQ ID NO: 418679 - DNA, 594 bp, Homo sapiens
gattgattcagttgctggctctgccactggtgagctttggaacattctggaaacaatttacatctgtgacagtttctccagatgtgaaaatatcaagtgtaaatggatgatgactttcttttcttttctttttttaatttgctgacmtgttcaaatactaaatattttcaagtattttaaagataatttattgtaatgtcaataaactacttcctaataactagaactcaattcaatacttttgaaggttatgtttctcacagtattaaaattccccctggtaatttatgcttttagctaaagtaaattcatgagatttttaactctcataaaacaccaataaaatcattgtatatacaagcagagaaaagcaaagctctcatgtaattatctagataattacagtaaaacttttgctatggaaaatgcgattaactattttatcaagtaaaattaaagagtgtgctttatattttgaacttagatttgttgccaatttcttcccacttttaacaattaaacacttatttggtacatattatatgaacttgctgtgtttctttaaaaaagctttaaataacaaaatattgccca

SEQ ID NO: 418680 - DNA, 693 bp, Homo sapiens
tgacttctcaaaggagaagggatatgagcacaaaggtattagggaaggattgcaagaggaaatgtcactcaaatttttaaggagagtttggcaagtaaacaattraaaaaagaaggtgtttcaggtagaaagaaaaactcatgcaggaaacacatctaagtcaggtcacagggtacatgtggagaactataaataacttagtatttccagagggcaaactactcaataaggaaatgagaaagacagaacagtagaattagggaagagcccagaccaggccaggctttatgatctgagttttgtccattaagagatgagaagcatctgaaagttttcaataaggagagtaacttggtaaatttatactagcaaaatctctcacggtggctatggtaagctcatttggaaacaaaagagagaagttgagatgaatagttcagagaaggaaaaagactttcaaacatttaaactgcatgcatttgaacatttctatcaaaactttgagataggatgacatgtagggataaaaacacgtaagtcagtgtatgagtaatactttaaatcgtgaggcttcatgacccagagagtgcatgtctgttaaagaaatgcctaacacatgcaggataaaggtactaataactgtggcaaactaggtcatttcagattgaaaatctatatcaaaaatcagcaaag

SEQ ID NO: 418681 - DNA, 693 bp, Homo sapiens
tgacttctcaaaggagaagggatatgagcacaaaggtattagggaaggattgcaagaggaaatgtcactcaaatttttaaggagagtttggcaagtaaacaattgaaaaaagaaggtgtttcaggtagaaagaaaaactcatgcaggaaacacatctaagtcaggtcacagggtacatgtggagaactataaataacttagtatttccagagggcaaactactcaataaggaaatgagaaagacagaacagtagaattakggaagagcccagaccaggccaggctttatgatctgagttttgtccattaagagatgagaagcatctgaaagttttcaataaggagagtaacttggtaaatttatactagcaaaatctctcacggtggctatggtaagctcatttggaaacaaaagagagaagttgagatgaatagttcagagaaggaaaaagactttcaaacatttaaactgcatgcatttgaacatttctatcaaaactttgagataggatgacatgtagggataaaaacacgtaagtcagtgtatgagtaatactttaaatcgtgaggcttcatgacccagagagtgcatgtctgttaaagaaatgcctaacacatgcaggataaaggtactaataactgtggcaaactaggtcatttcagattgaaaatctatatcaaaaatcagcaaag

SEQ ID NO: 418682 - DNA, 594 bp, Homo sapiens
gattgattcagttgctggctctgccactggtgagctttggaacattctggaaacaatttacatctgtgacagtttctccagatgtgaaaatatcaagtgtaaatggatgatgactttcttttcttttctttttttaatttgctgacctgttcaaatactaaatattttcaagtattttaaagataatttattgtaatgtcaataaactacttcctaataactagaactcaattcaatacttttgaaggttatgtttctcacagtattaaaattccccctggtaatttatgcttttagctaaagtaaattcatgagatttttaactctcataaaacaccaataaaatcattgtatatacaagcagagaaaagcaaagctctcatgtaattayctagataattacagtaaaacttttgctatggaaaatgcgattaactattttatcaagtaaaattaaagagtgtgctttatattttgaacttagatttgttgccaatttcttcccacttttaacaattaaacacttatttggtacatattatatgaacttgctgtgtttctttaaaaaagctttaaataacaaaatattgccca

SEQ ID NO: 418683 - DNA, 590 bp, Homo sapiens
cattctactagatgattgtcaagatccttttcccttgtaacaaaataggtttgtactattcgaaaagggcaagcattggcattactcatgaacattatgtgatacagtgaaatgatcactaggcttaattttgaactggggataatgctatctgtgataatcaactctcagggttgctctgaagactaaagccctgggatcattcattttaaaagaaaagaacggtgactcatcatttcaagcttttcagtaagtgtctgttattactaacattaacctaattatactaataatatacattagcaggccacatttgctgggagggytctggaaattataaatgtatttgaagttccatctcatatcaatggtaagagcaagaaacacaagctcatagttggatttttgatagttgaggaaacaactcagaactcagtcattctataaatacattaactaagaaaatttaaatctagaggcctctcactatattctcgaagtggaaatactactcagtaggcagaggagtcatgctggtgactttagcctgtcctactgttcccaaataagtttttcagtattgactctgg

SEQ ID NO: 418684 - DNA, 587 bp, Homo sapiens
acctacatgtttgttatcttcttctgtatccataactacacaaatctcttgggaaattctctctgaaattaaaaaaaaaaaagttttaaggtttcaaacaaaacatgtaacaaggccctaggatgctgaaacataaacttacctgatgttcttagctgttgaccaagaatagggaggttttgatttcaggccaagtggagtaatctgtgtacacactgagatggccttgattcagtttactacccaagtccataaacctatccattgaacactttgtgggtgaagaaccagccattgtgcaactaacagaaataagatattttargatgcattcggaagggagtagaggtgacaaccatttgaagttcaacaattcaatctttccatgtttataaggagtctcccagaacctaacagatttccacttcttaaacagattcactctttaggccataggttatctcctgtgcacagattcaatgtgccatccagtgccttggttaagtacgttgtgttccttgacattcctctagattttcaattcagtacaattaagttcctgttttgactattgcactaacaagtaa

SEQ ID NO: 418685 - DNA, 587 bp, Homo sapiens
acctacatgtttgttatcttcttctgtatccataactacacaaatctcttgggaaattctctctgaaattaaaaaaaaaaaagttttaaggtttcaaacaaaacatgtaacaaggccctaggatgctgaaacataaacttacctgatgttcttagctgttgaccaagaatagggaggttttgatttcaggccaagtggagtaatctgtgtacacactgagatggccttgattcagtttactacccaagtccataaacctatccattgaacactttgtgggtgaagaaccagccattgtgcaactaacagaaataagatattttaggatgcattcggaagggagtagaggtgacaaccatttgaagttcaacaattcaatctttccatgtttataaggagtctcccagaacctaacagatttccacttcttaaacagattcactctttargccataggttatctcctgtgcacagattcaatgtgccatccagtgccttggttaagtacgttgtgttccttgacattcctctagattttcaattcagtacaattaagttcctgttttgactattgcactaacaagtaa

SEQ ID NO: 418686 - DNA, 587 bp, Homo sapiens
acctacatgtttgttatcttcttctgtatccataactacacaaatctcttgggaaattctctctgaaattaaaaaaaaaaaagttttaaggtttcaaacaaaacatgtaacaaggccctaggatgctgaaacataaacttacctgatgttcttagctgttgaccaagaatagggaggttttgatttcaggccaagtggagtaatctgtgtacacactgagatggccttgattcagtttactacccaagtccataaacctatccattgaacactttgtgggtgaagaaccagccattgtgcaactaacagaaataagatattttaggatgcattcggaagggagtagaggtgacaaccatttgaagttcaacaattcaatctttccatgtttataaggagtctcccagaacctaacagatttccacttcttaaacagattcactctttaggccataggttatctcctgtgcacagattcaatgtgccatccagtgccttggttaagtacrttgtgttccttgacattcctctagattttcaattcagtacaattaagttcctgttttgactattgcactaacaagtaa

SEQ ID NO: 418687 - DNA, 558 bp, Homo sapiens
ctttccatacttcattatgactattttatgggtttttgttttgttttggctattgtgattatgattttttatattttataactagttatttgcagtgttttcaaagctaccaaattttgtgaatggaaatttttaggacattaaagttyataataggttattctctttacataggaaagctcacattgttttgtgagttgattttttttcttacccaactacttattatactctattagtacttattttatacctttttatgtttgaaaaggaggttacatttaattcttattttctaatatttaaccttcttatttatttttcttttcttgttacattagcctacaactcaagtacaaggatacattcaatagtgacaccagtcatcatttttctttctctaactttaagggaaactcttgataaaacagtgattctcatccctcttttcctttatttagtttttgtttgttttcatagggatggttgttgaataatgcaaaatgctttttggcatctaattaaaagtttatattatttggtttttaatttcataat

SEQ ID NO: 418688 - DNA, 558 bp, Homo sapiens
ctttccatacttcattatgactattttatgggtttttgttttgttttggctattgtgattatgattttttatattttataactagttatttgcagtgttttcaaagctaccaaattttgtgaatggaaatttttaggacattaaagtttataataggttattctctttacataggaaagctcacattgttttgtgagttgattttttttcttacccaactacttattatactctattagtacttattttatacctttttatgtttgaaaaggaggttacatttaattcttattttctaatatttaaccttcttatttatttttcttttcttgttacattagcctacaactcaagtacaaggatacaktcaatagtgacaccagtcatcatttttctttctctaactttaagggaaactcttgataaaacagtgattctcatccctcttttcctttatttagtttttgtttgttttcatagggatggttgttgaataatgcaaaatgctttttggcatctaattaaaagtttatattatttggtttttaatttcataat

SEQ ID NO: 418689 - DNA, 558 bp, Homo sapiens
ctttccatacttcattatgactattttatgggtttttgttttgttttggctattgtgattatgattttttatattttataactagttatttgcagtgttttcaaagctaccaaattttgtgaatggaaatttttaggacattaaagtttataataggttattctctttacataggaaagctcacattgttttgtgagttgattttttttcttacccaactacttattatactctattagtacttattttatacctttttatgtttgaaaaggaggttacatttaattcttattttctaatatttaaccttcttatttatttttcttttcttgttacattagcctacaactcaagtacaaggatacattcaatagtgacaccagtcatcatttttctttctctaactttaagggaaactcttgataaaacagtgattctcatccctcttttcctttatttagtttttgtttgttttcatagggatggttgttgaataatgcraaatgctttttggcatctaattaaaagtttatattatttggtttttaatttcataat

SEQ ID NO: 418690 - DNA, 589 bp, Homo sapiens
tctaaactattctattgggttgcattaaagaaacaagctgtttttagataaattgtatgctatataaatggccccatagtaaatgacagagactatgcttggtactgtttatgactggggggcaagggagaaattgagaacttattatatttaaaagaacaaaaattctgctttgtgtttatttgcaattgttgttggtttttkttttttttttttttttttgagacagtctccatctgtcacccaggctggagtgcagtggtatgatctcggctcactgcagcctctgcctcccaggttccaacaattcttctgcctcagcctcccaggtagctgggattgcaggcgtgcgccaccatgcctggctaatttttgtatttttagtagagatgggggttcactatgttggccaggctggtctcaaactcctgacctcaggtgatctgcccacctctgcctcccaaagtgctgggattacaggcgtgagccactgcacctggcctattcacagttttaaagtagcgtgatttggtttcaaaaaagctattctttcttttttgtcttcctctttccactcctcaatgaaaat

SEQ ID NO: 418691 - DNA, 589 bp, Homo sapiens
tctaaactattctattgggttgcattaaagaaacaagctgtttttagataaattgtatgctatataaatggccccatagtaaatgacagagactatgcttggtactgtttatgactggggggcaagggagaaattgagaacttattatatttaaaagaacaaaaattctgctttgtgtttatttgcaattgttgttggttttttttttttttttttttttttgagacagtctccatctgtcacccaggctggagtgcagtggtatgatctcggctcactgcagcctctgcctcccaggttccaacaattcttctgcctcagcctcccaggtagctgggattrcaggcgtgcgccaccatgcctggctaatttttgtatttttagtagagatgggggttcactatgttggccaggctggtctcaaactcctgacctcaggtgatctgcccacctctgcctcccaaagtgctgggattacaggcgtgagccactgcacctggcctattcacagttttaaagtagcgtgatttggtttcaaaaaagctattctttcttttttgtcttcctctttccactcctcaatgaaaat

SEQ ID NO: 418692 - DNA, 566 bp, Homo sapiens
ctgtaattttgtatctactaaccaacctttgtagatcccagccactagtaaccactattctactctttatttctatgaaatcaacatatttagcttccacatatgagtgagaacatgtagcatttatctctttatgcctgacttattccacttaatattctccaggatcatccatgttatccacaagtgacagaatttcattctttttttatggctaaatagtatcccattgcatatatatatactacaaattaatctgaaagtcacttctcaaaataatacaaatggccaacaaattacatggaaaaatgtgcaaacttgctaatcattagcaaatctaaaccacaatgagctatttcatcccagttagaatggctattatcaaaaagacaataacaaggatgcagagaaaatggaamtcgtacacaccattggtgggaatgtaaattggtacagccattatggaaaacagtatggaggttcctcaaaaaaaaaataaaaaaagaaagaaattgagcctatatgatccagcaatccaactactggttatttatccaaaggaaggg

SEQ ID NO: 418693 - DNA, 465 bp, Homo sapiens
agtgtgacatttctaacagttctttctcacatatacataaaaaagataagcctatccttctgccccccacaaaaaagaatatctaatttcattttaatgaaaggtagcacatttactcatataaactggtaaactgcttaaacatttaacatgtggttagcctcatggctttgtgggtgggcgaggtttccggctctcggtgtttggaaaaggctcctctgtgcattttgtgtctttacactcagctctacgcaagctttatgtttgtctagaawtcatttaatatattcctggtcccagatgaattccagttaactttttatattttaaaatgggattttttacttctgagaacggatacattaattaaaggactataagtaagtatcctgcacgatggtctttaaaaccccacatttaacactttcgtctcattgcagagtctatgttcacaataaaaggcat

SEQ ID NO: 418694 - DNA, 630 bp, Homo sapiens
gaaaactattttgttttgaagggaagaaaaatgagcacttataagcttaatgtcatgtcttagggtgtttaaatttcaagcatattaaactatagcaaatatcaattatatttataatttctcatagcttttttgattaacaagcctattataagcagccaaactataagatattaaaagttctttgcatcgscttttgtgcccctataacctcatacctaaaatgtgcctaggtaaaactaagacactttttactattcttttaaacaaatctattttgcttccttctgaaaacacctacttgattccttctatatgccatataactcatgagtggcagaaaggttaacatgctataaaggggtgtacaaagtagttatcacctcatgttgaaaataattattgtaaattagtatattcttcctgctttgattattgaaaataagaagagcaagccctccggcttcttccataccaattagacaaacttctcccaccctttcttcctaaactcttaccattgttttaaaaaggagtataatagcataaataatgtcagtgtaagctacagttttcatagataatctagatgagtttatgtttttacttcatttttgtccctgccatgat

SEQ ID NO: 418695 - DNA, 262 bp, Homo sapiens
ttataaatatgagctttgttccagatgtaagtaattaaaaacagtttgatccatttaggtcttgtttttttgatctttcagcaggactagtatatttagtgtagagataattatttcccacaactgagggaagacccttctttatactcaacctaatgccctgtaaattattgtctkacttactgtgttttctggtgttagaataacatgaactgggcaatttataaagaaaagtgatttatttggctcatgattctggaga

SEQ ID NO: 418696 - DNA, 262 bp, Homo sapiens
ttataaatatgagctttgttccagatgtaagtaattaaaaacagtttgatccatttaggtcttgtttttttgatctttcagcaggactagtatatttagtgtagagataattatttcccacaactgagggaagacccttctttatactcaacctaatgccctgtaaattattgtcttwcttactgtgttttctggtgttagaataacatgaactgggcaatttataaagaaaagtgatttatttggctcatgattctggaga

SEQ ID NO: 418697 - DNA, 597 bp, Homo sapiens
ttttggcagaaatcttgtaggccaggaaaaaacaaaaggatatatttaaaatgctgaaaagggggaaaaaaaactgtcagccaagaatagtgtacccagcaaaggtgtccttcagaaatgaagaaaagatgaatactttcctggacaaacaaaagctgagggagtatatcaccaccagacctgatacacaagaaatgctaatgggaatcctttmagccaaaaaaagcacaacactaatgaataatatgaaaacatttgaaaatataaaacttattggtaaaagtatacagtgaaatccactatactcatgctgtaatggttgtgtgtaaatcatttttatcactagtttgaaggcaaaaaggcaaacctattaaaaatagtaacaaatttaaggatatgcaatatgaaaattgtgacatgaaaaatactaaatatggaggagtgagtgaagtaaatgtgtagtgtttttgttgttaaaatcaaagtgttcatcaccttaaaacaatttaatgtggtttttgtaagcatcatggtaaccacaaagcaaaaacttatattagatacacagaaaataaaaagcaagaaattaaaaacata

SEQ ID NO: 418698 - DNA, 615 bp, Homo sapiens
cataaaataaatagtttttcaaattattttacaagktggtctctcttacaagaacatactttaacactgttgtattatggcacaattatctcaacattacatacatctacaattaccttaattaacatctgtaacaaattttagaatcaaaagttaagaacaatcccactgattaatataaagcattgatttgtttagctaactataaaacataattctatgttcatttactttctccaagaaaactgtcagaatataaatcaccaaagttaccaaaaaaagcaggtatatgcttctccaaaatttatccgagtttacaatatcatattttagtgaattgtcaaaatttcattttacattataaaaactaatactgcttaagcatcaatctataattattattaaggttctctgcaggccatgtaggcatgcattacttgtcatttttttaaaaaaatactaaacagttttacagtttacttcataaataaagaggacttctgcatttaggccaactactacaagtccatcatgctacttctcatctataagaattgattctgttttatgtacctacttttggcagttttttaaaaatagatatatttaatgtgt

SEQ ID NO: 418699 - DNA, 434 bp, Homo sapiens
attctggaacaggctagtagtctggtttatcttatacaaataaatattgaagagcatgttgaaggactaaaagagaaagggtgcagtgatgattgcaggtatctggaagcacataacacagttttaatacagggaatagacttcactaaacctgaaataactagaaatggggaaagcagtaagaaatcatcacaacaatataagtgagagagaattaagacttaaactacacaaactattcctaaaactgtcgggaacttacttctactactataagtagtccgagattagattagatttagagaagaacacatattatgcaaactttcctagtaagattttttattccatatagtttaatattctaattagcttcttttaagatttttctatcatcrcaatatgaacaaaaacttaagaattactagacaagg

SEQ ID NO: 418700 - DNA, 583 bp, Homo sapiens
gaagccagaaatttaataaagggataagagaattaaggtggtgaatatggcacaattaaatgtaaatcttagtaatatttaataaaacatattattcctacttaaaattaaaaaccaaacagatcaagtcagaatccaagatacctaaccagtagacaagcaagaaatgacctgactcttcactgaaaggcaactagaaataaatagtataatgcagataggtgtattctaaaaccacaaatgcataccttcatacattaaaaaaytgtatgtggcttaagatttagtgactggtatattttcacagaagcatatccccagtggagggtcaaaatattttttttgttaccttactttacagtaagaatggagcataaggttggctcagaccaatgatgtaaatacataccagtaggtaatatatagtttagtggtccatattttaatacattttatattgtgctgatttcagcttgcaagcctatgaacaaaattaaacttcctttacttgcgtcctaacttcaatacttctaatacaaaagtatttgtggtaaacaaaaaaaagcagtatgttcaatagtga

SEQ ID NO: 418701 - DNA, 583 bp, Homo sapiens
gaagccagaaatttaataaagggataagagaattaaggtggtgaatatggcacaattaaatgtaaatcttagtaatatttaataaaacatattattcctacttaaaattaaaaaccaaacagatcaagtcagaatccaagatacctaaccagtagacaagcaagaaatgacctgactcttcactgaaaggcaactagaaataaatagtataatgcagataggtgtattctaaaaccacaaatgcataccttcatacattaaaaaattgtatgtggcttaagatttagtgactggtatattttcacagaagcatatccccagtggagggtcaaaatattttttttgttaccttactttacagtaagaatggagcataaggttggctcagaccaatgatgtaaatacataccagtaggtaatatatagtttagtggtccatattttaatacattttatattgtgctgatttcagcttgcaagcctatgaacaaarttaaacttcctttacttgcgtcctaacttcaatacttctaatacaaaagtatttgtggtaaacaaaaaaaagcagtatgttcaatagtga

SEQ ID NO: 418702 - DNA, 591 bp, Homo sapiens
aggttgacttcacatttctcctacctagtttcatttcctacccttcatgctttcaagtcctcaagcatgaacgtgatgctctccaatggattccgttaaacactgyaatttcacagttccttgtacagctgcttatgcagtttggataattagtgttgcataaagtgaaaacaaacaaagatatctccctcactcacatattattcaaggaaagtctacataaaactgctgcaagcaggatacacacattttatttcaatgcactaaaataatgccatgtacattagaaaacactcagttttgcaaagcctaattattcagtttgttcttttagactatttgtcatgccattatttcttcactatttcattactcaaaatatcagaaactggacaaagactaaaatcaaatcccattttaaatttttcattgatataagtaatagagcaggagttttactgagtaaatagttataggaaatcagatcaatatcaatgaagtatatcagtgttttccgtaagtccacaacatgttttcctgaagactaccagtaggattccacttgtcaaattgccttctttttgtttctat

SEQ ID NO: 418703 - DNA, 560 bp, Homo sapiens
tgattactttgaagagggtattatgggtttctgtaaacagatttggtgttgcatgtttggtacgtctgccatatgattcggtgccatggaaagttttgtgtgtttagtaaataattcccatttaaattccaagtaattgttcattgcagaaagttgaacttctaagtctaacctcacccatgattaccataaaaaaaaacagtgttctgctaaccgacagcatacacccatttgttctccaaaggatcatgcatacttaaaggatgattcctctatctagtggacacagagtaaatgcggacctttgagatgaaaaaatggatgtcagtggtaccctatacattcagatctttaggaccaaagctgtaatagaaaactgttcctatatcattatcagttgacctaaggtaaktacaaggagtttcacaatcaagaatgtttcttggatgtcctttacagtgcacagaaaaccttcaaagcccagacaatagagaagaacaattgtacttacgtcatcgagtagagcaatatggtttatacttgtgatacaagaccaatac

SEQ ID NO: 418704 - DNA, 588 bp, Homo sapiens
catttgtctcatcttttttccagtatattccctaggcaaggaaggaaagggtgggtcacatcatagacatcatttcttatttttgttgcattaggagggattgggctgagaactactactctaccatatctgtcagccttgacaaaattgtctttttcacaaaaaatagtttgtttatactgttttcatcataatgcttagctttggcttcctttatcacattcgtgtctttccagatgtgcttcagtttgcattgagcatgaaatgacctgcccatctttcactcaagtattccctgtcattcttcatgctttttctctataacaatttaacacaatctggcacaaaatsctttacttattcatgctaattgtctgacttccttatctagaataggaggccaaacaagacaggatgtttttgtctggtttatcactttatttctagaactggaatggtgcctggtctagtgtaggccctcagtgactgctgagtgaccagtatgtaatgtgcaaatatgaacaaacacttataagctgtataaggacatcatagatttgagtagtagtactttttcatttaatgtac

SEQ ID NO: 418705 - DNA, 588 bp, Homo sapiens
catttgtctcatcttttttccagtatattccctaggcaaggaaggaaagggtgggtcacatcatagacatcatttcttatttttgttgcattaggagggattgggctgagaactactactctaccatatctgtcagccttgacaaaattgtctttttcacaaaaaatagtttgtttatactgttttcatcataatgcttagctttggcttcctttatcacattcgtgtctttccagatgtgcttcagtttgcattgagcatgaaatgacctgcccatctttcactcaagtattccctgtcattcttcatgctttttctctataacaatttaacacaatctggcacaaaatcctttacttattcatgctaattgtctgacttccttatctagaataggaggccaaasaagacaggatgtttttgtctggtttatcactttatttctagaactggaatggtgcctggtctagtgtaggccctcagtgactgctgagtgaccagtatgtaatgtgcaaatatgaacaaacacttataagctgtataaggacatcatagatttgagtagtagtactttttcatttaatgtac

SEQ ID NO: 418706 - DNA, 588 bp, Homo sapiens
catttgtctcatcttttttccagtatattccctaggcaaggaaggaaagggtgggtcacatcatagacatcatttcttatttttgttgcattaggagggattgggctgagaactactactctaccatatctgtcagccttgacaaaattgtctttttcacaaaaaatagtttgtttatactgttttcatcataatgcttagctttggcttcctttatcacattcgtgtctttccagatgtgcttcagtttgcattgagcatgaaatgacctgcccatctttcactcaagtattccctgtcattcttcatgctttttctctataacaatttaacacaatctggcacaaaatcctttacttattcatgctaattgtctgacttccttatctagaataggaggccaaacaagacaggatgtttttgtctggtttaycactttatttctagaactggaatggtgcctggtctagtgtaggccctcagtgactgctgagtgaccagtatgtaatgtgcaaatatgaacaaacacttataagctgtataaggacatcatagatttgagtagtagtactttttcatttaatgtac

SEQ ID NO: 418707 - DNA, 588 bp, Homo sapiens
catttgtctcatcttttttccagtatattccctaggcaaggaaggaaagggtgggtcacatcatagacatcatttcttatttttgttgcattaggagggattgggctgagaactactactctaccatatctgtcagccttgacaaaattgtctttttcacaaaaaatagtttgtttatactgttttcatcataatgcttagctttggcttcctttatcacattcgtgtctttccagatgtgcttcagtttgcattgagcatgaaatgacctgcccatctttcactcaagtattccctgtcattcttcatgctttttctctataacaatttaacacaatctggcacaaaatcctttacttattcatgctaattgtctgacttccttatctagaataggaggccaaacaagacaggatgtttttgtctggtttatcactttatttctagaactggaatggtgcctggtctagtgtaggccctcagtgactgctgagtgaccartatgtaatgtgcaaatatgaacaaacacttataagctgtataaggacatcatagatttgagtagtagtactttttcatttaatgtac

SEQ ID NO: 418708 - DNA, 490 bp, Homo sapiens
ccagcaagatccacgcggaaggcaggtgatttctgcacttccaactgaggtacctagttcatctcattgggactggttggacagygggtgcagcccacagagggcgagctgaagaagggtggggcgtcgcctcacctgggaagtgcaaggggtcaggggatttccctttcctagccaagggaagccatgacagactgtacttggaggaacagtatactcttgcccagatactgtgcttttcccaggtctttgcaactggcagacccagagattccctccaatgttttggctcagtgggacccatacccacagagcccagcaagctaagatctattggcttgaaattctcgctgctagtacagcagtctgagatcgacctgggatgcttgagtttggtgctgggaggggcgtccaccattgctgaggcttaagtaggcggttttatgcttacagtgtaaacaaaggcactgggtggttcgaactggatgca

SEQ ID NO: 418709 - DNA, 592 bp, Homo sapiens
ataacaccatgtgcaaatgagggttgcttgtctaaaaaaaaagcaaagtcctgaaatacctgcagcaaaggtatctccataaaagattccaaataacagaggtcttctgggctgcctagagtctaaaaaaaggtgttaagcaccttaggtgtctgtgtgcccatagtatggcaaaatctcctcaccatagagggtactaactctctaacctrcacacagactcacactttgatagcaacaactgcagtattagaacaaggaaatcagtctggctctgaatcgcagctttgacgtcaagttggagtgtgcctttgggaaagtcactttttggggtggagcttcatcttcctcacttctaaataagatgtactctattcagctttttattggaggaagtggggaaaggttctatatcacatgcccttttgagattctgaagaaaaaaccatagactcaggaaaaatacatctttttcatacaatatcactgagaaacagatttcctgaagcccatccatcaatcccatatctacccctggaattcaggtacagaatctctgggatagactcccatctggcagtaaaattctatg

SEQ ID NO: 418710 - DNA, 592 bp, Homo sapiens
ataacaccatgtgcaaatgagggttgcttgtctaaaaaaaaagcaaagtcctgaaatacctgcagcaaaggtatctccataaaagattccaaataacagaggtcttctgggctgcctagagtctaaaaaaaggtgttaagcaccttaggtgtctgtgtgcccatagtatggcaaaatctcctcaccatagagggtactaactctctaacctacacacagactcacactttgatagcaacaactgcagtattagaacaaggaaatcagtctggctctgaatcgcagctttgacgtcaagttggagtgtgcctttgggaaagtcactttttggggtggagcttcatcttcctcacttctaaataagatgtactctattcagctttttattggaggaagtggggaaaggttctatatcacatgcccttttgagattctgaagaaaaaaccatagactcaggaaaaatrcatctttttcatacaatatcactgagaaacagatttcctgaagcccatccatcaatcccatatctacccctggaattcaggtacagaatctctgggatagactcccatctggcagtaaaattctatg

SEQ ID NO: 418711 - DNA, 568 bp, Homo sapiens
gcataatatttttatcaagaattgctttgtgtcttctattcttccctcttctacacgagaaatgcagttattgtggctatcatctgtctgggctggaaaatgttgttgctttaagttcattcattgatagatgtgaggaaccaatcagaattgatggacataactctgctagatccaaagatcttgggtacaatgattgggagggaactttgggttgtctctcatgcagtggatgtaagtatattccatattttaaaagaaaattacatttatattttcatgtcccaaatagtagaattttacagaaattgcaaactcatcacctacctcatttcctcttttttctaaacacacaggcaaacaatacttcccagcctctcatgttgttagaagtagatttgtgacagttttagcaaacagatgatatatgggaaaacatgagaaacatttccaagcatgatacatcaaaactcrttatggttgatcccccatgatcaatccccccaccccaaacaactggacaccggtgcagctgaggatgacagagctgtcagcaacgtggggccca

SEQ ID NO: 418712 - DNA, 592 bp, Homo sapiens
gtctccttctatctatgagttttagttcaatttcttccagccttgatgttcttatttcatcattaaatcattttaacacctgttccatcagccttcccctctttatcttgccctctttggcatataaacatgctcaagttttctactcttaacatgaaatgctgaggatgctattctttaccaattcaacttcaagactaaagacacattttggcaaagagattctttacagcccaggtattgttgacgtttctgaaaagaggtgcagttattgtggagagccctagtgaagctctgcaatgggatttcagacacagcaatattgacctctgtcccctggaaagaaactgaagaagtgtcagagtcgctaatgttggggaaagagaaagaaacatgctattgtttacatgagctgtagtttgtagctgtacacagaccatactttaagatattgccagggacttcaagaagaggaagagagaggtctatgcatgttcaattcccrctgtagaatttattcaagaaagtctcacttgtttaaatcagaaatgttttttgttttaaaagcaaatatatgaacaggtaaacacgc

SEQ ID NO: 418713 - DNA, 553 bp, Homo sapiens
ctgtcttacaccataaacaaaaatcaactcaaaatggattcaagacttaatttaaaaccagaaacacaaaacacctagaagaaaacagacaaaaagatacttgacattggccttggcaataattttttggaaatgataccaaaagcacaggcaacaaaagcaaaagtagacaattgggacaacatcaactagaatgcttatgcacagcaaaggaaacaatcaacacaatgaaaargcaacttatggaatgggaaaactatattcgtaaaccaaatgtcttagtccactgaggacattataacaagatacaataaactgggtaactttaaacaatagaaacgtatttcttacagttatgaagactgggaagtccacaatttagggactgacaaatttagtgtctggtgaggacatacttcctagttcatacatggccatattttcactataacctcccgtgacagaagaggtgaagagtctctctttggcctcttttaaaaagtctctaatcctattcatgtatatttgtcattaccacatagttacttccaaa

SEQ ID NO: 418714 - DNA, 553 bp, Homo sapiens
ctgtcttacaccataaacaaaaatcaactcaaaatggattcaagacttaatttaaaaccagaaacacaaaacacctagaagaaaacagacaaaaagatacttgacattggccttggcaataattttttggaaatgataccaaaagcacaggcaacaaaagcaaaagtagacaattgggacaacatcaactagaatgcttatgcacagcaaaggaaacaatcaacacaatgaaaaagcaacttatggaatgggaaaactatattygtaaaccaaatgtcttagtccactgaggacattataacaagatacaataaactgggtaactttaaacaatagaaacgtatttcttacagttatgaagactgggaagtccacaatttagggactgacaaatttagtgtctggtgaggacatacttcctagttcatacatggccatattttcactataacctcccgtgacagaagaggtgaagagtctctctttggcctcttttaaaaagtctctaatcctattcatgtatatttgtcattaccacatagttacttccaaa

SEQ ID NO: 418715 - DNA, 609 bp, Homo sapiens
aggatttctctttaataaatagtgttgagaaaactggatatctacataaaaaatgaaataggcccctgtcttacaccataaacaaaaatcaactcaaaatggattcaagacttaatttaaaaccagaaacacaaaacacctagaagaaaacagacaaaaagatacttgacattggccttggcaataattttttggaaatgataccaaaagcacaggcaacaaaagcaaaagtagacaattgggacaacatcaactagaatgcttatgcacagcaaaggaaacaatcaacacaatgaaaaagcaacttatggaatgggaaaactatattcgtaaaccaaatgtcttagtccactgaggacattataacaagatacaataaactgggtaactttaaacaatagaaacgtatttcttacagttatgaagactgggaagtccacaatttagggactgacaaatttagtgtctggtgaggacatacttcctagttcatacatggccatattttcactataacctcmcgtgacagaagaggtgaagagtctctctttggcctcttttaaaaagtctctaatcctattcatgtatatttgtcattaccacatagtt

SEQ ID NO: 418716 - DNA, 395 bp, Homo sapiens
acaggaggaaaaaatgattatgagttcaaaatataaagccaaatagcttgcattagcaaagtaagaatttttaatgtagtattttgtaaatagtcaattgccatatatttcatattttgtaattaaaatgtaagtatatatactcagttctcctcatgtaactttaagctcttgactaaatattaagtgatttattctttgcttactgaagtttcagggtgtacaattgacttacattttaaagagaaaagcaacaaaaagacacgtgtgtacaagaataattttatgtaaaagaaggtaactgcatatatatatacaaattgagcaaaacatatttagaragcatattataatttcagaggacatatggtcttattctgccatgttaatatata

SEQ ID NO: 418717 - DNA, 621 bp, Homo sapiens
tatgtattgataggtaaattttaaattacaggtttatttagcatgctttatgtgcctggttatggaatgtatatatttcactacattggctctctgtgtgtagttttaaaatcttactattagttaacatgaccaggtaaaaggaaaatatttgctctgttactgcttaaagttatcattagtccctaatgaatgtgtgaaactgctgaacacacaaaaaatattttcagaatataactggtgagttgtttatgcatcgctgtgtaggtgtatacatatagcattgttacaattctgtagtttggawccaagtgcagaaaacgaatgtcatatagtagaaagaatatggaattgatgtcagaagacctagattgtcccatattcactgctttccactatagatatgctgatgcccaacagtttcttattttttgagatgagaatagtaataatagctatcacaactgggttttcatatttgctgagatggcattcattcttgtttttcatttaatatccatgaaaatcaaatttgaattatatctcaatttttgttatctcaattgttttagacttgtctaaattattttatttgaactctttttttgaaatgtgtttttt

SEQ ID NO: 418718 - DNA, 621 bp, Homo sapiens
tatgtattgataggtaaattttaaattacaggtttatttagcatgctttatgtgcctggttatggaatgtatatatttcactacattggctctctgtgtgtagttttaaaatcttactattagttaacatgaccaggtaaaaggaaaatatttgctctgttactgcttaaagttatcattagtccctaatgaatgtgtgaaactgctgaacacacaaaaaatattttcagaatataactggtgagttgtttatgcatcgctgtgtaggtgtatacatatagcattgttacaattctgtagtttggatccaagtgcagaaaacgaatgtcatatagtagaaagaatatggaattgatgtcagaagacctagattgtcccatattcactgctttccactatagatatgctgatgcccaacagtttcttattttttgagatgagaatagtaataatagctatcacmactgggttttcatatttgctgagatggcattcattcttgtttttcatttaatatccatgaaaatcaaatttgaattatatctcaatttttgttatctcaattgttttagacttgtctaaattattttatttgaactctttttttgaaatgtgtttttt

SEQ ID NO: 418719 - DNA, 589 bp, Homo sapiens
ttgggcaattatgttcagaattattttcactcaaatactcttctgagccagaaaggtagttaaggctccctccctcatgcccagtaaccagcactgaawtaaaatgtcaatgatataatgtagttacatttttaaatttcccgcttttgcctatctatatttgtttttcttttgcctctacaaaatggggacaagaaacttttagggatgttgtaaggattgaaccaatcactcccataggtttggtgtgaatcctctttgcttataggtaatttacattgtctaagtatcaactgcatgctcagattcctattgtgatcagaaatttacagagtcagtactattttcacctctttttgtgaatatttcaaatataatttgcatacagcaaaagcataaacaataattgttaatactaactttccttaaattgtttccctaatattaactagtatcttagaatgtgaaataacagctatttgagtaagtagcagataaattagtagatggttttgtccacagctctcatctttgagacaaagcagaaaagaaagcaatggcagtatttcatacagttttgcccttggag

SEQ ID NO: 418720 - DNA, 589 bp, Homo sapiens
ttgggcaattatgttcagaattattttcactcaaatactcttctgagccagaaaggtagttaaggctccctccctcatgcccagtaaccagcactgaattaaaatgtcaatgatataatgtagttacatttttaaatttcccgcttttgcctatctatatttgtttttcttttgcctctacaaaatggggacaagaaacttttagggatgttgtaaggattgaaccaatcactcccataggtttggtgtgaatcctctttgcttataggtaatttacattgtctaagtatcaactgcatgctcagattcctattgtgatcagaaatttacagagtcagtactattttcacctctttttgtgaatatttcaaatataatttgcatasagcaaaagcataaacaataattgttaatactaactttccttaaattgtttccctaatattaactagtatcttagaatgtgaaataacagctatttgagtaagtagcagataaattagtagatggttttgtccacagctctcatctttgagacaaagcagaaaagaaagcaatggcagtatttcatacagttttgcccttggag

SEQ ID NO: 418721 - DNA, 589 bp, Homo sapiens
ttgggcaattatgttcagaattattttcactcaaatactcttctgagccagaaaggtagttaaggctccctccctcatgcccagtaaccagcactgaattaaaatgtcaatgatataatgtagttacatttttaaatttcccgcttttgcctatctatatttgtttttcttttgcctctacaaaatggggacaagaaacttttagggatgttgtaaggattgaaccaatcactcccataggtttggtgtgaatcctctttgcttataggtaatttacattgtctaagtatcaactgcatgctcagattcctattgtgatcagaaatttacagagtcagtactattttcacctctttttgtgaatatttcaaatataatttgcatacagcaaaagcataaacaataattgttaatactaactttccttaaattgtttccctaatattaactagtatcttagaatgtgaartaacagctatttgagtaagtagcagataaattagtagatggttttgtccacagctctcatctttgagacaaagcagaaaagaaagcaatggcagtatttcatacagttttgcccttggag

SEQ ID NO: 418722 - DNA, 589 bp, Homo sapiens
ttgggcaattatgttcagaattattttcactcaaatactcttctgagccagaaaggtagttaaggctccctccctcatgcccagtaaccagcactgaattaaaatgtcaatgatataatgtagttacatttttaaatttcccgcttttgcctatctatatttgtttttcttttgcctctacaaaatggggacaagaaacttttagggatgttgtaaggattgaaccaatcactcccataggtttggtgtgaatcctctttgcttataggtaatttacattgtctaagtatcaactgcatgctcagattcctattgtgatcagaaatttacagagtcagtactattttcacctctttttgtgaatatttcaaatataatttgcatacagcaaaagcataaacaataattgttaatactaactttccttaaattgtttccctaatattaactagtatcttagaatgtgaaataacagctatttgagtaagtagcagataaattagtagatggttttgtccacagctctcatctttgagacaaagcagaaaagaaarcaatggcagtatttcatacagttttgcccttggag

SEQ ID NO: 418723 - DNA, 617 bp, Homo sapiens
gagctgggtctcttccttgtttctcctcttcaccagcgtcccaagcccttgcttttcactctcttccttcctctcactttccagcattgggttaagctctttataaattttaagctggcagctgaaactggcagaattaaatgagaaaaaagaaaaaggaaacctgttcagctatttcctcccacacgcttcctattctcagtccccttattcctatcatccttgcttttccctaacatcctggtatcaatctcatcttagtaagaaaggtgggaggaaagggcaagagaaacctgttttccttctcatagagctgctaggactgctgtttctccctctctacctacttctagaggtgctcccagccacacacaaggctcactgagcagtagtgagtatcaaggaaatgaaggttcaagaaaggttagctccaccccgccattgtttcatgctgagtcyctggcctacctctctggtctccttcctcttaaaatctcaggaatgagtcctacctcttattctctcatactattccagattctctgccctgattcttgagctatctgctctggtcggaaagcatcacctcaaggaagctggaggtcttggaaacgttc

SEQ ID NO: 418724 - DNA, 521 bp, Homo sapiens
tgagcatgaacccactgctgcatttctttagccataaagtgagtcccttggtcagaggcaatgttatgtggaataccatgatggtggataaggcgttctgtgagtccatagatagcagtcttggcagaataattgtgtgcaggataggcaaacctatatccagagtaagtgtctattccagtgaggaaaaacctctgctctttccatgatggaagaggtccaatacaatcaacctgccaccaggtggctggctgattaccccgaagaatggtgccatatggagggcttagtgttggtctctgctgctggcaagttggtcactcagcaatggccatagccaggtcagccttggtgagtggaagtccatgttgctgagcccatgcgtaacctccatccttgccaccatggccactttgttcwtgggcccattgggggatgacagggttgtctggggaaggaggctgagtggtttccacagagcgggtcatcctatccacgtgattattaaaatccttctctgc

SEQ ID NO: 418725 - DNA, 592 bp, Homo sapiens
ttggtaaaataaagttggtaaatgatcagatgatcatatcacaagctcaggatctaaattaatttctagccagattggcctcagagtctgctgatagrttagaaacaatgtagatcctttacacatttttttaaccctttgcccatctttgtaaagcatctgaggcttctgtgctttgttaatattttcctgtcctttgtagatgaaattttatatatctcttcattctacaaatgtgatttgaataggtattatgtattcagtgctgttctaggtacttagagtacatttgtaccccaactaacaaagatctccaccctcacagaatccacaccttggtagggggagaccaaaagcaaatgataaatatcagaaacaagtaaattatatattatgttcaaagttgacatatgctttagaaaatattttaaaagtagaacaaagtaagggccttacatagtagcatatgggggtttaaaaagggtagcatgggtagatctctgaaaatgaagcatgtaaataaaatcttgaaagaagcaaggaattagccatgaaggtacctgggcaagagcagggggagagcagacaaaac

SEQ ID NO: 418726 - DNA, 581 bp, Homo sapiens
cattcatgcctcaagtgttccttaacgcttgtgagttaggaactgttctagacagtgggaacatagctgtgaacaaaacaaacaaatgtccaagccattgtattacttgtattctaggaaaaagttataaaagtaaaaataaacaagttatttagcatattayacaatgatgagagtgccactggaataatgtagagctgaaatggagggcgcagagaatgtaacaggtggaagatatttcaggtttatttagagagctcagggtagacctcaataatgaggaaaagtaatgaaaggatatgagtaccacactgatttcaaaaactgataatagagctcctatggcttccaaaagaagttaaaaattgataacttattacacctctgattcgaaaggactttgaccaggaatttggtaatgattgagctataagaaaatactatatcaattgtaatctttttatcatgatgatttttagtgcaaatctcatattgtactgtatttgaaatctcatatataattcactgtcaaatgaaagaacacatatcatatgatttctgatacagttaattacaattat

SEQ ID NO: 418727 - DNA, 571 bp, Homo sapiens
tgtttgagttccttgcagattctggatattagttacttgtcagatgaatagtttgtgaatattttctcccattctctgggttgtctgtttactctgctgattatttattttgttgtgcagaagcttttcagtttaattaggtccaatgtatttatttttgttttcactgcttttgggttctttaatttgcttttgggttcttggtcatgaactcttttcccaaggcaacatctagaagagttttactgatgttatcttctagaacttttatggtttcagatcttaggtttaagtctttgatccatattgaattgttttttgcataaggtgagatatgaagttccagtttcatccttctacatgtggcttcccagttatcccagcattatttttgaatagggtgccctttccctgctttctgtttttgtttactttgttgaagatcagttggctacaagcagttgtctttagttctttgttccctattctgttccattggtctatggaacttatgggcttatttgtataccagtgccatgttgtttyggtagctatagccgccttgtagtat

SEQ ID NO: 418728 - DNA, 398 bp, Homo sapiens
tgaatgaaatctgttgtgtatctcctttgttctgggcctgtgctgtgcactataggaggcagatacagggcatgagggagaaagataagcagtccaaagtcactgtttttaggggaagactttaaggagatttctataaaatttcaaatgcatctcctatgcatttaaaaactgttggaaccagagatatggtgtttcctatagagtattggtttgaaaaatgagaaaatagggaaaagaatgaggttttcttgagttctggccagtaaaattttcaggtgaagtgagtataactaagccaaaaaacattcaggagcagtatcrgaagatgctcaggggcaagtgaccaccagtagtagacatacattaagttagaacaacagagtagcaggagagag

SEQ ID NO: 418729 - DNA, 619 bp, Homo sapiens
ctaaattgcacatattggaaattttctatcagccaatctgcttcctaggatcacatgcagataataattttaagatattgaagcaaataaaaaagtgatgccactgctttcaaagattgcagacatccaaacaatgatctatcctttttataatttctaaatagttttcattggaggttatgatgtttaaaaactccatatatcttcttaatgatcaaatcacattgggccaagtcccattctctcccttgaactctacaatttgatttttccatttcatgttggacaacacatttaataaatctaaaattgtgcttctgatatttcatccctgtaaatcctcttcctgtggccttccctattgcagtaaatggtaatcycattctttcttttattttgcccccaaattttagaatgcttcttgccttattttgccttacatctcatgcaccatccagtaacaaatctctttagtttaacctttaagttacacacagagttcaaacatcttaccacattcattgccagctcccttatccaaaccatggttttcttctccccggactattccaatagttttcccagtggtcttcctactctgtttttggcccatctcatt

SEQ ID NO: 418730 - DNA, 563 bp, Homo sapiens
tacaggtttaaaaaaaatactcccaggacttcatttttaaaaatatttcatggtattacataaaacctgatcattttacgaaggtattagttgaatagttctttctgttgactatgtgtatttttcatatttccattaaggtaatcagaattacataaataataaatcattattttgctaaataaaattagatacggccaaacagtcaatgaaagactgaaaaacaacaaacaaacaagaataaaatggataaataaattaataagatatactagggtggcacacatttatggaaatgaaataaaatgcctttctcacatagtaatttaccaaaatattccttctgcttattttaaaaactgtaactttagaagaaagttgtaatatgatttgtttttaataaaagactttaaatgtataaaatgctcaaatacatatttctgatttatasagaagagggaataaatgtggggtttggagcttggtgtatttctggattccttcattgcgtttacatttaagcagctaaacagttgtttggtgataaagaacaagtcttgata

SEQ ID NO: 418731 - DNA, 563 bp, Homo sapiens
tacaggtttaaaaaaaatactcccaggacttcatttttaaaaatatttcatggtattacataaaacctgatcattttacgaaggtattagttgaatagttctttctgttgactatgtgtatttttcatatttccattaaggtaatcagaattacataaataataaatcattattttgctaaataaaattagatacggccaaacagtcaatgaaagactgaaaaacaacaaacaaacaagaataaaatggataaataaattaataagatatactagggtggcacacatttatggaaatgaaataaaatgcctttctcacatagtaatttaccaaaatattccttctgcttattttaaaaactgtaactttagaagaaagttgtaatatgatttgtttttaataaaagactttaaatgtataaaatgctcaaatacatatttctgatttatagagaagagggaataaaygtggggtttggagcttggtgtatttctggattccttcattgcgtttacatttaagcagctaaacagttgtttggtgataaagaacaagtcttgata

SEQ ID NO: 418732 - DNA, 580 bp, Homo sapiens
ctaaatgccctctaatttgtgttgccaacacaaatctgtttgtttgtataaacgcgatcccatttatgcctacagtgcctttatgtgtttacatttcctgcttgttttaatttcaaaaaactttattttcaattttatttcaattttcaaaaaactttaagattgtgacaagatataaaaacttaccatcatatatacatggaatactatgcagccatacaaaaaaatgagatcatgtcatactggtatgctgagacaaaagagatgacactggagatgctgagcttctcgctgtttttgatgactggtatgctgagacatgtcctttggagaaacatggatggagctggggaaaattatccttagcaaactaatgcaggaacaggaaaccaaacatgacatgttctcacttataagtgggagcttaatgatgagaacttatggacacaaagaagggaacaactgacactggggcctacttgagggtggagggtgggaggagggggaggagcagaaaaaataactattgggtactrggcttagtacctgggtgattaaataatctgtacaaaacccagtg

SEQ ID NO: 418733 - DNA, 606 bp, Homo sapiens
acataatgccactaagctctatgcttaaaaatggttaagatgataaattttatgtcgtgtgtattttgccataataaagaatacaaatattggaagttattatttaatgagtacagcatctcagttttgcaatatgaaaactgctctggagatgaatgatagtgatcgttgtacaacaatgtgaataggcttaataccactgaactgtgcacttaagcatggttaggatggtaggttttatattatgtgtcttttaccrcaataaaaagtaatacaaaaaataatcacagaaaacctttaggtgataacagaagattttaaaacaggtggctgaactaaatcctttgaccatgttaagatgtacatttattttgtaccaaattgaaggctagagtagcaagcataataagcaatcaacaggtattcctttatctctttcacttaaagaaatacataggatgaggaaatttggatgttgacacacatttcagccttatcagaagcagcatgagttattctcccatataatacgtgggaaacatgcttcccattgccaaaaataccacatgagaaacctagttaatgatgaagctaggaattttgcat

SEQ ID NO: 418734 - DNA, 624 bp, Homo sapiens
tttctctagtttcagtggattattactgatcagtctgagtacataatgccaattactggcaccttatgtgatcagcagtgttaggtagtaacccagagcagcctgaaggagaggcaagaactttatgtcttctcaaaccctggattctcccttccctcccatgtcttgtctttcagaactatgtctattagagtctatgcccaaaagtattttaggtttcagaacaaatggatgagggcttccacttgaaaagtgaacttctatagaatgcatattaattttaaatcactttcacgtgctcttatttggaacccccagtaagaaaacaatattgtcccatagtgataataatgaaaaaactgagtctaggtaaattccagcaagtcrtcagaggtcacatcactaggcagtgatagaagaaccaatgtagtttctagtctaggactttccttcatctctagtgtgtcattaaatccagagtaattttattttgagtttacttgatcatgtgcatctccatttaaatctttgcaaggactctccacaattgacaatgtcaaattttgaaactagggatagcttggagatttttgtgtctcttttgctttcacctttccatgaaag

SEQ ID NO: 418735 - DNA, 519 bp, Homo sapiens
cagcaagtcatcagaggtcacatcactaggcagtgatagaagaaccaatgtagtttctagtctaggactttccttcatctctagtgtgtcattaaatccagagtaattttattttgagtttacttgatcatgtgcatctccatttaaatctttgcaaggactctccacaattgacaatgtcaaattttgaaactagggatagcttggagatttttgtgtctcttttgctttcacctttccatgaaagcctttttgtatgtggggacacatgagtgtgtatgtggatgtgtgtaggcatatgtgagtttatacgtgtgcatacgtgtatagacacatgtatgtgtgtatgtgggggcacatgtatgtgaatgtgtgggcaagtctgtttgygaagaagaagcagaggtgttactttacttgtgatttcttctcaatgttcagattttgggaacaacagaatgactttcagggtgcagagggcagtccactgacctggggtggttgcaccccagtttgcac

SEQ ID NO: 418736 - DNA, 609 bp, Homo sapiens
ttttgtgtatttgttgtatgttatttgatttgaagttaacaaaaggcttgcaaatattattctataactaatcattttaagctgacaacttaaccctgattatataaacaaactaacaagcacaaacaaaaatattgaaactctacactttaactgtgttgcttggcttattaactttttcttgcttcgatttatatcctattgtactgtctgtgtcttgaaaggttgttattcttgactcrttcatcttttagtctttttacttaagaaaatttagtttacacaccatagttaacagttataacattctgttcttctttgcacttactagtacaagtcaagttttggtgtgtttttttgtaccttcagatggtttcttattgctcaataatgtccttttttttctgattgaagtactcccttcagcatttcttgtaggacatgtctagtgctgatgaaatccctcagcttttgtttgtctgggaaagtctttatttctcctttacatctgaagaatatttttaccagatatactactctaggataaaagttttgtgtagttttttttccttcagcactttaaatatgtcacatcactcttctggcctg

SEQ ID NO: 418737 - DNA, 620 bp, Homo sapiens
tagatatctccactccagacaccttctctgaactgsagacatgtatatccaactgcccacttgaaatctctctttatattattcaaggcacctaaaactcaaaaatatccaagaagcaaattttgctgttcctaatttaaccttgtattcttctagtgttcatgtgttcattaaggccaccaaatcccttttgttaccaacccagaaatctaagtctcctattcttcccccatatgtattccatcacagtccagtggattttaaattctgtatcactgaagatggtttagctacgtgtaatataaatatttgtcaatttaaatttatttaagttttttttttttaatgtcaagtaataagaagtcctagtataagagatatccagggttggttaagtcagaaccagcattcttctctacttttctctctgttatcattaacaagtctgccttgttctgagactatttctattatagtagcaagttgactgcagcacacttcagtttcacacacaatttcaacaatgcccagcggataaaaaggccatctcgtcttaagtatctccttttaggaatgcagaaacatttttccagaaggctcccagtggcctctcccttaca

SEQ ID NO: 418738 - DNA, 620 bp, Homo sapiens
tagatatctccactccagacaccttctctgaactggagacatgtatatccaactgcccacttgaaatctctctttatattattcaaggcacctaaaactcaaaaatatccaagaagcaaattttgctgttcctaattwaaccttgtattcttctagtgttcatgtgttcattaaggccaccaaatcccttttgttaccaacccagaaatctaagtctcctattcttcccccatatgtattccatcacagtccagtggattttaaattctgtatcactgaagatggtttagctacgtgtaatataaatatttgtcaatttaaatttatttaagttttttttttttaatgtcaagtaataagaagtcctagtataagagatatccagggttggttaagtcagaaccagcattcttctctacttttctctctgttatcattaacaagtctgccttgttctgagactatttctattatagtagcaagttgactgcagcacacttcagtttcacacacaatttcaacaatgcccagcggataaaaaggccatctcgtcttaagtatctccttttaggaatgcagaaacatttttccagaaggctcccagtggcctctcccttaca

SEQ ID NO: 418739 - DNA, 577 bp, Homo sapiens
agaataaataccatttcaatgtaaaccagatgaataaattgagctacagatatattctactcattgactgaagtcacccaaaagacctcataccccaagaaaacaatcaaggaaggcaaagggggggtggaaataatttttattgtgccctttccttgggcctgtttctttgtcagactcttcacatatctttcttcattttttttcaagtcatatttgaaatattttgatattggcaaatactacttctcttaccaccccccccacattgatatttgaacatatctaaatttttcaaatcatatatctaatgagtttgatattcagagtatataaaaactcatacaactcaataataaaaagacaaataacctaatttaaaaatgagcaaaacttttggatggatgtttctcctaagaagatacacaaatggccaacaaacacatgaaaagatkctcagcatcgtcagtaatttatcccatttaataagtacaacagtgttacataggttttaatgttattttcttacaaccaagaaaacgatcaaaataagaaggatattggtttaattcagatt

SEQ ID NO: 418740 - DNA, 518 bp, Homo sapiens
aattttaccattaacattccaactaattttatatttagggattatgtattcttttttcttcaagagtgcactccaaattgttaagcttctggctctacaaatcctgcatctgcctttgcttctttcattgcacttaatatattgtgtcatcttttacttgattacacatctctgttgcctcccgggtgtcaaggatgcaaatctaattatttctatctaatatccccagcacctaacgtagtaaaagctagcagttgttcaatatattgttgttcactgaagtctaattgatggctattgcaaagaaagtggagactggtgatgctatgcctcagatagaaaccctaaggcaacatcaagacctgaagtggtatttttcctccccaaagacccagacacttctgagaccccatttygactttgcaatattgaaaggcaggaacagaagcatatttggcagtcatgaatggggaaaaggccaccacagagcctctgcaaacctggacatccgtgtgcct

SEQ ID NO: 418741 - DNA, 551 bp, Homo sapiens
tataaccaggtccagcaaatattaaagattattaggcattaagccaggattggagaggaatgtgaaacattatataaaaacagaaaagaagcctggcgcggtggctcacacttgtaatcccagcactttgggaggctgaagaggggggatcactcgaggacaggagtttgcgatcagcctggccaacatggtgaaacctcatctctactaaaaatacaaaaattagctgggcgtggtggcaggtgcctgtaattccagctactcaggagactgaggcaagagaatcgcttgaacctgggaggcagaggtttcagtgagccaagaccacgccactgcacttcagcctgggtgacagagcgagactctgtctcaaraacaaacaaacaaacaacaaacaaacaaagaacagaaaaggagctagaaagagagaggaaagcttgggagagcatagagaagatgctctaacttggatgtcaaagacacagaacaatggagaaggaaaaccctgttaaaaatggaggtgggtggaggtacagcaaatattgtagggt

SEQ ID NO: 418742 - DNA, 611 bp, Homo sapiens
tgttagtctcattcagttcttcttaatatttccccaggataactggtccttggcccctgacagtctctttcccactgctcagaccctcccatcttgggctattcaagaagcacaatcaggagttcttagcttggttccatttctgccatcaatttactgtgtatctataggtaaattaccttacttayctaggcctttatctcctcatttctaaagtgagaatttgacacaaaattactcattcagctctaaaatcctgccattttatagcaatagaaagttggaagaagaaattgtgcgttagaagttgcataaacttaagcatatgcttgattcaaatgcagatgcactcaggtgaaataatttttaatttctctttttaatgttgaataaagtcatgatgttctataatatgtgcgcttttttccaaaatgaaggaaggagacctttttcttaaagttgtaaaggatccaacaatgcccagtgttattgttgcttgaattccaattactggggaagcattctgcacatctttactcatcacatttcaacatgtcatcttctctaagtgaaaccagttgtattaaagcagctgtgaaactccagtcatc

SEQ ID NO: 418743 - DNA, 583 bp, Homo sapiens
cagttataatagaggaccagtgtagtcatgggcaaaacagatggctgcctacccctgaggacaagggagtcttagaattcctcaaatataaaaaaaaattatctctcatacctgcagtcacaaagaaccagtaattctcaccccctgtatcttctccaaattatggcaacatacttcctgtcagaatgcaaatgtgatcccctacagctgctatttaggcagcctcacagactgagtttccagctgtgtttctttctagcccagtggttctcattctctgtgtttgcatggccctgtggtctaatgcttcatccagacacaatgtgactcacctttttccctccytcaacttttaaggggaagaagttgatgagagcaattttcttaattaaaaaagatcttctgtgcattgtatttaaaccttttacctggtactgcttattgctagtgaagtgtagtcctaaataccatatataatcatttcagttacaagtatttgaatctgacattcttcatggtgtcatagaaagaacaagaaggtgtttaggtattctatgcctttaatcacctcaagaaacactga

SEQ ID NO: 418744 - DNA, 627 bp, Homo sapiens
agaatgacatgttcaaagagctaaacaaaattaatctcaatcagtatttccatatttcagcaaaagtatccatcaaaaatgaaaaaaaaaattattatcagtaaacaaaaattgagataaactgttgccagaaaatgtattctaaaggaaacattaaagagaatccttcaggctgaaatgaaacactaaacagtaagttgaatccatgtgacaaaataaataacaccaatataaataagtgcacaggtaaatgtaaaatacagtatcaatgtattttacatttacaagtcatttttcccttctattttattttcaaaaaattgtataaagcaataattctacattgtgtttataggcatatgatgaataaagacacaacttgtatgataattacagcacagagaaggaggaagaaaatgaagttatataagagccaggtttttgtatatgaatgaagtcagtgttcatctgaactaaattgttgcaaattaacgtgttaattgtaatccccagggaaaccactgaaaaaataacaaaaataaacagtaaaataaattacartttattggttagagctacagagaaaaaaaagaaatgatagtgatattaaaatactacagagacaaa

SEQ ID NO: 418745 - DNA, 569 bp, Homo sapiens
tttatccatagcaatatgtttccagaatccagtttacattacttacatccatactgctgttacaaacaaaaatcagtaacagattcttacacatttacataaagaaattagaattgagagaattagaatggagtaagcaagttgagtctcttctgttcagcattttctcccacaaggatgtctggcattccagacaaattgtctggagaaactgttacctttaactgagttgggataattctcccatccagtgtcttttgtttagctgaaggattttcctaaccctatcagaggcccaagagcaacttagccccttcctgctgctgcagaccttccctagactgggcattgatctttgccatatgattgtcccctaaattgtgaagaagggtaaggcctttagccttgtgctgtctctgtttttggaacatctcaatctacatctttagaggaccagagagaagctgtgaccaccctctcctccatckttttttttcttttgttaattgttcttattcctctggttttattttatcttatctacatcaccaatgacataaaaagattct

SEQ ID NO: 418746 - DNA, 612 bp, Homo sapiens
cttctctggttcctgactactgcttactgacctttgcgttgagackttataccttgaccagactccctgttcttcattcaaacctagactagatgacatgaagatagagacccttgtgactattaccctttatgacagaatgttaagcaagccttttagagtgtaatcaatagtagccaatcaaatcttatatctgtatgttagcctttgtacggaaaatgttatagttcagcccctccatttttgcttatagaaacaatcctcatttttcccccacactaggagcactgatcactattctttggtgtaattctgctcccttgtcagctgccctacctttgtgcttgagtaaactcttttaaccggatgctgagccttttgactgttttatgttggcattcgctacccttcatagttcttagctgggacaaatccctgtaacaaaagaaagattcacaagagaaaaacaaacagaagtttaataacatgtatacttcatgtgtacatagaagatatccagggaaaatgagtaaatctcaaagaagtggcttaaatttaggcttaaatgccatcttcagctgaaatgataagagtatttgggtaaggagcagt

SEQ ID NO: 418747 - DNA, 612 bp, Homo sapiens
cttctctggttcctgactactgcttactgacctttgcgttgagactttataccttgaccagactccctgttcttcattcaaacctagactagatgacatgaagatagagacccttgtgactattaccctttatgacagaatgttaagcaagccttttagagtgtaatcaatagtagccaatcaaatcttatatctgtatgttagcctttgtacggaaaatgttatagttcagcccctccatttttgcttatagaaacaatcctcatttttcccccayactaggagcactgatcactattctttggtgtaattctgctcccttgtcagctgccctacctttgtgcttgagtaaactcttttaaccggatgctgagccttttgactgttttatgttggcattcgctacccttcatagttcttagctgggacaaatccctgtaacaaaagaaagattcacaagagaaaaacaaacagaagtttaataacatgtatacttcatgtgtacatagaagatatccagggaaaatgagtaaatctcaaagaagtggcttaaatttaggcttaaatgccatcttcagctgaaatgataagagtatttgggtaaggagcagt

SEQ ID NO: 418748 - DNA, 612 bp, Homo sapiens
cttctctggttcctgactactgcttactgacctttgcgttgagactttataccttgaccagactccctgttcttcattcaaacctagactagatgacatgaagatagagacccttgtgactattaccctttatgacagaatgttaagcaagccttttagagtgtaatcaatagtagccaatcaaatcttatatctgtatgttagcctttgtacggaaaatgttatagttcagcccctccatttttgcttatagaaacaatcctcatttttcccccacactaggagcactgatcactattctttggtgtaattctgctcccttgtcagctgccctacctttgtgcttgagtaaactcttttaaccggatgctgagccttttgactgttttatgttggcattcgctacccttcatagttcttagctgggacaaatcccwgtaacaaaagaaagattcacaagagaaaaacaaacagaagtttaataacatgtatacttcatgtgtacatagaagatatccagggaaaatgagtaaatctcaaagaagtggcttaaatttaggcttaaatgccatcttcagctgaaatgataagagtatttgggtaaggagcagt

SEQ ID NO: 418749 - DNA, 614 bp, Homo sapiens
gtttgattggttgggcctggtctgagtgaaccaaaagttgagtcttagtgaaatacacactgcatttggtcaaatgtcagcggttgtgaaaaaggtagctacctgcaccctcatccccattttattgtatcttcatgagacaggacatgtttgattttacctctgtcatctcagtttctagcataacacaggccacatggaacatatttattaaatgtaggaatggaatcatttattaggtgwggtggtgaaggtagctttatactcatgccacacatttgcattttttttattttctctgaggtttgagttagctcctaatgctttacctaggtttctaaaggcttagactaggatgagtctttggtctcttccagatcatatcaggattcaggggcctttgagctcctttgagagataactgagtgttgagtggactctgaaaggaatttttcatccagggaaagaagtccacagaggaaacaaggcagagacagcagagctgctgctgccggaggcctgaaaactatcaactctttctgactctcctctgagactgggcaacaagtgtgggtccacaccattcttgtaactgtttaggatgggttatgctg

SEQ ID NO: 418750 - DNA, 523 bp, Homo sapiens
gcgggatttgctaggtagtcaatttagcaacattttcttacaactttaagacatttttttctttactattagagaactatttagaacctttaggactctaattatcatgcacacagcttggaagaaattaaccaacaaagttcagaaarcaaaaagtttataagacataatttaatgcactttatatatttaaacagcaacaatgaaatgctatcctcctgtgatgtaaagttctctctttccaccttctaaatataaaaaaacgtggctctcatatacaaatacaaacacacacatgtgcacacgtgaacacacatgcatacacatggacacacatgtacctcacaaactatattaagaagaacaagagaaaaaataatccaatttatgtggtgcttacaatgccagactaaggaggtgcttttacttgccttctaatttattaatcacatagcaaagttgacggtaatgtactaaaattactgtttttttttttgtagaatatagcttagaatcaaagagg

SEQ ID NO: 418751 - DNA, 505 bp, Homo sapiens
gcctgtaatcccagcactttgggagaccaaggcaggcggatcacttgaggtcaggagttcgagaccatcctggccaatatggtgaaactctgtctttactaaaaatacaaaaattagctgagcctgttgatgggtacctgtaatcccagctactyggggggctgaggcaggagaactgcttgaatctaggaggcagaggttacagtgagccgagatcgcatcactacactcctgcccaacaacgaagcaagactccatctcaaaaacaaaacaaaacaaaacaaaacaaaacaaaacaaaaaatctggtgtaaaatacctccaaaaagctgctcctttataaaggcaatgagtacactggaaaagtagtaaataaactttttcagaactcaaactaagcaaaagcttgcaaacaaaaaaatgaagttcttatttaaaaaaatagactgaatctcagtaaaagggaactttgtgatgttttaccttatactattctcagttccctc

SEQ ID NO: 418752 - DNA, 572 bp, Homo sapiens
gtcatgatagagtttgcctcagataaccatcagcaggatccattttccatcagggtaaaattgaaggagtgagacacagttgtttgacgcttgaatggattttggcctctrggtggtaaaccttcaatgactaaatgacttctagtatatttggacaattcatatttttgggtatctttaacatgtgacaggataccaattagtccactaaaaagactctacatcttatccattagacaattcaagcagtcagtaggactcaggaatctttatcagctcatggaggaggtttgagggcaaattctttctctggtactgattgcattcttgcaggaggtcacaggtgtacatgtgactcatgtagcaaatatgcatggaacaaggtcatgtagcaaattcctaccccttctttttgtatcacaaaaagcaaaaaatagcaaataggaacagtgggtatactttagaagatgctgtgacttgagtagtttcacccatcagacaaagaaaaaaaacaaatatggcagagaacacagcacccttttcatgtgtaaaatgtgacttgttacctgtca

SEQ ID NO: 418753 - DNA, 572 bp, Homo sapiens
gtcatgatagagtttgcctcagataaccatcagcaggatccattttccatcagggtaaaattgaaggagtgagacacagttgtttgacgcttgaatggattttggcctctgggtggtaaaccttcaatgactaaatgacttctagtatatttggacaattcatatttttgggtatctttaacatgtgacaggataccaattagtccactaaaaagactctacatcttatccattagacaattcaagcagtcagtaggactcaggaatctttatcagctcatggaggaggtttgagggcaaattctttctctggtactgattgcattcttgcaggaggtcacaggtgtacatgtgactcrtgtagcaaatatgcatggaacaaggtcatgtagcaaattcctaccccttctttttgtatcacaaaaagcaaaaaatagcaaataggaacagtgggtatactttagaagatgctgtgacttgagtagtttcacccatcagacaaagaaaaaaaacaaatatggcagagaacacagcacccttttcatgtgtaaaatgtgacttgttacctgtca

SEQ ID NO: 418754 - DNA, 529 bp, Homo sapiens
actggtgaattctttattggtttttaaaataaaattaacatttttcataatcaacattatttatttttgcagcattttctacttgtaatagtaaatatagatttactcttcaaccaagtagacaattttttcatgtataaaagtagggcgagaaatgttcacttcaagttacaggtaaatatttttatayctgaaaaataatatttaggcattaaagaatcaaaattgtctgtgctcctggtactcatgcctttattgtgactagatcgatggtaatctatctgatcacaaaattaaaattatactgaagtagacactcagccctttgaatactaatatagaagccaaatatcagattttggtcaaatatcaaggccaatgccaacctccagtgcattcctagtcggtgttttttgtatacattgtaaagaagagtgtagaaatttgtctgtgagttttatgttttaaacctgagcagagctctcttgacttaaaaattagttaagtaaaaaatatttatattgtacat

SEQ ID NO: 418755 - DNA, 568 bp, Homo sapiens
atcttatgtgtattatctcacttaattctcacagaatgctatgatgggaagattaatgccacttttttcatgtgaggagatgagacaaagacaggccaggtaacttgctgaagtcacctggcctggaagtggggggaccaakacttgaaccaagctagtctgattccagggacctctacggccacctctatatctgcctgtgagcttaagtaaccaatgcttagtctttgactgaaagattccaagggaagtttttttattcccttgtcctgcaatctttcacgtgggttttgagaccattatttgcactgatgatgaatttcagcagcagcagcagcagcaccttagacttgaacggaaaggtaaactttgtttagcttattcattttgtttgtgtatattactgtctggacttcctagaacataagctccatttcaggttttgtttttttttaatttgttgtattcattgaagtatcccaaaaatgatcagtgctcagtgcagagctgattttcaataaatattggttaaatgaacattataaatttaggatagagaagtttttaa

SEQ ID NO: 418756 - DNA, 561 bp, Homo sapiens
gaacttagagagaatggaaccaaactaataaaatgatcactgagaattttccagaaattataaaggaaagaactcttatgattcagaaagcatagcatactctaaatactatgaatagacaaaaaattatcctgacacatttcggtgaaaatacagaacaccaaaagcaaattgatttttttaagtaagaatataagaagcattatttagagaaacagtaaacttatcaatagcaccaaaagggtcaggagagagtggaacaaatattatcagagggagaggagaaaataattgccaacttagaatggtatgcctggtaaaatagcytttcaagaatgaaaggaaaataatgacatattaagaaaaagtaaaaccagcaaccacaaaaaataaaaataaataaataaaaagcaaacaaatattaatcaccaacatgcaattgttttgtctgctatggactgaattggaaccccctcacccaaattcatatgttgaagccctaaaaccctgtgtgactgtatttggaaataggacatgtaaggaggtaattgaagttaattg

SEQ ID NO: 418757 - DNA, 596 bp, Homo sapiens
aggtgcttaggccttctcactggccttactggcattctggctgcatgagtggaagaacaagaagtgtgggagagtaagaaaaagacataggcattgttctgatggtgaatgagacctgggatttgttgtagtcacctgggcttctagaaggaaarcaatctaaaaaaaaagtgttgttctgataagtttggaaacctaacttagtgttgtctccactcactaaagcaatggtgaaaacactgtcctgaatttgattggtccagcttagaatttcagaggatatcttgttttaggtctggaatctttattgtaaaggagtgaaaagggagtggctattaaagccaatggatgttttataatttaaaaatgtcttctacatatagtggagccctgttatcaaagcccaaattacctcattgaaaaacaaagctacataaacgaaattgatagtaaatgcttccaacaatttattttatcacacacacattcacaaatgtgcacactggttcattgagcaatattttgttatattgtcaagcttctatcaatatgcatgtattaattggagttcaatttttttgaatgtcattattcat

SEQ ID NO: 418758 - DNA, 596 bp, Homo sapiens
aggtgcttaggccttctcactggccttactggcattctggctgcatgagtggaagaacaagaagtgtgggagagtaagaaaaagacataggcattgttctgatggtgaatgagacctgggatttgttgtagtcacctgggcttctagaaggaaaacaatctaaaaaaaaagtgttgttctgataagtttggaaacctaacttagtgttgtctccactcactaaagcaatggtgaaaacactgtcctgaatttgattggtccagcttagaatttcagaggatatcttgttttaggtctggaatctttattgtaaaggagtgaaaagggagtggctattaaagccaatggatgttttataatttaaaaatgtcttctacatatagtggagccctgttatsaaagcccaaattacctcattgaaaaacaaagctacataaacgaaattgatagtaaatgcttccaacaatttattttatcacacacacattcacaaatgtgcacactggttcattgagcaatattttgttatattgtcaagcttctatcaatatgcatgtattaattggagttcaatttttttgaatgtcattattcat

SEQ ID NO: 418759 - DNA, 573 bp, Homo sapiens
cagctgcccaggtagctgggattagaggcgtctgccaccatgcctggttatttgttttgtattttaacagagatgggattttgccatgttggccaggctggtctgaaattcctggcctcaagcaatccacccgcctcggtgccccaaagtgctgggattacaggcttctcctagaagttttatagtttcagcttttaaatttaggtttatgatctatttcaaattagttatttatgtatggtttgaggtagggtcaagggtcatttttcccaatgtgtatatgtgattattccagttttatttgttgaaaaaattttttcctccatygattgccttggtgccatgaaaatcaattaaatgtatttgtgtgaatatatttcttaaatttctattctgttttattgctctatttgcccatcatcgtggttttcaaagtatggtccccagatccatgggggtttctgaaattcttccagagggttgtgaggccaaattattttcataataatactaaaataaaatttatttttttcactaaattgatattagtactgattgtgtaaaagcaataat

SEQ ID NO: 418760 - DNA, 628 bp, Homo sapiens
ttggtattagggtaattctggcctcatagaatacattagaaactattccgtgtgcctctatcctttgaaaaagattgtagagaattgtcagaatttcttaagtgtttggtagaactcaccaaggaattcatctaggcctggtgctttctgttttggaaggttattaactgttgattcaatttccttaatagataggaggctattcagataatctgtttcttcttgtgtgagttttggcagactgtgtctttcaagaaattggtccatttcctctaggttatcaaatttgtgggcacagaattcttcacagtattcctttgctatccttttgatgtttatgtgatctgtagtgaggtcttcactttaatttctgatgttaataatttgtgtcttctgttcatttttcttggcctgactataggcttatcaattttcttgatcatttcaaagagtcatcttttgattttgttgattttctctattgatttcctatctttgatttcattgatttccgtgctaatttttattctttcttttcttttgtgtacttgggagttaatttgctcttctttttctggttttctaaaaccttctaattgtctrcttacaaggtctagacacttggaag

SEQ ID NO: 418761 - DNA, 573 bp, Homo sapiens
cattattcctactttccctttttctttttctttttcaccgaaatatttgttaaatatttccagctaaaagataccctgctttaggcatgtacagttacatgtatgtgcatatatgttttctagaccattttaggaggaagtattgagacaaaggtaaatgcaaaatcattagcattcttggagttgacttttgtgtttttattgttcaagcctatgtgagcaagttaaaaccaggtataggtcaagttcacctagtagacgaagataaaatttktgtgtgtgtgtaaaatatacctggtctataggcctcccacactggtcatttttagttggtgcacaagcttatttaaggagatgattttcctttcttgcctcattttctacatatgagatcactgtgccttattttccccacctatgtgacccttttctgctttgtcatttttgacctcaaggcaggaagagatagtaatcagagaaagaattgaagaaggatttttgtggcatcagaacttttggagttgacttgatgagttccaagtagtgtttgactttgtactaagccatgggcag

SEQ ID NO: 418762 - DNA, 484 bp, Homo sapiens
ataaattagcaaaggagagagagaaacaagytacttttttactatgaaaggaagttaaatagctacatttccttcaaaccaggaacagatttgagcagttataatttgccaggatgagtgggccacctaaattacctagttggatgagggtcatttgatcagagtaactatgatcgcattaactccatgtaattctccaaccaaaacaaatcaactcagaatttttcagtggtcttagctgatgacagtattgtttgtctttaacatactacttcttgagcacttgaaaatgtaaccaacaacacaaaaagtaaaataaaaagcacattttctgtagcattttaaaactacagaagatcttttaaaggccttggatattctaaaataagtagcaatacatttggaaagaaaaaaaccataacaaaattcagaccagcaacccagaagaatacagaaaaaaaaaactattagaattaataaatga

SEQ ID NO: 418763 - DNA, 553 bp, Homo sapiens
tactctttgcttctataagcttcactattttagatacctctgataaataggatcctgcagtatttgtccttctatgactggcttatctcacgtagsatgatgtcctcaaaatacatctatgttgttgcatatttcaagatttccttcttccttaatgctgaataatattccattgtatgcatatgccacgttttctctattttcatctgttaatgtgcgtttaggttgtttccatgtcttggctattataaatagcaatgaacatgggagtgcaaatatctccttgagatcttgatttcaattctttcgggtaaatactcagaagtgggactgctggataatataataggtagttctatttttaatctgaggaaccttcctaatgctttctgtagtagctgcaccattctggaaagtttctatattgtttcatttgtttgcttgtggtgaaagtgagaagaaaataattttgaagattatttttcaagggagattgtggtggactttttattctttgcaaaagaaatagaaataatatgacttgaatagttgg

SEQ ID NO: 418764 - DNA, 553 bp, Homo sapiens
tactctttgcttctataagcttcactattttagatacctctgataaataggatcctgcagtatttgtccttctatgactggcttatctcacgtagcatgatgtcctcaaaatacatctatgttgttgcatatttcaagatttccttcttccttaatgctgaataatattccattgtatgcatatgccacgttttctctattttcatctgttaatgtgcgtttaggttgtttccatgtcttggctattataaatagcaatgaacatgggagtgcaaatatctccttgagatcttgatttcaattctttcgggtaaatactcagaagtgggactgctggataatataataggtagttctatttttaatctgaggaaccttcmtaatgctttctgtagtagctgcaccattctggaaagtttctatattgtttcatttgtttgcttgtggtgaaagtgagaagaaaataattttgaagattatttttcaagggagattgtggtggactttttattctttgcaaaagaaatagaaataatatgacttgaatagttgg

SEQ ID NO: 418765 - DNA, 642 bp, Homo sapiens
ttaactagggtttgacagagccctaaatggaatttttacttcttaaaaaaatcttacttgctrtgtctttgtgaccttaatataacttttatcagaaaactattcttacggcaaagggaaaaattatagatgccacaaatacatctcctctataatagatttgcagcaaaaaggagaaggactgaaagggcataaagttgaaattccctcattttaaggtattctaaagaattcatgtaaataacagattagcatgtgcagtgttccctgcttggatacatttatgcatattttaaatggacttgatcctggagagacataaaaattgttatttagaggcagggtcttgctctttttccatattgttttccttgaactctagatggatacatgtatatgtatatacatttataagaatgtttagatttttccaatatggtcttcaatcaacaaatatttattttaaacaatttttcatatttttcatttactttctttttagagacagggtcctggtctgtcacctggctggaatgcagtgacatgatcatagcttagtataacctcaaactcctgggctcaagctatcctcctgcctcacttcctgagtagctaggactacaggtgtgcaccactatgcct

SEQ ID NO: 418766 - DNA, 642 bp, Homo sapiens
ttaactagggtttgacagagccctaaatggaatttttacttcttaaaaaaatcttacttgctgtgtctttgtgaccttaatataacttttatcagaaaactattcttacggcaaagggaaaaattatagatgccacaaatacatctcctctataatagatttgcagcaaaaaggagaaggactgaaagggcataaagttgaaattccctcattttaaggtattctaaagaattcatgtaaataacagattagcatgtgcagtgttccctgcttggatacatttatgcatattttaaatggacttgatcctggagagacataaaaattgttatttagaggcagggtcttgctctttttccatattgttttccttgaactctagatggatacatgtatatgtatatacatttataagaatgtttagatttttccaatatggtcttcaatcaacaaatatttattttaaacartttttcatatttttcatttactttctttttagagacagggtcctggtctgtcacctggctggaatgcagtgacatgatcatagcttagtataacctcaaactcctgggctcaagctatcctcctgcctcacttcctgagtagctaggactacaggtgtgcaccactatgcct

SEQ ID NO: 418767 - DNA, 545 bp, Homo sapiens
gtggttatatgcaccctcaatatatgatgtagtgccattgcagattggtgggaaaggatgaacttttctataacttgtggggagctaaatgtttaataatgtaaaaaaattagatccmtacatcatgtcatacacaaataatacctagtagattaaagacttaagtgtgaagggcaaagctataaaaattttaggagatataggagaatatcattatgatcccaagacacaggaggtttctttagcaagacacaaaatgtataaaccataaacaaaggtttacaaatccaatcacactaaagtcaagtattcttatccattgaaagaaagcaaaaaatgaattaatatagcaataaataatagtagtaatagtaggaagaaatcaacaaaaagaaacaaaaagatgagaaagataaaaaaaaactaggcaaacaaattactaggaattttgtagaagaggaaatgctaatgcctcataaccatctgaaaagatgttcaaactcattaataattggaaaatgctaactcttgtgaaattgacaagt

SEQ ID NO: 418768 - DNA, 569 bp, Homo sapiens
agctctcatctcagactacgaaatccaatagcatgctgaaaaacctggagtgcatgtattactctcaaaatggttgctaaaatttgcatttgattatgctaaaatggatgttatggctagttttgtgtcactcaccgcagaatttcagttttaaaaagtgttttactgtatccagatgcctgccctaatatgctaagccacgaatgtaagcaatatctagaggaaacatggtttaagtattttattttaaaatttccctttgcctgaaaactatttaacttgagaaattacaaacttccaagtatttcattattttatactcwactttaatccatagaaaatatataatgtcaactatattgaatttttaatttcttatcagttaggtatgggaagtattgtaggtaaattgttcatcttaattagtatggagcttgattcaaagtccaagttaaaccaggaaagctttacattatttttaaaagtgtcaagctgttcactactgtaacaatttataatactttaaaatacttctctctcttttcacttatgattatttagtctccctt

SEQ ID NO: 418769 - DNA, 561 bp, Homo sapiens
aatactctcagccgggcatggtggctcatgcctataatccccacactttggtaagctgaggcgggtggatcacttgagctcagaagttcaagaccaccctgggcaacatggtgaaaccccatctccacaaaaaatacaaaaattagctaggcatgatggcacacgcctgtagtcccagctacttggtgggctgaggagggaggatcacttgagaccataaggttgaggcttcagtgagcagtattcatgccaccgcattccagcctgggtgacaaagggagaccctgtctccaaaaaattactaataacactgttaagagctatctaatttgctactatttggaaaaagttattatgtaaaagtaacaaagaagacatgaaaagtacctttatgaatgtaaaacactgaatatgtgatttgtycccaagaggcacacttcgggctgtaacatacacacaaacttcctagaagaaaaaggatatttagtagagtttaacagaatctatgtcataaataaagtttcctaaaccacttaaacttacttctattcctttagatgt

SEQ ID NO: 418770 - DNA, 590 bp, Homo sapiens
acttacacctcttacttccttttcttgtctgattgcattgttgaagactgccaaacaacactgaataatggtaaaactagacatccttgccttgttgcttcttttcatgcaaattgctctagctgttgtcttcagatacatttttattattttaaagtatatcattawaatctcatttaactaaaagattttatcagttaaatgttgatttttatcaaatgctttcctgccttatgagaagacttatctggtttttcctttattgtagtaataagtattctaatgttgacctgttctgcattcctgaaggacaccctacccttaaattagcgtgatgatttctacagaataggtacaaaatatatagattaatttactaatcaattgattgggaaatgaaaataaaagtcgctgatcctcactgttgttaggaagtgaaattactgtggttattttgtcctccttaggataataagaacaacaaagacccaaattaattagctccaagaatgatgaatgccaaggaagaaattttcctggatattaagtttcaattcctgagagaaagtagttactggcttctaagtaga

SEQ ID NO: 418771 - DNA, 545 bp, Homo sapiens
gtggtgaggtgcttcagctctgaagtcagacagctggaatttgaatcttggtcccaacactcatcaccagtgcaacctcaagtaactgacttaacctctctgtggtttcttcattggtaagatggagattttaaaaatggctacaatataagtttgttttgaagcctgagtaagtcaaaacctctaaaatattagagtactgattaccatatactaattactcaataagtatttataaatattattctggaagcaatagtgcaaatagctcccagacttttgcataagtattagatttaggtcacagccaatccagcaagtgaaactttcaagatagaattcaccccaagccatcccactgaattagaaataacaaaactggctccaaactagctcagcaaacctcagacaaaaataagggactctccttccctcccctaccgtaatgtctttgttttcattatcctgagtatacaaaactgaaatwtgcttcagctgaaattatacacttccattgtcatgtttcttctctttttttatgtcag

SEQ ID NO: 418772 - DNA, 612 bp, Homo sapiens
tctttctttttcttttctttttaaacacacaaacactaagccacagacttgtacgtttttgttttcacttttgattgtgtgtgtgtgtttgaaaaagagaaacacatggacacttaacttttttccaacagaattctttaagcagaatctgaatgaatactatcttgttttgtccataattcaccatgtatccttatgcatgtcaaatctgtttctgggcctcagctttctcagttatgacgtcctgtttcttttgttcttacatctattcttttgatatgtttttctgttttcccactccccctttgacctctccttccccaactttctatttccatattctctattaccttccaatttccactgtgtccccagtggagatttatttatttatttattaaattttccttaaatkgaatgagactaatttctcactatagcatttggaacctccccgcaggtttcctgtgataccttggatgtcattaacattgtaggcttacttgccagcccacttccttctgacttctgctcccatcactccatcaaaatggctcttacccaggtcatcagtttcctctgtgttgctaagtttagtgaatgcttattggt

SEQ ID NO: 418773 - DNA, 656 bp, Homo sapiens
aagtttaattggactacagctggtgctgattgtacgcacatggggtgggggctttgctgactgattggctgtctctgcattttgtttccattgtctttctccttctccactatttttccctacaggtagagagattgaagatactggggtcttaaaatagaattaactagagaaaagactgtggttttggataatgttaccccatgagcttctaccaagaatgattataatacatgattatcatataattgttattaccatcttctcttcattatataattattatttcattaacaactaaccgattgaatgtttaccgtgagctgcagttgtactaagtacttcacgtaccgtttaatcttcacaacagtttcactcaaggtgtttcattcttcccattttctgggtgaatagactaaggctcagaggggtaaaataatttgtcaaaggtaacacagatgaacatggtacagttgagattagacctttttttaaaaaaaaaaacaaattctagggattacacccttaaccactttattattctgattatttgaaaaatcaagcagtccagttaccctrttgatagagaatgaaaaatcagtagcctaagcatctgggtatgtcaaatggcatctataccaggtggaaaacagcaa

SEQ ID NO: 418774 - DNA, 620 bp, Homo sapiens
taattccttggcttccctcctcctaccattatctgggaaagcctgtctgctgtcaccaaattctagcataaactgctcaaggccctgtattttcccattgctgcttattattgtaccacgaattctaatttgattcagattcagagggctctttctcttcatagtatgaaagcattttggcagccattaactctatgggtagagatcacaaacaatcacacaaacaaagaaactgcaaattagagcttatattccttatatcttcacatggttgatggaagtaagacaactccacaaaccatgcattttaaagaacatttgcagggtgaatatattacaaatatggctaggaagtgggctgcagtatatctycaaaagtgactgatttaaacccaaacttaatgtattttggaggccagcaataatttgacttgctgagtggatggaatttatgggtataatgcagtgcaaataaaaacatcctctttcagtaataaaggtgtatgctatgtccgcgttgggaaatacggctttccttacctctgacttctggagagaactcgtgggaatagctaagtcagacccagtgactttctttgtgaccttttggaaatatcaaa

SEQ ID NO: 418775 - DNA, 564 bp, Homo sapiens
cctctccctggatcctgtactggatccttcttgctgccgtgattctggacttactagatctgacacattagctcaacattatttcttaaaatattgctcaaaattggcatcacatttttcagggcaatttgtcatcatctattaaaacttaaaatgctcatgcactctgacctggcatttttacctctatgtgtccctcaagagctaagataaatgttgaggtatgttccaaaaaaagttttgtttgccatagtaaaaaaattggaacaatttaaatgaccacccatagagagatggtaaatattaaagtataacctgtcaatacagttgaatgttacgtagctgcagaaaaaacrtgtagtctttctagatgtgttgacatggaaaggcaaccatgacatctgtgttggtgcatgttgagcatgaaattctctctcattgccttctaacagatctccagttttccttggtcttcacttcctccccttggcagcccatctgactcagattttcccaatccacttgttcccctagagaccctaaatgtgaagaccaaatctgtcc

SEQ ID NO: 418776 - DNA, 544 bp, Homo sapiens
ttaattttgatcaaatcaatgtatgtggcttaaagatttaaatataatatattcctcyttcctccatccaagccatcagcaaatcctatcaattctacttcttccaaaacacatttccagtctttcctctccccttcatttccaccacaatcaccctagtgcagaccactgccagctcctatctggactattgaaatgctttccaatgggcccctgcctccacctacatttctctgtagtcattttcaaggaaacagacaagacaccctttcgagtaaatcagatcatgtcaaacccttgcttaaaactatcacttcccaacaaaactacaaacacacttgagatgcagttcaaattctttaccctgaaatctttttgacataatctcataatgttctcaggaactacctctacactctaatacactgctcttccttctattctttgtatattatcaacctatttccatcttagggcctgcactggctggtacctttgctgacagtgcccaccagtctgtcatgtccctctgttgtaaatctcc

SEQ ID NO: 418777 - DNA, 559 bp, Homo sapiens
tcattgctgggtaaatccacatacccttcctttcattgcatttttttctgttagaaaacctccagaaatccctgcctcaaatctgtgcctcttcatcctgcagtcaaagtcaccatcagtagctcccactcctgactctctcaccagaagagtctctctcctttgatcggacgagctccatctactcctttactcacatccctrttccttcttccctgtatgttcaggccattctctatgcctgaaatgctttaccctttcttcacttataagaaatgtgttacactcctctccaggaagactttcttaattacgagggccaatgtttttattttaaatttcttaattattacccatacagtaatgaaatgcctgtctcaatactgatggtgaattgttttctagctattttgagtattgacattctctcttcctactgggaacatgaaccacctcatctttctcttacccacttccacccactcagtgcatcaagtacacaggaaaccataaacacttgctgatatttgttaagcaagttacatctttatagtggcca

SEQ ID NO: 418778 - DNA, 623 bp, Homo sapiens
ttgtgtttacccctgtaaactcagttatctgatgggtccaagaaaagtcattaatttttagtttatctagcttttcttgttgtaagatcaggagtggtaacttccaagctctttacatgtggagctgaaattggaagactctttgctaatatattttttactccttctttcctgtttacctcagataatttctattgatctatcattaagctcactgacttcttactctgtcgtctccattctgctattcagtccatccagtgagtttatttcagttattgtatttcccaattctaaaatgtccccttgatgtgtctttataccttctgtttctttgctatgactttctactttcccattcatttcaagagtgtttggagttacttgttggaggatttttataatagatgctttgaagtctttgtcaattattagagcatcartgtcatctttgaattggctttcattgattgtttttttctcaggtgaaaaaagtctccatttttcactcaaaatgccaagtaattttgaattgcatctggacatttttaatattgtcttataaaaatctgggactggtttaaatcctacggagaatgttgatgtttttgttttacctggca

SEQ ID NO: 418779 - DNA, 622 bp, Homo sapiens
acaaaagttggattcaggatagcaacatattatgttttgtggctgcaagatatttaaatctaacaccaatagcataacgtttaaaaacaaaaattttattgaaaataaagtttatgtttggggcaaaggaagattaagaggataggaatatatattttcccattcttaactctgtctctcttctagggattgagagatacagagagattgagagagtgaattggagtgagtggatatgagttatatagcactgcctaatggattattacctcccaaacccctgagttgaagagtagatggagagcctgtgtaaaagattttgggtagacgattttgaaataaaacttagtgacatacacacacacacacacacacacacacacacacacacacacattacagataagtatatatatggaaaaatatgtatacrcaaggaaaatactgctgttctaaatgtagtataatgattttaatatactacccaagaaatcttatgagactttaaaatcattttaagatttaataatagtaatggatttaatttttttagtatgctattcattacaaactagaaaaatcctaataaatcagtctgaatcagtaaagcctcatagatttc

SEQ ID NO: 418780 - DNA, 551 bp, Homo sapiens
taatggtcactacctataaagatagcaaaatactaaaggggtggtattttatgagcaatggaaacttttgttgtagatatttcaactgacactgtgcctttattactactttatacctacatctgaagatccagactctagtagttgtaatacaatagatgcaaacagtgggaacatctagttcttgtcaatgtgtcaccaaaacatattatcaaagctaatctcataagggtgtcagaggaaattaaagttgcctttgsgtgcatgttataagaactgactgaaattttaaactacctcagtagctgactatatacagcagcaggaagccttcaattaactgcaccagttctatttgtagtacaaaggatctatggcttaggatagcctacataacttaaaaagaaaaaaactcaactagatcttaacagtatcctgaagtacagcctgagagaaaaggatagatagggtcagataggagcatggagcatagtaactaattcaaagacaagggggtcttaggttgagctttaaaaaatgttctgtctagt

SEQ ID NO: 418781 - DNA, 551 bp, Homo sapiens
taatggtcactacctataaagatagcaaaatactaaaggggtggtattttatgagcaatggaaacttttgttgtagatatttcaactgacactgtgcctttattactactttatacctacatctgaagatccagactctagtagttgtaatacaatagatgcaaacagtgggaacatctagttcttgtcaatgtgtcaccaaaacatattatcaaagctaatctcataagggtgtcagaggaaattaaagttgcctttgcstgcatgttataagaactgactgaaattttaaactacctcagtagctgactatatacagcagcaggaagccttcaattaactgcaccagttctatttgtagtacaaaggatctatggcttaggatagcctacataacttaaaaagaaaaaaactcaactagatcttaacagtatcctgaagtacagcctgagagaaaaggatagatagggtcagataggagcatggagcatagtaactaattcaaagacaagggggtcttaggttgagctttaaaaaatgttctgtctagt

SEQ ID NO: 418782 - DNA, 458 bp, Homo sapiens
actaacaaaacttccctctcattatgaaaccctatatttgaggcagaggatttccttataactccaagtatttgtctgtgacctagaagaatatataagttgtagaaaaaaatacgggaaaggggacggtttgcaccatcttcctcgtagttcctttagaagtgaatttactttagatcccagaggaagagtattagatctggccacagaagtaactcttttatattattacctatattttctattttaaaacattcmaattttgaatcttctcaagatttcatttttaggtacatttatatcaaattgaattctactctcaaattacaaaataatatggattacaaactaatatataggttcttagcttctattaccttggagtcccataaattggcttgattttgtttccgtagtgcaaggagctgaataaagcttttactcagttcttaaatgta

SEQ ID NO: 418783 - DNA, 576 bp, Homo sapiens
atcttttcctcaacataattccattttttttttgtcctcgttgacttgatttttgttagtggttcagtagaataagttttatgaatgactgataccagtaaacaattgaagtcacctgttttgtaaaaggaaattgtggaggattcatggcagagtgcaaattgctgaatgaaaattagcctatgsgccatttatcaaaactaatgtacaaatgactttatatcatcattgtaaagaaatggctagagtcattggcataaaatttgttgtacagggtcttatactttttatttgtttccaaatcaatgtgctaatttccaatcttctattaccctcccccaccccatttccctttttttctggttctttagtggatgtgaagtcagaagttcctgtgggcctggagccatctcacctttagacctaaggacagacctcaggatgatgatgcccgtggtggaccctgttgtccgtgagaagcaattgcagcaggaattacttcttatccagcagcagcaacaactccagaagcagcttctgatagcagagtttcagaaacagcatgagaacttgaca

SEQ ID NO: 418784 - DNA, 576 bp, Homo sapiens
atcttttcctcaacataattccattttttttttgtcctcgttgacttgatttttgttagtggttcagtagaataagttttatgaatgactgataccagtaaacaattgaagtcacctgttttgtaaaaggaaattgtggaggattcatggcagagtgcaaattgctgaatgaaaattagcctatgcsccatttatcaaaactaatgtacaaatgactttatatcatcattgtaaagaaatggctagagtcattggcataaaatttgttgtacagggtcttatactttttatttgtttccaaatcaatgtgctaatttccaatcttctattaccctcccccaccccatttccctttttttctggttctttagtggatgtgaagtcagaagttcctgtgggcctggagccatctcacctttagacctaaggacagacctcaggatgatgatgcccgtggtggaccctgttgtccgtgagaagcaattgcagcaggaattacttcttatccagcagcagcaacaactccagaagcagcttctgatagcagagtttcagaaacagcatgagaacttgaca

SEQ ID NO: 418785 - DNA, 575 bp, Homo sapiens
actatttgcatggaatctttttatcctttcattttcaatctatgtgtgcccttaaatctgaagtgaatcttctgtagacagcagatagctggatcctgttttgtttgtttgttttaaatccattttgccaatctatgtctattcatggaggagtttaatccatttacatttaatgtaactactgacagggaaagacttacttttggcattatattgtatgttttctgcatattgtrcaaatttttgtccctgatttcctccattactgcttttgtttgttttcagctgatttttttgcagtgacacattttgattcccttttcatttccatttgtgtgtattcatagatacttcctttgtggtgaccatggtgattacatataacatcctgaagttataacaatctattttgaattaatatcaacttcaatcacatacaaaaactctattccattatagctctgttgccactccactttatgttgttgatactataaattacacctttatgtgcccattaacatagatttatgattactttatgcatttgtcttctaaattctttagaaaataaa

SEQ ID NO: 418786 - DNA, 581 bp, Homo sapiens
agtggtaatgaatttccttagctttttaaatctgggaattccttaattttcctcatatttttgaaggacagttttgttgaatataaaattctcagttgacaggttttttttttcttttartatgttaaagatattaacccactgccttctggcctgctaagaaatatgtgtataatctaattaaagatcccttgtatgtgacaagttgctttattcttgctgccccttcccacctttttttaagatagagtcttgctctgttgcccaggctggaatgcagtagcatgatcatagctcactgtagcctcaaactcctgggctcatggggctcatgtgatcctctcactttacctcctaaaatagctgggactacaggtgcatgccaccatgcctggctaaattttgtgttttttgtagagacagggtctcactgtgttgcccaggctggtctcaaactcctggcttcaagtgatcctctcacctcagcttcccaaagtgctgagattacaggcatgagccaccacacccagccactcttcctgctttcaggattctctctttgtctttggtttttgacagtt

SEQ ID NO: 418787 - DNA, 577 bp, Homo sapiens
ttttcacctcagcaaagttcactgctgagaaagagcagtatatttctttcacctggagtagagggtggtggaatgcctgattccaagaataatgagagcattattcccaagtggcatgggctgccaccattgattataccccaatgactactgaactctgtcgttagagtccatactagccacagagtgaagatggatggggaaaaaggtatgayagcaatagccttgaagaacaaaattccccagagggggcccttgtcctgctctacataatggaagctccttgggaaatatttgtgacttgtctgagttaatgtgcaaagataaacaaaatattttaaactaatatttttaaattttaggtaattgtcaattctcacttgaaaatcacaataaataatatgcatttcccagaattcatatatacagattagaagttattaaaaagactgaatcctagatatcaaaggaggtatcaaattctcagaagaaaacaccctgtaggtaaagaggccacactgtatgtgtaatattaacatacaacatgatttatataatcttggtctttaaaaaaact

SEQ ID NO: 418788 - DNA, 602 bp, Homo sapiens
tctggtgctctcttgaaagtgccacctcctggctggaggccaaccacctcaggacattacagcaactcatgacagatcccctgctccaaggaaggagaaaacaacagctaattctactgcctccaacatcctggctaaacagtggtcctgagtctgtccatggtggcaacttcattgctagcataaagcacttaagaaagccagcatactaaacatacttacaaccaaggtctttcacagagtctacttcaatcccctgccacctccacaggagcaggtgctggtatctatagctgggagatctgaagatgaattgcatcacaggactctttgcagacattccccakcaccagtccaaagcccggtagccctgctgggtgactagaccaagaagagcaataacaatcactgcagtctggctcacaggaagccccatcactaggagaaggggaagcaacccacatcaaggaaccacccagacaaaagaatctgaccagcagctttgagttccagatttttccagtgaaatagtctacccacatgagaaggaatcagaaaagcagttctggtaatatgacaaaacaaggttctataacaaggct

SEQ ID NO: 418789 - DNA, 576 bp, Homo sapiens
cccagttgctccaatatttacccgcaattggtattgtcatctgtttcttttttgagacaggatttcgctttgtcatccaggctggagtgcagtgctacaatcatagytcactgtaacctcaaactcctgggctcagtgatgctcgcaccttggcctcccaaagtattgggattacttgtcatctttttaaatctctgccatctaaagagtctgcagtggcatcttgtcgtggctttaatttgcatgtatggaacaaccgatgacgttgagcgtctatttgtgtgcctccttgccacccatatatctttctggtgaattgcctgcctagatctttagcctagttttaattgtgctgtttgttttcttattgtcaagttttgcgagatatttatttatgatggatacaaatcctttatcaggtagatgctttgcaaaacacttccccagcctgtggcttgtctttctgttctttcagcagtgtcttttgtagagcagaagttttaattttgatgaagtccaagttttcctttgatgttattattttatggattccacttttggtgttgtacctaagaa

SEQ ID NO: 418790 - DNA, 576 bp, Homo sapiens
cccagttgctccaatatttacccgcaattggtattgtcatctgtttcttttttgagacaggatttcgctttgtcatccaggctggagtgcagtgctacaatcatagctcactgtaacctcaaactcctgggctcagtgatgctcgcaccttggcctcccaaagtattgggattacttgtcatctttttaaatctctgccatctaaagagtctgcagtggcatcttgtygtggctttaatttgcatgtatggaacaaccgatgacgttgagcgtctatttgtgtgcctccttgccacccatatatctttctggtgaattgcctgcctagatctttagcctagttttaattgtgctgtttgttttcttattgtcaagttttgcgagatatttatttatgatggatacaaatcctttatcaggtagatgctttgcaaaacacttccccagcctgtggcttgtctttctgttctttcagcagtgtcttttgtagagcagaagttttaattttgatgaagtccaagttttcctttgatgttattattttatggattccacttttggtgttgtacctaagaa

SEQ ID NO: 418791 - DNA, 576 bp, Homo sapiens
cccagttgctccaatatttacccgcaattggtattgtcatctgtttcttttttgagacaggatttcgctttgtcatccaggctggagtgcagtgctacaatcatagctcactgtaacctcaaactcctgggctcagtgatgctcgcaccttggcctcccaaagtattgggattacttgtcatctttttaaatctctgccatctaaagagtctgcagtggcatcttgtcgtggctttaatttgcatgtatggaacaaccgatgaygttgagcgtctatttgtgtgcctccttgccacccatatatctttctggtgaattgcctgcctagatctttagcctagttttaattgtgctgtttgttttcttattgtcaagttttgcgagatatttatttatgatggatacaaatcctttatcaggtagatgctttgcaaaacacttccccagcctgtggcttgtctttctgttctttcagcagtgtcttttgtagagcagaagttttaattttgatgaagtccaagttttcctttgatgttattattttatggattccacttttggtgttgtacctaagaa

SEQ ID NO: 418792 - DNA, 576 bp, Homo sapiens
cccagttgctccaatatttacccgcaattggtattgtcatctgtttcttttttgagacaggatttcgctttgtcatccaggctggagtgcagtgctacaatcatagctcactgtaacctcaaactcctgggctcagtgatgctcgcaccttggcctcccaaagtattgggattacttgtcatctttttaaatctctgccatctaaagagtctgcagtggcatcttgtcgtggctttaatttgcatgtatggaacaaccgatgacgttgagcgtctatttgtgtgcctccttgccacccatatatctttctggtgaattgcctgcctagatctttagcctagttttaattgtgctgtttgttttcttattgtcaagttttgcgagatatttatttatgatggatacaaatcctttatcaggtagatgctttgcaaaacacttccccagcytgtggcttgtctttctgttctttcagcagtgtcttttgtagagcagaagttttaattttgatgaagtccaagttttcctttgatgttattattttatggattccacttttggtgttgtacctaagaa

SEQ ID NO: 418793 - DNA, 398 bp, Homo sapiens
cctgtaggggaaaaggtgcaggaagcccactctactttttgggccagcaggtctcatgcycccctagcagggggagacttctgatctgaagctattactgaagcatgccaggagaaaggcacagggagtgctgactttccttttcaggaatggggaggtcccccgcctccttccattgagggattgtgggagtttgtctctagagcacatggaggcagaaggcatgagaagtgctgtcccttccattcgtggtggcagagatttcagagttgggattgtgtctggagcaagccagggaaggaggtgcagagtgtgcttactctcccgttcaagcaagaagtctcacatgcaccttgcaggggtaaccttttggtctggagttccctgaagcaagccag

SEQ ID NO: 418794 - DNA, 398 bp, Homo sapiens
cctgtaggggaaaaggtgcaggaagcccactctactttttgggccagcaggtctcatgctcccctagcagggggagacttctgatctgaagctattactgaagcatgccaggagaaaggcacagggagtgctgactttccttttcaggaatggggaggtcccccgcctccttccattgagrgattgtgggagtttgtctctagagcacatggaggcagaaggcatgagaagtgctgtcccttccattcgtggtggcagagatttcagagttgggattgtgtctggagcaagccagggaaggaggtgcagagtgtgcttactctcccgttcaagcaagaagtctcacatgcaccttgcaggggtaaccttttggtctggagttccctgaagcaagccag

SEQ ID NO: 418795 - DNA, 524 bp, Homo sapiens
cccctgaaaaataaggtatggaaaaaatgtaccccagcataataaaggtcatatacccacagctaacatcatactcagtggtgaaaactgaaaagyttttcctctaagattagaaacaagacaagaacgcccactctcgccacttctattcaacatagtactggaagttctagtcagagcaataaggcaagaaaaagaaataaaagacatctatatagaaaaagaaatgagaatgtctgtttgctgatgacatgatctcatagagagaaaactttaaagactccaccaaaaaatctagtaataaactggtgataaattctgcaaagttgcaggttacgatgtcagcatacagaagtccatagcatttctatacactaacaatgaacaatcccccccaaaattgagagatcatatttacagtaacatcaagaaatgaaatagttgtaactttaaccaaggaggtgaaagatctatgcactaaaaactaaaacactaatgaaagaaactgaagacataaataagtg

SEQ ID NO: 418796 - DNA, 524 bp, Homo sapiens
cccctgaaaaataaggtatggaaaaaatgtaccccagcataataaaggtcatatacccacagctaacatcatactcagtggtgaaaactgaaaagtttttcctctaagattagaaacaagacaagaacgcccactctygccacttctattcaacatagtactggaagttctagtcagagcaataaggcaagaaaaagaaataaaagacatctatatagaaaaagaaatgagaatgtctgtttgctgatgacatgatctcatagagagaaaactttaaagactccaccaaaaaatctagtaataaactggtgataaattctgcaaagttgcaggttacgatgtcagcatacagaagtccatagcatttctatacactaacaatgaacaatcccccccaaaattgagagatcatatttacagtaacatcaagaaatgaaatagttgtaactttaaccaaggaggtgaaagatctatgcactaaaaactaaaacactaatgaaagaaactgaagacataaataagtg

SEQ ID NO: 418797 - DNA, 524 bp, Homo sapiens
cccctgaaaaataaggtatggaaaaaatgtaccccagcataataaaggtcatatacccacagctaacatcatactcagtggtgaaaactgaaaagtttttcctctaagattagaaacaagacaagaacgcccactctcgccacttctattcaacatagtactggaagttctagtcagagcaataaggcaagaaaaagaaataaaagacatctatatagaaaaagaaatgagaatgtctgtttgctgatgacatgatctcatagagagaaaactttaaagactccaccaaaaaatctagtaataaactggtgataaattctgcaaagttgcaggttacgatgtcagcatacaraagtccatagcatttctatacactaacaatgaacaatcccccccaaaattgagagatcatatttacagtaacatcaagaaatgaaatagttgtaactttaaccaaggaggtgaaagatctatgcactaaaaactaaaacactaatgaaagaaactgaagacataaataagtg

SEQ ID NO: 418798 - DNA, 591 bp, Homo sapiens
acagtactttcctgttttctcaaatgcatcttttatttggggttagtgaaattgattcatgctctttggtctgaaaatattcccacacaaactgatttcctgagtgacacagaactgtatcaagtttttagtctaaattcattcactaattaaatatcatctagcaacaagtgttctagacatattaatgagtgttggacccattagagattttgtaagcaagtctattcygagttttaattccattttgttacctaactttctgtgattcatgtatgtcttgctcttaattggttgtgagttgtttgaggaaggggtcttttccttcacaatcctgtgtctccaagattaaccaaagtgtctggtacctggggtggacctaataagtgtcagtggtattcatgcacagtaagaatactgtacccatcatctgtacttttacctctttttgtcatacagagaagtaatttatttccctggtattggtgaccaagaatctgtaagctacaaaaaatttccctcaagaaagtgaaaggaagaaaaaattactgagcacttgctgtctgttagattatgtcaagggttatcaaa

SEQ ID NO: 418799 - DNA, 546 bp, Homo sapiens
tcctatagtaattgccacagttaacttgacggcactcaagggaaagaagaaaaggctctgcatgataaacttttcagtgaactcatccagggtcactgtcaggatgatctacgtgggaagtactattctattcagattacagaataagactctgagatcaaagtctatagaacatgctcaacttttcctatcaaggaaaaggcaagaactaagcctactgtgtgccaaatcctacatttttaaattataatatattaaatttgrgtctgaacattatgtgtcctttttgatggttacttaaaaataaccttctgaggccatatcattattgtaattatttacctttgtacctctttctaggaaatgaagatttcagaaacgtaaatgcaacagagatggagattttctttgactgattggcacttggagccataggaaaaataatagtactattgatgagacagagtaccatccattcttacattgcagtcacattggatctacactgaattaacaagtaaatatttttggtccagaattaggact

SEQ ID NO: 418800 - DNA, 519 bp, Homo sapiens
caacttaaataacaatacagtctttcattctttctggtatataataggagcagattttccaataggacaagcagaggaggatttctttttgtttttctttttgctcctattttgggaataccaaaaggagttattctaaatcactcaggcgtgaaacaaatgactgtactaaaattgtgaaatgccttcaattaaaagagtaacaaaacctgtgggctccttctggggtactagtctattgtccctctatagtttagtgtttagcattcagaccttcagtcaggtgatacagatgaaattgcgcaagaagttcatctcaaaataatgtcaacattttctatataatatagactgtccaagctggaagccacataaaagatggccagctcctaaatctgcagaggtagagactagaatttagagattcatggtccagctagaacagacagttaatctccttgttytaatttgatagttctatccattgtaccactcaaagtgaatttttcatacctatga

SEQ ID NO: 418801 - DNA, 592 bp, Homo sapiens
tgcagttgttcttgaggtgcttgaggagtcaggtgcatgaagtttctttcataaaaayaaaacacatggaaaacagggttctggctttctagactccgaaattgttggcaggcaatgaaaaccacatcagaaaaagtctcttggacactgctgactcagtgaatggatagtgtctgtcaccatactaaagcttagcttgcgcagtgatgtgatgctatcatgtcagatatgaactgtgcatgcacaagctgggaagctacagagagccctgaggctctgcgctagggatctagtcttggccagaagcactgctagcttcccagctggcctctgcatccaaaggccaggctgaaatacatggacctacagaaagcctcgtcttttctatttttaaaatctcatggaggtaccaaccagataggacttgaatggaaaatcacctgatattacccggttccataggcttttggcatctccattcatcccagaatagccagtcagctctctctgctgtgtcctagagcaccaggaaacgaataaatagtcctagagtgagacacaaaggataaagccaagtatcggaggtgagtgg

SEQ ID NO: 418802 - DNA, 592 bp, Homo sapiens
tgcagttgttcttgaggtgcttgaggagtcaggtgcatgaagtttctttcataaaaataaaacacatggaaaacagggttctggctttctagactccgaaattgttggcaggcaatgaaaaccacatcagaaaaagtctcttggacactgctgactcagtgaatggatagtgtctgtcaccatactaaagcttagcttgcgcagtgatgtgatgctatcatgtcagatatgaactgtgcatgcacaagctgggaagctacagagagccctgaggctctgcgctagggatctagtcttggccagaagcactgctagcttcccagctggcctctgcatccaaaggccaggctgaartacatggacctacagaaagcctcgtcttttctatttttaaaatctcatggaggtaccaaccagataggacttgaatggaaaatcacctgatattacccggttccataggcttttggcatctccattcatcccagaatagccagtcagctctctctgctgtgtcctagagcaccaggaaacgaataaatagtcctagagtgagacacaaaggataaagccaagtatcggaggtgagtgg

SEQ ID NO: 418803 - DNA, 570 bp, Homo sapiens
gccttacttctctgacctttttaagctccaggtactcctttgactgtaactgtcaaattttgacagcttgactcagggtgagcaaatggctcctctcaaagaatgtaacagcatccatttgacaacagcctcatctattcacatgcactaccccagcttcagaggcctttattcttacagatgtgcagagactctatgagtggtattagggttgttggatggtgtctcagtcagctcaggctgctgtaacaaaataccaaagactgagtggcttaaacagtagatatttacttctcatagttctggaggctggacgctcaagatcaaggtgccataaccttggttattggtgagggccctctttctggcttgctgtaccctcacatagtggacaggacaygacagagagctctcgtctttcctcccccttataaaaaactaatcctgtcttggaaccccattctcataatctcatctaaacctaattatgttcccagagcctcacctccaaataccatcacactggggggttagggtttcaacatataaagtgggggattgaatgacatc

SEQ ID NO: 418804 - DNA, 425 bp, Homo sapiens
tactgaatttgtttatcaattctaatagttttttgatgaattatttaggtttttcataatataagatcaattgtctatgaacaaggacaatttgacctctgcatttccaatttggatggactttatttctatctcttttcttactgctctggctagaacttccagtactgtrttaaatgaaagtggtaaaagtgaacatcattgtcatatgatgaaataccaatgacattcttcacaaatttattattgtacagttctgaaggccaggagtctgaaatggttattatggggtaaaaataaaggtgttggctgcattccttctgaagcctctagagaatacatttcctagccttttccagcttctggaatttgcctgcattctttggctcatggccacttcttctatctccaaagccagcagtgta

SEQ ID NO: 418805 - DNA, 425 bp, Homo sapiens
tactgaatttgtttatcaattctaatagttttttgatgaattatttaggtttttcataatataagatcaattgtctatgaacaaggacaatttgacctctgcatttccaatttggatggactttatttctatctcttttcttactgctctggctagaacttccagtactgtattaaatgaaagtggtaaaagtgaacatcattgtcatatratgaaataccaatgacattcttcacaaatttattattgtacagttctgaaggccaggagtctgaaatggttattatggggtaaaaataaaggtgttggctgcattccttctgaagcctctagagaatacatttcctagccttttccagcttctggaatttgcctgcattctttggctcatggccacttcttctatctccaaagccagcagtgta

SEQ ID NO: 418806 - DNA, 425 bp, Homo sapiens
tactgaatttgtttatcaattctaatagttttttgatgaattatttaggtttttcataatataagatcaattgtctatgaacaaggacaatttgacctctgcatttccaatttggatggactttatttctatctcttttcttactgctctggctagaacttccagtactgtattaaatgaaagtggtaaaagtgaacatcattgtcatatgatgaaataccaatgacattcttcacaaatttrttattgtacagttctgaaggccaggagtctgaaatggttattatggggtaaaaataaaggtgttggctgcattccttctgaagcctctagagaatacatttcctagccttttccagcttctggaatttgcctgcattctttggctcatggccacttcttctatctccaaagccagcagtgta

SEQ ID NO: 418807 - DNA, 425 bp, Homo sapiens
tactgaatttgtttatcaattctaatagttttttgatgaattatttaggtttttcataatataagatcaattgtctatgaacaaggacaatttgacctctgcatttccaatttggatggactttatttctatctcttttcttactgctctggctagaacttccagtactgtattaaatgaaagtggtaaaagtgaacatcattgtcatatgatgaaataccaatgacattcttcacaaatttatwattgtacagttctgaaggccaggagtctgaaatggttattatggggtaaaaataaaggtgttggctgcattccttctgaagcctctagagaatacatttcctagccttttccagcttctggaatttgcctgcattctttggctcatggccacttcttctatctccaaagccagcagtgta

SEQ ID NO: 418808 - DNA, 529 bp, Homo sapiens
caccaccatcttctatttctttagacttcataccctcagttttctgatggatgtgacactcattgtgtggaattcccatgatgtccagcagtgttcctctgagaagattaaagtaaataatgtctgtgcaagtgctttttaaactgggaagttatttaccataagcaagtgatgatcaagcgattaataccattgttacagtcatttcttcgtccagaatttttctgggcctgtcttaaaatttaagggctcacactccaggtaggaagcaatcttcatactttcctgagggctaggacatagattatagtagtacactgcagtcaattctaggtcagcttctgatttcctaccttgagttaaaattaygtattatactttttctgcttcctttgaagactcagtagcggagcatgtctttatcttctcatatcattatgagaaaaggcagaggatttgataccatcttcagtaagtcaatattagctgtggagtatcatccgatcttccctttagaaacgaggtaatt

SEQ ID NO: 418809 - DNA, 527 bp, Homo sapiens
ccattcaggagattccaagggttttaggagctgtrtgccaggaaatgggggatgaaagtcaaatatatatttcataatagtacactaggattaaatgactgaacaagacaagatctggcttttatggggtttatactatggcagaaggggataagtcaaacaaataagaaaacatcagttagagatacgtgagatgaaggaaatagagtgatgtgataatgtctgaaatgctacttgagactggtcagtcaggaaataaagtgtaaagacagaggtgaagggcaggtgagggcatgcagtgggttcagagaaatcagttgtaactggaatatggtacatggaatgtagagaggggtggtggaaaacaggaccgcatacatagaccagatctttaaggattgaaaatgataggttaaaagtttgcattttattttattttaaaatttatccactattcaacaagaattcatcactgcaggcaaaaacacaattagatcttgaaaagcatttacagttgaaacaaatga

SEQ ID NO: 418810 - DNA, 577 bp, Homo sapiens
gtaactggaatatggtacatggaatgtagagaggggtggtggaaaacaggaccgcatacatagaccagatctttaaggattgaaaatgataggttaaaagtttgcattttattttattttaaaatttatccactattcaacaagaattcatcactgcaggcaaaaacacaattagatcttgaaaagcatttacagttgaaacaaatgaattggaggagttacgattagaaggaggaaggccaagctggtaagtaagcatgctgacttgctcaactgaggaaggagcagtgtggacttaggaagggagatgaaatacagagatatttctggagtaaaatagaagaatttgtcaactaacaatctcattgatgaagaaggctcagaagtcaaatgcctcttagatttctagtttaagcaactcgtgttcttactcactggataggtagtataaggaataagaagggggcaggttcggagtgcattggaaaaggttgtatttggctattccgatattctacttttatcrttttcttatctattttacatagaggatgagaattcttgagaatattacagc

SEQ ID NO: 418811 - DNA, 506 bp, Homo sapiens
gcaagttctgcaataataaaaagataaaagacacagacaatctacaaggttttataatctaatatgggctataaggccatcaatacactgaaataattaatctatgtatcacttcattccttttttaattgaacaaatatttattgagcaccaactatggttcagacactgttctaggcactgggaatacaatggtatctaatagaaaaaacgcattgcccacattaagcataatttttttgtttttgtttttttgagatggagtctcactctgtcaccaggctgcagtgcagtggcacaatctcggctcactgcaccttccgcctcctgggttcaagtgatacttctgcctcagcttccctagtagctgggactacaggcatgygccaccacacccagctaatttttatgtttttagtagagacagggttagtctcgatctctcgacctcatgatctgcctgcctcggcctcccaaagtgctgggattacaggcgtgagccacca

SEQ ID NO: 418812 - DNA, 611 bp, Homo sapiens
aagtcacttaacttctcagcatttccatttctcttatctgccagttagtatgtactttgatgatttttttgtgggaattcagtgtaataaatatataaatagattacctgacacatagtagacattcaataaacaatgactcttatcacaataaaaaatgtacaaattatcatcagaatttgcattttttcagatatcaacatctgcagacagcaactaaaatatgaagcatacatttctatagcatagtttcaggcatctgaataatgacatagggagaatatgaggatttgattaagaccaacaagcatctattaagcattgtctatgttacagtcactgtgcttgggagaggagattcagagacraagaaaacactttctcaatccacacagattttagagtatagtggataaaagagagaataaatcagctaatttttctacagcagaaagtaagatatgacagcaataaacacaggatgcaatgaaagcaagatttaagttttaactcaacaacttgttgataatgacatcagtataaatgaataatattaacttaccaggaacttaccaggaaaacacagaaatttgcaagggattttataatca

SEQ ID NO: 418813 - DNA, 575 bp, Homo sapiens
ttgtagcacagaacagactaagacaagtggcataaattctgttccttgttcataaaaatggccatcggaaatctacaaataatcccaagccataagaacttaatgcctctctttagtcgaaatttccattatatgtaataggtcaaggtatttctagggtcacacaaaagtacacctagagaatcatctttctttctgagctacacctctatttgattcatcttatcatttactgactctttgatatttgaaaatttagctacttcatggccgtctccaatgaacatctcccattatctaatggaaaaaatagtaataatagcatgcattatcaagtgtttagtatggatcaatgactatgttaggtgctttggctgcatccttactgatcctcactagagccctacaaagaaggyattagaattttcattttatgtatcaagaaaacaagactcaaggacattaactttccaaaggatgttcataaagtaaatgactggtaatatttgaacctgcaacttgtataccacattccatggcattcaagagccttcaagacacattcagtaaaatat

SEQ ID NO: 418814 - DNA, 428 bp, Homo sapiens
tcccttttaattaaaattgcacagaagttatcatgacaagaatgaagcttgaaatggttaccatttatggtatctctaytttgtttcaaattctgtagtaggtgctgtacctaaatatgtattttcctccttaatttagtttcctatattatctggcaaggtaattgtcattggtcccatttgacatccaaggaatcttgaagttgagatattttaggcaacatcccaccaaaatatattcaaagtctatgttcttttatttatgcctaggaatctaggcataaatatctattcacaattactcctcagtttaactgtcctgtttctgtctttctagtatttagctcaaaaactcatggtcatgtttgcttctttttttctctatgacacaaatattcatttctcagaccagtcatgtttcctctgca

SEQ ID NO: 418815 - DNA, 604 bp, Homo sapiens
aatgggcaaaatattggaatagatacttcactaaaaagatataggaatggttcataaacacatgaaaagatctcaacattattagtcatctaggaaatgcaaatcaagaccacaacaatataccatttaacatccactagaattactataataaaaaaagacaataacaagtgttggcaatgatgtggataaattgatacccttataacattgctggtagaaatataaaatagtacaagtgttttaaaaratattttggcaatgtctttaaaaagtgaaatataaatgtatcatgaccctatatttccactcctagaaatctacctaagaaagtgaaaacatgtccagacaaaggcttgcatgtaaatgtctgtagaagcattattcataatagccaaaaattgaaaccaactcaaatttcagtttcttagtaattagctaaacaaaatctgttacatcataaaatctaatactattcaattaaaagaaattagtgatacacactaaaacaggactgcatctaaaatatatctgtgctaagtgatagaagctagacatacaagaccacatactacaagactacatttatataaaaggatcaaat

SEQ ID NO: 418816 - DNA, 588 bp, Homo sapiens
agataatcagtgacaggacaaggactcacatttagtgtgctggattcaaattccaggttctgtaaataaaagtggaatccattataggcatctttaacttatgcaaattcatgtcaaatgctcagaaaacccaataaacatacaaataaaacaaacatgaaatgttagaatttcttgatttattctattattcttccaggctttggctcttactgtgtgtggtggagagaggggaagaaactgcagccaaaatgcaataaaaataaaaatackacattttcaggaatatttcagtctttcaaaaaataattttgattatgcaatgatttgacattatgtatgaatttagaacttaaccttcatgtaatatgatttcattacattaaaaattcttcagactttaggacaaacctataaaaatacgaatatttatctttaagatataaaaagtccattaaattgcttgaaaatatataatacatatgtggtggaaccctgtatgttgttcaactaaagctacttctgctttctactgtagcgaaaatatgtatacctttaagtgctatttatactgtggtacacagaata

SEQ ID NO: 418817 - DNA, 588 bp, Homo sapiens
agataatcagtgacaggacaaggactcacatttagtgtgctggattcaaattccaggttctgtaaataaaagtggaatccattataggcatctttaacttatgcaaattcatgtcaaatgctcagaaaacccaataaacatacaaataaaacaaacatgaaatgttagaatttcttgatttattctattattcttccaggctttggctcttactgtgtgtggtggagagaggggaagaaactgcagccaaaatgcaataaaaataaaaatactacattttcaggaatatttcagtctttcaaaaaataattttgattatgcaatgatttgacattatgtatgaatttagaacttaaccttcatgtaatatgatttcattayattaaaaattcttcagactttaggacaaacctataaaaatacgaatatttatctttaagatataaaaagtccattaaattgcttgaaaatatataatacatatgtggtggaaccctgtatgttgttcaactaaagctacttctgctttctactgtagcgaaaatatgtatacctttaagtgctatttatactgtggtacacagaata

SEQ ID NO: 418818 - DNA, 590 bp, Homo sapiens
ctttatctttaccttttgttgrctttgtaatcctaggcaaattgaagactcttagacttaatttgccctttttaaaaacggaggtaataataccttttctgtaatacagttacaaatctaatattgcctgagacagagagaaggtacacaattgaaaactctcttcctgttaaagaaaatattttaaaatcagggccaggtgtggtgttaggcattcttttttatgtttgtctccataaattggtatggctcaattttgcaccagattgtaaaatttccattggcagaaactggttctcactcatattttgtcccaattgcccaacccaatatgtgatagatgctcaataagtaggatatgtattaaatggagccaaaagtgaggccagatcaagccaaggatgcagacttcactatcagacagcctgggtgatctcatttcactttcacccacaaagcagcctctgctacaaggaaagcatctgctggtgagaaattctttgcagcatttccctgtaaattggagagtagaagaaaagactgctcaaccagctgtcgtcaacaacttagaaaacttgaatgtttaggca

SEQ ID NO: 418819 - DNA, 520 bp, Homo sapiens
gataacttacaaaaccctatttgacccctaatatattccttctgtaacattagctgatctacaggtagaattcattttgcytaagttggtaataaatggtgttggcaaatcttttctcctgtttttcccagaaacccagccaggctacattttccaatgtcccttgtggttagattggtaatagaattgaattgtagctaatgaaatatgatcagaagtgatacaacttgtagggatgaacataaaacccttccacatgttcctttatgagttttgctcctttcaacttgggaaaggatctcaagggtaaccttgggaactatgaattggggatgccagagctgtcatagtcttggttcaagactggctgtgtggagaagagcttcttcctgcaaaacgaaacacaaataacaccaccaacttattcctgtcaaactaggaccagtcattaagatgaacataaataagcttctactgtgttgagctagccacatttaattagatctatttgtcaccataa

SEQ ID NO: 418820 - DNA, 585 bp, Homo sapiens
gataacttacaaaaccctatttgacccctaatatattccttctgtaacattagctgatctacaggtagaattcattttgcctaagttggtaataaatggtgttggcaaatcytttctcctgtttttcccagaaacccagccaggctacattttccaatgtcccttgtggttagattggtaatagaattgaattgtagctaatgaaatatgatcagaagtgatacaacttgtagggatgaacataaaacccttccacatgttcctttatgagttttgctcctttcaacttgggaaaggatctcaagggtaaccttgggaactatgaattggggatgccagagctgtcatagtcttggttcaagactggctgtgtggagaagagcttcttcctgcaaaacgaaacacaaataacaccaccaacttattcctgtcaaactaggaccagtcattaagatgaacataaataagcttctactgtgttgagctagccacatttaattagatctatttgtcaccataatctagcctaccctgactaatacaaatacgctggaggcagtctgcatcctagtattaacagaagaa

SEQ ID NO: 418821 - DNA, 594 bp, Homo sapiens
gaacataaataagcttctactgtgttgagctagccacatttaattagatctatttgtcaccataatctagcctaccctgactaatacaaatacgctggaggcagtctgcatcctagtattaacagaagaaaaccttaagcaagttaaatttgataaaatttaattgaacaaggaacaattcacaaactaggcagccctcagaacctaaacacgttcaaagaactctggtctgcaaygtcgtcagacaatatttatggatagaaaatggaaatgaagtacaaaaaatgaaagtgaggtacagagacagctcgattgattatatttcagcatttgccttattggaacatagtttgaactgttggccctctgcaattgactgaagctcaactgctgtggttggctgaccctcagctgtttgttacgtaagtatactcctaatttaggctttcagtttatgcactaagttaggtagcagtttgttatgtcaggactcgagtatggagacatcctcaggccaaatttagtttgatataacactagcatcatagcaggctaagtcttttagttaaaccttcgccaaatctcggattgtat

SEQ ID NO: 418822 - DNA, 594 bp, Homo sapiens
gaacataaataagcttctactgtgttgagctagccacatttaattagatctatttgtcaccataatctagcctaccctgactaatacaaatacgctggaggcagtctgcatcctagtattaacagaagaaaaccttaagcaagttaaatttgataaaatttaattgaacaaggaacaattcacaaactaggcagccctcagaacctaaacacgttcaaagaactctggtctgcaacgtcgtcagacaatatttatggatagaaaatggaaatgaagtacaaaaaatgaaagtgaggtacagagacagcycgattgattatatttcagcatttgccttattggaacatagtttgaactgttggccctctgcaattgactgaagctcaactgctgtggttggctgaccctcagctgtttgttacgtaagtatactcctaatttaggctttcagtttatgcactaagttaggtagcagtttgttatgtcaggactcgagtatggagacatcctcaggccaaatttagtttgatataacactagcatcatagcaggctaagtcttttagttaaaccttcgccaaatctcggattgtat

SEQ ID NO: 418823 - DNA, 486 bp, Homo sapiens
cacataaattaaaatttctatacagcccccttccttaaaggaatttaaatgtggacagattggaggggaaaggtttgcagcaaaaatcataagtagaaggaaacagaatggttaagtacacagtgtagtagccatttaggaaagttataagccatttaaatgccatgtataaagtgtttttgataagaaaaaatcaaagtgtaaaggagaatacaaaattatatgtgtactgcggtcacatctgtattgttctgtgtatggaaaacagactggggagaaatagctttaagtcctaatagtaattttctttttctctcttcttttttctgctttctcttttccctgtctccctcaatattgcatatctttcccattaaaaagtattrtattatatatctaccaacaagacatttgtttcagattttttggttttgtcttcaaggaacattcttctgcatacaacttcatacttttaaaattctctgg

SEQ ID NO: 418824 - DNA, 594 bp, Homo sapiens
taggttcatccaaggatcgtggttctctgtcttcatgacaagggagaataactgaagacttatkctgatgcctcactctgggtttggaaataaaagtggaatacctataacaaatttcagttacactacatcacaagtatcactgtgatattaggacaaacaaaattgatgtcgatattaaagcttcgaaaaattaatcagacactttttttaagagaaagaagacagatatggataggttttttgtaaatgaagtataccaaataaccaagcactgagaatggagttaaaactgcccagacgctatgatgctacccaatgctattaaacattgggtggcacctttaaagaaaaggtactgatttcccacagccacttattatatgctatggagagcaattcttccaaaataccaagcacactttttggatggttaaagcccgttccagccttctgatggtgtcaattaattcttgtgaggaatcattttaaattctctccagtgagagagtttgctattatattttagttttatttaaaccccctttcaagaactgtgtctaatagaccttcaaagcatctctgggtagctct

SEQ ID NO: 418825 - DNA, 594 bp, Homo sapiens
taggttcatccaaggatcgtggttctctgtcttcatgacaagggagaataactgaagacttattctgatgcctcactctgggtttggaaataaaagtggaatacctataacaaatttcagttacactacatcacaagtatcactgtgatattaggacaaacaaaattgatgtcgatattaaagcttcgaaaaattaatcagacactttttttaagagaaagaagacagatatggataggttttttgtaaatgaagtataccaaataaccaagcactgagaatggagttaaaactgcccagacgctatgatgctacccaatgctattaaacaytgggtggcacctttaaagaaaaggtactgatttcccacagccacttattatatgctatggagagcaattcttccaaaataccaagcacactttttggatggttaaagcccgttccagccttctgatggtgtcaattaattcttgtgaggaatcattttaaattctctccagtgagagagtttgctattatattttagttttatttaaaccccctttcaagaactgtgtctaatagaccttcaaagcatctctgggtagctct

SEQ ID NO: 418826 - DNA, 615 bp, Homo sapiens
ttgttacatgggtatattgtgtgatgctgaggtttgggatatgaatgatcccatcacctaggtactgagcatataacccaatagttagtttttcaacacttgcccctctccctcccttccccctctagtagtccccattgtctatgggtgtcatttttatgtccatgatcaaccaatgtgtagctcccacttaaaagtgaaaacatgcattatttggttttctgttcctgcattaacttgcttatgatgatggcctccagctgcatcatgttgctgcaaaggatatgatttcattcttttttatggctgcatagtattccatggtgtctrtgtatcacattttctttatctaatccactgttcatgggcatctaggttgattccatgctttgctattgtgaatactgctgtgatgaacattcaagtacatgtgtctttttggtagaatgatttattttcttttggatatatacccagtaatgggattgctgagtcaaatggtagatctgttttaagttctttgggaaatgagatctgcttttattaaaaccaaatagcaagattataggaaagtagccagcttccaccaaattcaaactcttttgaagctattat

SEQ ID NO: 418827 - DNA, 615 bp, Homo sapiens
ttgttacatgggtatattgtgtgatgctgaggtttgggatatgaatgatcccatcacctaggtactgagcatataacccaatagttagtttttcaacacttgcccctctccctcccttccccctctagtagtccccattgtctatgggtgtcatttttatgtccatgatcaaccaatgtgtagctcccacttaaaagtgaaaacatgcattatttggttttctgttcctgcattaacttgcttatgatgatggcctccagctgcatcatgttgctgcaaaggatatgatttcattcttttttatggctgcatagtattccatggtgtctatgtatcacattttctttatctaatccactgttcatgggcatctaggttgattccatgctttgctattgtgaatactgctgtgatgaacattcaagtacatgtgtctttttggtagaatgatttattttcttttggatatatacccagtaatgggattgctgagtcaaatggtagatctgttttaagttctttgggaaatkagatctgcttttattaaaaccaaatagcaagattataggaaagtagccagcttccaccaaattcaaactcttttgaagctattat

SEQ ID NO: 418828 - DNA, 579 bp, Homo sapiens
gtgaattatatcccaataacactgtttaaaaattaatgtttaaatccctggactcagtaatcctaagcattagtttgaaccatataaaactgcagatatcggatcatttttgacctatagaacagcaatttaatagttcaacctaacagctattctaagacacagtccaagacttatttgtaaagatgtcaatatttgtaattttgtaagaatgtgatttttgaaacaacctaaatgttaagaaataaaatgattaaataaactattgtataagtacatggtggaaaataatgcaaacatgtaaattacatctttgaagaattatttaaagcatgataaaatactgtgtgtactactttatgcaaayttttaaaacatatatttatttgtaggtaaaaataaataaatataggtaaataaaccaagaatttaacagtattatctctgaaagttaggattacgggtgatactaatttttcctttttttgtattttccaaattttctataacaagctcatattacttttaaaattaggaaataatcttatcaccaaagaaaaggaaaaaaaatccaagaaa

SEQ ID NO: 418829 - DNA, 574 bp, Homo sapiens
aatgagaacacaaagggaatttttaaataattagttattctttttttagcatttgtgtatcttttataaagacaatggtgaattaatatagaacataaaaagttgcctggcagagttgttgtaataccactattcatgtacataacaatattttttaaaaatattcaaaaagtacctttgaaaagtaccttctgtggaaactattcataagatgacagaagaaatctctttgctcccacgaaattgactttattaagctgattagttgtttgagggttggctattatagtagtactacagcttgcagccatgtctaaaggtaatctaattttttaaaaaaatcagttctatgccagtcaaatcccatgcaagtcatacatgtgtgagctgcattcagtcttctggggccatcaatttgttgccccttctcagcatgatgcagtcratattcccctcctcactacagtaaacttaaataccttgtgcacccctgacatctcaataatcttaaacattctcctcacactattagaaatgtgaggctaggagtttataaaattttccctattatctg

SEQ ID NO: 418830 - DNA, 623 bp, Homo sapiens
ggtggcggaacatgtcggcatgaaggagagcagcagggtaaccaaacactctgaatcatgagctgaagagaggtgaccagggctaaagaaacctacagagattagccaaagaagaacttcaaaccacagctgctaatacattggctgttggaaagtacctgcaataaacatatcatactttatggaacactgtaatatgaaatgacacttttagggcagakgtataggaacctgggaaggcagataagagcccttgctcttttccatttcccaggtttatgctggcgtgcccacacatcttaatagatcacaaatgtttgctcctatcgaggtctcattattttcttcttcaaaataataccttccatcaatcacccaggaataacaaagtaatgacttaattgaatgcaaagagtctactcataccacctaaatcagctagtttatacatattgctgaaaaataggaatatttgtttgaaacccacaaagtgaaccagaaaattccgatcatctctcctgcatggtctgcctttgtgtgtactttcaaagtgaattatcaaactagtaatttgtcagtatggaacttaaattattaatatgtgaatatagtaggctatattt

SEQ ID NO: 418831 - DNA, 603 bp, Homo sapiens
ttaatagaactaaacattgatgctattcaagaaaggtacagagtcctgtgcaaatcttccctttaaattattcacagctcatgaagctctatctcacaggtacaagtccattaagaaaagtccagaaaacaaatctaacataaatggaatcaaagataagaactaaatatataatgagttccttttaaatgaaggcagcagagcaaaggcaggactaccatctgtgtacaaactgaactgttaggggtatggtatgggtatgtagtggttatrtttggaaagacgcaaaacccacatccttctacctaaatctgtataagaggcacatcatctcaggactctgccatctatgatacaaaatgcacaaaatgaaatttctgctttatcttacattccatggaaatatctttattggaataaagtggcctacatttatattcacttctaaacaacgtcctctccttctcatctgtttctgtctgatggaggcctatttttgcttcagaggacagatcaaataccgcctcttccaggaagccttttcagatccaagtgagaacaagcctgtctttcctaggcgcccccagcctgtctgagaacaac

SEQ ID NO: 418832 - DNA, 603 bp, Homo sapiens
ttaatagaactaaacattgatgctattcaagaaaggtacagagtcctgtgcaaatcttccctttaaattattcacagctcatgaagctctatctcacaggtacaagtccattaagaaaagtccagaaaacaaatctaacataaatggaatcaaagataagaactaaatatataatgagttccttttaaatgaaggcagcagagcaaaggcaggactaccatctgtgtacaaactgaactgttaggggtatggtatgggtatgtagtggttatatttggaaagacgcaaaacccacrtccttctacctaaatctgtataagaggcacatcatctcaggactctgccatctatgatacaaaatgcacaaaatgaaatttctgctttatcttacattccatggaaatatctttattggaataaagtggcctacatttatattcacttctaaacaacgtcctctccttctcatctgtttctgtctgatggaggcctatttttgcttcagaggacagatcaaataccgcctcttccaggaagccttttcagatccaagtgagaacaagcctgtctttcctaggcgcccccagcctgtctgagaacaac

SEQ ID NO: 418833 - DNA, 606 bp, Homo sapiens
taacttaaacagtatagtcacacagtctcaaagtgccacacccaaagattccttattacaaaggtaaaaggtgtctttgtagtgaataaatctggtgaacgctacctcaaacaagtaaacttagcatcactctttagaagaaaaattaacaccatgtgcctcctgatataatgcaatggaaaggacacaacatcaccaagaatacagtgttcttgtcaaatgtgtaacgtgaatctaattattcaagaaatgaaaattaagaaatgtagaaatcatcagtcattctatcagaaacctaacgctggatgcttaaaaaatgtcaagatcatgaaagacaaaaaaaaagtttttttaaataaatataaagttaaaycatgggagctataccaatttaaagaagactgaagagacctgaaatccaaataaaatatgtgatcctttactagaaattccgaaaattccacaaaggatatttctggagggacaattggagaaagttaagtcagataattatatcattataaactttcttaagtatgatactggtgttgtaattatgctgcagaatgtccttattcttaggatatacatgctagggtatttggg

SEQ ID NO: 418834 - DNA, 457 bp, Homo sapiens
tggtgcctatgctatgctattctcgctctgtcacccaggctggaatgcagtcattygatctcggttcactgcaacctccacctcccgggttcaagcgattctcctgcctcatcctcccaagtagctgggactacagatgcaagccatcatgcctggctaattttttttttttttttttttttttgcattttagtagagatggggtttcaccatattggccaaggtggtctcgaactcctgaccgcaggtgatccactcgccttggcctcccaaagtgttggaattacaggcgtgacccacagtgcccggccaggagtctttaaatgccattatgaggcctggctctggtctggtgatccatggaggccacactaaaccccagagagaggagagtccaattaaagagagggaaatcaaaacccaaacaaaaccaaatctcctgctcaaaataagtatg

SEQ ID NO: 418835 - DNA, 457 bp, Homo sapiens
tggtgcctatgctatgctattctcgctctgtcacccaggctggaatgcagtcatttratctcggttcactgcaacctccacctcccgggttcaagcgattctcctgcctcatcctcccaagtagctgggactacagatgcaagccatcatgcctggctaattttttttttttttttttttttttgcattttagtagagatggggtttcaccatattggccaaggtggtctcgaactcctgaccgcaggtgatccactcgccttggcctcccaaagtgttggaattacaggcgtgacccacagtgcccggccaggagtctttaaatgccattatgaggcctggctctggtctggtgatccatggaggccacactaaaccccagagagaggagagtccaattaaagagagggaaatcaaaacccaaacaaaaccaaatctcctgctcaaaataagtatg

SEQ ID NO: 418836 - DNA, 586 bp, Homo sapiens
cacaaataaaacttgaggatggggcacggtggctgcttgagaactggagtcattttgtaacccaagctggagatgtttccagtggcctccaccatccagctgcaccccttcagactgggttaggtacaggggaagtactctgctttactctgccatggcatgccctccactgaactgtcatcgtgagtggattctgcaagggaggccctgagtcttacccatcttcttatctccagtgcctagcacaatgcctggtatagagaagatcctcaataatgctgtctttaaaaatgactgtatattatctaatctctattattttccaggtgatacatatagataacgtgaacaagtcaaataatcaacaggattgattctatctctgttttgtctgtttggtgtttttttttattgagacrgggtcttgctctgtcacagaggctggagtgcagtggcgccatctcagctcagtgcaacctcaagttttatttttaaaagaagtgttatcttctatccaccaatccctcaattatataatacacatatctatttctccgagttaatcatattaaacttttagctattt

SEQ ID NO: 418837 - DNA, 552 bp, Homo sapiens
atgtatattatatatagacatttctattcaaatagtaagggtccgtattcaaaagtttgtatcataatatatggaaaaaagttaagcaagcagtgcaaagcaacttactttctcctaaaaatgtaatgtcattcctacattttaagaaagcaacgtaaatattatgcttttatgacactagacaggaatgttgcaccactgcctagcagctttattaaacaatgaaaacaaaatgttaagatttacagttacccttctccatatattgggcaaaacactaaaacagaggaaagaggaaaatcagtaacttttcaaaactgatagtctttatcagcagaactagactgaatttcactacattttagaatgarcagctctcaacaacaaattatcaacatatttaaaagtaaaagattcacaatttgaagtctgaataatgatattgcaaaaacaactcaatattgcagacgaagcatccaaacatatcactgtgattttaccttggatacaaccatggtctgttacaaaaatagatcatacatacaaaggtat

SEQ ID NO: 418838 - DNA, 552 bp, Homo sapiens
atgtatattatatatagacatttctattcaaatagtaagggtccgtattcaaaagtttgtatcataatatatggaaaaaagttaagcaagcagtgcaaagcaacttactttctcctaaaaatgtaatgtcattcctacattttaagaaagcaacgtaaatattatgcttttatgacactagacaggaatgttgcaccactgcctagcagctttattaaacaatgaaaacaaaatgttaagatttacagttacccttctccatatattgggcaaaacactaaaacagaggaaagaggaaaatcagtaacttttcaaaactgatagtctttatcagcagaactagactgaatttcactacattttagaatgaacagctctcaacaacaaattatcaacatatttaaaagtaaaagattcacaatttgaagtctgaataatgatattgcaaaaacaactcaatattgcagacgaagcatccaaayatatcactgtgattttaccttggatacaaccatggtctgttacaaaaatagatcatacatacaaaggtat

SEQ ID NO: 418839 - DNA, 564 bp, Homo sapiens
taactagatgatttcaagtggggtaggattttagattcttcactgtcttgacaataacaacacctgaaaaaaatataaactatctttctcaacattttgtgtcattgaattccattgataagttatggaaaacacttattaaatttaagacattctcatattcagtgatcaagaagatactgtcataataaactttcactagaatccagctattaaagcctcatgtacttagccaggcaactaaaattgcccaagttgaaattagtwgttcagttagaccatagggacacctggctccttataaatatcattcttctttccttcacttttgtataagacttctcattttatttctgttcatacttttttttaagtaaaacttgtttacacttagctcagaggaacatttctatctaacataaaagattcacaacaggaaagttacacagacttgaattggtaaaatattagttgtgtttgcatatatcaataatgttaattgtctatatcacagtttcttcatctgtaaaaacagaatattaatacctaccctacagacttaac

SEQ ID NO: 418840 - DNA, 564 bp, Homo sapiens
taactagatgatttcaagtggggtaggattttagattcttcactgtcttgacaataacaacacctgaaaaaaatataaactatctttctcaacattttgtgtcattgaattccattgataagttatggaaaacacttattaaatttaagacattctcatattcagtgatcaagaagatactgtcataataaactttcactagaatccagctattaaagcctcatgtacttagccaggcaactaaaattgcccaagttgaaattagttgttcagttagaccatagggacacctggctccttataaatatcattcttctttccttcacttttgtataagacttctcattttatttctgttcatacttttttttaagtaamacttgtttacacttagctcagaggaacatttctatctaacataaaagattcacaacaggaaagttacacagacttgaattggtaaaatattagttgtgtttgcatatatcaataatgttaattgtctatatcacagtttcttcatctgtaaaaacagaatattaatacctaccctacagacttaac

SEQ ID NO: 418841 - DNA, 597 bp, Homo sapiens
agaagtcccacagtttactgtctgcaagctagagaaccaggaaagctggtgatgtaattcagtctgagttcaaagaccagagaatcaggagtcccagtgtctgaggacaggggaaaaatggatgtcctagctcaaacaaagagaccacatttgcccttcctcttcctttctatctgagccctcagtggattggacaatgcccacccacattgctcaggacaatcttctttactcaatttattgattcgaatgctaatctcttccagaaacacttcacagaccacccaaaaataatgttttgccagctatctgggcaccccttagcccagtcaagttgacacataccaattaaccatcacaaatgttaagtcttaaaaggttagagaccttatttattatttctttggtatctccctgtgctatccagtmctttatacacactggataatcaatatttaaccaaagatcagtaaacatcagtatcttcatttttcttctaaagacactaatgaagattagtatcttcatttttcttctaaagacacaggaacctaagaattatgatataagtgtaaagttagggaacatagtctacaa

SEQ ID NO: 418842 - DNA, 588 bp, Homo sapiens
aaaatgtaattctagcaatagtagtccagagagtgagagcaagaatcaagaatgtagaaatataaactctcatttttaaaggttatagatccaagagtcatttctaggtcacatcgatagactttgactatatctaattagttagatatagacatgagattagagggaggagcagaataaaggatgatgccaatgcctctagccaagtagttgaaaaactgaccaacacagaaaactcaagagaatgatgaaactcaggacacaagcagaggaagttagtgagtttgattcagggtatgtagcatttgagaagcaagcagaagatccaaacagaaatgacctgtggggccttggagcttcagaagtcaaataagcctagtgacctaggtttagcataaaagtgttagttgaaataatgtacgctaatgagactcccaagagatagactgtagaacataaaggaaagcagaagacagcaactttggagacaccaccacttcaagataaaagaaggtaaaagaagtgaatcacrggaggtacaacaggggaagactaaggcaggcagtccaccagagtcttacagcatgg

SEQ ID NO: 418843 - DNA, 610 bp, Homo sapiens
gactgggtctatatcacactcaaaaacttctgggtgtcaaagaacacaatgaatagaatgaaaaggcaacatatagaacagaagaaaatacctgcaaattatatatctgataaggagttaatatccagactatataaagaatttgcaaaacccaacaataacaaaaactaacatgatttaaaaatgggcaaaggacttagacaacatttctccaaagatgatatacaaatgtctaagaagcatatgtgaaaagatgctcaacatcwtttatcattaaagaaatgaaaattcaaaccacaatgagatatcatgtcgcacccacgaggatggcaactatcaaaaacaaagaaaaaagaaaagaccaaatgttagtagggatatggagaaatttggaacccttgtgaagtactagtgggactgtaaaatggtgcacctgctctggaaaacagtatggcatttctttaaaaaattaaaagtagaactaccgtataatccagcaatctcacttttggatatatattcaaagaattaaatgcagggtcttgaagagatatttgtacacccatgtttatagcagcattattcacaatagccaagaggtagaagcaat

SEQ ID NO: 418844 - DNA, 506 bp, Homo sapiens
ttgtagttcttcttgtaaagatctttcacctccttggttagatgtattcctaggtattttatttgtgtgtgtgtgtgtgtgtgtggctattgtaaatgggattatgttcttgatttggctctcagcttatacattattggtgtaaagaaatgctactgatttttgtacattaattttacatcctgaaaccttgctaaaattatcagttctaatagccttttggtaaagtccttaggattgtctaagtatagaatcatatcattagcgaaaagagatagtttgacttcttcttttcctgttcagatgcctttttttttttttaactcttgcctagttgctctggctagcacctccagtgctatgttgaataggagtggtgagagtggggatccttgtcttattctagttctcaagaggaatgcttccagtttttgcctgttcagtatgatgttggctgtgggtttgtcataratggctcttattattttgaagaatattccttcaat

SEQ ID NO: 418845 - DNA, 406 bp, Homo sapiens
ctggtagaattcaattcatatggtccagagattttatttggttggtaggatttttattactgattctatctcagatattgatattggtctgttttgtgtttcaatttcttcctgattcaatcttgagagattgtgtgtttccaagaatatattcatttcctctagattttctagtttgtgtgcatagaggtgtcgtaatcatctctgaggatcttttgtatttctgtgggatcagttgtaatgccacttttgtcatttctgattttgcttatttggatctatttgggtctttctttttttttttttttttttgktaatctagctagtggtctattgatcttgtttatcctttcaaaaaccaacttttggttttgttggttctttgtgtggatttttgggtctcaat

SEQ ID NO: 418846 - DNA, 488 bp, Homo sapiens
aaaacagttattgtgattaccatgttgtttggggcattatccctttttttagtcacrttgctaaagtaaactttgtttgctgatcttatttccctctgttcttcctttcttagttggcacttttctttggtcctgtcttatcatcatgattattattatttctctttattacaataaatacaaatacaaatctcaaggcaaaatacacaggaaaatgaagacccacaccacacttgaaaccaaagcgcaactgacgtagtaaaaaagaaaatgatgaattcttaaactgctttaatagacagcccagatatctattaccgtaagtctgcaaatatattgtacctagagttaaaatgcaacctcatgctctataagctttattgcatataaggaaaatgtctaagaaaaggccagtacctgaagaaagagttatgggaagggtcagctaaccagaaggcacctttttttctgacacagtgagaccatct

SEQ ID NO: 418847 - DNA, 575 bp, Homo sapiens
aattagcataatttcctaagggtgatgaaattaccatctaagacagcacaatagtttcaaaagtgccctccaaaaacatagaagtcattatgctactgaattrtcagtaaaatagataggcaacatacaccagccgtcaagctggaggtgggtcgatattcataaataatttatctctatgaaaaaccatagcatcctatactttcagcaagatataagcgagtccaagctagcaatccaaatggccccggctgtttttttaaagccactatcaccctagctaaaaaatctcttatcataaaaggtccaattgacctgctacccagaatgccaaaggaacttggtggtattgcctgaaaatcacaaagaacaaagaacagaagactgtcaagatactataattgggcaatgttctgatatgtgaaatggatggatttttcaactctctcagattctgaccttctccacatttaatgtgaaatatcacaacctcttatgtggcatagcatatataatattggaaaacatcctgattttccaaaagaatgaatactatcaactaaaaaaaacaaact

SEQ ID NO: 418848 - DNA, 520 bp, Homo sapiens
gcacctggaatagccagctaattagaccattcatatttttcaggtttgggttttgctgggctagaaagatctgatatatcggctagcatttactctcatgcaaataacagggccaggaaccattctataaatctcaattcatttctgaggtgttccagtaaaatgagcaatcaatttaaccgactagaattcttcactttaggatctgcatagtacggaacaacagaagcagtagaaattgcaacaagccctaggctaccaaagtctataagactcctagatactccttcagatggcrtttcaaaaacaaattgaaaaatttcatagcttccaagtccctctgccttacttaagaaaggttatcttataggcatcattggatattgtcttccccaccataagccacccatcagcatgctcacgtacatctgatacatctagctacactgcacccaacaacaagagatttcatataattagttccatgattgacatgaaaagtttatgaaaattcaccaaa

SEQ ID NO: 418849 - DNA, 520 bp, Homo sapiens
gcacctggaatagccagctaattagaccattcatatttttcaggtttgggttttgctgggctagaaagatctgatatatcggctagcatttactctcatgcaaataacagggccaggaaccattctataaatctcaattcatttctgaggtgttccagtaaaatgagcaatcaatttaaccgactagaattcttcactttaggatctgcatagtacggaacaacagaagcagtagaaattgcaacaagccctaggctaccaaagtctataagactcctagatactccttcagatggcatttcaaaaacaaattgaaaaatttcatagcttccaagtccctctgccttacttmagaaaggttatcttataggcatcattggatattgtcttccccaccataagccacccatcagcatgctcacgtacatctgatacatctagctacactgcacccaacaacaagagatttcatataattagttccatgattgacatgaaaagtttatgaaaattcaccaaa

SEQ ID NO: 418850 - DNA, 576 bp, Homo sapiens
aatcatccaaccataaggagttaggggaaaagaacagcaaaataaattcaagaaaatggaaaaaataatacaaataagagcaaaagttaatgaaaatggcaggaaatatatattgaagacaattgaagacaattcaatatatattgaagacaattggtttaaatgtttttccccctcaaaactcgtgttaaaatttaattgccattgtgatgatattaggaagtgggacctttaagaagtgtttaggtcatgagggctctgctcatgagattacactcataccattatcacttgagtgggttcattattgcagaagtgggtctgcctctccccagcactctttgccctttcaccatatgatgccttccaccatgttatgccacagcaagaaggccctcaccagatgcagacaccttgattttggactccctggctttcagaactgtgcactaataaatttctgtttgttataaattaccgagtctatggtattctgttatagcascacaaaactgactaagacaaaaattaacaaagttcaaaaaaagaataacatatgaaaatctctagagagaa

SEQ ID NO: 418851 - DNA, 674 bp, Homo sapiens
tcaaggctgacatggctattaccacagctggccagaagcagagatcaacactgagttcctgatgtagcatcatttcccagggtgatctgccagctacctgatgacaggttgagcacattggactgcttccactaaggaaagagcagcattttgttcttaccagaacagacacatgtttctgtcaaaactgcaacccatgtaattacagaatcctatattcaccttcatgatattccacacagcattggttctgatttaaaaaaataaactcacttcaaagaaaaaatcatgtagcaatgggtccattttcataaaattcactagtcttatcttatttcccactattctaaagcagtcaatttgctagaatggtggaattgccttttgaagtctcagttatatcaccgaaggrctagtactttgcaggcatggttcatttatttcacatcatactatttaagttatggaatatgaaggagatgagcaaatataactactttgcctctctatctggggaaagggtttgtgaatttgggttgtacactgaatagttgtatcatgttaggcagaattatgaccttattattgcctttgtttagagattgagtatggcttaaggaaatatgtgtgagtgccaagttgacatagggtagacttggatggctaattttata

SEQ ID NO: 418852 - DNA, 545 bp, Homo sapiens
ttttttattagaaacattttgttcaaaattcagtggagactctctcatccttaaaagatcttaaactcaataaagtactagttgaaatattcagacatcattccaaagagaaattttatttctttagcttttcttaaagtggaattttgttgcatataattgggctactactaatcatgtgttttagtccattttatttgttgattgatgtggtaggcagaattctaaaatggcccctaaaatttcctgccyttctggtatatgtgccctacagtaattaactggagctgtgaatttgatggtttttactcctgtgattaggttatgtgaatatggcacagacaaccttgagacaggagattatccaggtacgccttaactaaatatatgagctctttaaatatcgaacttttttccagctggttgcagaagagaaagtaaaagagtcaaagactgaaaaggctttgtgaggactaggatgccaaggcgggagcctgagtctgttttatcttggcgaaggcttccctcatttctggggtccacgc

SEQ ID NO: 418853 - DNA, 552 bp, Homo sapiens
ggtttcgatttgcatttctctgacgattagtgatgctgagtattttttttcatatattctttggccacttgtatcttcttttgagaaatgtctcctcatattgtttgcccacattttaatggggttgttttttgcttattaaattgtttgagctacttatagattctagatattagactttcgtcagatgcatattttgtgaatattctctcccattcatatgttgtctgtttactctgttgatagtttcttttgctatgcagaagctctttaagtcccacttgtcaattttttgttacaattgcyttaggggacttactcaattactcaattactaaattctttcccaaggctgatgtccagaatcgtgttccctaggtttgcttctaggatttttataattttaggccttacatttaagtttttgatccatcttgagttaatttttgtttatgttcaaagataggggttcagttttatccttctgcatatggctagacagctatcccagcacgatttattgaatagacagtcctttccccattgcttatt

SEQ ID NO: 418854 - DNA, 552 bp, Homo sapiens
ggtttcgatttgcatttctctgacgattagtgatgctgagtattttttttcatatattctttggccacttgtatcttcttttgagaaatgtctcctcatattgtttgcccacattttaatggggttgttttttgcttattaaattgtttgagctacttatagattctagatattagactttcgtcagatgcatattttgtgaatattctctcccattcatatgttgtctgtttactctgttgatagtttcttttgctatgcagaagctctttaagtcccacttgtcaattttttgttacaattgccttagrggacttactcaattactcaattactaaattctttcccaaggctgatgtccagaatcgtgttccctaggtttgcttctaggatttttataattttaggccttacatttaagtttttgatccatcttgagttaatttttgtttatgttcaaagataggggttcagttttatccttctgcatatggctagacagctatcccagcacgatttattgaatagacagtcctttccccattgcttatt

SEQ ID NO: 418855 - DNA, 579 bp, Homo sapiens
gcaataaaacaatcacagatcactgcaacctcgaccatctgggttcaagtcatcttcccacctcagcctcccaagtagctggaactgcaggtgcatagcaccatgccaggctaattattattattattattgtttttagaggcaggctcttgctatgttgcccaggcttgtctcaaactcctggatgtaagtgatcctcccgctyaggcctcccaaagtgttgggattaaaagtgtgagctaccacacttggcaggcccagggtcttaaaaagtgttttggtgtagctttctctctactatgagctttctaatctcttccactatctgccacagctacactgtaatttatatcacacttaatgaggactgttgcttttaccatacttctaagagccatccaaataatgtgtttgcaccatcgtctttaatagggtgttaaatccagtgtattcagagagtgctttgaaatcagtatttcccttatgcatcttcatgttacatcctttttgatccaacaccctcttagaatccagtcccataaactctctacattctctggtggaaggggtgaacaagct

SEQ ID NO: 418856 - DNA, 519 bp, Homo sapiens
tacaactgtgtttcattaacattttcttggaattcagcttgcattggatttcatagatttgtctagaatttgtcataagaatycagaggtaaataaggcatataatgtggccatccaatactaaaaaacctaatccagagacagaaaatacacttcatcttgggctgggtgtggtggctcatgcctgtaatcccaccactttgggaggccaaggcaagcagatcacttgagttcagaagttccaaaccagcttggccagcatggtgaaaccctgtctctactaaaaatacaaaaaattagctgggcgtggtggtgcatgcctgtaattccagctactcaggaggctgaggaacaagaatcgcttgaacctgggaggcagaggttacagtaagccaagatcacgccattgcaccccagcctgggcaacagagcaaggctctgtctcaaattaaaaaaaaaaaaaaaagaaagaaagaaaatacacttcatcttaagtgccacatgtaaattgatcattgt

SEQ ID NO: 418857 - DNA, 519 bp, Homo sapiens
tacaactgtgtttcattaacattttcttggaattcagcttgcattggatttcatagatttgtctagaatttgtcataagaattcagaggtaaataaggcatataatgtggccatccaatactaaaaaacctaatccagagacagaaaatacacttcatcttgggctgggtgtggtggytcatgcctgtaatcccaccactttgggaggccaaggcaagcagatcacttgagttcagaagttccaaaccagcttggccagcatggtgaaaccctgtctctactaaaaatacaaaaaattagctgggcgtggtggtgcatgcctgtaattccagctactcaggaggctgaggaacaagaatcgcttgaacctgggaggcagaggttacagtaagccaagatcacgccattgcaccccagcctgggcaacagagcaaggctctgtctcaaattaaaaaaaaaaaaaaaagaaagaaagaaaatacacttcatcttaagtgccacatgtaaattgatcattgt

SEQ ID NO: 418858 - DNA, 519 bp, Homo sapiens
tacaactgtgtttcattaacattttcttggaattcagcttgcattggatttcatagatttgtctagaatttgtcataagaattcagaggtaaataaggcatataatgtggccatccaatactaaaaaacctaatccagagacagaaaatacacttcatcttgggctgggtgtggtggctcatgcctgtaatcccaccactttgggaggccaaggcaagcagatcacttgagttcagaagttccaraccagcttggccagcatggtgaaaccctgtctctactaaaaatacaaaaaattagctgggcgtggtggtgcatgcctgtaattccagctactcaggaggctgaggaacaagaatcgcttgaacctgggaggcagaggttacagtaagccaagatcacgccattgcaccccagcctgggcaacagagcaaggctctgtctcaaattaaaaaaaaaaaaaaaagaaagaaagaaaatacacttcatcttaagtgccacatgtaaattgatcattgt

SEQ ID NO: 418859 - DNA, 519 bp, Homo sapiens
tacaactgtgtttcattaacattttcttggaattcagcttgcattggatttcatagatttgtctagaatttgtcataagaattcagaggtaaataaggcatataatgtggccatccaatactaaaaaacctaatccagagacagaaaatacacttcatcttgggctgggtgtggtggctcatgcctgtaatcccaccactttgggaggccaaggcaagcagatcacttgagttcagaagttccaaaccagcttggccagcatggtgaaaccctgtctctactaaaaatacaaaaaattagctgggcgtggtggtgcatgcctgtaattccagctactcaggaggctgaggaacaagaatcgcttgaacctgggaggcagaggttacagtaagccaagatcaygccattgcaccccagcctgggcaacagagcaaggctctgtctcaaattaaaaaaaaaaaaaaaagaaagaaagaaaatacacttcatcttaagtgccacatgtaaattgatcattgt

SEQ ID NO: 418860 - DNA, 630 bp, Homo sapiens
tgcaaaaataaccataattctttatctcttcctatatccactcctctttgtatagcaactttgccactctttcttcaccccttaaatcttgtctgaccttataacttgcattgattagtaaaatgtggtagaaataacagactaattttgtgcctagcccttgaaagattttgcatatttcccattttgcttttggatctctattactgtcgtgtgaataagcctcagaagatacttaaatgtaaaaaagcagagtcaggtcatcctagctgaagtcatttcagatgaaccagcctccacccagtctggcagctgatcacagatgcatgaatgacctaagtcaaaaacaaaagacatgcttagctcaacccagacaacattgccaaactggagaatcccaattaaataagtggttgcagttttaggccactaagttgtgaggtcgcttattatgcagtaatagctaattgatatactgtttcatctctaatctaatytacataacccaaaataagatatatgcttccatgattaaataaaattaatgtttttttactggctcttattttctgtaaccattcaaatttgcaacataaaagggtttgctttaaaaataaaatggtacttcat

SEQ ID NO: 418861 - DNA, 542 bp, Homo sapiens
gtgcatctgcattttgttcttgataaagttgttttccaaagatatacaggttcacaagtctgatactgctatacctgtatactagaatagaacaattaagtaaacggatggcagatggacagagtcaggtttttcaatgttggagtggaagtttatagataagcaaaatgaggaagttataattatccatgttataagggttaaagttaagagatctgtatggattcatgtctagcttaatataaatatagatgcttacatatagaaatatttataaatatacgcattttattagtcagtgttctccagagaatcacaaccaataagatgtgtgcctatgtgtgtatgtgtgtgcacagattttatatgtgtgtgtgtgtgtgtgtatatatatatatakagagagagagagagagagacagagaggcagagagaaaaagagttattacatgaaactggctcacatagttacagagcctgaaagtcccaagttctatagtcagcaagctggagatccaggatggctaattgtgtagttcaag

SEQ ID NO: 418862 - DNA, 592 bp, Homo sapiens
aaacagcaagaaccttttacccctagtaattgagtctcctaacagttagtgaccacttctgttctttaaattcatcatttatcctgcwtcccttttcttttttactttttaattatttagacttttttataccctttactgagactccccaattcttactatttgtcacattttctttataattgtctgtctgcctcttctctgcctctctctctctgtccctttatctcctccccccatacatgtacatacacatttttttgtgaactatttgagagtaagttgtacatcatgcctctttccccctaaattctttagtttatattttatgtatttccttagaacaaggacatcatcatgcataatactctagagttacaaaagtcagcatagcattgatactatatctgcaggctatactgagatttcaccaattataccagtgcctttatagcaaatatttttttctagtccaggatcatctattgcattttgtcagatcttcctaatctcctttagtcaggaacagttctgcagcctttcgttatttgcaatatgctgatatgttgaagtaataccagttatagtaaag

SEQ ID NO: 418863 - DNA, 619 bp, Homo sapiens
attataccactccttaacatgaggtaatctaattctgttcctgtttgcttttttatttctgtctaagcccttataagggtaaactgtctcctttcttcttctatttggccacagtcattatttaattcccaggattaagatcagcagctgtgtactgaacgttctcactaagactaagagttttcagaatgtgaaatggattttgtactagtctccatacagtgggataaataaatgctgatcacgagacaaaaaccttacctgccttgaattatttgggacaaagtaaggactaatccttttctatgataaaggttttcccctcatatccaattccttttaaacgattccttccccaaacttacaattataagcactgagtaattattcagaaataccttggtggtttaatacggctgtctttaaatggtgtgagatgctggactctagcaagactgcctgtttttatttgacttagttcaaacaagagtcttggttctctttgtaggctggctaacaagcagagcaatcccataaacgtagtttagtctgactcagttcacaaayacatacatacctgaaagaagatccttggtagggaggttgtttgaagaaagaa

SEQ ID NO: 418864 - DNA, 622 bp, Homo sapiens
tagtctctgaaagcatttccacagatgtatccacaactatagattagattctggtcctctgatattagaataaagtactaaaaattgtaccgccttgaatatagtctcactgaatcttgggtggactaattttctttatggtttgttcagagtctgattgccatagtgcttctgaagctaaaggctagtgtgggaaatttgaggggtctgtggccctaccttgtaataagagtgatatgtgttgctgttcagatctgcagactatcaccagggattcgcaagcagctttgagttctcaccgagccaggagtagaagcaacaaggccaccaccctcccagatgctcaggacacagaagcactgcaagaacgatgcacaatgccagatgagccattggtaagagctccagataaaggcacagattccccaycaccccctcctctcgaagagacttcaaatggaggaagaatgctccatgagtccctgaggcatgcagtacccattacaaggatgcagagcagtgaagacactgaggcaggcccagcctacagtgatgaggactatgaagaagacatcattgagcccaggaccttaaatgagatcaccacggtgacagacaaaac

SEQ ID NO: 418865 - DNA, 531 bp, Homo sapiens
gaaccctgaaagagtgtaagtagcccaagtaatccaaagcaaaaagaataaagctggaggtatcacattacctgacttcaaattactctaaaagactatagtaatgcaaacagcacagtactggtatagaaatagacatataaatcggtagaaaagaatagagaactcagaaacatagccaaatacctacaatcaactgattcttgacaaaaatatgcactggtgaaaggactccctattcaataaatggtactgggaaaactgggatgtcatatgcagaagaatgaaatctctcaccatgtacaaaaattaactcaagatggatttaaggcttaaatgtaagacctgaaactataaaattactagaagaaaaatctaggaaacactctctggacattggcctaggcaaagaatttatgaccaagtcctcaaaagaaaccacaacagaaacaaaatcagacaaaaggggacttaattaaactaaaaagcttctgcacagtaaaaaaatraaatagagtaaacagacaacca

SEQ ID NO: 418866 - DNA, 370 bp, Homo sapiens
ttactttccctgtcatattgtgcragttactcaatagctcaattgagctgtactcaatagctcactcaagctgtactcaatagctcactcattacttggaagctcacctagattatcacattctcagtatgtcacactactgcaacactccatcttgtcactgggtattggtgcacttcagatacagccatagtaatgtttctttggtgctttattgtaagatcttttgataaatactgtggtatcaagattgaagttcaataaatgaactttggcttttctacatgtcatatctaactgaattactccacggccttggcgtttattaattggcattctccttttttgctcagccagagagaaatactgg

SEQ ID NO: 418867 - DNA, 602 bp, Homo sapiens
ttccagaagaggcatttcatttccattcttgcagccatccctagatcatcatttcctcatgcttgggttgctccaggtgccccttggcatcccttctgaattccatttctcctatccattccgttacatgtgggattagaatttctcttttttacatccaacttttgttattatttctacccaacttcagtacatatagtggtttattactgtacgttgagccaagttcaaacactgtcttctatcatctaagaccctacctctgtgcctctataggttcacttaggctatacttytatgcagattttaaagacaactgtctacacttattccaaacctttgaattctaaaatcctttccactttcttgatgaagtcttttatccccaattccagaacgcagagttgaaagatcccattgatggcagggagcaggaatatttcatcaaattccagatatccagcttaggaaagaaatgatagttaatacttttaaatcctttgatttttcagggctataaagcactgtgtaaacatgggagggcaggttacgtgcttaaagataaacccgcatgccctaagtaaatgttgcagagtaattaa

SEQ ID NO: 418868 - DNA, 602 bp, Homo sapiens
ttccagaagaggcatttcatttccattcttgcagccatccctagatcatcatttcctcatgcttgggttgctccaggtgccccttggcatcccttctgaattccatttctcctatccattccgttacatgtgggattagaatttctcttttttacatccaacttttgttattatttctacccaacttcagtacatatagtggtttattactgtacgttgagccaagttcaaacactgtcttctatcatctaagaccctacctctgtgcctctataggttcacttaggctatacttctatgcagattttaaagacaactgtctacacttattccaaacctttgaattstaaaatcctttccactttcttgatgaagtcttttatccccaattccagaacgcagagttgaaagatcccattgatggcagggagcaggaatatttcatcaaattccagatatccagcttaggaaagaaatgatagttaatacttttaaatcctttgatttttcagggctataaagcactgtgtaaacatgggagggcaggttacgtgcttaaagataaacccgcatgccctaagtaaatgttgcagagtaattaa

SEQ ID NO: 418869 - DNA, 565 bp, Homo sapiens
ggagggcaggttacgtgcttaaagataaacccgcatgccctaagtaaaygttgcagagtaattaagctgagagaaattcacagttgatttccaaggataacaataacataagtggtaatctcaataatttgagaggttaccatatttcttaaacagaagctttgtcatcttttacagcgaacacacttggtaattgtctatgtattactcatttatttggcttatgatatccttttccaaattccagtttattatcaatatgttggggatcatgttttatgatatagcagcaagggtattgcattttgccaagatcattgtgagtcttcacctttaaattactctgtgtttacacaacatcagttaatagccattatatggtgctaggaagagcagtgagcccagataaaaacttaaagtcttaaaagacttaagtttatgtttggcaccttgaaatgataatgtagccattggtcaagtgaaaggatgtaaggggagccaggttattgagttactcagtcctggctttgcttctggaaagctctttgacttgatcagtaagtca

SEQ ID NO: 418870 - DNA, 612 bp, Homo sapiens
ccagtatatgaaagcttgaaaaataatgacacgtttgggacttgataaaagatagggagttgagaaaataggcagttctatattattttctattatttattttcacaatggttttgattttttctatatarcgttaacttctttgaaataattattcataaatatttaagatatacaaaaatatataaccattatccagcttaagaaataaaatattatcagcagagatgaagtcccccacgcatatcccttctgtattattaccttttcctccatcctctttagaagtaaccacacttttgaaattgatatttaccatgcattcctttcaacctttactacctctatatatacttgtaaataatagatatatacagcctataaacaaaatgcatttttgtttatgcgcttaacattgtgagatttaactatgttgatagatatctctagttcatttattttgctataaaactggtacacaattgtataaaattatgtcaattttatggcaaaaataaatcaaaatcattctacagtaaaaaaagtttttcttcaatatattgaagttacatcagtcccattctgaatatttttgtaagtttttttttactt

SEQ ID NO: 418871 - DNA, 570 bp, Homo sapiens
tttataaaatgtaatgatgatatctagctccagaatctgccatagatagtatgtgcgtatgatggggtatatatctgtcttttcccttcttttgagaaataaagatttttcatcaatccctttgacatgtatcctaatatatatatatatatattttttttttttttttgagaaggagcctcactctgtcatgcaggctggagctgtggtgcgatctcagctcactgcaacctccacctctggggttgaagcaattctcctgcctacaaagtagctgggattacaggcatgcaccaccatacccggctaatttttgtatttttagtagagatggggtttcaccacgttggtcaggctggtctcgaattcctgaccttgtgatccacctgcctyggcctcccaaagtgctgggattacaggtgtgaaccactgcacccagccccgtgtatcataatttttatgtagctattatttgagaatttgcagagtcaactatgaaaaccttttttttctcctatgttaggattcacagcccggttgaaaaatctgccttcttcaccagtgtttgga

SEQ ID NO: 418872 - DNA, 484 bp, Homo sapiens
agtttgtctgacaaacttagctatctcctaaaattcatctcaggtrtcacctcatctatcattctagaaaaacttcagatctatgtagaatgatcgcttcctcctttctgcctcttccagatccagtatataatttcctagtactacacctgagatacctccttatgctagttaagttggttgtcttccctcattaaacctgtggttcttcaaacatgatgggaccactgacttttttaaaatggtgataaaatctatgtaccccttcccagaaacattacataagcaaaatatttttcataacattccagtggtttcatagttttcctgggaaaccatccatggcttccagcatgagagttcagcattaaggattctggttttagaccatgggtcagaaaacttttttaaaaaagggtcagataacatacattttaagcttttcagggcattggtctctgctgttgtaacttgaaagcagccg

SEQ ID NO: 418873 - DNA, 486 bp, Homo sapiens
gtgggagtggggagtagatagggaatatgtgggatttggtttaagttcatcattggaagagttcctggatccttgcaagcttagataaatgtgatctttattagatagcagtggcatgctttwaaaaaaaaaaaggcaatgaaaatttagcaagccactgaatttgagttttcactttgtttctaatatgctgtgtgaatcagtacagttttcttaccctttcttggtcttaatttccttactgataaaatggggtagtaatacctatctcaaaaaattattgcacatattaaataacattcctctatgtatctcaatggcattagacattaggagaagcattttgtggaggatttgaagttgagatcttcatccaagaagtagcttttcaatttgctagaagcttaatgtaggcaagccacttcatttttcagaacttgtttactcatttataatatgggaataaaaatttgtgcaagtcagaga

SEQ ID NO: 418874 - DNA, 550 bp, Homo sapiens
tctccattgcaaagaggaataactagcacttggtaggcattcaataaatgttagtaaattttgtattaatagtttaaagacacgtaaagtaatctacttcacctgtacaaaaagaaatgccacaaacataatgtaacttaattttaatcgacatatttcaaaacaatkttactttttaaaagaagatgtaaaatgaataactggatgatagtatcattaattagatgtcccctggtgtgtatacactactccaaacaggtgctgactgatggctcactgtaagataaagtgaaatttctagtaaaggttccagagcataaacttcagtcccacactattagtatgattggggtgactttcataatatatagtcattggtcttatcagagagaaaggataaccgagaaaaaatcatccctagaaagttaagatcatatcctgaatgggaaatactgagaataggtctgagccttgtggatcagagcactgactattgaagatcaaaaaaaggaggtgtgggagggtatacgaacatgcaggggaacagagg

SEQ ID NO: 418875 - DNA, 608 bp, Homo sapiens
caatagcaaggagttgtactgcatccagcaatgaatcagagaagaagtgaaagtgctctctactgtacagggggaatttggagatgagccaatctcctttgcctctctcatagcttacccattagggtctgaatgcccttgctctagaaagttggcaggtctaaaactttccatcctgaacctctctcactcttttctacacagatggaaactgctggaattcacttaccttcaaagaaattgaagtgaaaagccatatgactctaagtctcaacccagactacatcatgcctgattagtgctgagactgctctgtggcccagaagaagctacgacttcctccctctcggtgaacgagaaaactgtcttcacatatgtatttaggaaaaggtccagaaatcatagtgccatggaatgccccacagtttctctctttctctctccctctgtcttttcttcttcaacgtgtctctaaggaatgttattcattgaggaaagttagttcagaaaaaccctagggatgcagggaaggagaaaacaaagraagtttcagatcttccctcctgaggctaatcaagatttagaactcctagaagtttggtataatg

SEQ ID NO: 418876 - DNA, 488 bp, Homo sapiens
ttggccaaacaagagcaggcaaaaacttctcaatcccctctccctcaggattcaaaggctaaggtttgtaaagggtactttggtgggcatggggctggggaacttgtataattgattggcagggaatgaaatcacaggagcacctaaaactgtctttgtgcarctgagtcagttcccaggaggggtgtgtgtgttggcctcaagactaggtggtgtctgttggtctactgaaatgctaacaaatatctaaaagaccagttatttaggtttcacaatagtgattgatatggttaggctttgtgtcagaacccaaatcttatcttgaattgtaatccccataatccccatgtgtcaagggagggaccaggtgggatgtgattggatcatgggggcggatccccctatgctgttctcatgatagtgggtgagttctcatgagatctgatggttttgcaaagcagttttccctgctcttgctcactctctct

SEQ ID NO: 418877 - DNA, 527 bp, Homo sapiens
ctgtgtatgtctattcaaataggtctggggctacctgaaggactcacacaaggtcctcaccttgttcacccaacatagcagaactcactcatgatgaaaagtggcaggtattgctcaagagcattataagaacaactataatcctacagttacctagagtaaagattactattgagacatgcaacccaccatctaatgcctcagaggaaatgttggggaaagtttttttgggggggaattatggagttcaaatgtacctgtgggggaaatgatggccaactacacacagccatggagcacctctcccactgagagagctcaaaatatcaagtaaaccaacatatttcaaacagatcttcatagagaaaacagagtttatagagaagctatgcagatgcctaagctgaagagggaggaagctggaaatcctgtacaaggtttmtcagcactagtactagtcaccagccctaaataccaactaagtaaggggtgaatgaattgattgcacagatactcactcttgctgc

SEQ ID NO: 418878 - DNA, 659 bp, Homo sapiens
agctattataaatgggattagtctcttaatttcttttcagagtgttcactgttggcatatagaaatgctactaatttttgtctgttgattttgtatcctggagctttactgaatttgtttatcagttctaatagytttttggtggaatctttaggtttttacaaatataaggtcatatcatctgaaaacaaggataaattgacttcatcctttccaatttggatgccctttatttctttctcttgtctgactgctctagctaagcctcccagcactatgttgaaaaacagtgatgaaagcgagtgcggccttgccatattccagatcttacaggaaaggctttcattttttccccattcaatatatgctggctgtaggtctgtcatatatggcttttattttgttgagggatgttccttcaataccctgttttttgagagttttaatcatgaagggatgttgacttttatcaaataatttatcagcatcaattgaaatgatcgtatggtttttgttcttcattctgttgatataatgtattacattgattaagttgcatatgttgaaccatccttgcattcctgggataaatctcacttggtcgtgatgaatgatctttttaatatgttgttgaattcagcttgctagtattttgttga

SEQ ID NO: 418879 - DNA, 659 bp, Homo sapiens
agctattataaatgggattagtctcttaatttcttttcagagtgttcactgttggcatatagaaatgctactaatttttgtctgttgattttgtatcctggagctttactgaatttgtttatcagttctaatagctttttggtggaatctttaggtttttacaaatataaggtcatatcatctgaaaacaaggataaattgacttcatcctttccaatttggatgccctttatttctttctcttgtctgactgctctagctaagcctcccagcactatgttgaaaaacagtgatgaaagcgagtgcggccttgccatattccagatcttacaggaaaggctttcattttttccccattcaatatatgctggctgtaggtctgtcatatatggcttttattttgttgagggatgttccttcaataccctgttttttgagagttttaatcatgaagsgatgttgacttttatcaaataatttatcagcatcaattgaaatgatcgtatggtttttgttcttcattctgttgatataatgtattacattgattaagttgcatatgttgaaccatccttgcattcctgggataaatctcacttggtcgtgatgaatgatctttttaatatgttgttgaattcagcttgctagtattttgttga

SEQ ID NO: 418880 - DNA, 659 bp, Homo sapiens
agctattataaatgggattagtctcttaatttcttttcagagtgttcactgttggcatatagaaatgctactaatttttgtctgttgattttgtatcctggagctttactgaatttgtttatcagttctaatagctttttggtggaatctttaggtttttacaaatataaggtcatatcatctgaaaacaaggataaattgacttcatcctttccaatttggatgccctttatttctttctcttgtctgactgctctagctaagcctcccagcactatgttgaaaaacagtgatgaaagcgagtgcggccttgccatattccagatcttacaggaaaggctttcattttttccccattcaatatatgctggctgtaggtctgtcatatatggcttttattttgttgagggatgttccttcaataccctgttttttgagagttttaatcatgaagggatgttgacttttatcaaataatttatcagcatcaattgaaatgatcgtatggtttttgttcttcattctgttgatataatgtattacattgattaagttgcatatgttgaaccatccttgcattcctgggataaatctcacttggtcgtgatgaatgrtctttttaatatgttgttgaattcagcttgctagtattttgttga

SEQ ID NO: 418881 - DNA, 373 bp, Homo sapiens
gttaaactctccagctattattatattggagactatctatttctttagctctaataatattttccttacatatctgggtgtgccagtattggatgcatatatatttatattgttatattctcttgctgaattgacccctttatcattatacagtgacctyctttgtgtcttcttacagtttttgtctcaagatctattttgtctgaaataagtatagctactgttgctccttttcggtttccattgggatggaatgtctctttttatcccttcatttttagtctgcatgtgtctttataggtggagtgtgtttcttgtgggaaatagatcattaggtcttgttttttcatccattcagccactctatgtactt

SEQ ID NO: 418882 - DNA, 373 bp, Homo sapiens
gttaaactctccagctattattatattggagactatctatttctttagctctaataatattttccttacatatctgggtgtgccagtattggatgcatatatatttatattgttatattctcttgctgaattgacccctttatcattatacagtgacctcctttgtgtcttcttacagtttttgtctcaagatctattttgtctgaaataartatagctactgttgctccttttcggtttccattgggatggaatgtctctttttatcccttcatttttagtctgcatgtgtctttataggtggagtgtgtttcttgtgggaaatagatcattaggtcttgttttttcatccattcagccactctatgtactt

SEQ ID NO: 418883 - DNA, 373 bp, Homo sapiens
gttaaactctccagctattattatattggagactatctatttctttagctctaataatattttccttacatatctgggtgtgccagtattggatgcatatatatttatattgttatattctcttgctgaattgacccctttatcattatacagtgacctcctttgtgtcttcttacagtttttgtctcaagatctattttgtctgaaataagtatagctactgttgctccttttcggtttccattgggatggaatrtctctttttatcccttcatttttagtctgcatgtgtctttataggtggagtgtgtttcttgtgggaaatagatcattaggtcttgttttttcatccattcagccactctatgtactt

SEQ ID NO: 418884 - DNA, 590 bp, Homo sapiens
tgccaagaaaaatacagtgaagaaagaattgtctatttaaataaagaactcaaacaatagcaaacaaataattcgattaaataaatgggcaaaagacctgaatagacgtttctcaaaagaagacataaaaatggccaacagatatatgaaaaaatactcaacattactaattatcagggaaatacaaataagaagcacaatgaaatatcatctcaccctagttagaatggctattatcaaagagatagaaataacaaatgctgataaggatrcagagaaaggggaatgctcgcacactgttgctggaaatgtgaagtcattacggaaaacagtgtggaggtacctcaaaaaactaaaactagaactaccacatgatccagcaatcccactgctgggtatataccaccaccccaaaaggaaatcagtacatcagagagatatcttcacttctatatttattgcagcaccatttccaatagccaagatatggaatcaacccaagtgtccatcaatgatgaatggataaaatggaaatgtacctgtacacgatggaatatattattcagccttaaaaaagaataaaatcctgt

SEQ ID NO: 418885 - DNA, 594 bp, Homo sapiens
aagatatggaatcaacccaagtgtccatcaatgatgaatggataaaatggaaatgtacctgtacacgatggaatatattattcagccttaaaaaagaataaaatcctgtcatttgcagcaacatggatggaactggagaatattatgttatgtgaaataagccaggcataggaagacaaatatgtgttctcattcatatgtgggagctagaaaagtggatgtcatggatggagagaggagaacggtggttaccagagaatgggaagggaagggggaaaggagatgaagagaagttggttaaggggtcagtacaaaatttcagctagatagaaggaatatgttctagtattcaatagtgcagtaaggaaattggagttaacaataatttaytgtatatttcaaaatagctagaagagaagaattgtaatgtttctaactcaaagaaaagacaaatgtttgaggtaacagacatctcaattatcctgatttgatcattccacattgtagcaaaatatcacatggactctcaacagatgtagaaaaaattaagttgcaaaaaaaaaaaaaaaaaagagagagagacagaaaaaaaca

SEQ ID NO: 418886 - DNA, 612 bp, Homo sapiens
atggataaaatggaaatgtacctgtacacgatggaatatattattcagccttaaaaaagaataaaatcctgtcatttgcagcaacatggatggaactggagaatattatgttatgtgaaataagccaggcataggaagacaaatatgtgttctcattcatatgtgggagctagaaaagtggatgtcatggatggagagaggagaacggtggttaccagagaatgggaagggaagggggaaaggagatgaagagaagttggttaaggggtcagtacaaaatttcagctagatagaaggaatatgttctagtattcaatagtgcagtaaggaaattggagttaacaataatttattgtatatttcaaaatagctagaagagaagaattgtaatgtttctaactcaaagaaaagacaaatgtttgaggtaacagacatctcaattatcctgatttgatcattccacattgtagcaaaatatcacatggactctcaacagatgtagaaaaaattaagttgcaaaaaaaaaaaaaaaaaagagagagagacagaaaaraacatatttgcatattgcattatatttctttacggttgatctccggcccagagtgcagg

SEQ ID NO: 418887 - DNA, 446 bp, Homo sapiens
tggccttatacaatgagttaggaagaattccttcctcttcaatttttgggaatagtttgagaagaattggtgtttgtttttctttacaaattgggtagaaatcarcataaaagcccagtctagggcttttctcttttgggagactttttgttactgattcaaatctgctattcattttgggtcagttcaggttttctttttcttcctagttgaatcttggtaggctgtgtatgtctgggaatttatccctttcctctaggttttccaatttgttagcatatggttgttcatagtagcctctaatgatcctttttatttctttggtaacagttgtaaagtctcctttttcatttctgattgtatttatttgggtctcttttttttttttttttttttttttttggttagcctcactagtggtttatcaatttttttaacttttcaaa

SEQ ID NO: 418888 - DNA, 446 bp, Homo sapiens
tggccttatacaatgagttaggaagaattccttcctcttcaatttttgggaatagtttgagaagaattggtgtttgtttttctttacaaattgggtagaaatcaacataaaagcccagtctagggcttttctcttttgggagactttttgttactgattcaaatctgctattcwttttgggtcagttcaggttttctttttcttcctagttgaatcttggtaggctgtgtatgtctgggaatttatccctttcctctaggttttccaatttgttagcatatggttgttcatagtagcctctaatgatcctttttatttctttggtaacagttgtaaagtctcctttttcatttctgattgtatttatttgggtctcttttttttttttttttttttttttttggttagcctcactagtggtttatcaatttttttaacttttcaaa

SEQ ID NO: 418889 - DNA, 446 bp, Homo sapiens
tggccttatacaatgagttaggaagaattccttcctcttcaatttttgggaatagtttgagaagaattggtgtttgtttttctttacaaattgggtagaaatcaacataaaagcccagtctagggcttttctcttttgggagactttttgttactgattcaaatctgctattcattttgggtcagttcaggttttctktttcttcctagttgaatcttggtaggctgtgtatgtctgggaatttatccctttcctctaggttttccaatttgttagcatatggttgttcatagtagcctctaatgatcctttttatttctttggtaacagttgtaaagtctcctttttcatttctgattgtatttatttgggtctcttttttttttttttttttttttttttggttagcctcactagtggtttatcaatttttttaacttttcaaa

SEQ ID NO: 418890 - DNA, 518 bp, Homo sapiens
cttctccaaggcacattatggtaaaattgtcaaaagacaaagagaaaatgctaaaaacagcaagagaaagacatcaagtcacttataagagaatctccatcaggctaacgggatttctcagcagaaaccttacaggctaggagaaaaggggatgtatactacaagtaaaaaataaaaataaaaaaagtaagccaaaaatactatacccagcaaagctatccttcacaaatgaaggaggctggcacagtggctcacatctgcagttccagagactcagaaggctgaggsaggagaaccatttgatcccaggagttcaaggctgcagtgagctatgatcatgccactgtactccagcctgggtgacagagtgagactccattgctaaaaaaaatagtaataataaaagagaaaaaaggatttcccagataagcaaaagactgtttgtttgtgtcttgtttgttgtggtcttacaagaaatgtttaagggagtcctacattgggaagcaaaagaacaatat

SEQ ID NO: 418891 - DNA, 564 bp, Homo sapiens
attttttttttggtctatatccagaagttgggttgctggattatatgytttgaaatctatagcacagcagcgtgactatagtcaataataatgtatctttcaaaataactaaatgggtacatttcaaatgtcgcatcatgaaaattgtcagtaaattaggggatggacctgttcattagtttgatctaatcatcccacattgcatacacatatcaaaacatcacatacattggtacaattatgatttgtcaattaaaataacgttagttaaaaaaataagtaacttgttcaaagccccagttgggattgatggagctgggacatgcaccaaggctattgctgtcaggcccacagagtcctttgtccacgaatgttgaagccctacctgagatttctactgagatcagtgtagggattcaatgtctcagaatcatcccatcctccagggcccacaagtccatgaccgctgcctctacccctgaccctactgacctgaaatatggcccctgctttcttttccaggagcatacaacacttacaccaagcattgatgggatttgttga

SEQ ID NO: 418892 - DNA, 564 bp, Homo sapiens
attttttttttggtctatatccagaagttgggttgctggattatatgttttgaaatctatagcacagcagcgtgactatagtcaataataatgtatctttcaaaataactaaatgggtacatttyaaatgtcgcatcatgaaaattgtcagtaaattaggggatggacctgttcattagtttgatctaatcatcccacattgcatacacatatcaaaacatcacatacattggtacaattatgatttgtcaattaaaataacgttagttaaaaaaataagtaacttgttcaaagccccagttgggattgatggagctgggacatgcaccaaggctattgctgtcaggcccacagagtcctttgtccacgaatgttgaagccctacctgagatttctactgagatcagtgtagggattcaatgtctcagaatcatcccatcctccagggcccacaagtccatgaccgctgcctctacccctgaccctactgacctgaaatatggcccctgctttcttttccaggagcatacaacacttacaccaagcattgatgggatttgttga

SEQ ID NO: 418893 - DNA, 564 bp, Homo sapiens
attttttttttggtctatatccagaagttgggttgctggattatatgttttgaaatctatagcacagcagcgtgactatagtcaataataatgtatctttcaaaataactaaatgggtacatttcaaatgtcgcatcatgaaaattgtcagtaaattaggggatggacstgttcattagtttgatctaatcatcccacattgcatacacatatcaaaacatcacatacattggtacaattatgatttgtcaattaaaataacgttagttaaaaaaataagtaacttgttcaaagccccagttgggattgatggagctgggacatgcaccaaggctattgctgtcaggcccacagagtcctttgtccacgaatgttgaagccctacctgagatttctactgagatcagtgtagggattcaatgtctcagaatcatcccatcctccagggcccacaagtccatgaccgctgcctctacccctgaccctactgacctgaaatatggcccctgctttcttttccaggagcatacaacacttacaccaagcattgatgggatttgttga

SEQ ID NO: 418894 - DNA, 564 bp, Homo sapiens
attttttttttggtctatatccagaagttgggttgctggattatatgttttgaaatctatagcacagcagcgtgactatagtcaataataatgtatctttcaaaataactaaatgggtacatttcaaatgtcgcatcatgaaaattgtcagtaaattaggggatggacctgttcattagtttgatctaatcatcccacattgcatacacatatcaaaacatcacatacattggtacaattatgatttgtcaattaaaataacgttagttaaaaaaataagtaamttgttcaaagccccagttgggattgatggagctgggacatgcaccaaggctattgctgtcaggcccacagagtcctttgtccacgaatgttgaagccctacctgagatttctactgagatcagtgtagggattcaatgtctcagaatcatcccatcctccagggcccacaagtccatgaccgctgcctctacccctgaccctactgacctgaaatatggcccctgctttcttttccaggagcatacaacacttacaccaagcattgatgggatttgttga

SEQ ID NO: 418895 - DNA, 530 bp, Homo sapiens
caaaagtgtgtagttgagctgactgcaaggtgcttgacacgcaagagaatttataaatgggattcggcctctggaaagtggtggtagttccagatttatgtggatgttactttgtttttccctataaaatctattctttaaactgtcaagctcttggctcctggctgcagtcctttgctggtggcagtgggctgggtactgccaccggggagaaatgytccccacttagggaaagggaaactggttctctttaagaggcagagggaggtttccagtgccagtttgtttggaggcaaaatggctgttgtattaaaattgcccaaacttgggctggtgcctagtgtgtttagagctcaaagccatgattgttttcatttttttttttttggttgttggttttccatccttttgcatggcaggtttctgctaatagcttcaacctcaagagtcccattatacagacactaatagcacctactgtgtgtcagtctgtagtgcctactatgtgccaggcattggagataatataa

SEQ ID NO: 418896 - DNA, 594 bp, Homo sapiens
agagggcatcacagtcctactratgtgtaatgtgtaatgtcacccccagcagcccagctgtaaaattcttctctttgtagtgtctctatttctcagctggctgacacttatggaaaatagaaagaacctacattgaaatattgggtgcaggttccacctatacttctttcatggatttacttattttttgtttgtccccctctgtatcctagaaactcctagagggcagaggcatgcctgccatcttcatcattgcattaccatcacccaacactatcaggggacctgccctgataatcaggtaggtcttttctattttcctaagcattgactggcttgagaaataaaaggacagagtacaaaagagagaaattttaaagctggatgtccgggggagacatcacacattggtaggatccgtgatgccccacaagccacaaaaaccagcaagtttttattagggagtttcaaaaggggagggagtatacgaataggtgtgggtgacagacatcaagtagttaacagggtaatagaatatcacaaggcaagtggagacagggcaagatcacaggaccacaggactgaagtgaaatt

SEQ ID NO: 418897 - DNA, 594 bp, Homo sapiens
agagggcatcacagtcctactaatgtgtaatgtgtaatgtcacccccagcagcccagctgtaaaattcttctctttgtagtgtctctatttctcagctggctgacacttatggaaaatagaaagaacctacattgaaatattgggtgcaggttccacctatacttctttcatggatttacttattttttgtttgtccccctctgtatcctagaaactcctrgagggcagaggcatgcctgccatcttcatcattgcattaccatcacccaacactatcaggggacctgccctgataatcaggtaggtcttttctattttcctaagcattgactggcttgagaaataaaaggacagagtacaaaagagagaaattttaaagctggatgtccgggggagacatcacacattggtaggatccgtgatgccccacaagccacaaaaaccagcaagtttttattagggagtttcaaaaggggagggagtatacgaataggtgtgggtgacagacatcaagtagttaacagggtaatagaatatcacaaggcaagtggagacagggcaagatcacaggaccacaggactgaagtgaaatt

SEQ ID NO: 418898 - DNA, 598 bp, Homo sapiens
aataattataattgttacataaaattattgtattccacagaggtaacaaatttccttgtcaattgtgtttttgactayggctgccctaaaattttttgtcatccacagacaattgttgtctttttttggtcctctttagaaggtggtttttgttttagtttgttttttgagatggagtttcactcttgtctcccaggctggaatgcagtggcacaatcttggctcactgcaacctccgcctcctgggttcaagcaattctcctacctcagcctcctgggtagctgagattacaggcacatgccacatcacctggctaatttttgaatttttagtagagatggtgtttcaccatgttggccaggctggtctcaaacttctgacctcaggtgatccacccaccttgtcctcccaaagtgctgagattaaaggtgtgagccatcatgcccagccagaagatggttttacaataagctataaaactctaacagatgctcttaaacgcaggtttctgataactctggaaatggtgacatcagaatataggaaaaactttcaggactcatggacagttgaaatgttcatgaatatcaagcagaa

SEQ ID NO: 418899 - DNA, 571 bp, Homo sapiens
tgtgagccatcatgcccagccagaagatggttttacaataagctataaaactctaacagatgctcttaaaygcaggtttctgataactctggaaatggtgacatcagaatataggaaaaactttcaggactcatggacagttgaaatgttcatgaatatcaagcagaacagaaattaactgcatggactgaactaatagaagactgaagtaatccttttgactttttgcataaaacattgccaatcctttgttttgtttttcagagtcaagaaaacttttattttgtgctattgacagcttttaccaatttagtatactctatgaacaaaacttggagcatatttgtttctctctacctgatttctccagaatttggaaactatctgtgagtattcttaccttatgccaatagtattatttgcataaattcaataagaatgtgttttcatttgtaacaagacacaattggggaaactggttattttaccaagactttgactggaatggtgtggtttcctttaaggaatcaaacttgacttatggagccaataaaagccccttgggaaaact

SEQ ID NO: 418900 - DNA, 555 bp, Homo sapiens
atatttttattgagaggacaaaatctacaactttgattctgtttgtaaaatgtkaaatcccttttggtctagagttttagtgggctctctgcatactgagcactagggaatgaaggcagtggtctgaatgttaggactggacacagcagagctatacctgggaatgagtactaagagttctgttccctggactgagcttttaaagtgttatagaagcttcaatctccatcaaagccaaagcaacgtggactcacagaggatacagataaaggatctaggtactaagacaaaaattactccaggaaggaaacattttataatttttctcccgtaggaagaccttggcagcatgaaataataggaaaaacactttgggaagaggaagacaatagttcagatcctggctctgtggattttgttcagtgagttaatcacattgaacctcaacttcagacctcctgtcttcttctgagccctccaaactgttctatcctctgtctgttacccagttccaaagtcacttccacattttcaagtatctttatagtagcagcc

SEQ ID NO: 418901 - DNA, 561 bp, Homo sapiens
aaggtcaggagatcaagaccatcctggctaacacagtgaagccccgtccctactaaaaatacaaaaaattagctgggcgtgctggcgcacacttgtacttgggaggctgaagcaggagaattgcttgaacccaggaggcggaggttgcagcgagccaacatcacaccacsgcactccagcctggataacaaagtgagactccatctcaaacaaagagagacagagagaaagaaggagagagagagagagagagagagagagagagagagagagagagagggcataggccccttctgaacttattattttagctatattctctttgagatagtacatgcatacaaaaaagtacaaaaatctttagtacacagtctatgacacattcatctactgagttaacaaccatgcatatcaagatatagaacatttcccaaattccagaagacttccttatttactctttcacataatagccctaaaggtatccactactctgagttttatcagcgaattttccctgttcctgaaacttcaatataacgaatactacagtgccttcag

SEQ ID NO: 418902 - DNA, 536 bp, Homo sapiens
tgcaaactccaatatgaattattaaatttagatcatttatgacattttcccttctccatactttctggtcaatttctttagcaatttctaggagaaaggtagaaagggaaagtacaagagtcaaaaactgaagtcacccaggtgtgtyagtaaacttattattttcgttgcctgaaatgccttcccccttgtgcctgcccatctcagtcttttgctctgagttgccctattacggacctccctctgatttcaccactttcctggaattgaacttagatgggccactcttcttggaaattgttttgatttttgagctccccatgtttgaatagctaaccagatttctggtccagatgaaacacagagcagaattaaatgagtacaatgtatttagaatctgaactcattcatgaggtccaaagaatgaggcgaccgcctgacagaacgatcattcactatgttcccctgtccttggtgacaaaatacacctaagcacctttggacaagctctcatgcctcacaaagaggaaagcttg

SEQ ID NO: 418903 - DNA, 536 bp, Homo sapiens
tgcaaactccaatatgaattattaaatttagatcatttatgacattttcccttctccatactttctggtcaatttctttagcaatttctaggagaaaggtagaaagggaaagtacaagagtcaaaaactgaagtcacccaggtgtgttagtaaacttattattttcgttgcctgaaatgccttcccccttgtgcctgcccatctcagtcttttgctctgagttgccctattacggacctccctctgatttcaccactttcctggaattgaacttagatgggccactcttcttggaaattgttttgatttttgagctccccawgtttgaatagctaaccagatttctggtccagatgaaacacagagcagaattaaatgagtacaatgtatttagaatctgaactcattcatgaggtccaaagaatgaggcgaccgcctgacagaacgatcattcactatgttcccctgtccttggtgacaaaatacacctaagcacctttggacaagctctcatgcctcacaaagaggaaagcttg

SEQ ID NO: 418904 - DNA, 582 bp, Homo sapiens
tatatagtgaagctcaaatttgaacatacaactcaactcaaatttgactctaccaagtaccaattgaacgaccttgtactaattagttaattgaaaacatcagtttcaatagaagagaaataataattgatcagtttaggattgttctgaagattagaacaacacattcacttaatagacacttcttaactgaagaytagaacaacacattcacttaatagacacttcttaactgaagattagaacaacacattcactgaataaacacttcttaactgaagattagaacaacacattcactgaataaacactacttaactgaagattagaacaacacattcactgaataaacacttcttaactgccttctatgtggcactgactctgccaagggcagggtatacagcagtgaataagagaaacatggctcctgacttcaaaaggtttgcaaaatgccttcatggcttcagaagcacatgggaagtgctcaaaaaatggtcgctgatcctgtcactgttactattaatattattaatgctattaatattattttgggcacagccaaatgatgacaacactgag

SEQ ID NO: 418905 - DNA, 628 bp, Homo sapiens
ctagtttcattcttctgcatatggacatccagttgtcccagcaccatttattgaatagactatctttttccccagtgtatgttcttggcacatactcttttattcattcaaggcctacatatatattctgattcatatagaaatccgatttgagttgcacagagaaaatttcattacattttgcttgtggatgtttgactaaaaaatgatttaaaaagccaaacctattgtgtttgtcaaaatccaagtgatttacaacaattataataaagttcagaatatttttgacaactcttcctgagtgatttttgaaaactgaaatgcttccgggatgaggttcccattctctacacagcattggcattagtagatatatcaccatgacgtaccttaaaaaaaagctgaaattgcatttcccagcaatcgccctcagtacagcctttatgcattagggtcagatataaggctggtgactaaatttatcttcctttatttttattcacttttcttgcctttttctcttttgtttcttctttaagacagacatatatgcatggtaagtaaaagctgtaaaaagmtaaatacttgaggggatggacaccccatttttcattatgtgattattagg

SEQ ID NO: 418906 - DNA, 619 bp, Homo sapiens
ctttctttatgacaagaagcagacagctgaatgatcacagataaaggatggcattagttccaaagctgttcaaatgcaggtaatgagtgtgtgtctgttttaaggacaatggcctaggatcccacacctgctataataaaatctgctgaagaaatctgtgcttacactaccgtctgtgctgccaaataaaaatagtctgagatcagaaaacattaacatctgagtactgcaataaacctttgcttccagctaggagactgttttttgctttaagcatgaggcgaccttcataaattggagaatgagctcatgaatagggaacatgcagcaggtttcttttcctattcaaaatgaatgaggcccatatattataatctgtgggtaaatcaatcaatttgagttcaggtcacatagtctggtttcagagtccccacytaatctctgcagcatgctaccctcttggacttctaaaacagctatcacacacatggcatcatcatatccctttggggggggcttttgcgtagaccatctgttcttgctaccagctcttgtcccaggccatcattacactaatattgtctctgactataagaatgccttgtcaaaaatatcctgc

SEQ ID NO: 418907 - DNA, 551 bp, Homo sapiens
cttcctcctcctcctcctccttcatgttaatataaaaggaaattacctttggcaaaatgccaagtattggaaagcatgtgaagcaggatgtgaaagtcactgggagcttattttttgtctctgaaactctatcrccatgtaagtgtggtcccccaatcgcttgatctgtaaagcaggttttgcttttgaatacccttttagtaaataaactaccccagaggcaatgagattttgctataagaaatcagtgagtgcaggtgtcattgtatggtaaactggtaatttaaaaaaatcaccataattttgctctccccaagcccattcatttcagtcttcctcagctctcttcccaacctccccaaagccgcgtctggaaagcctggggtagagagaccacagtaactccaggcttctatgcagcatctgcccttttccccttccataaggaatgagaatgctgagctcagtgcctgtagatatgcatgatttattcatacttgcagtcttgatgagaatcactgaatgctgcattttcttgatacagtattttt

SEQ ID NO: 418908 - DNA, 542 bp, Homo sapiens
gttaatataaaaggaaattacctttggcaaaatgccaagtattggaaagcatgtgaagcaggatgtgaaagtcactgggagcttattttttgtctctgaaactctatcgccatgtaagtgtggtcccccaatcgcttgatctgtaaagcaggttttgcttttgaatacccttttagtaaataaactaccccagaggcaatgagattttgctataagaaatcagtgagtrcaggtgtcattgtatggtaaactggtaatttaaaaaaatcaccataattttgctctccccaagcccattcatttcagtcttcctcagctctcttcccaacctccccaaagccgcgtctggaaagcctggggtagagagaccacagtaactccaggcttctatgcagcatctgcccttttccccttccataaggaatgagaatgctgagctcagtgcctgtagatatgcatgatttattcatacttgcagtcttgatgagaatcactgaatgctgcattttcttgatacagtatttttatgtgtcttcatgtta

SEQ ID NO: 418909 - DNA, 497 bp, Homo sapiens
tttgtttttccctatatatactttttatttttatttttttttacctgaaaaaattcattcatcgctgtgactttaactttcatttgaaagattcaaaattcaggccctgaccttttcttggtctagatycctatctccagctgactgttgttaatccctgtatagatgtcctgccagttcataaatttaacaatcagtgcaaaaccaaattcatatttcatttctatttcctttcctatttctcagttgagttaattgtttcacagttcttttattcacatagtctagaaactgtggaaatatctgccattcttctcccatgttttactacccacccgctacaatttcagcatttcctttcaaatttgtcttcctgcctgcagtatcctttctactgtggaaatttactcatcttttaggtccaatttaatcagaactctcagccacccctcatacatggataaaaatcaatcagatattcttagaaacttctatag

SEQ ID NO: 418910 - DNA, 523 bp, Homo sapiens
ttttactttaaaataatttatataaagctataccgattctgttgcaactgacattaagagattttaaatgtctttgtacattgacagtttcttaacacattacatatttttattacagtttgataagatgtaaatgattactgaagagtgttccttaatatttcaaaactgatggcaattgtgttgtcaaaaccacccagacaatttatagatctctcaccaatttgagactgcattgttcttactggaagtgcctttgatcaacagctccaggtttcttgcttcagaatgcatggagtaagtgtactgcatggagtagtgtcatttatttgataagagctttttaaacccaaacaatatgccaggccctgggcataaaatrtggtggataaaaccggaactgcccttttggagcctggaatcttgtgatagaagtagatattaactaatgaattatagaaataaatacatattgatatggtttggctgtgtccccacccaaatctcatcttgaattgtagtt

SEQ ID NO: 418911 - DNA, 523 bp, Homo sapiens
ttttactttaaaataatttatataaagctataccgattctgttgcaactgacattaagagattttaaatgtctttgtacattgacagtttcttaacacattacatatttttattacagtttgataagatgtaaatgattactgaagagtgttccttaatatttcaaaactgatggcaattgtgttgtcaaaaccacccagacaatttatagatctctcaccaatttgagactgcattgttcttactggaagtgcctttgatcaacagctccaggtttcttgcttcagaatgcatggagtaagtgtactgcatggagtagtgtcatttatttgataagagctttttaaacccaaacaatatgccaggccctgggcataaaatgtggtggataaaacyggaactgcccttttggagcctggaatcttgtgatagaagtagatattaactaatgaattatagaaataaatacatattgatatggtttggctgtgtccccacccaaatctcatcttgaattgtagtt

SEQ ID NO: 418912 - DNA, 592 bp, Homo sapiens
attctcattttcattctctcccccttccctggcttggttccaactgaatacatttccaatctatttatggaagataaacttacagagccagggttaaaggcagatatcactgactactggaaattatcaggtgacatgagggattgtgtattaatgaagaataacacaatctctgagtagaattagaggtcatttagcatagccaacaactacctgatgtacatcacctatccatttgttcacaagtggccaaccatcctctgagaatttctaattaaagaatacttgctayttctttatttcatttttttcaattttattttatttcattttaaaattaatttcaacttttatattcatgggttatatatacaggttcattacctggatatattgtgtgatgctaggtttgtggtatgattgatcctgtcaccatagtactgagcatagtgcccaatagttagtttttcaacctttgactgcctccctccctccctgcctctaggaatccacagtgtcttttgttgctttatgtccctgtttatccactgtttagctcccacttataagtgacaacatgtggtatttggtt

SEQ ID NO: 418913 - DNA, 559 bp, Homo sapiens
agtggtcatcaactgcactccatcaaactcacctccatttcaccaaggagctctaaagtaaggagagtgggctttatttaaatgaacagcattttaaccagatactttgtcctaatgtatgttccttttcttcatctgttttttcatactaaatgtatttgatagtggacatgttggatattatacaaaaaaatcattaattcatttctgttccaaaacctttgatcagaacgatctgtggaagagtaactccatttctatatgagtgagtgtctccttgctttagatttctggtgaaccctgtggttatgaatacttgtgtgtgatttaaaaaaaaaaagatacattttacatttyatcgaattgctgttcacactggagtattatatataaatatatatatttgaggcccaaggcctgaaaaatattagtatacaacttggtatcttagtcttactatgtactttttgaaagtattcctcgcaggagaaagaatttaaaatacccattttattcatgcctttctttttaaagaattctctatccagttatactgtag

SEQ ID NO: 418914 - DNA, 522 bp, Homo sapiens
ttagttcatcaatagtgactcataagcgctggtgtctataggatgaatcactttataccgtggggatgactcacatacaggtaggagggagcaggatggcattagatttcatcacactgctcagaatggtgcaaaatttaaaacttacaatttgtttatttctggaatttctcattaaatatttttggcttgcagttaaccatatatacatgggtattgtattgttttggttcctcgtgctgcactggactcaatgacactttattttgtaagyaagctgccatcagactttgaatttcttcaaagccctctttgaaaacatttgaaacaaaatatattaacccccaaatccagaaaattgaaaaattgaaatgagtcaatatctaatgaaatgtctacgaaaacacaaaatccacttttcttgattggtggtaaaattagtatttgtaaagaattttcacaattgaaaataatatgtataatgcatttttctctgtttataataatttctgaatatgtagg

SEQ ID NO: 418915 - DNA, 522 bp, Homo sapiens
ttagttcatcaatagtgactcataagcgctggtgtctataggatgaatcactttataccgtggggatgactcacatacaggtaggagggagcaggatggcattagatttcatcacactgctcagaatggtgcaaaatttaaaacttacaatttgtttatttctggaatttctcattaaatatttttggcttgcagttaaccatatatacatgggtattgtattgttttggttcctcgtgctgcactggactcaatgacactttattttgtaagcaagctgccatcagactttgaakttcttcaaagccctctttgaaaacatttgaaacaaaatatattaacccccaaatccagaaaattgaaaaattgaaatgagtcaatatctaatgaaatgtctacgaaaacacaaaatccacttttcttgattggtggtaaaattagtatttgtaaagaattttcacaattgaaaataatatgtataatgcatttttctctgtttataataatttctgaatatgtagg

SEQ ID NO: 418916 - DNA, 526 bp, Homo sapiens
ggtgggttgaaaaatctgtctctgccatgtgggcagaaccagtttcttctctagatgtctccttggcattttgtgccccatcaaccctggctgcgtctattccatttctaggcaaaaaagattaaatatagcttaagtatcttatgctatattctccaaagaataacctgagaaaacaatatatatcctatatattcgtaacctgttattgagatatacacagaataattagttgcttattaaattttgctaagactgaaataatgcattgtaaccatgtaaacatgaaatatttgtcaaagtgcacaaatgaagtggaaaatgattaccatctatagtcatttaaaaaggaagtctagycattaacaaactttcttgataattcacaactcaatcaggcacagaaaataataaagtagtaagataatgtgattcatgatttagcggagatttaaaaaatgagaatggtttattatagaatttagtagtaaaactcagtgtctaatttcaaataattttgacaact

SEQ ID NO: 418917 - DNA, 473 bp, Homo sapiens
ggatggtggtccataatttgatacattatagtgtgccagagaaggtctaagcaaaacaaacaaacaaacaaaaaaaaacacaaaacactgtatttggcaacaaaactgaattactttgakactatactactcttgagttctgaaaccaaaatgcattttgtaagaaattaaagtagtaaagattccccaccttggtctctaataatacatactgctgaatcaactgccaaagattctaattcagtttgtatgtgtgtggcagggagaaggggccgatcaaaattttaaaaatagtactaacaatgacatggacttataacaagggataaggattatttaatcacacagtgattaagtagtaagacataaagcatggtattttgagatgctcatattcagcagagaaatgtaggcctgacacttctttcctgaacttgacacgtggacatgttagtgcagtgtcagattgggct

SEQ ID NO: 418918 - DNA, 513 bp, Homo sapiens
aaatcttggatttcatagggatatagcaaaaaatacctcatgatataaagttacaagtcaatcacacaagtaacttaaaacctggatgatatttytattgagtttttaaaattctgaatattaaaatactgtccttataactgtaattaaaaattatcatgggccacagcatttaataaataaatatatatatcttaagaataatagcagttagccaaagaagcttattaaagtatagaagtttaaacattttaaaacattttatctttacatatcacctccaacaatatgttaccaattgtggttagattctaaaaatactgatggcaaaatttttttaaaatttgcaaaacataaatttaaagaagcacttgaaaaaataaaaggaaaatcttcgctaaaatcatacctgttttaggtcagaattttcatttttttccttctctgcattttcaatagtcacaatttgttgctgaagttttaacctaaaaatcacaacccaacaaaaggcat

SEQ ID NO: 418919 - DNA, 513 bp, Homo sapiens
aaatcttggatttcatagggatatagcaaaaaatacctcatgatataaagttacaagtcaatcacacaagtaacttaaaacctggatgatatttctattgagtttttaaaattctgaatattaaaatactgtccttataactgtaattaaaaattatcatgggccwcagcatttaataaataaatatatatatcttaagaataatagcagttagccaaagaagcttattaaagtatagaagtttaaacattttaaaacattttatctttacatatcacctccaacaatatgttaccaattgtggttagattctaaaaatactgatggcaaaatttttttaaaatttgcaaaacataaatttaaagaagcacttgaaaaaataaaaggaaaatcttcgctaaaatcatacctgttttaggtcagaattttcatttttttccttctctgcattttcaatagtcacaatttgttgctgaagttttaacctaaaaatcacaacccaacaaaaggcat

SEQ ID NO: 418920 - DNA, 582 bp, Homo sapiens
aagcttttctggttttgcaaatttacttacaaaactactgcaggaagcatcaaatataaaacaaatggctaaaacagtctcttagccttgagttcatcctgaatgtttatcttttatgatctaactttttaccaaatatagccaggggatacttctttggcatcttacagtataaagtcataaagtcagagagatgatcaagccagtttctctctagtgtgtaatttaaagttttaaaagatagtggaagactgaagcaacatactatttatctttcagtctagtagacactatgaaacagaaagtccagccttctttagagtgaatgttataaaccttcatagatttctacctctttcaaattaaacgtataaatggtacttgtttattttttcaagttttaaaatttcatcctgaatattatttgggcactttttcattataaagtgaacttcaaacaaaataattaatttcagttcacatttctaaaaaaatgggtataatgaattcctattttgtgatttgacaggaagttctttcaaaagaactttaatggcattaraaaataaaataatgagattt

SEQ ID NO: 418921 - DNA, 383 bp, Homo sapiens
aaaaatcaaaagttgataaatataatatatattgcttttttaagaaaatcattcatttcttagagtagtacaaagcacaaagaagcctttaatttttaaggatattaagcaagctagaacaaaagaaagtcagttattgaccagataataaagtatttgaataaacaatactgtattaagagagataagtttttaggcaaataaaacttyctctggaactaaaagtcattttttcaggattcatgtatggaatgatggtgtgaggagattcccagagaaacaacaataaatgttaaaaattattttaaataaccattacaactttctgggagtctgttccaagatggccaaataggaaaagctctggtctgcagctcccagtg

SEQ ID NO: 418922 - DNA, 628 bp, Homo sapiens
atgcttatcctcagtagaaagaataaacaatgaaccaatcaaaaataataacaacatagacagtacaagaagatagaaatagaaacaatgaaaagttaaaaagtgaggggataaagttaagctgtagaatttttattagttttctttttgcttctttgtttatgcaaatagtgttatcatcttacagtaatgggttataagatagtatttgcaagcctcaatgcaatcacaaaccaaaaatatacaatagttacacaaagaaataaaaagaaagaaactaaatcatatgaccaaagaaaatcaccgtcactgaaggaagacaggaaggatagayagaaagaagagaacaccacaaaacaaccagaaagcgaataacaaaatggaagaagttcttgcttctcaactataactttgaataaatggactaaaactttctatcaaaagacatagagtggctgaatggataaaaataagaaagatccattgatttgttccctacaagaaacacaaatcacctataaagacacagatagactaaaaataaggggatggaaaaaaatattccatgccaatggaaaccaataaggagcagagaaccaggagcagctatccttatgtaagacaagta

SEQ ID NO: 418923 - DNA, 570 bp, Homo sapiens
cacgcctggtggtgtgcatctatagccccagctactcaggaagctgaggtgagaggattgcttgagcccaggagtttgaggctgcaatgagccatcattccaccactgtactccagcttgggcaaaaagggaagaccctgactcaataatataataataatataatataataaaatacattattcatttcttttcatgaattgtgttgctatgttcatctgtttgttccctagttcaagaagcagacattkggcatggagagtgctctcacggatctctgaagagccaatttatgttatttcaaatgcttttgaagcagtaacaataaaaaaaaagttccttaagtaacaatttttgcaaaccctagtatggaaatagtctgatctgcattaataaaagtgttgattgatttttcttagagaaacaacctgacgaaaacatttcattcataatattttaaagcagaggagtgtacttcatttgcagcatgttgcctatgagagttttaaagattcttcccaaaggctgtgacataaaacctgaaacgaaaacaaccatcttgagattttc

SEQ ID NO: 418924 - DNA, 594 bp, Homo sapiens
aaatgaaaagagaaaactgaaactttcattatttgtcatgaatgatttttcacatggactcacagatatatggataatttactataaacgtattataactgaggattttagaaagttccatggatataaaattttaaaagtcaaatttatttctgaacatcacatattttgaaaaaacatttgaatcacagattatatgacataatttacaatagcaatactactatgctttatttgggaataaatttatcaaatgatatgccgagtgtgtttagaatcagtaatgaaactgtaacaaagagcattcaagggcacctaagaaaatggagacatcccatgtttaaaaggcttaatattaaataatgtcaatttttcccagttgttcatagaacactccartggagcaagaaaacatctctaatgaatagcaaaaacaatttttatgggatttaacaaattgatataaattttgtaagaaaaagtacacagctaagttacattgggaaaagacaaaaaaaaaaaaaaaagagatgtaataccaagtacaagttgcctctagaagttagagtaagtaacatagtgtggtattggtag

SEQ ID NO: 418925 - DNA, 626 bp, Homo sapiens
ttaatagccaaggaccacatagagacttaatcttaccaaaaatttttaaaatgcaaacaaaaacaagatgctaccataaaaaaatttttttgagtccatcagactgataaaaaccatagaratgataacatggagtttaggaaaagatgtggagaaatgaacatgcatatccattgcttgtgtgaggggaaattggtgcaaccattgagcaaaggatctaccagagcataacatgtacatactcaaatgagatgcctagcatctccatttctaggcatctcatttggaaacattcatgtcactgtgcacactatgtgctcaaatacatttattgcagaattttttgcaatgccaaaaatattgaaagcaacctaaatcaatcaatcagggattttttaaaaagacatagtatatccatgctcaggactattatgcatgtattaaaaggaacagaaaagatctatctgtatgaatccaggacttattactaagtaaaaaattaagttgcagactcgtagtgtaatcttgtacaaacaataagccccaccacgatgttatttgttggtacatcacagaaaaatcacttgaaagtatacaaatcaaacttttctatcaagggtgtgagg

SEQ ID NO: 418926 - DNA, 626 bp, Homo sapiens
ttaatagccaaggaccacatagagacttaatcttaccaaaaatttttaaaatgcaaacaaaaacaagatgctaccataaaaaaatttttttgagtccatcagactgataaaaaccatagagatgataacatggagtttaggaaaagatgtggagaaatgaacatgcatatccattgctkgtgtgaggggaaattggtgcaaccattgagcaaaggatctaccagagcataacatgtacatactcaaatgagatgcctagcatctccatttctaggcatctcatttggaaacattcatgtcactgtgcacactatgtgctcaaatacatttattgcagaattttttgcaatgccaaaaatattgaaagcaacctaaatcaatcaatcagggattttttaaaaagacatagtatatccatgctcaggactattatgcatgtattaaaaggaacagaaaagatctatctgtatgaatccaggacttattactaagtaaaaaattaagttgcagactcgtagtgtaatcttgtacaaacaataagccccaccacgatgttatttgttggtacatcacagaaaaatcacttgaaagtatacaaatcaaacttttctatcaagggtgtgagg

SEQ ID NO: 418927 - DNA, 626 bp, Homo sapiens
ttaatagccaaggaccacatagagacttaatcttaccaaaaatttttaaaatgcaaacaaaaacaagatgctaccataaaaaaatttttttgagtccatcagactgataaaaaccatagagatgataacatggagtttaggaaaagatgtggagaaatgaacatgcatatccattgcttgtgtgaggggaaattggtgcaaccattgagcaaaggatctaccagagcataacatgtacatactcaaatgagatgcctagcatctccatttctaggcatctcatttggaaacattcatgtcactgtgcacactatgtgctcaaatacatttattgcagaattttttgcaatgccaaaaatattgaaagcarcctaaatcaatcaatcagggattttttaaaaagacatagtatatccatgctcaggactattatgcatgtattaaaaggaacagaaaagatctatctgtatgaatccaggacttattactaagtaaaaaattaagttgcagactcgtagtgtaatcttgtacaaacaataagccccaccacgatgttatttgttggtacatcacagaaaaatcacttgaaagtatacaaatcaaacttttctatcaagggtgtgagg

SEQ ID NO: 418928 - DNA, 599 bp, Homo sapiens
ggtgttatgtaattctttttgttactttgttttcctttaattgtgatatagttgcactggtaattattttcttgttctcataaaacaaaacaaaataattaaaaagccattcaaaatacatcctagtaaaattacaactgaaatgtaattgagtaaaaataaaatttacttatgtaagtcgtagagttttagtttttattctcaaggtcaatttcttaatctctctggaaatttattaatttcattaaaagatataaagaaaatgacacctgcaaagaccaatttaactacttttaactcttgttgtctttttagttcagccatatgctgtgtgatttaggacatgttatttaatctctctgtgttatggaaatatgtataatctatccaaatgaatagaaagaaaactgtgtgattyggggcatgttatttaatctctctgtgatgaaatccttgcctaaaagttagagaaaaattagaactaagctcacagagattttaagaagctaaaatgagtcaatatatgtaaatcacttagaatattattattgttagttttttgaaaaaacttgaacagtatttggtgctatgccttcttc

SEQ ID NO: 418929 - DNA, 507 bp, Homo sapiens
gagaaaagcaagcagttcttggaaacaatactagacctacatgtggtaaagaaggaaggaactcaagtagaatgtacgactgtttcaaaaatctactgaaccttgctgaaagtatatggaaatgccagagaaaaattaaatactaaaggtatatcttagaatatactatttaatctctgtgtccctcactttcttcaagagagaattagtaatagcatctaattctagattcttargttgtgagaataaatgtgatgaatgtgtgatatatatatgtgtgtgtgtgtgtgtatatatatacacatgtatatatgtgtgtatatatatacatgtatatatgtgtgtgtatatatatacacacatacactatatataatacacacatatacactatatatagtacacatatacactatatataatacacacattcacactatactataatacacgcatacacacatacactataatacacacatacacacatacatacacacatacaca

SEQ ID NO: 418930 - DNA, 507 bp, Homo sapiens
gagaaaagcaagcagttcttggaaacaatactagacctacatgtggtaaagaaggaaggaactcaagtagaatgtacgactgtttcaaaaatctactgaaccttgctgaaagtatatggaaatgccagagaaaaattaaatactaaaggtatatcttagaatatactatttaatctctgtgtccctcactttcttcaagagagaattagtaatagcatctaattctagattcttaggttgtgagaataaatgtgatgaatgtgtgatatatatatgtgtgtgtgtgtgtgtatatatatacacatgtatatatgtgtgtatatatatacatgtatatatgtgtgtgtatatatayacacacatacactatatataatacacacatatacactatatatagtacacatatacactatatataatacacacattcacactatactataatacacgcatacacacatacactataatacacacatacacacatacatacacacatacaca

SEQ ID NO: 418931 - DNA, 507 bp, Homo sapiens
gagaaaagcaagcagttcttggaaacaatactagacctacatgtggtaaagaaggaaggaactcaagtagaatgtacgactgtttcaaaaatctactgaaccttgctgaaagtatatggaaatgccagagaaaaattaaatactaaaggtatatcttagaatatactatttaatctctgtgtccctcactttcttcaagagagaattagtaatagcatctaattctagattcttaggttgtgagaataaatgtgatgaatgtgtgatatatatatgtgtgtgtgtgtgtgtatatatatacacatgtatatatgtgtgtatatatatacatgtatatatgtgtgtgtatatatatacacacatacactatatataatacacacatatacactatatatartacacatatacactatatataatacacacattcacactatactataatacacgcatacacacatacactataatacacacatacacacatacatacacacatacaca

SEQ ID NO: 418932 - DNA, 616 bp, Homo sapiens
ataattggtatagtttttactaaagtgaaatcagataatacatagggattatgtataagaatgagtgaataatcaatcactaattatctaatggtgcaagatgtttttctgattacaatgaaatacactgccccacactcttttgcaactttactgaatccaatttttagagttttgcactaaaagaaagtcatagaaagtcagaggaaaaggtgaggatagagagacatataaatgaaatagcagcaataaaattgcaatctgcatggaatttatctagaaatatgtttaaaccacattaagcaagtagtagaacctatagatgtattctctcaggaacttcaataaattaatttgccgaagcctcagtctcctcttttgtaaattgagagtgataataaatcctctaacacatgatttcttggggaaagaggatactggaaatgcaatttattcaccttarattttcagcagatttctgcagagttgtttgaacttgccagtttcaattgttttctatttaaaaccattgtaatcaggtgtacgcccccccacctttccatcaatattggaaaaggtccctaatgatgatttccacaatgctaaatttagtagt

SEQ ID NO: 418933 - DNA, 629 bp, Homo sapiens
tgaagccaaaactacaaataagaaagtgagtaaatttcatgaaagagtcaatggaattgaaatgtttggcatttgtttgtccttttgaagaagctcaaatttgcaagtggagaaaaagtttttaaaaatttaaaatattttacgcaatcatttcttagtgccacagaccccaaaatgtatcagacttcaagccaaataaaattaaaagttacttttgaccattacactgtgtaaaccccatgtttttttttaatcagaragatgacgtattcagttataaaaatgccagccttctatggatagtttctgctaatatcttgaacacaattttttttctgttggttttctacctgtgtccatttgattttgcccttttggcaattacaaatttcttgaaagaggctgtataagaatgatgccagccactgaccttatcatcagatagatgactctcacttctgttcttccacaaattgggcaaggcgagttattatttcctttgcaagagagacttaaccttgtatattacacgggctgctttcatcaggagaaggctcagccctagttgatctgtggaatgctaatgattcatttcatctttcatggagaacacctcttgcaatcacagc

SEQ ID NO: 418934 - DNA, 646 bp, Homo sapiens
aatcacagctcagatgtttcttgctattttcttgaaattgctgactgttaagcattctggtagggcttattgacctagcacctgtgtattttgggaagtgaaaagcagcaggtgaaaggcaaatgcaatggaggcatattttagatggtgacacttggttcccaaatcttctgatttataggccaatatctaatgagtgataaagtgggtgatcaggtgggactgttctgtgtttagaagactgaaatgatgagattatttcacaatgggtatggctaaatggatatttggtaagccaacatttacaatcatattattaacacttgggacttttggctaggactggattagcccaggctgctgagaaagtgccaagctaggagttggccattcactatcctccacagcaggctcccttttaataactgtatgtttatggtgtaggctagtgtttattatttgaattcctgttaaacascaatcacgtccaggatgaatgtttatgttacaaaaaggctgagccaaatcatctcagtttcattatctgtaaattatgaaaattaataaaataggtaggtgataccatatgtagttatcgggacagagaagagtgtgtagtttgcagtaaattctgagtaaagtttaa

SEQ ID NO: 418935 - DNA, 525 bp, Homo sapiens
ataaagggacagccctgtcatgtattaaatttaagaaaaaatcaaaaccaaattgaagaacaagttctatagtacatcatattttaaaatgtatgtgtatgtatatatgtttatactcatatacattgtccactcctgtatttattaatatacatgtataaaacattatcatgaaaagtaggacataatactgaaaaaggaaagttttagggtaatctgttattcttgaatgttttgcaaccagcatttgttacattctaatttaaataattttaaaattgacaggtaacaactataacaacagaatccccataaatactaaacataagtctatataaaaatcaatttttcttgtccccactaagtttcatgatatctttgttcactccaaaacagacacctatccttgagaatggtaattggataagttcatytggtcctctagggaagtgaaatagtgcaggaatctttattactccttataaatatcattacattttaatttcaaaatgcttttttcaacaa

SEQ ID NO: 418936 - DNA, 618 bp, Homo sapiens
  misc_feature (1)...(618): n = A,T,C or G
aaaggaaagttttagggtaatctgttattcttgaatgttttgcaaccagcatttgttacattctaatttaaataattttaaaattgacaggtaacaactataacaacagaatccccataaatactaaacataagtctatataaaaatcaatttttcttgtccccactaagtttcatgatatctttgttcactccaaaacagacacctatccttgagaatggtaattggataagttcatctggtcctctagggaagtgaaatagtgcaggaatctttattactccttataaatatcattacattttaatttcaaaatgcttttttcaacaaaatcccaaaagacctatggaagatgctgatagtgtttctttctttaaaatgtgatttagttttcaaacttaatccccttgatcctccaacgatggccctctgaacatgactagtaatgtggtatgatttcaacagcaaraccaggggtttccaatagcgggagaaagctagggcagagcatatttgaattctttatgggacatcattctttgatgaacccttgagggtacacatttcttattaagaataaatgttataatatgttaannnnnnnnnnnnnnnnnnnnn

SEQ ID NO: 418937 - DNA, 610 bp, Homo sapiens
ttgcttatatttttacaaactgaagttttatggtaaccctgagccaagcaagtctattcatttttccaatagcacacgcttaattcctgttactgtgtcacatttggtaatttttataatatttcaaacttttttattactgtcaaccaaccattccctgtctctctccctctcctcaagcctcctattttctgagrcacagtaatattgaagttaggccaataaataaccttacaatgccttctaagtgttcagatgaaaggaagagtttcaagtctctcaatataaatcaaatggccaagaagcatatgaaaaaatattcaacatcactaatcatcagagaaatgcaatttaaaatcaatgagatataccacctacaccaatcagaatggctattactaaaaagtcaaaaaataacagaggtaggagaggatgtagaggaaagggacacttatacactgttgctgtgaatgtaaattaatacaacctgtaaggaaaagtgtattgagatttcacaaagaactaaaaatagaactaccattttgatccagaaagctcactactaggtacctaccaaaaagaaaaaatacatattatattaaaaaatact

SEQ ID NO: 418938 - DNA, 532 bp, Homo sapiens
aagtgttcagatgaaaggaagagtttcaagtctctcaatataaatcaaatggccaagaagcatatgaaaaaatattcaacatcactaatcatcagagaaatgcaatttaaaatcaatgagatataccacctacaccaatcagaatggctattactaaaaagtcaaaaaataacagaggtaggagaggatgtagaggaaagggacacttatacactgttgctgtgaatgtaaattaatacaacctgtawggaaaagtgtattgagatttcacaaagaactaaaaatagaactaccattttgatccagaaagctcactactaggtacctaccaaaaagaaaaaatacatattatattaaaaaatacttgcactcatatgtttattgcagcactattcacaatagcaagtattcggaatcaacctaagggggtcattgatgaatgaatggattttaaaaaccatggtatatatagacaatggaatatattctaccttaaaaaatggaatcatgacttttgcagtaacatggatgg

SEQ ID NO: 418939 - DNA, 593 bp, Homo sapiens
ccaagttatgaatgctaaggaaaagttattgaagaaaatttaaaatgctattccagtgagcacacaaatgataagaaagcaaacagccttattgctgatatggggaaagcttttgtagtctgtatagaagattaagcaggccagaccattcctttaattcagagcctaatccagagcaaagtcttaactctcttcaattctgtgaaggctgagagaagtgaggaaactgcaggagaaaagttggaaactagcagacactggttcatgagatttaagaaaagaagccacttccataacataaaagtgcaaayggaagcagaaagtgctgaagtagaagttgcaggaagttattcaagaggtttaattaagatcattgatgaaagtcccacaaaacaacaaattttcaatgttgatgaaagtgccttacatagaaaaaaggtgccatctaagactttaatagcttgagtggagaagtcattgtctggtttcaaagcttcagagaataggctaattttcttggtagggactaatgcatcctgtgctttttaagttgaagccaatgcatatttaccattctcaaaattctagggctc

SEQ ID NO: 418940 - DNA, 593 bp, Homo sapiens
ccaagttatgaatgctaaggaaaagttattgaagaaaatttaaaatgctattccagtgagcacacaaatgataagaaagcaaacagccttattgctgatatggggaaagcttttgtagtctgtatagaagattaagcaggccagaccattcctttaattcagagcctaatccagagcaaagtcttaactctcttcaattctgtgaaggctgagagaagtgaggaaactgcaggagaaaagttggaaactagcagacactggttcatgagatttaagaaaagaagccacttccataacataaaagtgcaaacggaagcagaaagtgctgaagtagaagttgcaggaagttatycaagaggtttaattaagatcattgatgaaagtcccacaaaacaacaaattttcaatgttgatgaaagtgccttacatagaaaaaaggtgccatctaagactttaatagcttgagtggagaagtcattgtctggtttcaaagcttcagagaataggctaattttcttggtagggactaatgcatcctgtgctttttaagttgaagccaatgcatatttaccattctcaaaattctagggctc

SEQ ID NO: 418941 - DNA, 546 bp, Homo sapiens
aagccacttccataacataaaagtgcaaacggaagcagaaagtgctgaagtagaagttgcaggaagttattcaagaggtttaattaagatcattgatgaaagtcccacaaaacaacaaattttcaatgttgatgaaagtgccttacatagaaaaaaggtgccatctaagactttaatagcttgagtggagaagtcattgtctggtttcaaagcttcagagaataggctaattttcttggtagggactaatgcatcctgtgctttttaagttgaagccaatgcatatttaccattctcaaaattctagggctctttagaattatactaaatctastttctgtgggctgtgtaaatgagaaaacaaagcttggatgaaaatgtatctgtttacagcatggtttactgaatattttaagcccactgttgagacctactgctcattgattcccattgacaatgaacctggtcacccaagggctctaatggaaatgtacaatgagattaatgttagttttatgcctgctaacacaacatccattctgtagc

SEQ ID NO: 418942 - DNA, 598 bp, Homo sapiens
tattacataaactttttttgataaagtcaggactccaatttgaaagaagctctactctaggttaagtgctaccaaatagaatcacagctacagagaaatattttgtgaaagagtgaatagatgtggcaaaattcattattgccttattttaagaaattcccaaagccatcccaatcatcagcaaccaccaccctgatcagccggcagrcatcaacatcaaggcaaaggtaaaaccctctaccagcaaaaagatcacaactttctgaaggctcagatgattgttagcattctttagccataatttattttcaatttttatttaaaaaatttggatataatttattttatatttttaatgaaggtatgtacatttttagacacaattctattacacatttaaacaagctatggtatagtgtaagcacaaattttatattcactgggaaatcaaaataaataattgtatgacttactttattacaatatttactttattgtgatgatctagaactgagcccacagtgtctccatttcatgcctgcatcttgttaagaccttgctttcaattcttttgattacatacctgaagtggaactgc

SEQ ID NO: 418943 - DNA, 583 bp, Homo sapiens
ttaacatttttccattagtgcgatatatttgttacaactaatgaattgatatttatgcatcacaattaactgatgtctacamtttattcacaattcctcagttttctactaatgtcctttgactttttcaagatccaagatagcagggttccccaagccctgggccatggaccagtaccagtctgtggcctgttaggagccggccacacagcaggaggtgagcagcaggttagcaagcattactgactgcctgagcacctcctgtctgatcagcagcagcattagattcccataggagtaggaaccctactataaactgcacatgtgagggacaaaggttgtgcacactccttatgagaatcttatgcctgatgatctgaggtggagcagtttcatcctgaaaccatccctttacccctagttcatggaaaaaaaaaaatgcctttaacaaaactggtccctggtgccacaaaggttggggaccattgccatataggataccacattacatctagttatcctgtctcttagggacctctaactatgatggtttttaggcttttcttgtctttgatgactgtga

SEQ ID NO: 418944 - DNA, 583 bp, Homo sapiens
ttaacatttttccattagtgcgatatatttgttacaactaatgaattgatatttatgcatcacaattaactgatgtctacactttattcacaattcctcagttttctactaatgtcctttgactttttcaagatccaagatagcagggttccccaagccctgggccatggaccagtaccagtctgtggcctgttaggagcyggccacacagcaggaggtgagcagcaggttagcaagcattactgactgcctgagcacctcctgtctgatcagcagcagcattagattcccataggagtaggaaccctactataaactgcacatgtgagggacaaaggttgtgcacactccttatgagaatcttatgcctgatgatctgaggtggagcagtttcatcctgaaaccatccctttacccctagttcatggaaaaaaaaaaatgcctttaacaaaactggtccctggtgccacaaaggttggggaccattgccatataggataccacattacatctagttatcctgtctcttagggacctctaactatgatggtttttaggcttttcttgtctttgatgactgtga

SEQ ID NO: 418945 - DNA, 583 bp, Homo sapiens
ttaacatttttccattagtgcgatatatttgttacaactaatgaattgatatttatgcatcacaattaactgatgtctacactttattcacaattcctcagttttctactaatgtcctttgactttttcaagatccaagatagcagggttccccaagccctgggccatggaccagtaccagtctgtggcctgttaggagccggccacacagcaggaggtgagcagcaggttagcaagcattactgactgcctgagcacctcctgtctgatcagcagcagcattagattcccataggagtaggaaccctactataaactgcacatgtgagggacaaaggttgtgcacactccttatgagaatcttatgcctgatgatctgaggtrgagcagtttcatcctgaaaccatccctttacccctagttcatggaaaaaaaaaaatgcctttaacaaaactggtccctggtgccacaaaggttggggaccattgccatataggataccacattacatctagttatcctgtctcttagggacctctaactatgatggtttttaggcttttcttgtctttgatgactgtga

SEQ ID NO: 418946 - DNA, 636 bp, Homo sapiens
tctctagatatttgactcattctatttyataatacttctccaaaatggctccagtccccctcactttttcacagctcaagttggaaggaagtcataaagaatagagaatagaaatatgggggatattcccaagctgagctagtacaaaacagttcccctaggtcagtaacacttgcgtttccaaggagacagacactttgaggaaagtcttaccaaatcataaatatgtaatttttttcttctcagaaatcctatcaagcaaatttagttaacttggccatagctcataaaacctaaatattgtgaggttgttgaatgtttaaacctaacatcaatgtacagttctacagaccctgaaatgttttctgaattcaaatcctcaatgcagaagaatagaagctaaacataagttggaagtcatcaatttctctttaacctgggcaccagggaaaaacaaaaacctgagatggaaaaaataaatttattacagggattccaggactctacagggttctggggaattaaccgattatcgtacacagcgctaacaaagcacctacatgattccttctaggtacacaggccacttcacacacattatttccctcattctccccacagcctggtaaagcagga

SEQ ID NO: 418947 - DNA, 636 bp, Homo sapiens
tctctagatatttgactcattctattttataatacttctccaaaatggctccagtccccctcactttttcacagctcaagttggaaggaagtcataaagaatagagaatagaaatatgggggatattcccaagctgagctagtacaaaacagttcccctaggtcagtaacacttgcgtttccaaggagacagacactttgaggaaagtcttaccaaatcataaatatgtaatttttttcttctcagaaatcctatcaagcaaatttagttaacttggccatagctcataaaacctaaatattgtgaggttgttgaatgtttaaacctaacatcaatgtacagttctacagaccctgaaatgttttctgaattcaaatcctcaatgcagaagaatagaagctaaacataagttggaagkcatcaatttctctttaacctgggcaccagggaaaaacaaaaacctgagatggaaaaaataaatttattacagggattccaggactctacagggttctggggaattaaccgattatcgtacacagcgctaacaaagcacctacatgattccttctaggtacacaggccacttcacacacattatttccctcattctccccacagcctggtaaagcagga

SEQ ID NO: 418948 - DNA, 587 bp, Homo sapiens
ggactgatagaccttacagacagttactgtaaaaggagaatgtatgtgttacttacatacccaagataagacagaaattatatctactttatgtcaacaattgcattgtaagagtaagtgactttcaacaatgaatagttattaaaacaagattccagcctgaatgcacatattcatgaggaaatgccttttttatggagtatttattgaaatgttttatttataaaatactgtggctggcagctacatgctaagacagcaagagaaagactaaattgtccaagactttttatatgttattgaaaaagcagagaaatttttaatacaaactcattaggatctttgaaaattgatgaaatcattataatcctgacctttttttatgttcttaaaggaatatagctttactgcactgtattgtctaacacgtaagaaataggcccttgaacaggagacaatttgcagtacaatggtaagctgctgtatgctttcgtgtgttaaattttttatgccacatgaagatttctgcatattaatacatawatttaatctgatatctaatgatctttctcatatggcacaaccca

SEQ ID NO: 418949 - DNA, 560 bp, Homo sapiens
tcccttccactccggccatgtgaagtgtcttgatctcctttgctttccatcacgaccrtaagttccctgaggcctcccccaaagctgatgccaccatgcttcctatacatcctgcagaaccatgagccacttaaacctctcctctacaaactacccagtttcaggtatttctttatagcagtgtgagaacaacctaatatagaaaattggtactgaggagtggggcattgctttaaagatacctgaaaccctggaagcagctttggaactggttaatgggcagagattagaacaatttgatgaacatttggaacttcctagtgacttgttggatgattgtgaccaaaatgctgatagtgatatggagggtgaaatccaggctgaggaggtcccagatggaaatgagaaacttattaaaaattggagtgaaggtcacttatgttatgctctagcaaagagcttggctgcattgtgcccgtgctctagggatctgtggagctttgaacttgagagatgatttaggatatctagtagaagaaaattctaaacagcagtgttca

SEQ ID NO: 418950 - DNA, 560 bp, Homo sapiens
tcccttccactccggccatgtgaagtgtcttgatctcctttgctttccatcacgaccgtaagttccctgaggcctcccccaaagctgatgccaccatgcttcctatacatcctgcagaaccatgagccacttaaacctctcctctacaaactacccagtttcaggtatttctttatagcagtgtgagaacaacctaatatagaaaattggtactgaggagtggggcattgctttaaagrtacctgaaaccctggaagcagctttggaactggttaatgggcagagattagaacaatttgatgaacatttggaacttcctagtgacttgttggatgattgtgaccaaaatgctgatagtgatatggagggtgaaatccaggctgaggaggtcccagatggaaatgagaaacttattaaaaattggagtgaaggtcacttatgttatgctctagcaaagagcttggctgcattgtgcccgtgctctagggatctgtggagctttgaacttgagagatgatttaggatatctagtagaagaaaattctaaacagcagtgttca

SEQ ID NO: 418951 - DNA, 560 bp, Homo sapiens
tcccttccactccggccatgtgaagtgtcttgatctcctttgctttccatcacgaccgtaagttccctgaggcctcccccaaagctgatgccaccatgcttcctatacatcctgcagaaccatgagccacttaaacctctcctctacaaactacccagtttcaggtatttctttatagcagtgtgagaacaacctaatatagaaaattggtactgaggagtggggcattgctttaaagatacctgaaaccctggaagcagctttggaactggttaatgggcagagattagaacaatttgatgaacatttggaacttcctagtgacttgttggatgattgtgaccaaaatgctgatagtgatatggagggtgaaatccaggctgaggaggtcccagatggaaatgagaaacttattaaaaattggagtgaaggtcacttatgttatgctctagcaaagagcttggctgcattgtgcccgtgctctrgggatctgtggagctttgaacttgagagatgatttaggatatctagtagaagaaaattctaaacagcagtgttca

SEQ ID NO: 418952 - DNA, 584 bp, Homo sapiens
tctcatgttaaattgtaatccccactgttggagatggggccttgtgtgaggtgattgaatcacaggcatccttcatgagtggtttagcaccgtcccattggttttgttcttgttatagtgactgagtgagttattgtgacatctgtttgtttaaaagtatattgtacctccatcctctctcttcctattgttcaagccatgtgaagtgcctcatttccattttccttccaccatgattgtaatttccctgaggcctccctagaggctgatgctgccttgcttcctgtatagcctactgaaccatgagctaactaaatctcttttctttacaaattactcagtctcggatatttctttatagtagtttgagaatrgactaatatagacttccaattctatgttgaataggggtagtgggagtaagcatccctgtttgtttcagttctcaagagaaatgctttcagcttttgccggttaagtatgatgctggcttgtcatagaaggctttaattattttgaagtatgttaatttcgttcctagtttgttgagggtttttaacatgaagggatgttgaatttcagca

SEQ ID NO: 418953 - DNA, 584 bp, Homo sapiens
tctcatgttaaattgtaatccccactgttggagatggggccttgtgtgaggtgattgaatcacaggcatccttcatgagtggtttagcaccgtcccattggttttgttcttgttatagtgactgagtgagttattgtgacatctgtttgtttaaaagtatattgtacctccatcctctctcttcctattgttcaagccatgtgaagtgcctcatttccattttccttccaccatgattgtaatttccctgaggcctccctagaggctgatgctgccttgcttcctgtatagcctactgaaccatgagctaactaaatctcttttctttacaaattactcagtctcggatatttctttatagtagtttgagaatagactaatatagacttccaattctatgttgaataggggtagtgggagtaagcatccctgtttgtttcagttctcaagagaaatgctttcagcttttgcckgttaagtatgatgctggcttgtcatagaaggctttaattattttgaagtatgttaatttcgttcctagtttgttgagggtttttaacatgaagggatgttgaatttcagca

SEQ ID NO: 418954 - DNA, 624 bp, Homo sapiens
gtgacgatattgcctgtcaatacagaaggagaaaagcttatttttaatttctgtatatgtataacatatcgaatgaaatgaagtacatatacaatagtcctcccttatcagtgggtgccagaaaccacaaatagtaccaaaccctgtatacattgtttttttttgatctaataactgagagtgctactaagtaattaatgggttgatagtgcatatagtatggatatgttggaaaaagaaatgattcatgctctgagccggacagagtgcaataacagaaatttttatcagctactcagaatggcacacaatttaaagcttwtgaattgtttatttctgtaatttccatttaatatttttaaccacagttgacctcaggcaactgaaaccatggaaagcaaaactgcagattaggggtactattatatgtaagaatttctttaaaaaaaaaaaactaaggataaaaatagctttgtgctcaccaaagacaaacctgttattactcaggtagtgtagttttaagtattcttttgaagtaatattaaaaaattacaacgaacaataatgatgatgaaacaaaatgcatataggcaatgcaactcttgttattatataaggaaagtc

SEQ ID NO: 418955 - DNA, 560 bp, Homo sapiens
atgaacattgtcattgacaataatttttcatttctattttttggctaaaagaatttactaagtaattcactcacactcacaaagtctattaaacaattagcaaattacagatttttaaaattctaccataacatgtctggtacattggttatatagggtaaaaattgatcttatagttttttatgcctcaaatcaaatataaatttgcttcatgttcttctgatatttatacttaggaaagtctttttataatagaaaatatagacatgaatgtgaagagtagcattgacattactgcactaaaaattcattattatttttttcttaygcaaattagttaagtctagttgcagagcttttcacatgaagatggtattcagttccttcactatttatagatacaaaccatacaacttaacaattaaattctgtcaggcattattttcacaatatttcacctgcgagcctctctctcctcagtcagattttatgcttaccaagggcaggtccatttttatagtaattttgtattcccactgaatctgtgataatgttttgtg

SEQ ID NO: 418956 - DNA, 598 bp, Homo sapiens
gataatgttttgtgcgcagaatatcatctaaaataattgattggttcatatcttatcatcatatgtccccacaattttattcttgattttatatgactggtttggcgaggtattaaaaggtcataattatgagcaaactaagaatrtaaacaagtcaaaacaaatagatttaaactaatttttattatttgatctatttaaacaaatcataaatgtaattattattatttgcacaatgcaacaagtatatgtgcatatctctgtgtttgcatatttaatatttatttggagagaaaaagagaatgtattcaaactgaaaatttaacccaaaacaaagtttggtgacatttttaagttatacatgttatgaaagaaataatttgagaaaaatgcctttcattttcattagtttactttcctaatattatttggcattactttccagtagatacagagacatgttcagcacagtcttgaccattcagagcatattatttagtagggaacaaggcaggtgcaaatatctataaagtaaccaaacctgtgccagattacttaaaaccagatatatttgtaatgtgaccatatatacaactaa

SEQ ID NO: 418957 - DNA, 622 bp, Homo sapiens
gacccatttcatcatctctggtgctttgatttgctttttccttttgtccataaagatatgaactaaaaaaatatgaatatagaaaggcctctgttttgctagcactttagaggagtgggtataagatgtggcttccagctacagcaccttccagagtgtttgttgcttgaaatgatttaggcatttctgatagaactgccaactgccatgactttttctttggaaaagatgttagcattatgcacaaagaaaaatcttcatagcttctgacatggtaacatcacttctacaaactttccataataaaatacaattttgaaaattaaacctgtgttctattatgttcaacaaagattcataatagagacaatcataaaataatctaaatggctagttatatttraatacttaactgctttaaagaacatttatgaagtctaatatgattttaaaatacggtaataaaaaacaacaacaaaagaaagcccaggaccaaatggagtcacagctaagttatatgacccatacaaagaagaactaatgtcaatcctcccaaaagtgctccagaaaatcaaggaggagagacttctttctaacttcttatataaaaaggccagtatca

SEQ ID NO: 418958 - DNA, 622 bp, Homo sapiens
gacccatttcatcatctctggtgctttgatttgctttttccttttgtccataaagatatgaactaaaaaaatatgaatatagaaaggcctctgttttgctagcactttagaggagtgggtataagatgtggcttccagctacagcaccttccagagtgtttgttgcttgaaatgatttaggcatttctgatagaactgccaactgccatgactttttctttggaaaagatgttagcattatgcacaaagaaaaatcttcatagcttctgacatggtaacatcacttctacaaactttccataataaaatacaattttgaaaattaaacctgtgttctattatgttcaacaaagattcataatagagacaatcataaaataatctaaatggctagttatatttaaatacttaactgctttaaagaacatttatgaagtctaatatgattttaaaatacggtaataaaaaacaacaacaaaagaaagcccaggaccaaatggagtcacagctaagttatatgacccatacaaagaakaactaatgtcaatcctcccaaaagtgctccagaaaatcaaggaggagagacttctttctaacttcttatataaaaaggccagtatca

SEQ ID NO: 418959 - DNA, 607 bp, Homo sapiens
aaaccctactaaagctgtagatgacacaaacctcccttctggtaattagaataattaatattrgtaaaaatgatcgtacttcttaaagcattagacagagtcaatgcaatccctgtcaaaatactaacaccatttttcacagaattagaaaaaacaatccccaaattcacatggaaccataaaagagcctgaatagctaaagcaatcctaagcaaactctggaagcatcatagaatctgacttcaaatatactacaaagctgtaatgaccaaaacagtatgataccagtataaaaatagacacagagatcaatggaacataatagagaatccagaaataaagctatttatctacagccaatggatctttgacaaaattgagaagaaatgcattggggaaaagacacccttgtcattaaatgatgctgggaaaactggataggcataatgcagaagaataaaactgagctacataagaaaatcaacttatgatggattaaaaacttatatatgtcctaaaactataaaaatattagaagaaaagctaggctaaactctctggacattgatctaggcaaagaattcaggactaagacctcaaaaacaca

SEQ ID NO: 418960 - DNA, 561 bp, Homo sapiens
aaaagaaacaattaacagtgaaaagacaaagtgcagaatgtgagaaaatattttcaaactatgtatcttacaggggactaatatccagaatttacaaggaactcaaataacaacaaaaacaaaatgaaaacaaatacccattaaaagacaggccaagaacataaatagatgttttgcraaagaagacatataaatggctaacaagcatgtgaaaaaaatgttcaacatccctaatcatcagagaaatacaaattaaaatcacagtgagatatcatcttacaccagttagaatagttaccaatagaaatgttataaataatgcctcctttaatttcttctatcctttataggaatattgaaagcactaaatgacaaaatatatacaaagcacagagcacaatattaaattgcctaagaacaaaaaaagaaaaaagaatagttatgttggcaaggatgtgaagaaaaaggaactcttatacattattgatggaaatgtaaattggtacaacttctacataaagcagtatgcagatttttttcaaagattaaaaatagtactac

SEQ ID NO: 418961 - DNA, 532 bp, Homo sapiens
tttacagggatagaaattgttcctcaatcgagatcttcattagttgttcccaatgcttggtcccaaatggctttctccctgattttcaataagaaaagtaaaaagtaggctaagttgacgagtaaaaaaattttatttaatttaactgagataccttaagttcctcaggacaagtcatgataatttcccatgacacctagacatcgtcctccatcttgcttgaaaataactattttaattcccctccaaggctgttctcaggtttcagagagaggcacttgtttatatttgaaactttgaaaattattaaatgcttaatgcttatgaagacatttctggaaatatcatactttgaaatattaaacacacagtgtttttgtattagtcagactttgctgaagcaataaacagctaaaagccccagggacttgtaacaacagattcrtttccctatcccattataggtggtctgcaggttgacctgctgtcttctctttctgagctccaggcataaggaatagcccctatctgg

SEQ ID NO: 418962 - DNA, 583 bp, Homo sapiens
gccatgggtctgcccagttttgkgcttgagacccaaggccctggtggtgtaggctcccaagggaatctcctgatccacggattgcaaaaatctgtgggaaaagcacagtaccctgggtgggtaggacagtttcttgctgcctctcttggctgggggaaggaggtccctttgccttgtgcagcttctgggtgaaccatcaccccaccctgcttttccttgctctctgtgggtcacaccaaccacctcgtcagtcccagtgagataaacagggtacctcagttggaaatgcagaaatcattcgtcttttgcattcctctcgtggggagctgcagaccggagctgtctcttctcggccatcttggctcctcccccagtcagctatttattgactgatttgttaaaatcagtgaatacatatttatttcgttcttagtaaagatgctaggtgcaggggatgagaggtgcaaggaatacagctgagaacaaaaaagacatagaagcattttctatatttttatcaactggtcatgttttctctttggttagttaagagtgttcttgtctttggcctactgtcttatca

SEQ ID NO: 418963 - DNA, 592 bp, Homo sapiens
atttgtctgtttatagcagcacaatttgcaattgcaaaaagatggggctgggcacagtggctcaccctgtaatttcaacactttgggatgccaagatcggtggatcacctgaggtcaggagttcaagaccagcctggccaacatggtgaaaccctgtctctactaaaaatactaaaattagctgggtgtggtggcaggagcctgtaatcccagctacttgggaggctgagggagtagaattgcttgaatccaggaggtggaggttgcagtgagccgagatcatgccattgtattcyagcctgggcgacagagcaagactctgtctcaaaaaaaaaaaaaaaaaaaaaaaaaaggaccagcccaaatgcccatcagtcaatgagtggataaagaaaatgtgagatatatatatctcacatatatatatcatggaatactacctggccataaataggaatgaaataacggtatttgcagtaacctggatagaaaaggagatcattattctaaatgaagtaactcaggaatggaaaaccaaacatcatatgtgggaactaagctataaggactccagggcacaagaatgatacag

SEQ ID NO: 418964 - DNA, 573 bp, Homo sapiens
ttcacaggcttaacaggaagaattactaggaaagctcaggaaacgtagaatcatggcagaaggtgaagaggaggcaagtatgtcttaccatggtgaagcaagaaagagagagagggggaagtggcacacactcttaaaccatcagatctcataagaactcactaccaagagaacagcaaaggggaggctgcccccatgatggaatcacctcccaccaggtccctcccccaacaattacaattgaattgtaattaacagttacaattcaacaattgcaattgttgaattacaattcaacatgagatttgggtggggacccagacccaaaccaaatcattctacccgtggcccctccccaatctcatgtgcttctcacattttaaaacacaatcatggcttcccaacagtcttctcaagtcttaastcattccagcattaactcaaaagtccaaggccaaagtctcatctgagacaaggaaagtcccttccacctgtgagactgtaaaatcaaaacaagttagttacttccaagatacaatgaggatacagttatgggcaatggataaaagctcc

SEQ ID NO: 418965 - DNA, 578 bp, Homo sapiens
gaaggtttctgaagtgccctggagagaatttttttttggcttggctattaacatttggctcctcattacttatgcaaatttctttagccaacttgaatttctctccagaaaatgagtttttattttctactacatggtcaagctgcaaattttccaaacttttatgctctgcttaccttttaaatataagttccagttttataactctttttgttcatgcatatgagcacacactttcagaaacagccagatcacatctcaaatgctttgctgcttagaaatttcttctgygagatacctcaatcatctctcttaaggtcaaagttccacagatctctagggcaggggcaaaatgctaccagtctctttacgaaagcatggcaagagtgacctttactccacttcccaagatgtttatcatctccatcagagaccacctcagcctggacttcattgtccatattactattagcaatttggtcaaaaccattcaacaagtgtctaggaagttccaaactttcccacctcttgctgtcttctaagtcctccaaactgttccaacctctgcccattaccca

SEQ ID NO: 418966 - DNA, 598 bp, Homo sapiens
ttcacttcttcatttagaaaatggccatgcctttgagaaaccttaattgtcagtcagcatttattaccacactcttctatactctctctgagctataggagctggaagctgaagcactatgtttcccagactcccttgccattagggttctggataaggcttaggttcagccaaggagatgtactcacatcatgtgattagctgaaagcaaaggaaggtaaaagtcatccatccccagcacttgacatggctactgactacaggttttggtaaaaactttttaataactggcaattccatattccaattctagtcaccagtttaggggctatggagtagttacagctttggcaggcatttccygcatttgtgcatggcagtttcctggactccagttcacagtttgcagtagagggaacaacagcaacaagaaacctgaactgatatattcctctgctttttctaaaaattttgaagatacttaattcattgttttaaaactcttttcagtgtgaaatatctggggcttttgttgttgttcgccctgaggtcccttctctcaagaaaaactaatgatctgaatctatcaattcaggat

SEQ ID NO: 418967 - DNA, 523 bp, Homo sapiens
tggccacataatcttacgggaccaccgttgtacatgccgtttgttgttgacactgtyaatctataggtggcctcttagacctaagcattccctgtggaattcaacttagggccccaggagagctgcctgtctcccaaacaggacctggaaatgagttacaatgtattctctgagctatgcggttacctctaggagtgtcttgttgaaaatacggttttgctcaacacaggtaatgtgttgaaccacttataactaatttggtgccaatgtagaatagtaaaaagaacctggaatgtgtaatggaaagttctggtttgagctgacagttgttagttacgtgtctctaggaaagacactaacctctctgaatctcagctattttgcccataaaaggggaaagcggttcttgtcccacctgtcagagtgttgactgtcaaatgggaacgtgtctgcaaaagtgttctggatgctttaaatgctgtaaaaatcatgtgttcaatcttttttaagtttataaagcctt

SEQ ID NO: 418968 - DNA, 523 bp, Homo sapiens
tggccacataatcttacgggaccaccgttgtacatgccgtttgttgttgacactgtcaatctataggtggcctcttagacctmagcattccctgtggaattcaacttagggccccaggagagctgcctgtctcccaaacaggacctggaaatgagttacaatgtattctctgagctatgcggttacctctaggagtgtcttgttgaaaatacggttttgctcaacacaggtaatgtgttgaaccacttataactaatttggtgccaatgtagaatagtaaaaagaacctggaatgtgtaatggaaagttctggtttgagctgacagttgttagttacgtgtctctaggaaagacactaacctctctgaatctcagctattttgcccataaaaggggaaagcggttcttgtcccacctgtcagagtgttgactgtcaaatgggaacgtgtctgcaaaagtgttctggatgctttaaatgctgtaaaaatcatgtgttcaatcttttttaagtttataaagcctt

SEQ ID NO: 418969 - DNA, 523 bp, Homo sapiens
tggccacataatcttacgggaccaccgttgtacatgccgtttgttgttgacactgtcaatctataggtggcctcttagacctaagcattccctgtggaattcaacttagggccccaggagagctgcctgtctcccaaacaggacctggaaatgagttacaatgtattctctgagctatgcggttacctctaggagtgtcttgttgaaaatacggttttgctcaacacaggtaatgtgttgaaccacttataactaatttggtgccaatgtmgaatagtaaaaagaacctggaatgtgtaatggaaagttctggtttgagctgacagttgttagttacgtgtctctaggaaagacactaacctctctgaatctcagctattttgcccataaaaggggaaagcggttcttgtcccacctgtcagagtgttgactgtcaaatgggaacgtgtctgcaaaagtgttctggatgctttaaatgctgtaaaaatcatgtgttcaatcttttttaagtttataaagcctt

SEQ ID NO: 418970 - DNA, 577 bp, Homo sapiens
gtgagtgatctaagtggatttaaatggagcatcccagggtttcacaggatctgctagagaagggtctgtcttcccctctggacttgaacttgaaaggatgggaggcttagactaaagccaggcagcaagcagactcaaagatggagagaaactgtctgagtggtgaatcagccaaaagccagccctagcatggaattactagtcatgttggttatagtcacttccaagggctgccataacaaattatcacaaactgggggacttaaaacaacagaattcaactgttgcacagtcctggaggtttgaagtccaaaattaaggtgttggcaggacygtgttccccagtgaggctctcagggaggattcttccttgcctcgtcctagtttccggtggtcaccagcaatctttggctttccttggcttgtagctgcatgactccagtttctgcctctgttgtcacatgccttcttccgtctgtgtcttcacattgtcttctctttgtgcatctctgtgcccaaatttgcctcttctgataaggacaccaggtcattggattagagcccacccaagatgacc

SEQ ID NO: 418971 - DNA, 599 bp, Homo sapiens
cctcatcataacttgattatatctgcaaagaccctacttccaaataaggtcacattcacaggtgtttgtgtggtggcagttgaggggagggtgttaggacttgaacacatcgttttggggacacagtacaacctacaacatcagccartaaattgcctctaagctgatccactttggtttgggtttttgatcttttgtaccaagagaaaggcagggccaagacttccccccaggtctcttattatcttcagagtctaagtcaacaactgaaacccaaagctgggtctttaccttaaccacagagctggactctatacctactcaacctctcctttccaaatatcagtggctaggccaggcacggtggctcatgcctataatcccatcactttgggaggctgaggcaggattccttgaagccaggagctcaagatcagcctgggcaacatagcaagactctatctctacaaaaaaaaaaaaaaaaaaattggctgggcatggtggcacgtgcctgtaactccagctactcaggaggctgaagcaggagaatcccttgggcccaggagatggaggctgaagtgagccatgatcgcaccact

SEQ ID NO: 418972 - DNA, 577 bp, Homo sapiens
gtagctgcaagcaattcttttttatctcttttcatttatgtagcctgacattgagtaataataataattaaatgcagtttaagcttttaggcacctataccagaaggcctctagacacctcatcaacagcagcccagactgacaaaaaagagagctaattatattgtggttaacttttttcaaagaagaaataaacccatacaccaactatctttatccctgataaaagcagtacattaaatgtcccatccgacagtccatttgcacaggatcattttaaaacctggtgcccttgtcttaaatgtgccaccctgttacaaagtattgagacgtttgctttagcctctattttcacatccccttggctttctgaaaactgatctctagggacctaatttttccatatatattcatagccccrggaccagttttattgatttatttatgtgcacctatagtgttagaagaaagtacttagttgcttttgagtgatgcttttcacttttaaaagtttgagagggttttagacatggaaactccaaaatagcttaatctaaaaacttgagccagcacagac

SEQ ID NO: 418973 - DNA, 577 bp, Homo sapiens
gtagctgcaagcaattcttttttatctcttttcatttatgtagcctgacattgagtaataataataattaaatgcagtttaagcttttaggcacctataccagaaggcctctagacacctcatcaacagcagcccagactgacaaaaaagagagctaattatattgtggttaacttttttcaaagaagaaataaacccatacaccaactatctttatccctgataaaagcagtacattaaatgtcccatccgacagtccatttgcacaggatcattttaaaacctggtgcccttgtcttaaatgtgccaccctgttacaaagtattgagacgtttgctttagcctctattttcacatccccttggctttctgaaaactgatctctagggacctaatttttccatatatattcatagccccgggaccagttttattgatttatttatgtgyacctatagtgttagaagaaagtacttagttgcttttgagtgatgcttttcacttttaaaagtttgagagggttttagacatggaaactccaaaatagcttaatctaaaaacttgagccagcacagac

SEQ ID NO: 418974 - DNA, 519 bp, Homo sapiens
ttcctttcccctctgccagcttggtacaggtaagcatggtgaccttggaaaccacagctaggagctggcagagccaggagactgaaagagcttgcatccctgagtcatcacatggagggaagccacctaccattcagaagcaccattttgggattctgtgtaagaaataaatgtgtcccatgtttcagccattgcacaattttgggtttatgtgattacataaacagaatgattacagcagctaggattaccttaaccagtgtaataaataggctttactattgctgaaaaagtacaaaaactacgattcttggttttcttaggcaaatgatttttttctactttgggcacaaatatgtccactttaaaattttaakttttgttgtagggtatttaaagaccactcccatttccagaaatgttctcactcagccactccccaactccctgccccctcaatgaggggaagcagaaaaggttttggttgttcttcctagaagttgtcatactgagatatta

SEQ ID NO: 418975 - DNA, 514 bp, Homo sapiens
tcttgtggtccctgtggtaggagatggtggcaaaccccacatcatgtcactctaaagcccaggtgccgcattgcttctattaatgatgctttcctgtctgtatctcctgagtttcccttttgttaaagaacggtcaaggaatcaattctagttctgcaaatgccaccctgtaaccctctcaatacctcatctataaagtggaagcacgattacaggtccmctttgcctcccagggttcgggaacaggtctaagaagttaagagctgataatatgcaaaggtgcagtgggcctcattagtaataggggtgttagggtattttttaggatttctactgagacagataaaatgaaccacagcagttttacagcttttaaagtcagtctgaccaaaatattgtacatgctttgctgacttcttactgctacacagcccacaaggaaagccctctgcaaccgaattgaattattattctataatgaagtaaccagtgaatctatcgttacattccatat

SEQ ID NO: 418976 - DNA, 514 bp, Homo sapiens
tcttgtggtccctgtggtaggagatggtggcaaaccccacatcatgtcactctaaagcccaggtgccgcattgcttctattaatgatgctttcctgtctgtatctcctgagtttcccttttgttaaagaacggtcaaggaatcaattctagttctgcaaatgccaccctgtaaccctctcaatacctcatctataaagtggaagcacgattacaggtcccctttgcctcccagggttcgggaacaggtctaagaagttaagagctgataatatgcaaaggtgcagtgggcctcattagtaataggggtgttagggtwttttttaggatttctactgagacagataaaatgaaccacagcagttttacagcttttaaagtcagtctgaccaaaatattgtacatgctttgctgacttcttactgctacacagcccacaaggaaagccctctgcaaccgaattgaattattattctataatgaagtaaccagtgaatctatcgttacattccatat

SEQ ID NO: 418977 - DNA, 570 bp, Homo sapiens
tccccaggtgatgctgccactgctggtccatgaaccacactttgggtagcgaagctttagggacggtttctgtctcccagcaggttggattagtgtaggaggagactagaatcaaaggaacctattagaaaccaacatacctcatcctggctaaacagatctgaatagttgtttttttcamaatcaaggcttgatttattcacacatctatacatttgcgcatcaagaactaacacataccttatcctggctgaacagatctgaagagctatttttttaaaaagcaaggcttgctttattacattcatgtatttcattgtgagcacaagtaatggtctcctttgcagatacaatgcttactgaggccagtgaattcttaggagaataaacatagttgtctgtgactaaatgcaggcttcagaaatcataaagtagatttggtcaaaattctgtccctggaatttgtctatggtcatcaaaaaggctaaaggaaatggaaacttattttgaatgtgaaaagcaaatttatatcaggagaattagagctatagggtgtggcaacagtagcca

SEQ ID NO: 418978 - DNA, 578 bp, Homo sapiens
ctgctttctcatgataacgaggtggctgcaacagctccagataacacctgttcaaaggcagaaggaagtttcttcccacatacgtgtgtgtgtgtgtttcaagagcgagaaacccagttcctatcacattttattggtcagaatgatcacctggggcttgtggtcgcatgagaccttgtcacatgatgatgtcacatgrcaatgtcttaaccatttcttagcaagggagatggtattaccatgatctgtttaggttcaccaagattcacccttaagaactgaagaagggccctgtcgctagacattcagactctaaaaggctgaacaccaaaacagaatcatatcttgggatgtgtaagagagttgggaatagacaaccaatggtgctgtctctgaaccccatgtctttttgttgctgcataaaaagccagaaaatcatgtttccgatgagtttggagttaaggggaggggctatggttgtttgctcagaaaaaagccatctcatcccccctccctggcatctttctgatctgtcctgttctgtaggtggaatgttcccacctttgtttgcctgttca

SEQ ID NO: 418979 - DNA, 600 bp, Homo sapiens
gtggtcagcgtgagggagccagtcattgggccagttcagggaggaaaagcaggccagacctccccgggttgtagaattgcttcgcctccacctcctcccgctctgtccccacctcctctgcccctcccatttttgggttttcgggccaaggattccattccgcgacttcaccggcttgtagccagtgaccttcagcacacagcaggggaataaaaatgagaaagaaaatcgcctgtttggagaggtgtacaatgacctctttattgagaggccctttgcttttctctaagtcaataacttattgacttatttttgctgcatggaaatgggcaccttgcaaatgtgcrtggcatttgctccagagctgtgctgtcatacctatgagagcagagcagcgggtgggtcgtgatgacacactcaggctgcagagtcccagccttgtcacttcctatctgtgtacgcctgaagcagctgcaccactccctgcacctccttttcatcatctgtaaaatgggggtgtgaggctgtccaccccgcacgcccaccgtgaagatccaatgagatcattactcgcccagtgacaacacagtggctggcact

SEQ ID NO: 418980 - DNA, 540 bp, Homo sapiens
aattaaagtaaaaccagggaactgcatagtacaatcttgaatcttataattttatctagaaacatctggttaacaggaaaaagtggatcctcactggcagggtgcgcaggaagaaaagaagcatcattcttattatgaataggaataaaataatrggccagacacagtggctcacacctgcaatcgcagcaatttgggaggctgaagcaggaagattacttgaggcaagaccagcctaggcaccatgcgagacccccatctctacaaaacattttaaaaaatcaaccaggtgtggtggcacatgcttgtggtccaaactactgaggaggctgaggtgggaggatagcttgagctcaggaggttgaggtggccgtaagctatgattgtaccactgcgctccagcctgggtgacagagcaaaaccctgtctcaaataaaggaaagaaaataatcacgtctaatatttactaagagcctctgctgtaccaggaatgggcacccttcatgtgcacctcttcatttgtattattagtgctgttcc

SEQ ID NO: 418981 - DNA, 529 bp, Homo sapiens
aatggaacaaaatagaaaattcaaaaatagacctatacatacatggtcaattgacttttgcaaacagtgccaaggtaatttartggggcaaagggtagactattcaacaaatggtactggaacaactgcatatcaatatggaagtaaaacgaacttctacctttatcttaaacacataaaaaaactttttcaaaatggagcacaaacctaagtgtaaaagtgaaactgtaaaacttctgggatgtaaatattgcttactggaacaccaaaagcataaaccatacaagaaaaaattaacaaactggacttcatcactagtaagaatgtttgctcttcaaaagaaacatttaagaaactgaaaagacaaatcacagattgggagaaaatattcctaatacacataactttcaaaggacttgtatctagactatataaagaactcttataactcaataagaagaaagacaatccagttgaaaaactggatgaacatttttaaccaatgtttcacaaaagaagatatacagat

SEQ ID NO: 418982 - DNA, 533 bp, Homo sapiens
  misc_feature (1)...(533): n = A,T,C or G
tcctgacaccaggtgagaggtgtccaggtatcctggtaaccaggtctgaggctgtggaaattaaataagaacacgtgtgaagcgccagcacagtgccygggacccagtaaacctctggaactgctggcccttccccaaaacaacttgccattgttcccagcacaaagaaatgataaaggcttgagatgatgtatatgctaattaccctgatttgatcattacacattgtgtacatgtatcaaaatatcacactgtacctcatcaatatgtacaattattatgtatcaattaaaataataataaaagaaagaaaaaattggaaacaacccaaatgttcttcaattgctgaatagatcaactgtgggtttaaaaaaatcccaaaacttggtcatctagtggaatcctgtgactgtttaaaatgcaataatagggtagaggttccctgaaagcagaagccctctataagtacaagttgttattgctgtctttattattatcctaaagtgcgttnnnnnnnnnnnnnnnnnnnnnnn

SEQ ID NO: 418983 - DNA, 613 bp, Homo sapiens
atcctggcatgcttgtagcatcctgcgcacgcctgtagcctcaactacttgggaggctgaggtgggaggatcagttgagcctgacaggaggaggctgcagtcagccaagatcatgccactgcactccagcctgggcaacagagcgagaccctgcctcagraaaaaaaaattgtttttgtcgagacagggtctctctgtgtttcccatgctggtctcgaatgcctggcctcaaacaatccccctgcctcggcctcccaaagtgttgggatgacatctgtgagccaccacacttggcccccaaacactgctatttcccatggtaaattaataaattggtgtcctgattttcatatcagtctcccaatgggttcccaatggattccttctggatacgtggacaaaattgagttacgagactaagaaagctcagtgtcagaccctagaacatggtgagcccatcaaggtcaggccacctggtcattccttgagcaccagtcaactggcctccctgtggaatggccatcttgtcaccatcacaattacatctcgagaatgtgagtgctcagagcatggcctcttctcaggctggcaagtcttgaccagagggcattca

SEQ ID NO: 418984 - DNA, 613 bp, Homo sapiens
atcctggcatgcttgtagcatcctgcgcacgcctgtagcctcaactacttgggaggctgaggtgggaggatcagttgagcctgacaggaggaggctgcagtcagccaagatcatgccactgcactccagcctgggcaacagagcgagaccctgcctcaggaaaaaaaaattgtttttgtcgagacagggtctctctgtgtttcccatgctggtctcgaatgcctggcctcaarcaatccccctgcctcggcctcccaaagtgttgggatgacatctgtgagccaccacacttggcccccaaacactgctatttcccatggtaaattaataaattggtgtcctgattttcatatcagtctcccaatgggttcccaatggattccttctggatacgtggacaaaattgagttacgagactaagaaagctcagtgtcagaccctagaacatggtgagcccatcaaggtcaggccacctggtcattccttgagcaccagtcaactggcctccctgtggaatggccatcttgtcaccatcacaattacatctcgagaatgtgagtgctcagagcatggcctcttctcaggctggcaagtcttgaccagagggcattca

SEQ ID NO: 418985 - DNA, 613 bp, Homo sapiens
atcctggcatgcttgtagcatcctgcgcacgcctgtagcctcaactacttgggaggctgaggtgggaggatcagttgagcctgacaggaggaggctgcagtcagccaagatcatgccactgcactccagcctgggcaacagagcgagaccctgcctcaggaaaaaaaaattgtttttgtcgagacagggtctctctgtgtttcccatgctggtctcgaatgcctggcctcaaacaatccccctgcctcggcctcccaaagtgttgggatgacatctgtgagccaccacacttggcccccaarcactgctatttcccatggtaaattaataaattggtgtcctgattttcatatcagtctcccaatgggttcccaatggattccttctggatacgtggacaaaattgagttacgagactaagaaagctcagtgtcagaccctagaacatggtgagcccatcaaggtcaggccacctggtcattccttgagcaccagtcaactggcctccctgtggaatggccatcttgtcaccatcacaattacatctcgagaatgtgagtgctcagagcatggcctcttctcaggctggcaagtcttgaccagagggcattca

SEQ ID NO: 418986 - DNA, 546 bp, Homo sapiens
ggtagggaagtcaagctttgccctcagcccccaggaacactgagggaaataaatgaccttgaacttggcattgctgggcrtcctgtgcagggaacgtgtggactctagggtagtgctgagggtgaactagccagcccctacctaacagcctttgttctccccagggagtgctgatgaagttcaagaatcctcctcttcactccctcactgggccaagtggatgtagcatggggcctcaactgggggttgtcaaatcagaggggcctgatacaggtgaaccttcaggagccctggctacaatcactggctttgatatagtaattagtggagcccagcaagaggcaggcttttcaaatgactgtacttatatttgttataggattgttcaacataaagatttccagtataaaattatctaaatgaactctttatttaaaatgcacacacattcctttgaggaataaaagtgaaaggtcactcagaaccttaacttccaggggggtgtctgcaagggttccttttggtcacttgtaacacagctgttct

SEQ ID NO: 418987 - DNA, 431 bp, Homo sapiens
tgtttaatgttacatcataagagtaacaaaagtaaggtaatatgtttaaaaaaattcatgtggaggtaacawgatatagagggatactttatgttttatttgtagaccttagacactcttacttttagaggcctgccacacactatatcaaaggtgcaataaagagaatttacattacatgccatataaaatatactgacacatatataatttttgaattgatttgatttacatttgactgcttgccataatttagtatttgtaaacctttgcttttttttttttatttaactgttttctttttctatttgagagcgaatattttataggtcactgaagaccctgaaggcctgaagcactttctccatgaagcgcaatggatgaaataggttggcagaaagagaggcttagaggaccaagcactacacaaa

SEQ ID NO: 418988 - DNA, 431 bp, Homo sapiens
tgtttaatgttacatcataagagtaacaaaagtaaggtaatatgtttaaaaaaattcatgtggaggtaacatgatatagagggatactttatgttttatttgtagaccttagacactcttacttttagaggcctgccacacactatatcaaaggtgcaataaagwgaatttacattacatgccatataaaatatactgacacatatataatttttgaattgatttgatttacatttgactgcttgccataatttagtatttgtaaacctttgcttttttttttttatttaactgttttctttttctatttgagagcgaatattttataggtcactgaagaccctgaaggcctgaagcactttctccatgaagcgcaatggatgaaataggttggcagaaagagaggcttagaggaccaagcactacacaaa

SEQ ID NO: 418989 - DNA, 619 bp, Homo sapiens
gaaatcttcatactgttttccataatgtctgtaataatttacattctcaccaacaatgtccaagggttcccttttctccacatcctcaccaacacttgttatcttttgctattttgataatatacatcctaatgcatgaggtgatgtctcatggttgtttgaacttgctttccctgatgttttgtgatgtcgagcattttttcttgtaattggccattcgtatgtattcttttgagaaatgtctagtcaggtcctttgcccgttttctttgtttgtttttctgctatttagtttttgagtttctaacatattttgcatattaatcccttatcaattgtgtggtttgcaaatattttctccactccctaggttgtctcttccctctgtgatgttccctttgctgtgcagaagctttttastttggtgcaattctatttgcctctttttgctttgttggctgtgcttataaggtcatatccagaaaatcattgtctagtccaatatcaagaagctattttgcccatgttttcttctagtacatttatgatttcaggacttacgtttaaatctttaatctgtcttgagttgatttgtgtgtatgttgtaaaataaggatcca

SEQ ID NO: 418990 - DNA, 553 bp, Homo sapiens
ttcacattaagtggaataatgaaagactataaatagtcttttctcaattcaggtcaattttttgctaccaaattatttactacaaagttacaaaactgaggcccatccaaggcttcaaggctgatgcatctgtcccctcctctctcccacacccccatacatacgagatgacaaattcttcgtgagatgaaagcatttccacattgttgtcaccctagaagccaacccagtgcctagcacattttctaatatatgtgtccttatataactgccaccattgtgacaaatacattaaaatttggtaaattktaatatttttaaaatatttgttttttaaaaaatagattttgctttatatagttctaaaatattttttagaggttaagaattataagataaatcaaacacactatcagatctatccaccctctcccacttataccttcccaccacatgagaccaaactttccagatttgaatgacataatttcagacatcataagatactttaattcatattggaaaaatcgtgtaatttctatgtaacctttca

SEQ ID NO: 418991 - DNA, 350 bp, Homo sapiens
tacggtataatattacccagagctaggtgtttatatagcctcagctgactccaattcctgaggcctgtaggaccaactgcttttgaaatacaagcaatgtgagcctcaaggatgaaggacccagagagtatttggaactcctctgtggttgttgcttttaatgttacacggtctggcctttaggaaccawttacgatttaggttataagagagaaggagaatgtgaaccaattctacccagtaataatcacccacaccaaaaactggtcttaaatcagagcctatcacagctgtgcagcacccaaattgtagtgtggcttccccagccacacctctcctctaccctgacg

SEQ ID NO: 418992 - DNA, 584 bp, Homo sapiens
tgagtttagacatttttggaaaaagtcccaagaaagtgatgtcatattcttcccagtgcaccatattagtaaatgtagggtgctgatatgtcttattactggttacattaactttgaatacttggtaatgtggtgtctgccatgctttcctatggtagagtcactgtttttccctttatagttgggaaataacttaggagagataattgagactatgctaagtttctgcttttcctcaaacttttgctcactgattttagtatccattgccttcaataattatttctgtgctacttgcctaatgattttctgttttcctcattccttctatatttattaattggaattgttctgtaagaaaaagatgtcctcccccacaatttacttatttattcaattatttattccagtagggacacatgtatatttattttgttacgtagttaaaattcatcattatactcattgttattattttgtcactcaaattgttctagctttgaccrctaagagctccttcaggcttgcacctgtacctttttaatattggctcataatttttcaagcagatttttatttgctag

SEQ ID NO: 418993 - DNA, 532 bp, Homo sapiens
taaaaactgtgatgatgcacaaactagcattgaaaaatttaaaaaatgcattgaaaataacaagttagttgcatatagcaagtaagtagaaaatgattaaaaactaaatttagttacatgttactctttcctttttaaattatttaagaaaatacactaaaatgttaatcttttctctgccagggaaaatgcctctttcgtcacagtaattgacccaatacagatacagccataataaaacaattttgtttcctgagacccattttctttctctttgtgggtactttacagtcacggattttgggttaaatcacaccattttattagtgacaagaagktaatttgcatgctttcttccttccttttttttagggtaaaaagtatacacatatagaaattaaatataaatcctcccccttcatcatgcagctgtcatgaaatgcctctgaaggattgtaggtgtgtagctctaaatttcgtggtgctacaggattcatatacatgtattctccattccttcagaaattgctgg

SEQ ID NO: 418994 - DNA, 578 bp, Homo sapiens
tttaatatttgataggacaagcaatgtgttcccttcccttsttacttttccttttcatatctgagattttctacatgaggaagtcagaccgccctccttttctccagaaagcacccaggaagctattttttgacaataaagattacttttttttcttggattttgcacaaaaatctgtaagtgcaaagttactgctataataactagttagcattggaatagaaggagagtttcaggctggagacatcatggcagttgaaaaaatactctgttcttcttttattcttctctgttgcctttgcttcagcagatggtagaaggactcagtggtaataatggagacaaaaaaatcaatagaagcatccaaattatctgttatatatacttcactataggctaattacgatctttactattaaagaaacatgtaagcactgtgtaggttaggaaaacaaaataacgtacagttttatattataatgggaaaaaaatctttttcattggctgaattattaacagaatgattaaaatggttatgcttagcattcatccatctacaaatgaatggatgaagaaat

SEQ ID NO: 418995 - DNA, 578 bp, Homo sapiens
tttaatatttgataggacaagcaatgtgttcccttcccttcttacttttccttttcatatctgagattttctacatgaggaagtcagaccgccctccttttctccagaaagcacccaggaagctattttttgacaataaagattacttttttttcttggattttgcacaaaaatctgtaagtgcaaagttactgctataataactagttagcattggaatagaaggagagtttcaggctggagacatcatggcagttgaaaaaatactctgttcttcttttattcttctctgttgcctttgcttcagcagatggtagaaggactcagtggtaataatggagacaaaaaaatcaatagaagcatccaaattatctgttatatatacttcactataggctaattacgatctttactattaaagaaacatgtaagcactgtgtaggttaggaaaacaaaataacgtacagttttatattataatgggaaaaaaatctttttcattggctgarttattaacagaatgattaaaatggttatgcttagcattcatccatctacaaatgaatggatgaagaaat

SEQ ID NO: 418996 - DNA, 559 bp, Homo sapiens
taccataagttcaatactacgttgtaatataataatgcttaaactgatttatatatctacaatggactactattcaggtattaaaaagctatgaaaaaaagaattaaaaccagccaggcatggtgggtcatgcctgtaatcccagcactttgggaggtcgacgcaagaggatcacttgtgttcaggagttcgagacaagcctaagcaaaatagtgagacctcgtctctacaaaaaatcaaaaattagccaggcatggtgacatgtgcctgtggtccccgatactcragagactgaggtggaaggatcgcttcagtccaggaggtcaaggctgtagtcagccgtgattgcaccactgcactcagcttgggtgacagagtgaaaccctataaaacaaaacaaaaaaaaaaacaaaaaaataaaatcctgtcacttgtgacaacatggatgaatttggaggatattatgttaattgaaattaaccaggcacagaaaaacaaatactgcatgttctcaccccctttttagatatggactctaaaaaagttgatctcatagagg

SEQ ID NO: 418997 - DNA, 551 bp, Homo sapiens
ttacaaaacaaaaatgatgactatgtgaggtaatacgttgttaattagccggatttagtaaattcacaatgtatgtatacttcaaaatatcatgctgtatacagtaaatacaaataaattttgytgatgtataaaaagaaaacaatttttcgatgcttatgtaaaaaataataaataaataaagtcaatacatcttatgttgcaccatgaaggaataggagagaaaataaaaatatttgcttaatatatgtgtaaatacacacaaacattttcataagaacatatggaggaaatactcatgacaattacagtattcatttctgagataactggtatttataactaccttattttactatccactctgtatttattttgacttcaccaagcacctaagcaggtcatggtttcttcaccttgtggggtaacccaaatccttattcctgaaatgtgtggactattaggaagtaatttctgccttgactgggtggttgtggttttctatggaccataatcacaaggtatgataatactaagactcctcgaaaaat

SEQ ID NO: 418998 - DNA, 551 bp, Homo sapiens
ttacaaaacaaaaatgatgactatgtgaggtaatacgttgttaattagccggatttagtaaattcacaatgtatgtatacttcaaaatatcatgctgtatacagtaaatacaaataaattttgttgatgtataaaaagaaaacaatttttcgatgcttatgtaaaaaataataaataaataaagtcaatacatcttatgttgyaccatgaaggaataggagagaaaataaaaatatttgcttaatatatgtgtaaatacacacaaacattttcataagaacatatggaggaaatactcatgacaattacagtattcatttctgagataactggtatttataactaccttattttactatccactctgtatttattttgacttcaccaagcacctaagcaggtcatggtttcttcaccttgtggggtaacccaaatccttattcctgaaatgtgtggactattaggaagtaatttctgccttgactgggtggttgtggttttctatggaccataatcacaaggtatgataatactaagactcctcgaaaaat

SEQ ID NO: 418999 - DNA, 551 bp, Homo sapiens
ttacaaaacaaaaatgatgactatgtgaggtaatacgttgttaattagccggatttagtaaattcacaatgtatgtatacttcaaaatatcatgctgtatacagtaaatacaaataaattttgttgatgtataaaaagaaaacaatttttcgatgcttatgtaaaaaataataaataaataaagtcaatacatcttatgttgcaccatgaaggaataggagagaaaataaaaatatttgcttaatatatgtgtaaatayacacaaacattttcataagaacatatggaggaaatactcatgacaattacagtattcatttctgagataactggtatttataactaccttattttactatccactctgtatttattttgacttcaccaagcacctaagcaggtcatggtttcttcaccttgtggggtaacccaaatccttattcctgaaatgtgtggactattaggaagtaatttctgccttgactgggtggttgtggttttctatggaccataatcacaaggtatgataatactaagactcctcgaaaaat

SEQ ID NO: 419000 - DNA, 558 bp, Homo sapiens
tcatatattggacactgattcagagcatatgctatcttctaaacaatcttaacccagccctacaagggattgtcacctagctgacactgtaacattgcttagtcaaaccagctgctttaggatggcgggtaatatggtaagaccactgaattccatgagcataggcccattgctgcattttgttagttattcagtgagtttcatgatgaaaaacaattctgaggagaataccatgatggtggataaggcatcctggaggtaaacaaatggtattgttgaaagaactattgcatgtattgmgacaaataaatatccaaagtagttgtcagattgctgccccttccatgatgaaagcagtccattctaatcaatttgacaccaggtagctggctgattatcccaccgaatggtttcatactggaggctcagggttgatttccactgctggaagattgagcactcagcagtggccataacctggccattattggtgagtggtattccacattgttgagcccatgcctaacctccatccctgccaccatggctattttgttc

SEQ ID NO: 419001 - DNA, 558 bp, Homo sapiens
tcatatattggacactgattcagagcatatgctatcttctaaacaatcttaacccagccctacaagggattgtcacctagctgacactgtaacattgcttagtcaaaccagctgctttaggatggcgggtaatatggtaagaccactgaattccatgagcataggcccattgctgcattttgttagttattcagtgagtttcatgatgaaaaacaattctgaggagaataccatgatggtggataaggcatcctggaggtaaacaaatggtattgttgaaagaactattgcatgtattgagacaaatmaatatccaaagtagttgtcagattgctgccccttccatgatgaaagcagtccattctaatcaatttgacaccaggtagctggctgattatcccaccgaatggtttcatactggaggctcagggttgatttccactgctggaagattgagcactcagcagtggccataacctggccattattggtgagtggtattccacattgttgagcccatgcctaacctccatccctgccaccatggctattttgttc

SEQ ID NO: 419002 - DNA, 558 bp, Homo sapiens
tcatatattggacactgattcagagcatatgctatcttctaaacaatcttaacccagccctacaagggattgtcacctagctgacactgtaacattgcttagtcaaaccagctgctttaggatggcgggtaatatggtaagaccactgaattccatgagcataggcccattgctgcattttgttagttattcagtgagtttcatgatgaaaaacaattctgaggagaataccatgatggtggataaggcatcctggaggtaaacaaatggtattgttgaaagaactattgcatgtattgagacaaataaatatccaaagtagttgtcagattgctgccccttccatgatgaaagcagtccattctaatcaatttgacaccaggtagctggctgattatcccaccgaatggtttcatactggaggctcagggttgatttccactgctggaagattgagcactcagcagtggccatarcctggccattattggtgagtggtattccacattgttgagcccatgcctaacctccatccctgccaccatggctattttgttc

SEQ ID NO: 419003 - DNA, 536 bp, Homo sapiens
attgacagcagagagatggaaaccataataaagattcaaagggaattactagcaawgaaaagcacagtaacaaaaataaagaatgcctcagaagggctcattagtagacttaatacatttaaggaaagaatcaatcaagttgaagatggggcagtacaaattgcccagattaagatgtaaaaagaaaaaggaatgagagaaaaaaagggagaacataatttccaagaactgtaggacaatagcaaaaggtgcaacatacatgtcattggaatgccagaagaaggagaaaaacagaaaggggcagaaaaagtatttaaagaaataaaagtcaaagattttccaaaattaataacagacaccaaaccacaaacccaagagtttcagagaaaacaaaacagaaacaaagtaaaaaaaaaattacttagacataccacatatacattgccaaaaaccaaagacaaagagaaattttgaaggcagtcagagaaggaagcacctaacctatggagaaacaataataaaaatgaccagaaacc

SEQ ID NO: 419004 - DNA, 536 bp, Homo sapiens
attgacagcagagagatggaaaccataataaagattcaaagggaattactagcaatgaaaagcacagtaacaaaaataaagaatgcctcagaagggctcattagtagacttaatacatttaaggaaagaatcaatcaagttgaagatggggcagtacaaattgcccagattaagatgtaaaaagaaaaaggaatgagagaaaaaargggagaacataatttccaagaactgtaggacaatagcaaaaggtgcaacatacatgtcattggaatgccagaagaaggagaaaaacagaaaggggcagaaaaagtatttaaagaaataaaagtcaaagattttccaaaattaataacagacaccaaaccacaaacccaagagtttcagagaaaacaaaacagaaacaaagtaaaaaaaaaattacttagacataccacatatacattgccaaaaaccaaagacaaagagaaattttgaaggcagtcagagaaggaagcacctaacctatggagaaacaataataaaaatgaccagaaacc

SEQ ID NO: 419005 - DNA, 536 bp, Homo sapiens
attgacagcagagagatggaaaccataataaagattcaaagggaattactagcaatgaaaagcacagtaacaaaaataaagaatgcctcagaagggctcattagtagacttaatacatttaaggaaagaatcaatcaagttgaagatggggcagtacaaattgcccagattaagatgtaaaaagaaaaaggaatgagagaaaaaaagggagaacataatttccaagaactgtaggacaatagcaaaaggtgcaacrtacatgtcattggaatgccagaagaaggagaaaaacagaaaggggcagaaaaagtatttaaagaaataaaagtcaaagattttccaaaattaataacagacaccaaaccacaaacccaagagtttcagagaaaacaaaacagaaacaaagtaaaaaaaaaattacttagacataccacatatacattgccaaaaaccaaagacaaagagaaattttgaaggcagtcagagaaggaagcacctaacctatggagaaacaataataaaaatgaccagaaacc

SEQ ID NO: 419006 - DNA, 453 bp, Homo sapiens
atccagagaaacagaaacagagggacctcactgcaagcagaactgcactacaataaattttaaaagaacagttcaggcagaagattaatattggtcagaaacttaaatttactttttaaaaaaatgtcagaaaagagtaaatgagtaaaacaaaatgtttatttttcttatttttaatttatctaaaaatgaatgtctgtgaaaagccatactaaaaatatagtgtatggtacagaatatgtaaaactaaaatgagtgacaacaacatcacaygagactggagggagaaattgaaaatattttgttataagtaactgttctacatgttaattgataaagtattatttgaaggtatattattttattgtttattataaatcttaaaccaatcactagaaatgtttagaaaataaatgtcatattaaataagacatgataataataatagccatt

SEQ ID NO: 419007 - DNA, 453 bp, Homo sapiens
atccagagaaacagaaacagagggacctcactgcaagcagaactgcactacaataaattttaaaagaacagttcaggcagaagattaatattggtcagaaacttaaatttactttttaaaaaaatgtcagaaaagagtaaatgagtaaaacaaaatgtttatttttcttatttttaatttatctaaaaatgaatgtctgtgaaaagccatactaaaaatatagtgtatggtacagaatatgtaaaactaaaatgagtgacaacaacatcacacgrgactggagggagaaattgaaaatattttgttataagtaactgttctacatgttaattgataaagtattatttgaaggtatattattttattgtttattataaatcttaaaccaatcactagaaatgtttagaaaataaatgtcatattaaataagacatgataataataatagccatt

SEQ ID NO: 419008 - DNA, 611 bp, Homo sapiens
cttgaaaatgccctgcacattttaagagaatgttcctagatattcacaataatcagtttaagttatttagaggttgtctctcttagtaacaactacctagcacagttgccgcctttagaataatttctagtatctctggacttcagatckctgttcagttattgatttggtaattgcaaagagatgagcatcagggtactgagaaggcataagttcagatgaaaggggatacaattattgataagccaaagaaagaaattgataaattccggatacagtaataacaactgtcactcaattagttcattcatgaatttgttcattcatttattcattgttccagcaataatgtctctgttcctactatgtacctgccactgtttcaggagcagagagagagagcagtgaccaaaacaggaaggtgagacacatgtgactcaaagccaatgtgttcctttgtagagcatactaaaatactaatcttctaaagatgcatatatgaaaagtcaagttcaaggtattttatcatattatttactagtccaaacctttttttatgtataaaccaacaacagtctttaacctaagttaaaatttcagcagtaccaggc

SEQ ID NO: 419009 - DNA, 560 bp, Homo sapiens
tgagcttgtattattgtgtctagtaagaagtcagtcattgttgtsttaaaatggtttattgcctttataaaaatataaatatgcaataattccttaatggccagactaattgtctatgttataaagtgagattgcatagaaaacagacctaatgtgcttaagcctgtatctctgcatgaagtgattggaaggaaccagaatgttgttgtcatttgcctttggcaaggtattatgaataagaaatgagcacaggtaggagctgattgggttttaaacaataatcatatggaatacatagaaacttcaatgttcaaaggcatggcaactgaaaaggatgagtcctgctgggcccaattacaaacattgtctaaaatggttttgagtaacaatacccagtgaatcagaccattctcatgctgctaataaagacatacctgagactgggtaatttataaagaaaaagaagttgaatgggctcacagttgcacatggctggggaggctcacaatcatggcagaaggcaaaggaggagcaaaggcacgtcttacatggcagcaggc

SEQ ID NO: 419010 - DNA, 560 bp, Homo sapiens
tgagcttgtattattgtgtctagtaagaagtcagtcattgttgtcttaaaatggtttattgcctttataaaaatataaatatgcaataattccttaatggccagactaattgtctatgttataaagtgagattgcatagaaaacagacctaatgtgcttaagcctgtatctctgcatgaagtgattggaaggaaccagaatgttgttgtcatttgcctttggcaaggtattatgaataagaaatgagcacaggtaggagctgattgggttttaaacaataatcatatggaatacatagaaacttcaatgttcaaaggcatggcaactgaaaaggatgagtcctgctgggcccaattacaaacaytgtctaaaatggttttgagtaacaatacccagtgaatcagaccattctcatgctgctaataaagacatacctgagactgggtaatttataaagaaaaagaagttgaatgggctcacagttgcacatggctggggaggctcacaatcatggcagaaggcaaaggaggagcaaaggcacgtcttacatggcagcaggc

SEQ ID NO: 419011 - DNA, 607 bp, Homo sapiens
ctcacaattctgaaggctgtaagtccaatgtcaaagtgttgacaaggccaacctgtaagggagactcctttctagctgcctagcttctggtggtggctggcaaacggctggcattttttgccttgcagctgcagcacctcagtcactactgctgtcatcacacatattctcttcttgcctgtcactctgtccttataaaaggacgccagtcacattggggttgtggcctaccctactcccgtatggcctcatctcaccttaactgattacatcttcaatgatactatttccaaataagctcatattctaaaatactgggaattaggacttcagtataccttttggaggcaaaatttaacccataaaaacttgctatgtttttaaattaatagatatacacaagaaaaagcataatgacttggtttgagttatgttagcttacaatgttatttctccattcgttttgataatgaccagaaaccaagctgaaaaatccattgtagaagtttagaattcaagtctcagtattgttttatatctcaactgaaatgtcctttccctgttacatcwccccaccaaaattcaatatgaaccatagtactggaaa

SEQ ID NO: 419012 - DNA, 539 bp, Homo sapiens
ataattaaaagagacaaaattcacattttaagcaatatcacactgtcaccactgaaactctataagcagataagtagggctgataggaggacagattgaataattagcatatttaaacccatacastcacatgactttaaatcattaataagtaaacaggaagtgagacctctactacaacatgccaattcttttatgttctgtttatatgaatctattacacatcataaatataacttatagctctgtttttttatgagtaaatgcagttaaacaatgggccaattctatcaaacagtatgtggttcaatagcataatagtaataatatggtaatataataatataatattaatagttaccattaaattatgacaatggtaattatagttgtttgcatgcacagatataaatataggtactaattttattttctattctctattacttgttttactaaaaaacattttttctgagaaaaaaagcaatgaatcttttttatctatctacccatccagtatctatttattttgcaaagaa

SEQ ID NO: 419013 - DNA, 539 bp, Homo sapiens
ataattaaaagagacaaaattcacattttaagcaatatcacactgtcaccactgaaactctataagcagataagtagggctgataggaggacagattgaataattagcatatttaaacccatacactcacatgactttaaatcattaataagtaaacaggaagtgagacctctactacaacatgccaattcttttatgttctgtttayatgaatctattacacatcataaatataacttatagctctgtttttttatgagtaaatgcagttaaacaatgggccaattctatcaaacagtatgtggttcaatagcataatagtaataatatggtaatataataatataatattaatagttaccattaaattatgacaatggtaattatagttgtttgcatgcacagatataaatataggtactaattttattttctattctctattacttgttttactaaaaaacattttttctgagaaaaaaagcaatgaatcttttttatctatctacccatccagtatctatttattttgcaaagaa

SEQ ID NO: 419014 - DNA, 539 bp, Homo sapiens
ataattaaaagagacaaaattcacattttaagcaatatcacactgtcaccactgaaactctataagcagataagtagggctgataggaggacagattgaataattagcatatttaaacccatacactcacatgactttaaatcattaataagtaaacaggaagtgagacctctactacaacatgccaattcttttatgttctgtttatatgaatctattacacatcataaatataacttatagctctgtttttttatgagtaaatgcagttaaacaatgggccaattctatcaaacagtatgtggttcaatagcataatagtaataatatggtaatataataatataatattaatagttaccattaaattatgacaatggtaattatagttgtttgcatgcacagatataaatatakgtactaattttattttctattctctattacttgttttactaaaaaacattttttctgagaaaaaaagcaatgaatcttttttatctatctacccatccagtatctatttattttgcaaagaa

SEQ ID NO: 419015 - DNA, 585 bp, Homo sapiens
ttaagtttgcacttcagcctgatgcttggcacagagtctacaacaacaaaaagataagagtctacaacaacaaaaagataaataagtacaaacaaaaacagtgaacccaggggtagcatgaaaatttgatttccagacttagcccatgatttgattaaaatatccagtttttaacaaaaaaaattaccatgtataaaaaaataggaaacttcagcccattcaaagaaaaaaaaataaatagaaactgtctctgaaaaaagatctgactgcagaactactgaacgatactttaactctcttaaagatgctccggaaactaaagatgtagagaaagtcaagaaaatgcagtatgaacaacagaaaaatatcaataaacagaaaacctaaaaaaaaaaagaaattttggagctgagaagtackataatcaaaataaaaaatatacaagagcaattcaaaggcaaatctgaataggcagaaaaaagaatctaatttacttgtgggataccatcaagctgaccaacatattcactgcgagaatcccagaagataacgagagaaggcagagaaaatatttgaagatgtaat

SEQ ID NO: 419016 - DNA, 452 bp, Homo sapiens
gtgagacattgttgcgactgtgtgtcatttatattgagcttcaaaagagaagaaaattgtctctgtgttcctgtctagacatccataggtaaaggagaataattatttaaattatgatataatttacataattacataataattagatgtggaaactaaccaggtactttcttgacatacagcagtcaaaactttgttgaactagcattttgtgacttaaatactctgattgtttaaaaaaaacagggaagctggaaattggaatgagaaaggggtttatgagagatcccattaggtccttacagcatattttcctctaacccacctttttatctctcagcacactctgacccagagackttcactggaaagtggggaagagttgggggatgggtgtgatgggcaaatgtttcccacagcttgttctgtcattgtattataaataagagcct

SEQ ID NO: 419017 - DNA, 535 bp, Homo sapiens
cacatttcttgactaaaaatccatccccaagaaattaaaacaacaagctttgaatctggtcatatgtaaaaatcaggaagtcactatactttactagcatttcagaaaaaaaaaaaattctgggatggtaaagtttcaagctgaaacattgcaagttttcaaatttttaactgtttctgagttgcaacttgatttcagacatttctgaattaaatttcagtaytaaaatattgtaaaagttaataaatatgtaacattctatttattgaaaatgatttctgattaatttctctgtggtataataaacttaagaaaagtcagtattctatattctaaaataattttatattatgtttgtgttttttaaaaactgtgccctaattaaaaacagtgaaaaatagctgtgatgaatatttggtataaaatgataccagtgacattgcccactatcaaattgagaatgtcatcatgtttggcagcaaattggcccaattctgtatgtcatgccagtaatgtaccaattaaaatctcatgt

SEQ ID NO: 419018 - DNA, 591 bp, Homo sapiens
tggtaagtaacatgtatattttttttcctccatatgtttctgtatgtaaaaattacttttattctatataactgcaactataaggtactctcaccacatacacacaggagaaaatcaactatgtgagagaatgagataatttgtttgactgaagtaatcacttcactgtgtatatctatatcaaaacatcatgttgcacaatttaaacttatacactaaaaaacytaaaaaatgcaatcaatttcctttcataagagaaaggaattctttaaacgtaccttgaaagaaaaatttttttaaattttcttgaaactaattctcttttttcataaagaataaataagccaaattttaaaaagttctataatctaaacatatactgaagaataatgctgaaaaagaataacttcctgattcaagcaaaaaccattgtatttaaatcatctcaatattccctgcaaaaataaatataaaataaatataaatagattgtcaaaataaaattatatattgtttagaataacatttctagtttaacatttcattttttaatttagtaggtgaaatagtatggagaaatatgttggaaga

SEQ ID NO: 419019 - DNA, 610 bp, Homo sapiens
ctgttattgataatcactcttttctctttgtttggaatagggtctactgcatagaaaacattcaaaaatatttgtagagtaaatgagcaagtgtcaaatacatgaatgaattgcatggcacatagtacttaacaggaaagagacagaaaagcgttgatatgaagaatttctaaaatcctcatatgaaatgagtaaaattaaggataaatgacactggaaaaccaaaatggtaagtgagggtgggtccatggggaattgtaaataagagactcattttaacttcaggttatgaaggtaggttatgatgcatactttttttgttgttgtccttacttctttcattgttgatttgaagcagtttgctaaactctgtaggctgaaaactgaaagaatgtacttgtgaaagactctgrccaatattttggagcagtgattctgacattatccttcagctgattaggaaagattctttgaataaggaaatattttcatatatcaacaatgctaatttaagaggctgaatcaacaggcctgtggggaaatgaaaaagaaacctatttttttcttgtaatttactgttcacacattctttgttatgttttaaaatcca

SEQ ID NO: 419020 - DNA, 355 bp, Homo sapiens
caatagactattatcttccttatgcattttctaaatcatatataatgatttaaatctaaattataacatcatctgatacccaaggtaattgtayttaaaagtttggaaggtgaaaggacataaatggaagtcaggttttcacgtttcatttgaaatggcaaatcctgatacaagtagactgtaataagcccaattcgtatgttgtaataccagagaattactaaaggaactctacgaagagattaactcaaaaattttataaggaaataaaaaaggaatcttaaaaaatgttcaagcaacccacagaaaagcaagaaaagagaaatgagaaacagagaaaaacagaaagcaaatg

SEQ ID NO: 419021 - DNA, 550 bp, Homo sapiens
tgagtcagtttggtcaattttgaaagtatggatttgatgcacaatataattactaagttctgatttgaaaattttagctatctctgcactgtaaaatataactcaacagcgcacttattgtcagctactccgagtkacaactgctaaggatatttataaaaaatatgctgcaagtgtccctgcatgggcctatttatctgaaggcatcctgaaaaatgttaataatgaaatacgactgtttcatctgaatcgagtttgcatagtttattagacattgcagaatattttattgcaaaatgaagtgtgattgtcactaatgttataactgagagtgctctggtttaaagtgtctgattcccttatcccaggattgggatttgttttgtaatctttatgaaaagaatagcattttcataaaataaatttaactagattttcttgcatttgagacaaccaatagagtaccatttttgatccttataacatgaacgtgcagaaaacacaattgataattctttatttgatgtggagtgtgcttttcctacacaaa

SEQ ID NO: 419022 - DNA, 556 bp, Homo sapiens
aagtgtatgcattttttttttggcatcacagtgtgctatcaattaacaggcagccctacaaagaaaaataataaataaataaacaatctggcratcagagcacttctctttcttttgatagattagaagttgacaaataattcaggtctagtcaatagaacaaaagggaaagtttaccctaggagatctggaaaaatttacctccttctctgaaagagaatcaggagacatctggttctatgaggctgcagtatactcttaagctgccacatcccttctgcagacagaaaaaatagtttacatgctgttattaactgggcacagagtgtaagaactaatttctaatagttgagccactgatttatcaatttacagacactttccttctgagattactgttttcatagtaatgttaaccttagtacttaagctttttaaagttttcttaatatttaagcttcttttagttggtctttttgttaatagcagcccaaagcattataacacatataaacctgtatctctgctccccttttcagcaaaaaaatttagacat

SEQ ID NO: 419023 - DNA, 556 bp, Homo sapiens
aagtgtatgcattttttttttggcatcacagtgtgctatcaattaacaggcagccctacaaagaaaaataataaataaataaacaatctggcaatcagagcacttctctttcttttgayagattagaagttgacaaataattcaggtctagtcaatagaacaaaagggaaagtttaccctaggagatctggaaaaatttacctccttctctgaaagagaatcaggagacatctggttctatgaggctgcagtatactcttaagctgccacatcccttctgcagacagaaaaaatagtttacatgctgttattaactgggcacagagtgtaagaactaatttctaatagttgagccactgatttatcaatttacagacactttccttctgagattactgttttcatagtaatgttaaccttagtacttaagctttttaaagttttcttaatatttaagcttcttttagttggtctttttgttaatagcagcccaaagcattataacacatataaacctgtatctctgctccccttttcagcaaaaaaatttagacat

SEQ ID NO: 419024 - DNA, 590 bp, Homo sapiens
tcgacaggtgggatccttaaagaagtgattaagccatgtgggctctactctcctgggtgggatttgtgccctcataaaagggccagttgaaccctctcttgctctcgcattcytctgtcttgtgagaacagcgttcctctcttctgaaggatgcagtgttcattgcagcatctgagaagcggagactgttcataaaaaaacagtgtaacagcaccttgatcttgaactttccagtctccatagctgtaagaaataagcttttcttatttatgaattacccagtctgaagtattttgttatcgcagaacaaaatggactatgacaacatgtattattttctaagaatgtgtgatagaaaacatatattttaaagatatgttcaatgacttctacattgtaaattccttcaagaaatacatacacactctagagattcattaagaaaaattagacttccagtttttagttcagcatgtaaagagcttggcattcattactctgtcctaaatagtgaaagactaaacaaataaaaaatcaacaactttttaaaaacctatcagtgaattgaagtcacagggcaaactgctgcc

SEQ ID NO: 419025 - DNA, 590 bp, Homo sapiens
tcgacaggtgggatccttaaagaagtgattaagccatgtgggctctactctcctgggtgggatttgtgccctcataaaagggccagttgaaccctctcttgctctcgcattcttctgtcttgtgagaacagcgttcctctcttctgaaggatgcagtgttcattgcagcatctgagaagcggagactgttcataaaaaaacagtgtaacagcaccttgatcttgaactttccagtctccatagctgtaagaaataagcttttcttatttatgaattacccagtctgaagtattttgttatcgcagaacaaaatggactatgacaacatgtattattttctaagaatgtgtgatagraaacatatattttaaagatatgttcaatgacttctacattgtaaattccttcaagaaatacatacacactctagagattcattaagaaaaattagacttccagtttttagttcagcatgtaaagagcttggcattcattactctgtcctaaatagtgaaagactaaacaaataaaaaatcaacaactttttaaaaacctatcagtgaattgaagtcacagggcaaactgctgcc

SEQ ID NO: 419026 - DNA, 623 bp, Homo sapiens
taacccccatgctcaccaattatagactggataaataaaatgtggtacatatacactacggaatactatgcagtcataaaaaggaatgagctcatgtattttgcagggacatgaatgaagctggaagccattatcctcagcaaactaacacaggaacagaaaaccaaacaccacatsttctcacttacaactgggagctgaacaatgagaacacatggacacagggacagaaacaacactcacacagtggccttttgttgggggaggcagaggaagggaaagcattaagataaatagctaatgcattcagggcttaatacctaggtgatgggttgataggtgcagaaaaccaccatgacacatgtttacctgtgtaagaaacctgcacatgtatccttgaacttaaaattaaaattaaattaaattttaaaaatgccaagaaaagttgtgtgttgactatgaaaagtgtaacatatgcatgatgggaatagaaaaaaacaaagaagaaattttggaagcaataaggtctaaaagtttcccaaaattaatggcaccaattaaaaaacagattgtcagagtggctcaaaaagaagataatatattttcttcaggaaatcttcttt

SEQ ID NO: 419027 - DNA, 623 bp, Homo sapiens
taacccccatgctcaccaattatagactggataaataaaatgtggtacatatacactacggaatactatgcagtcataaaaaggaatgagctcatgtattttgcagggacatgaatgaagctggaagccattatcctcagcaaactaacacaggaacagaaaaccaaacaccacatgttctcacttacaactgggagctgaacaatgagaacacatggacacagggacagaaacaacactcacacagtgkccttttgttgggggaggcagaggaagggaaagcattaagataaatagctaatgcattcagggcttaatacctaggtgatgggttgataggtgcagaaaaccaccatgacacatgtttacctgtgtaagaaacctgcacatgtatccttgaacttaaaattaaaattaaattaaattttaaaaatgccaagaaaagttgtgtgttgactatgaaaagtgtaacatatgcatgatgggaatagaaaaaaacaaagaagaaattttggaagcaataaggtctaaaagtttcccaaaattaatggcaccaattaaaaaacagattgtcagagtggctcaaaaagaagataatatattttcttcaggaaatcttcttt

SEQ ID NO: 419028 - DNA, 623 bp, Homo sapiens
taacccccatgctcaccaattatagactggataaataaaatgtggtacatatacactacggaatactatgcagtcataaaaaggaatgagctcatgtattttgcagggacatgaatgaagctggaagccattatcctcagcaaactaacacaggaacagaaaaccaaacaccacatgttctcacttacaactgggagctgaacaatgagaacacatggacacagggacagaaacaacactcacacagtggccttttgttgggggaggcagaggaagggaaagcattaagataaatagctaatgcattcagggcttratacctaggtgatgggttgataggtgcagaaaaccaccatgacacatgtttacctgtgtaagaaacctgcacatgtatccttgaacttaaaattaaaattaaattaaattttaaaaatgccaagaaaagttgtgtgttgactatgaaaagtgtaacatatgcatgatgggaatagaaaaaaacaaagaagaaattttggaagcaataaggtctaaaagtttcccaaaattaatggcaccaattaaaaaacagattgtcagagtggctcaaaaagaagataatatattttcttcaggaaatcttcttt

SEQ ID NO: 419029 - DNA, 623 bp, Homo sapiens
taacccccatgctcaccaattatagactggataaataaaatgtggtacatatacactacggaatactatgcagtcataaaaaggaatgagctcatgtattttgcagggacatgaatgaagctggaagccattatcctcagcaaactaacacaggaacagaaaaccaaacaccacatgttctcacttacaactgggagctgaacaatgagaacacatggacacagggacagaaacaacactcacacagtggccttttgttgggggaggcagaggaagggaaagcattaagataaatagctaatgcattcagggcttaatacctaggtgatgggttgataggtgcagaaaaccaccatgacacatgtttacctgtgtaagaaacctgcacatgtatccttgaacttaaaattaaaattaaattaaattttaaaaatgccaagaaaagttgtgtgttgactatgaaaagtgtaacatatgcatgatgggaatagaraaaaacaaagaagaaattttggaagcaataaggtctaaaagtttcccaaaattaatggcaccaattaaaaaacagattgtcagagtggctcaaaaagaagataatatattttcttcaggaaatcttcttt

SEQ ID NO: 419030 - DNA, 580 bp, Homo sapiens
tctacagattacttaattgaataacagtggaacacacattcttctctaacttacgtggaactttcaccaagataggccacattctaggccataaagaaaaccrtaacaaatttaaaagattaaaaatcatgcagtgtatgttctcagatcacaatggaattaaacaagaaatcaataacagaaagataactggaacatccccaaatacttagaaagcacacaacgcccttctaaattgtacatagatcaaaacagaaactcaagagagacttaaatattttgaactaaatgaaaatcaaagtaaaattttacaggttttgagtgatgtagcaaaagcgatgcttagaggaaaatctatagcatcaaatgcatatattaaagaaaaaataaaatcaataatgtattcttgcagcataggaaactagaaaaagatagcaaatttaattcaaagacagcaaaattaaattgaaatcaaaaattgatagggaaaatcaacaaaacaaaaaactggtttttgcaaagatcaataaagtcagtaagcctcctgccaggctaactgtgaaaaaacatagagaagaca

SEQ ID NO: 419031 - DNA, 580 bp, Homo sapiens
tctacagattacttaattgaataacagtggaacacacattcttctctaacttacgtggaactttcaccaagataggccacattctaggccataaagaaaaccgtaacaaatttaaaagattaaaaatcatgcagtgtatgttctcagatcacaatggaattaaacaagaaatcaataacagaaagataactggaacatccccaaatacttagaaagcacacaacgcccttctaaattgtacatagatcaaaacagaaactcaagagagacttaaatattttgaactaaatgaaaatcaaagtaaaattttacaggttttgagtgatgtagcaaaagcratgcttagaggaaaatctatagcatcaaatgcatatattaaagaaaaaataaaatcaataatgtattcttgcagcataggaaactagaaaaagatagcaaatttaattcaaagacagcaaaattaaattgaaatcaaaaattgatagggaaaatcaacaaaacaaaaaactggtttttgcaaagatcaataaagtcagtaagcctcctgccaggctaactgtgaaaaaacatagagaagaca

SEQ ID NO: 419032 - DNA, 612 bp, Homo sapiens
aacgcccttctaaattgtacatagatcaaaacagaaactcaagagagacttaaatattttgaactaaatgaaaatcaaagtaaaattttacaggttttgagtgatgtagcaaaagcgatgcttagaggaaaatctatagcatcaaatgcatatattaaagaaaaaataaaatcaataatgtattcttgcagcataggaaactagaaaaagatagcaaatttaattcaaagacagcaaaattaaattgaaatcaaaaattgatagggaaaatcaacaaaacaaaaaactggtttttgcaaagatcaataaagtcagtaagcctcctgccaggctaactgtgaaaaaacatagagaagacacaagtgactaatattaaacatgaaatgagatacatcactacagatcccatggatattgaaagaagggtaatagaataatattatgaacaactagrtgctcacaaatttgagaatctagacaaaatggacctattctttgaaaaacacaatgtacaaaaatacacaagaagaaatagaaaattttaaaaagtctgtaactattaactaaatttaatcaacaattagcaatcttccagaagtaccatcctgaggg

SEQ ID NO: 419033 - DNA, 612 bp, Homo sapiens
aacgcccttctaaattgtacatagatcaaaacagaaactcaagagagacttaaatattttgaactaaatgaaaatcaaagtaaaattttacaggttttgagtgatgtagcaaaagcgatgcttagaggaaaatctatagcatcaaatgcatatattaaagaaaaaataaaatcaataatgtattcttgcagcataggaaactagaaaaagatagcaaatttaattcaaagacagcaaaattaaattgaaatcaaaaattgatagggaaaatcaacaaaacaaaaaactggtttttgcaaagatcaataaagtcagtaagcctcctgccaggctaactgtgaaaaaacatagagaagacacaagtgactaatattaaacatgaaatgagatacatcactacagatcccatggatattgaaagaagggtaatagaataatattatgaacaactaggtgctcacaaatttgagaatctagayaaaatggacctattctttgaaaaacacaatgtacaaaaatacacaagaagaaatagaaaattttaaaaagtctgtaactattaactaaatttaatcaacaattagcaatcttccagaagtaccatcctgaggg

SEQ ID NO: 419034 - DNA, 612 bp, Homo sapiens
aacgcccttctaaattgtacatagatcaaaacagaaactcaagagagacttaaatattttgaactaaatgaaaatcaaagtaaaattttacaggttttgagtgatgtagcaaaagcgatgcttagaggaaaatctatagcatcaaatgcatatattaaagaaaaaataaaatcaataatgtattcttgcagcataggaaactagaaaaagatagcaaatttaattcaaagacagcaaaattaaattgaaatcaaaaattgatagggaaaatcaacaaaacaaaaaactggtttttgcaaagatcaataaagtcagtaagcctcctgccaggctaactgtgaaaaaacatagagaagacacaagtgactaatattaaacatgaaatgagatacatcactacagatcccatggatattgaaagaagggtaatagaataatattatgaacaactaggtgctcacaaatttgagaatctagacaaaatggacctattctttgaaaaacacaatgtacaaaaatacacaagaagaaatagaaaattttaaaaagyctgtaactattaactaaatttaatcaacaattagcaatcttccagaagtaccatcctgaggg

SEQ ID NO: 419035 - DNA, 538 bp, Homo sapiens
gagatggcattgccctgggtcatcaacattcaaaatgttcataatttgaaacgtgggattttaaaagccatgcttccaattcaagaataaaaagttaaaacagaaaagtgggagaagactcgtattgttaaggatatccttgtgtgtaccaccatatgagcttttaaaacttgattaaagctaccttcatggtaattgctgtaggccacaaaagttttagtcacagttctgaattttagaaacttaataatggctaatgcgtattggcacgttacacattagccatcactagagygaccagctgcctcagtttgctcatgactgaggggtttcctaggcatgggactcctagtgttaaaactgggaaagtcacaagcaaactgggataattgatcactctaattggcacttaccatttcctaggtatttaatatatctctccattatttaatactcccataaactccacatggcaggttctacgaggattctaacccagagaactgaaacctcctaggggctgcattttttttctcat

SEQ ID NO: 419036 - DNA, 548 bp, Homo sapiens
gagaaatgcaaactagatggtctcaactggtagaatctgatgttactgctcttgttttgcatttattgccactaaacccaatccagaagattcacatggacactgaaacattttctttgaagcaacatacactgcacacaattacatattttgtactttactagaaaatctagaagtccaaactcttggaatcattacatggggcaaactgacttttctttaaaaagtcagtcccttgctgaggtctaaaataaagtggctcacatttgttttgcctaattctactccagcatgttatataacatgatccaagtatagttgagtgcattttaacaaaatctgtattgmgtgttcttatgtgtacttttccaaaaatgatcagattaattgcttttcactaaaagtttagtgtggctctaagtcataatttctaaattcataattcatgtacagcacgagtattcagtatcatttatgacctgttctgctgtcatttatttcttccctccccctctccaccccgttgctcatcacacaataaaatgctt

SEQ ID NO: 419037 - DNA, 607 bp, Homo sapiens
gcctctggggtattagccatttatagatccactgcctagaacctggaattaattaaagcctatatttgtaaaaaatgcaataataatacaatttcacttaaattttacctgtaaaattaaaattttacttgaacaccattatcatamttttacaatgtacatttaccatttttttgttccctttcaccacatctctttttccagtcttctctgtctggtcactgtcaaccaaggttttcaaatgtcagtccattcccaactcaccatccctggcgatcactgcactctctttagtcatggtggcatcctcactgaggccacacatgttttcagaaaagacccggaagtaatattcattccctatgaccaattcagtaatggtggcactggttcgatgataatgctcaatgacagtaaaccattcctaaaagaaaaaaaaataataactggaggaaaatcacctaaaagtatacaatttttctaactgtagattgggataaataacaaggatgctttattaacaaaaagaaaaaaagaccactcatttttatatggagagtaataatatatgttgttaaaatgtgttgaaacaatgtatattttgttt

SEQ ID NO: 419038 - DNA, 621 bp, Homo sapiens
ggtctcatctcccttcctgggggctgaacagtctctgggatgccagatctatgcggtccctgttctcatgattttttctctctcagactcagtgacagaagctgaacacgcagacccccagatctgggaactgggattagttgtggtggcaggaacgatgtggaggcttgagggctgactcagcagccccagtgcagggttggggctgggtcccaatacctgccttgttgccacttctggttttatttgatgctgcaagagaaggaaagtgagaagaaccttgccaagccacccacttcctcctgggctgtgttctgcttcacttcctccttggctttcattctgatttcatgcsgggggtatgtagtacacaatgtctctccttaggtttgcacccggagtgcaatgaggatggcctgaattggccatccctttagtttggtttcatgggagcctgggtttgaacagagttctctctgtgtgtgcatgtgtgcatgtgtgagtgtgtgtgtgtgagtgtgtgtgtgtgtgtgtgtgtgtgtgtatatgagtgtcaaatgtgtgtagagacctacattctaaggccaggctggctgatacgatagccacaaggtacacgtg

SEQ ID NO: 419039 - DNA, 621 bp, Homo sapiens
ggtctcatctcccttcctgggggctgaacagtctctgggatgccagatctatgcggtccctgttctcatgattttttctctctcagactcagtgacagaagctgaacacgcagacccccagatctgggaactgggattagttgtggtggcaggaacgatgtggaggcttgagggctgactcagcagccccagtgcagggttggggctgggtcccaatacctgccttgttgccacttctggttttatttgatgctgcaagagaaggaaagtgagaagaaccttgccaagccacccacttcctcctgggctgtgttctgcttcacttcctccttggctttcattctgatttcatgccgggggtatgtagtacacaatgtctctccttaggtttgcacccggagtgcaatgaggatggcctgaattggccatccctttagtttggtttcatgggagcctgggtttgaacagagttctctctgtgtgtgcatgtgtgcatgtgtgagtgtgtgtgtgtgwgtgtgtgtgtgtgtgtgtgtgtgtgtgtatatgagtgtcaaatgtgtgtagagacctacattctaaggccaggctggctgatacgatagccacaaggtacacgtg

SEQ ID NO: 419040 - DNA, 590 bp, Homo sapiens
tggttatatcaattattgtgtttgtaaaaattaattgaactgtacacgtattatatactcacacttttccacatgtatgttactctctactaacattttaaattggaacaacaaaytattttagatataaaaaagcaattttcaaaatataatattttcttcaaaataatatgggaagctgggaacttggcagactataaattaaacaatattggctatgagttgacagttattaaagctggatgatgggtcattatactcacagaaaaaagtgtcattatactattcttatattaaaacttttggtactaaaaataccaaagcaagggaaaaaccttcttttccatcccatgctaattatgactggaaagagatcgtcctgaggaaagaaaatcaccttttccctctttctcttagtgtgaacctttggaaaagcataatttagtaaatgtccttttatccaatataagatagtccctaatcaaaaacatctgttaccctgattgttttaccacacctactttgacatttatttttgcaatttgaatgtatttatgcatccgacctagagttttttttagacagagttt

SEQ ID NO: 419041 - DNA, 578 bp, Homo sapiens
gatgcagaaaaccaattttctcctctagaatttcctggtttctaaagacagagaaagagagacactggttgagaggccctcctatgggggaagattcttcatcccaaaataaactcttcctgctcaagttagagcctcgggcttaaagtatcagcatcctggaactagaacaatacaaacatgggataaggggaatgagagagkagcatttgtatgtgatgtggtcattgccgtgttagtgcaggctcactgacatgttgggaatgcaatgaagttagaggggattttagtccatcataaaggaagactaggtgccatctactggtgaggaaactgaaaataaaacatactttgcatttttccaacaaaattcagtctcttcagacaatgcagtctgcaagatatatggatatttataggatatgcaaatgatcatcctgtggtcatgataagttggaaaggctgcttaacccattcgccagcctgatttggaaacttatttttccatttctaaaaatttactttacaaatctctgtgcacaaagtggtaaagttatgtaaaaggatgttcactgtgg

SEQ ID NO: 419042 - DNA, 582 bp, Homo sapiens
tctcacattttggcagtttgccctgtatcctcacttctctgacatatgtaagaggagttgctagtttttccgtttgtccagctttttacttgttaggatagagtggcaacttctaagctgattacatgcccgaatgaaaatttgaagtctaactgattctttaaatttttttggactttttctcttgtgtttcattttggatcatttctattgctatgtcttcaaatttgccttcaatgtctaattagctattaattccatctacatattttttatctgagacattttattgctttcatctgtaggtgattagatttggatctttttatattttccatttcagttcacttttttcacttaactttctcttaatttttattttattttattaaatttctcttaaatttaatttaaatggagagcttaacatttctccacctaactttttgaacatatggaatacasttaaaataactattttcatatgctcgactgctattctaatttacatgtgagatctgaattggctgtaactgacttttctcctcattttgagctgtgttttcctgcttatttctctac

SEQ ID NO: 419043 - DNA, 582 bp, Homo sapiens
tctcacattttggcagtttgccctgtatcctcacttctctgacatatgtaagaggagttgctagtttttccgtttgtccagctttttacttgttaggatagagtggcaacttctaagctgattacatgcccgaatgaaaatttgaagtctaactgattctttaaatttttttggactttttctcttgtgtttcattttggatcatttctattgctatgtcttcaaatttgccttcaatgtctaattagctattaattccatctacatattttttatctgagacattttattgctttcatctgtaggtgattagatttggatctttttatattttccatttcagttcacttttttcacttaactttctcttaatttttattttattttattaaatttctcttaaatttaatttaaatggagagcttaacatttctccacctaactttttgaacatatggaatacacttaaaataactattttcatatgctcgactgctawtctaatttacatgtgagatctgaattggctgtaactgacttttctcctcattttgagctgtgttttcctgcttatttctctac

SEQ ID NO: 419044 - DNA, 577 bp, Homo sapiens
attatagggcttatttcatttgtttatcatatttcatagtcattgtctttcacgatctgatgtccaatgtcttgaaacccattgttcacatattttgtctattttgggggttatttcaagtgagtaggtaaatctggttcctgttattcaattctggttgaaagtagaagtctcattctgctttttattatttaattttatttttaacattaaaaaaatttgttttgagatagagtctcactctgtcacccagctggagtgcagtggcgtgatctyggctcactgcaacctctgcctcccgggttccagcaattcttgtgcctcagcctcctgagtagctggaattagaggcatgctgccaccatatttggctaatttttttgtatttttagtagagatggggtttctccatgcaggctcaggctggtctggaactcctggcttcaggtgttctgcctgccccagctcccaaagtgctgggattacaggcatgagccaccatgcccagcctcatgtcttctttttaaatgtaatttttctttttttgcttttatttttgtagaaagccacggagtca

SEQ ID NO: 419045 - DNA, 577 bp, Homo sapiens
attatagggcttatttcatttgtttatcatatttcatagtcattgtctttcacgatctgatgtccaatgtcttgaaacccattgttcacatattttgtctattttgggggttatttcaagtgagtaggtaaatctggttcctgttattcaattctggttgaaagtagaagtctcattctgctttttattatttaattttatttttaacattaaaaaaatttgttttgagatagagtctcactctgtcacccagctggagtgcagtggcgtgatctcggctcactgcaacctctgcctcccgggttccagcrattcttgtgcctcagcctcctgagtagctggaattagaggcatgctgccaccatatttggctaatttttttgtatttttagtagagatggggtttctccatgcaggctcaggctggtctggaactcctggcttcaggtgttctgcctgccccagctcccaaagtgctgggattacaggcatgagccaccatgcccagcctcatgtcttctttttaaatgtaatttttctttttttgcttttatttttgtagaaagccacggagtca

SEQ ID NO: 419046 - DNA, 467 bp, Homo sapiens
caaagatacacacacacttaaatatttttaaaatacatttcagcaatataacatagatatattatatctatattatgtctactttatataaaaatgatatatattatacaatatatttctatagtatataaataatataatatatctaatatatagtattagatatgtagtatatatagatatatgtatacattatctatatatasatatatagtatatatagtactatagctatgtagtatatatatagatatatagtatatatagtatatatagatatatatgtatattagatatatacatacacatgtatgtgtatatgtgtatatatgcatatatatacatacacacctatgtgtatatgtgtatatatacgtgtatatacatacacacctatgtgtataggtgtatatatacgtgtatatacatacacacacacagggagagagtgtcataaagtgttaaat

SEQ ID NO: 419047 - DNA, 467 bp, Homo sapiens
caaagatacacacacacttaaatatttttaaaatacatttcagcaatataacatagatatattatatctatattatgtctactttatataaaaatgatatatattatacaatatatttctatagtatataaataatataatatatctaatatatagtattagatatgtagtatatatagatatatgtatacattatctatatatagatatatagtatatatagtactatagctatgtagtatatatatagatatatagtatatatagtatatatagatatatatgtatattagatatatacatacacatgtatgtgtatatgtgtatatatgcatatatatacatacacacctatgtgtatatgtgtatatatacgtgtatatacatacacacctatgtgtatakgtgtatatatacgtgtatatacatacacacacacagggagagagtgtcataaagtgttaaat

SEQ ID NO: 419048 - DNA, 646 bp, Homo sapiens
gaccctagtaagttatgtgggaaagcatttattgctgctaatattttattttcaattatttcattaggagagtcaaatgcttaagatakaggacacatgactaaaagtttcaccagcactcatggcatctgctataaaacatgtgtccacagagtacccacaaactctcaagatcttaagtctcaacagtaaattactggttagtttttctaatcagagtctcaacgtcttagtcccaattcttccaaattttccaaaaccatacactatagtgtatatggaaaggagaatatgtacttttgtgaatataaagtgtctgttccatttttagtcatgaagtaccataggaagagatggtcacaccctaacattgtaaagcaaaagaaagcttcaggaatcagaccataacagcaacactttgctgaaaaatatttaattagaaggcaataccacatactcacatatgctaaggagtgcaattattttgtatgtttactggaaaaggcaaaaaatttttctgtagttaaaacaatatttttgtttctagaacttttgttcttgtactgattcattaccattaaactgttttcacaaaatgccaaagaacagaggagagctatacatgatttgaccaagacgctgcaag

SEQ ID NO: 419049 - DNA, 602 bp, Homo sapiens
aattaaaacgtgtattgggtaggcaactaacaaactctgctagggataccacagttctggcagaataaatgaccatgtccttaaacagggcaggaattataaarctagagccctttaaactccattgttttctagtctgagaagaactcagctgttatgaacccactgaatcagctatttaagtccttgcctctgcctaagtcttttcttattatttcacccttggtcgtgttgccaaacttcagccttgtatgtaggtaaccttgaaccctgttcactcttttccagggtgactctgcctcttacttgccttctgaccaatcttgacctccatagacctatgtcatatgaacatgtctgagaccacagcagcacttgagtctgttaaggaaaacatttattagctaatgagatattcctgaagataaacaggcaattcctatctagaaatgcacttttcattcataattctaaccagcaggctgacctattcaaactcacatgccagcattacacatatggtaggtggttactaacttgggctctggagtcagagacctgggaccaaaccctggctctgtggccccaggcaaattatgtag

SEQ ID NO: 419050 - DNA, 620 bp, Homo sapiens
aatacaatttgagcactcaggaggtcatgctacagaggaattatgctgagcatgtttcttatcagtacttatgtggctaagtggttccttttccttgaaggaaaaaatcatctcattatggcagaggttccctatcattcagaagaaagctactaggttgagctatgagaaactgctagttttgtacatcaaaaactgtcaaaatcaacaactgcatatgattcagtctaatacacttgatttttctaagccaggtcaagttaggattgacagttactttttgtgggaagagaggagtgaggagtgggaaatcaaatagtaaggctcttgtaaggttcagaaaataaaatgcctgatcagaatgcatgtggttcccagtgggaactccaaataactcttgggagttgcggacatgaaatgaacattacaacttagaattgacctttttggtcagacctggtggctgagatttttccttattcaagaggctacaacatggaaacactgtacagccagcatatcctaaattgcaaacacaaaggtaggaattaagaactgagaactggacccagtgatttgygccagtagtcccagctacttgggaagctgaagtgggagta

SEQ ID NO: 419051 - DNA, 599 bp, Homo sapiens
gggcaaatatatttatgttcttacacattcagaaaatttttcttgattatctactcaagacactgaaaacatctgttgcctctaggggaggaaactgagtgtctgggaaatagtagaacggagattttatattgcacctttgtaccsttttgtatccatggaactatgtgaatgtgttccttattcaaaacataaataaaatacggaataaactgtatatgctggtcacaagagaactcaacagtggagtgtgaatgaaatcaggaaataagtggggtcccttggccacctagatgaccagatgcccaggctgtgtcccatagtggggcaagtatccgaggtcctgtctgcgatgggccaggagggaactggaaggaacatggggccccagtgatgtcaaaaaggttgccccaagggagaagcactgcatcccaaatagggtttttaggtcagcatcaactctaacctacacttgaaacaaaacctgagttatcagtcctacactactaaagaaaattctggtttaaagaaagagcaccctaaggattagaaccattaggtagaagttacaggggtatagatttcagtccaacataaag

SEQ ID NO: 419052 - DNA, 617 bp, Homo sapiens
ctggtaaggaagtgggcagggtgaaaggagatgaggccaaggaatagatgtgagcttcagaatgaatgagggggtttccgaatgctataccgaggacttcggaaggtaccttatagatggtgatagtaacctgaggtctttaaagcagggagatgctgtgatcagatttctttttaaaaaaacatcattttgtcaaaaatttggaagatagactgtagtggaggggcctataaattacataaaaccaacacttttgaatattaatgtttctcttccattcatatttgactaataacacatagaatattttctgagataaacaggctttactatctatcagcactcagatttgggtacattattatgtaacaaggacaatattttgagaatrgtaaaccagtgcattttccattctgtttgaatggtgatgcctggggctcctctcccgtcatctcagtaggcttccctccttcaggcaaatggcggttcccagctagaaacaagctgccatcattcagctttgaaaaagaatagccctacttgtagctttgcaaggtgaagtggctttctacatttcagaactctcctttctctattaagaaccaaacctggctaag

SEQ ID NO: 419053 - DNA, 617 bp, Homo sapiens
ctggtaaggaagtgggcagggtgaaaggagatgaggccaaggaatagatgtgagcttcagaatgaatgagggggtttccgaatgctataccgaggacttcggaaggtaccttatagatggtgatagtaacctgaggtctttaaagcagggagatgctgtgatcagatttctttttaaaaaaacatcattttgtcaaaaatttggaagatagactgtagtggaggggcctataaattacataaaaccaacacttttgaatattaatgtttctcttccattcatatttgactaataacacatagaatattttctgagataaacaggctttactatctatcagcactcagatttgggtacattattatgtaacaaggacaatattttgagaatggtaaaccagtgcattttccattctgtttgaatggtgatgcctggggctcctctcccgtcatctcagtaggcttccctccttcaggcaaatggyggttcccagctagaaacaagctgccatcattcagctttgaaaaagaatagccctacttgtagctttgcaaggtgaagtggctttctacatttcagaactctcctttctctattaagaaccaaacctggctaag

SEQ ID NO: 419054 - DNA, 593 bp, Homo sapiens
aatagaaacaaagttaagggaatcagtatatgataacagtgaccattcaaataataaggaaagagttcagtcaaaaactgatgtgaagaaaactaggtaagataaataacaaacttggaaacatatttgtcacctttgcaaataataagggtttatttctttaatagatagtgagctcctatggatcagtaagaaaatagccctagttcaatagaaaaataggcaaaaatataaagcatttacagaagaaatacaaatggcttctaagtaaataaatctatactaaaaatatgatcatacttatttataatatggaaaatgctaattgaaactataatgagatagattttatagctatcgtattagcaaaattgaaatttggtaatacattgtgttggtaagggcatagagaaataggcatctcagacattactgrtaggaatgtaaattggttcaaactccacagagagaaatttggtgatatctatcacgatctcaaatgcttatatgccaaatgcccagttatcttatttcttggtatttctcctaaaaataaagtatgaaaattgtgtatttacaagaatatttattgc

SEQ ID NO: 419055 - DNA, 565 bp, Homo sapiens
ttcagctgttcagatcacctgtaacactaaaacctaaattcgatgatgatatattgaatcaaagacttggagaataatttgtccttttttgttattttatggttctgtagctcatccctctgcttgtaggagttattggttcagatgctgaaactcccctaattcactggggcgattgtgagcagcaagtataccctccctagtttctcatccgtgaaataaaggcaggaatgttaacaccgccacagggcaattcaagagtgataggttatttcagggcatcctgaaagcayaagatgctgaggaaatgcaagcgcttactagtaacaatgtgataacccgatctttcccgttcctgtcactctcttgcgcttgctttgttgctgaggcagcctgtggggtctcccagtggctgataacaacacacacacactgctgctgcagcttggatgagggaagaggttggtagattcagctgtgctgggcatcctggctgagtaacagagacagtgaatgtaaacaattaagatgttctaataaaggaacccaaagagggtcccagagg

SEQ ID NO: 419056 - DNA, 571 bp, Homo sapiens
atactttattttaaggggatcctcaactcttttttcttcctgtctgctcctcccatcctcagtgtctccgaataagcrgtcccccatgtgcaaagctcaacaacttttgggtcaggtgtatcttgctttgcaaaactgaccttgactatacatgttgaattactttttaatgttattcagttttgtgtgcacacttaggcaataaatgggatgaagaaattattcatgcaattactacattccttttactttgggtaaagcttaggaggatgaagatatgtattggggtgggaagctgattaagttttggtactagtttgcaaagctattttggagtgaactcaaagtctacacactcttcctatgtgttggttataggaaaggctgtaaaggatcctcatatggttttccatgttaatttgttttattactgattgacaatcctttagggcttatcttatgcttcctattaaatgctttgaaatctttaggttacaaaggaagttacttgaatttaagtggaaatagcagtttctagaatttagggagtaatattatcccttcacattat

SEQ ID NO: 419057 - DNA, 603 bp, Homo sapiens
tgtcccctctaacagctaaggcctgaccccaaggtagggcaaggttgggtggcaagaamcttcatgtagagcccaaggcaagcactctcatagagagagctgggatcttcctgcaggtggaggaggttggagagttggagtctacagagggtgggagttgacccagggcaccccacggctggaggctcttgagtacagcagtgggacagaacagcgagtttggcaggggcgggtggccaggctgctgggcagtacatatgcatatggttttggtacagctttttgacttcattgactttcactgggtagttcagttttacttcatggttttaaaagggttgtgcttgtcaaatatcaaatagataaagcactttctgtttgtgttcctgtttgctgagtttagctcttctccaagcaaaggggaagattatcactactctcagtgcctgaagggctacttatttatgtgcctaattggcacctgcaccggtatattttggatgcccagtgcatttaaaatcgaaactcttatctctgatagcttcaagttccactcaattttttactacattgagggaaaacaatgaggaactcctcctcctc

SEQ ID NO: 419058 - DNA, 608 bp, Homo sapiens
ttaccatgttggtctaggcatatggcaaaagaataccgaggagtacacatgagacaaagcatgtcccctctaacagctaaggcctgaccccaaggtagggcaaggttgggtggcaagaaccttcatgtagagcccaaggcaagcactctcatagagagagctgggatcttcctgcaggtggaggaggttggagagttggagtctacagagggtgggagttgacccagggcaccccacggctggaggctcttgagtacagcagtgggacagaacagcgagtttggcaggggcrggtggccaggctgctgggcagtacatatgcatatggttttggtacagctttttgacttcattgactttcactgggtagttcagttttacttcatggttttaaaagggttgtgcttgtcaaatatcaaatagataaagcactttctgtttgtgttcctgtttgctgagtttagctcttctccaagcaaaggggaagattatcactactctcagtgcctgaagggctacttatttatgtgcctaattggcacctgcaccggtatattttggatgcccagtgcatttaaaatcgaaactcttatctctgatagcttcaa

SEQ ID NO: 419059 - DNA, 608 bp, Homo sapiens
ttaccatgttggtctaggcatatggcaaaagaataccgaggagtacacatgagacaaagcatgtcccctctaacagctaaggcctgaccccaaggtagggcaaggttgggtggcaagaaccttcatgtagagcccaaggcaagcactctcatagagagagctgggatcttcctgcaggtggaggaggttggagagttggagtctacagagggtgggagttgacccagggcaccccacggctggaggctcttgagtacagcagtgggacagaacagcgagtttggcaggggcgggtggccaggctgctgggcagtacmtatgcatatggttttggtacagctttttgacttcattgactttcactgggtagttcagttttacttcatggttttaaaagggttgtgcttgtcaaatatcaaatagataaagcactttctgtttgtgttcctgtttgctgagtttagctcttctccaagcaaaggggaagattatcactactctcagtgcctgaagggctacttatttatgtgcctaattggcacctgcaccggtatattttggatgcccagtgcatttaaaatcgaaactcttatctctgatagcttcaa

SEQ ID NO: 419060 - DNA, 603 bp, Homo sapiens
tgtcccctctaacagctaaggcctgaccccaaggtagggcaaggttgggtggcaagaaccttcatgtagagcccaaggcaagcactctcatagagagagctgggatcttcctgcaggtggaggaggttggagagttggagtctacagagggtgggagttgacccagggcaccccacggctggaggctcttgagtacagcagtgggacagaacagcgagtttggcaggggcgggtggccaggctgctgggcagtacatatgcatatggttttggtacagctttttgacttcattgactttcactgggtagttcagttttacttcatggttttaaaagggttgtgcttgtcaaatatcaaatagataaagcactttctgtttgtgttcctgtttgctgagtttagctcttctccaagcaaaggggaagattatcactactctcagtgcctgaagggctacttatttatgtgcctaattggcacctgcaccggtatattytggatgcccagtgcatttaaaatcgaaactcttatctctgatagcttcaagttccactcaattttttactacattgagggaaaacaatgaggaactcctcctcctc

SEQ ID NO: 419061 - DNA, 556 bp, Homo sapiens
gcttgtcaaatatcaaatagataaagcactttctgtttgtgttcctgtttgctgagtttagctcttctccaagcaaaggggaagattatcactactctcagtgcctgaagggctacttatttatgtgcctaattggcacctgcaccggtatattttggatgcccagtgcatttaaaatcgaaactcttatctctgatagcttcaagttccactcaattttttactacattgagggaaaacaatgaggaactcctcctcctccaaaatctattcactaggaagttatctaagtaatcttgagattgacagaaagcgacagacagaaaatatataaaaatatttaaataaaacagaaaaaaacgatgtgcaggccctctttaccatatatattgtcaacgagagaggctgactggttctatctcaagtggagaaagacagcatgtcattgtggtattgatttagctctcccaacatgccaggtgggtaggacacatgcacagaacagtcccaaatcgatgratagctatctaataaggatgtaggccaggcttatatc

SEQ ID NO: 419062 - DNA, 556 bp, Homo sapiens
gcttgtcaaatatcaaatagataaagcactttctgtttgtgttcctgtttgctgagtttagctcttctccaagcaaaggggaagattatcactactctcagtgcctgaagggctacttatttatgtgcctaattggcacctgcaccggtatattttggatgcccagtgcatttaaaatcgaaactcttatctctgatagcttcaagttccactcaattttttactacattgagggaaaacaatgaggaactcctcctcctccaaaatctattcactaggaagttatctaagtaatcttgagattgacagaaagcgacagacagaaaatatataaaaatatttaaataaaacagaaaaaaacgatgtgcaggccctctttaccatatatattgtcaacgagagaggctgactggttctatctcaagtggagaaagacagcatgtcattgtggtattgatttagctctcccaacatgccaggtgggtaggacacatgcacagaacagtcccaaatcgatgaatagytatctaataaggatgtaggccaggcttatatc

SEQ ID NO: 419063 - DNA, 548 bp, Homo sapiens
ggtttcaggaaagatgatcggcagctgtacagtggacagatggtctgagaggagaactgaaaagaatgttctagatttggagaacttggccaaagcagaagcccatttgcaggcagcagtggagtgggaggaaggtgagaaaatcgagacrgtgagtgctgatgacaccgcacagctacatggtcagctgcaggctccacccttctgtcttctgtacccgcagggctcttccaagctggagaaagccgaggtcttgcagatgacggtggatcacttgaaaatgctccatgccactggtgggacaggtacccatgctcttctctttcaggcgtcattcatacaacaaatattttgaggctgggccctggggatatgctggtgagcaaagtccacacgctgcccactctgaggagctcagtcaatggagggaacatttgcaaagcttctctctctcctttcagcatctccctctccactttcagtgtctccatttgtcgcaaccttttcctcagttcagctccctccagtcttagacctgggaggcgctt

SEQ ID NO: 419064 - DNA, 331 bp, Homo sapiens
ggataccaacctgatcttagcatgttgacaaatgcatttgcgtggtacaaaaaacagttgaccagactcaggaacatggagacttcccctagttactctcaacatgggtggaactatctctactggctttccctcagtgatagtgtatcttatggtcttgccttttcaaatgcaataagaccatactccgcaatggtaaagcagtattgtaatgatctgcttggctccctatacattgcgaccctggatcccatcttgtccctaggcctgaagcattctaaggagcctgtgtytaggtttccatggattctgtatccgtgcagcctgataa

SEQ ID NO: 419065 - DNA, 564 bp, Homo sapiens
gttatttattgcagtacagtttgcgggagcaaaagactggaaactacctaaatacccaccaatagatgatgggttaaagaaactatgataccccaattcaaaggaagcatggaagtgataagaaaaataaagaaaaaaaacctttatggactgatgtggagcaatctgcaaaataatttgttgagtataagaagcaaagtgcagtatagggcaaacagcatggcccaacttatctaaaagatggagaaatctgtatgtggtgtgatgctggctttcatgtgcccagaagcattcacaagaaactggtaaccttggttgtaggcgggaaagagaacaggaggracagctctggggtatatggtggaaggtggacttcctgctgaatactacctttgattaatttatatttacattatattttgggactgtgtgaatatagtacccatttaaaagtaaaataaaaactttattaccccaaaaaaggtaaaataacaattcataaggctgaggtttttatttgggattcatacacagcctggaatctcaaaggaaaaatatctcaaa

SEQ ID NO: 419066 - DNA, 526 bp, Homo sapiens
tcgaaggaactcttagcctgaccttaggctaagcaaggacagagctgggacctcaaattcatccacaactaaaccagaaattcaggcagcctagttgtaggaccctgaatcagtgactcaacttctatggaatgtaaagtctttttttctgtgaaacacagagatgagatgtggttatttcttaaggcctttccagwaccaaaattccccaagtgtaatcatatcaacaacaaataacaatgcaaaaaatattgagagaagtggactatacctaaaaccataatgatactgctaagaacatataaatgacatgaaccctgaaacagcgaccgaaaatggggttgatgtggcccccaaagctatcactcttctaagtgatcttgggcaaataaccattctagaacatgtaacaccaataacgttgactgaatttctgttgcctgccagacaccgtgttaaacatcatcccattgtttccacattccagtgaggcctggcatagaccttcatagcaccttacgcaaga

SEQ ID NO: 419067 - DNA, 549 bp, Homo sapiens
gttgtttaacttcttcccaaattttggtgtactgaatcctattcagtattacattgaaaatatcctcataagtgctaataaagcctcctgtaagaatccagtgacattgagcaaaacacccacctaagggtaatatttgctttttgagggaatgaatgaggggcaggaatggtgaagtgggtcaatccagggccactgtctggctgcgcrttcctggcaaaaaccttatctctctgaacctcattttttcatctgtaggaggagaataactatactgacctcaaagggtcacattgagccttaaatgagataatccatgaacagtgcaaaatcaggcacaagaaataaatgatggctgttggcagtacttgtaataagtcacaagagaagaaagccaagagttccaggaagttttctgctctgcaggagacttggaggtcctggggaaaagccacatttgagcagaggagaatatactgtgctggagtcaccctccaggtctccccccatttggtgctccagccttttccaccagaggacttggtgctc

SEQ ID NO: 419068 - DNA, 549 bp, Homo sapiens
gttgtttaacttcttcccaaattttggtgtactgaatcctattcagtattacattgaaaatatcctcataagtgctaataaagcctcctgtaagaatccagtgacattgagcaaaacacccacctaagggtaatatttgctttttgagggaatgaatgaggggcaggaatggtgaagtgggtcaatccagggccactgtctggctgcgcattcctggmaaaaaccttatctctctgaacctcattttttcatctgtaggaggagaataactatactgacctcaaagggtcacattgagccttaaatgagataatccatgaacagtgcaaaatcaggcacaagaaataaatgatggctgttggcagtacttgtaataagtcacaagagaagaaagccaagagttccaggaagttttctgctctgcaggagacttggaggtcctggggaaaagccacatttgagcagaggagaatatactgtgctggagtcaccctccaggtctccccccatttggtgctccagccttttccaccagaggacttggtgctc

SEQ ID NO: 419069 - DNA, 522 bp, Homo sapiens
atcccgaataatcaaaacaacactgaaaaagaaaaacaaagttggaggaatcacacttcttgatttcaaaacttactaccaaaatacagtgaccaaaaccatgtgatactaacataaggctagacatatagaccaaaaaaatagaattaatgttcagaaataaaccaaacatctatgactagttgatttttttaccagggcaccaagactattcatgaatagaataatctcttcaactggtgatgggataactagataatgccatgccaaagaatgccactggacccctaccttgctccatatacaaaaattaactctagatagtccccagatagccaacctggttttcccccttatttccctcatgtatgtagttctcagaacaaatgtagaatatgctagaaatggcratatgctgagagaagcaggaaatacccaaaacagcccagccttgttcacgtccttcctaagaaagataacatcttgacttaaggaagaactgccagagacagccaggacttt

SEQ ID NO: 419070 - DNA, 576 bp, Homo sapiens
aatactacctcatttattttttatatcgattacatattaaaatgttaaaatgacaatatttcagatatattgggtaaaaaaatattaaaattaaattcactggtttttaaaaactttttacaatgtagctgccacaaaagtacaaattacatgtggctcacactatatttctgttggccagtgcctttctaaaccatagatttccttagtgccagtgactgtcacctcaactgcttagttacctgtgatctttgggcatggttaccaggaagctcttgaaggaccaactgtctcaaggccctgagtatacacttgcatagaaaattaatatatattcatcaaggcctcttgccttgttcagtagccaacttgatggacttcatgtcaaccgccattggtgtctgtgtggttcccttcagttctgcctgaatttcctttacatggctsggagaaaattataacgaggggttgatattttccacaagcctatactgataagagcaagtggtctagtctgacagcaataaagccaaatgactgctaaggcccggcaggtaacataaaaagtgaagcaag

SEQ ID NO: 419071 - DNA, 530 bp, Homo sapiens
cctaactggtcttctgtccctagcctcctcggtcccaaatttaaaagtaagttctggcacatagcaagcattcaataaatgtcccttccacacacatttttatctctcaccctgtagacctgttggtgctcataaatatgttccaaatgttttcctttgtccaattaggctggaagttccctgacacagatctcccagtctgtctctctctgcagcccatcacagcttccagcaaagacctcttcctttgggaagagggattttatggagttctagaagaactgattatatacatttagaaaggagtcaagacctaaaccaataatcaagccaatctccaagggaaacgctactcagagaaccttagaaatggctatggcttaagccagagttgtcatcaaatttagaaaatatattaaaaacayagttttaaaaccatcatccttttattcagggataagcatctcaccccatcttctgcccttttgctgatttttcagctttgaaagagaccacccaagttgtaaagt

SEQ ID NO: 419072 - DNA, 606 bp, Homo sapiens
tcattacagaatataggacaatttcatcacaaacataaaagttttatcaattggagtctataaattttgcraagaattttaattcaactatttctcttgattccaataatatctgagcagtaagcaaagcaaccttatttaaccgcccataaacctgaaatcataagaggtaaagtgacttacccaagatcacacagttgcttaacaatggggttgctactaaagtctgagctctctgtgatcaaacatctatcttactctcccacttcaccctctggggttgaagccatgttgattgatttcttgcttctgtaagctcttggctagaaaaagctaatacatttatatgggatttggatccagcacaaattttttagtgtctacctaagcagtctaaaaaagcactttcacctacttaatctgtggaatatcaaaactctaaaaacttcccatgaagattaattaatttttttctagcgtcacatgtctaaaacctcaaaatgccattgcagtgatctgtaataataaagtaccacaataattaaatctttaaaatcactccaacatgggattcctaagtctgaaccacagttctgccactcgtta

SEQ ID NO: 419073 - DNA, 531 bp, Homo sapiens
agcttcactgctattgtggttactggggatttgctgggcctggaatgccctagagctgcacagacaacaccatccattgcacccttgcctgttgactttgagtgcatagcagggtctgtttggtggcagtgctgttaatgaaactgggagttattagtcataaataaaaaagatactttttagactttaaagactgctgaggctgggctctgcccgtcttgatgcctcactctctttcactgtccagagaatctggacaccatcttttgtcttctctgctctcctgtatgcatggttccatgtgcttgaagaatgcactctccatttattactagttagagccaaaaaagaattacagaggtaagtctgtcagaaggaagagtgatgtcacattccaaagacaaatgggaatattgttgaagtgtttgctttttggattgactatgccacccttttgctactgtacagaatgattgagaatctatagttcctgttytccttctctctgtctctctcatggacttccactct

SEQ ID NO: 419074 - DNA, 582 bp, Homo sapiens
atataacttttagtcatatttttacaatcctttgtttactgacttttgctttagttgtctgtctatactttactcttaaagtgtaagatgatgcctaactctcttgttttccctctttgcctctttgggcctctttgctctttggaggtgtgtccggcccatggtaggtctgaatgaamcttcttgtccagctctgtttgtttgagcaccccagtgccttgctccatgggtgtatcttgtggcccagcagcattggtgtcaccctctcggcagaatctgcattttaacagacaccctggggattcacacacacacatattaaagtttgagaaacactggcctaatattcagagtttcttatatcagacaaaaacctttgctgctttgagctgactgctgggacaaaccaccactacagtgggcctttttttttccccagcggcttgagagtgttgcattgcacctttgcatgtcctcaaccagaataaatgagaacagcattcttaatgtgcccaccagcaggttcctctcttctaatcaattccatatgctttttgtgactctctttctggaatgtaaaaa

SEQ ID NO: 419075 - DNA, 582 bp, Homo sapiens
atataacttttagtcatatttttacaatcctttgtttactgacttttgctttagttgtctgtctatactttactcttaaagtgtaagatgatgcctaactctcttgttttccctctttgcctctttgggcctctttgctctttggaggtgtgtccggcccatggtaggtctgaatgaaccttcttgtccagctctgtttgtttgagcaccccagtgccttgctccatgggtgtatcttgtggcccagcagcattggtgtcaccctctcggcagaatctgcattttaacagacaccctggggattcacacacacacatattaaagtttgagaaacactggcctaatattcagagtttcttayatcagacaaaaacctttgctgctttgagctgactgctgggacaaaccaccactacagtgggcctttttttttccccagcggcttgagagtgttgcattgcacctttgcatgtcctcaaccagaataaatgagaacagcattcttaatgtgcccaccagcaggttcctctcttctaatcaattccatatgctttttgtgactctctttctggaatgtaaaaa

SEQ ID NO: 419076 - DNA, 582 bp, Homo sapiens
atataacttttagtcatatttttacaatcctttgtttactgacttttgctttagttgtctgtctatactttactcttaaagtgtaagatgatgcctaactctcttgttttccctctttgcctctttgggcctctttgctctttggaggtgtgtccggcccatggtaggtctgaatgaaccttcttgtccagctctgtttgtttgagcaccccagtgccttgctccatgggtgtatcttgtggcccagcagcattggtgtcaccctctcggcagaatctgcattttaacagacaccctggggattcacacacacacatattaaagtttgagaaacactggcctaatattcagagtttcttatatcagacaaaaacctttgctgctttgagctgactgctgggacaaaccaccactacagtgggccttttttttyccccagcggcttgagagtgttgcattgcacctttgcatgtcctcaaccagaataaatgagaacagcattcttaatgtgcccaccagcaggttcctctcttctaatcaattccatatgctttttgtgactctctttctggaatgtaaaaa

SEQ ID NO: 419077 - DNA, 368 bp, Homo sapiens
gatttatagtagatacttctacacaccaattttaccccttacaatcctactcctattttctcttcactctaatttcctyatttattgggatctgagaaataaggaagaaatgttagtaatatttagttaatttagtattagtaatatacagttttttgtgtgttggaccacatgttgaactggcttgagctacaagcccctccctgaacctaacccaaaagagagaggcagaagatcccagaatccatcggaaacagtgggaactccatgaagagacagaaagtagttgagtctcattccaaaaacagaaagattgtctgtagcgtcagaagtctctggagccactaataggtgatagaaaatgagaa

SEQ ID NO: 419078 - DNA, 525 bp, Homo sapiens
gctgggcttcaacccagagattctgattctgtagttctagggatggagttcaaagacctgccctgtgagtgagtccccggcaccaccatcagccatgaattctggtctggggatcccttagactttgccttgttggcattgcctcattcatgtagtctataacgacagggacctccagactctcaagccagagacacttaaaactaacaactgctcaygtttaaatgctccatccccagaactacagaatcagaatccctgggttggggcccagaaatctgaatctgagttttttgtttgtttttgagacagggtctcactctgtcacccaggctggagtgcagtggcatgaatatggcttggtgcagcttcgacctcccaggttcaagtgatcctcccacctcagcctcctgagtagctgggactacaggcgcacaccaccacacctggctaatttttgtgtttttagtagagacagggatttgccatgtttcccaggctggtcttgaactcctgggctcaagt

SEQ ID NO: 419079 - DNA, 542 bp, Homo sapiens
ttctcacttgtaacttggctaggagtacatgtgtggatggacatggaagcaagtatgtggagtctggaaagaacaggcatttatccacagccacttgattgttaccttcttgtcaggggcaaatcattttgtaacaactggcccacacccttgttaaaccatcccttgcccaaaattcatctgtgctaattgggcctgaatgaagacaaaggtctcagttaaataacataccgttatagtaggaataagacttcacaaccaaagaatctccatcaattttcctgtctcaaaaaatgctagccttcataaatccagcaaacactggtgcatatagaaaaagcaatgaactrgaagccaggaaacctgagccaggcccaggcccagctcaagtcctactcaaaccctacctcctccataatgttgttctgacttctgtatcctgcacccatctatcttttcttggaatttttattttgctgacaacttgtttcaaatgattttcataatgtgtttagcacatgctttgatacacagttggcccc

SEQ ID NO: 419080 - DNA, 625 bp, Homo sapiens
ctttaaataaataaaaataatcaggctcagaataaaggaataataggtaaagaaaatatgcaaactaaggacaaaaaaaggcagaagatcatagtggaccacaagtatttacaagtataatacaaaggtgtggttgatgatttgtgtgactttttttaatagaagaggtgacagggaagtggagagaaaggtacatagtacgaatgatctgagataaaacagactcacataatcggaattgctttgaactatcataagtcaataataatgtgagaatgtggaaaggatttggaagacatttgcaaacaggatctatgatgaagggtaaaatcctcatctgtattgttagcccagagctggagaaaagaataaagggtgatgtggcaattttcatctgtgggcaggtagacagaaaatggtggggatctgttctctcactccattkagtcccaacacgaagtaaatggtccacagaaagaatttaggttcaacgtcaggattcatttcccagccatgagggttgttaaatgctaaagtggttgacccacagacagtaggcactttccttcattgacactctttaaaagggaaaatgaatgaaaaagacacttctgtctgaaacaac

SEQ ID NO: 419081 - DNA, 625 bp, Homo sapiens
ctttaaataaataaaaataatcaggctcagaataaaggaataataggtaaagaaaatatgcaaactaaggacaaaaaaaggcagaagatcatagtggaccacaagtatttacaagtataatacaaaggtgtggttgatgatttgtgtgactttttttaatagaagaggtgacagggaagtggagagaaaggtacatagtacgaatgatctgagataaaacagactcacataatcggaattgctttgaactatcataagtcaataataatgtgagaatgtggaaaggatttggaagacatttgcaaacaggatctatgatgaagggtaaaatcctcatctgtattgttagcccagagctggagaaaagaataaagggtgatgtggcaattttcatctgtgggcaggtagacagaaaatggtggggatctgttctctcactccatttagtcccaacacgaagtaaatggtccacagaargaatttaggttcaacgtcaggattcatttcccagccatgagggttgttaaatgctaaagtggttgacccacagacagtaggcactttccttcattgacactctttaaaagggaaaatgaatgaaaaagacacttctgtctgaaacaac

SEQ ID NO: 419082 - DNA, 581 bp, Homo sapiens
gcataacagcagtgattccaaaaagaggacccagaagcttcttgtgccaggaccacctgaaccaatttgcacaaccatggccagggttacagtggcctcatgagacaggaccaggatccctccaagagcactctttggtgaacacttttggtaggcgagtgacgtcagggcctggtcacaggggtccatggtatcatgcttcgagaatcgtgcctgcttccactggaactccaagatcatcgagggaatacamacagaggtgatgggctctggtgaggatccttaagcctaaatccctttcaatcacacagatatcaccagtatcatcagttgacaaagaggtttaagatttctgaaacttcagcttggttgaacatcaaaaggcaggtggaccatcctgatgcattagcagtttgaaggggccgggaagagtgaaaatgactaggaattactatagtgaaatggaggctggagcaacctagcatgaagatcccacgaagaacggagtgaggcagagcacagggcaacctggaaagaagcagtcacgactagcaaagggagcctgtgcattttgttagggg

SEQ ID NO: 419083 - DNA, 581 bp, Homo sapiens
gcataacagcagtgattccaaaaagaggacccagaagcttcttgtgccaggaccacctgaaccaatttgcacaaccatggccagggttacagtggcctcatgagacaggaccaggatccctccaagagcactctttggtgaacacttttggtaggcgagtgacgtcagggcctggtcacaggggtccatggtatcatgcttcgagaatcgtgcctgcttccactggaactccaagatcatcgagggaatacaaacagaggtgatgggctctggtgaggatccttaagcctaaatccctttcaatcacacagatatcaccagtatcatcagttgacaaagaggtttaagatttctgaaacttcagcttggttgaacatcaaaaggcrggtggaccatcctgatgcattagcagtttgaaggggccgggaagagtgaaaatgactaggaattactatagtgaaatggaggctggagcaacctagcatgaagatcccacgaagaacggagtgaggcagagcacagggcaacctggaaagaagcagtcacgactagcaaagggagcctgtgcattttgttagggg

SEQ ID NO: 419084 - DNA, 496 bp, Homo sapiens
gatttgtaacacttctcctgtttgtgtcatacatgtaactgtgtgatcattggtttaacataagctttccacactgggactggaagctcatggagaccacatcagtcctgctcaccattatatagtcagatttagcatggagccaggcacrtggtggaaagtaaatattcattaattgaattaattagttaatggtccatgagctcaaggagataagcaaggtcttcccagatggccattcccaggattgatctttcaagaaagaggaagaaccccagagagaaaactggaactaagatgggaaaggtgtctttctcttcatcatggctttgttgtcttgaacttggactttgaagaatcaaggagtctagacatacattctgggtggtgggtgctaaggaggggcccgcccatgaagatggttctacctagaatctaggtcctctaactagcctggtttattccccagatttggaaagaggatggatttgagttg

SEQ ID NO: 419085 - DNA, 496 bp, Homo sapiens
gatttgtaacacttctcctgtttgtgtcatacatgtaactgtgtgatcattggtttaacataagctttccacactgggactggaagctcatggagaccacatcagtcctgctcaccattatatagtcagatttagcatggagccaggcacgtggtggaaagtaaatattcattaattgaattaattagttaatggtccatgagctcaaggagataagcaaggtcttcccagatggccattcccaggattgatctttcaagaaagaggaagaaccccagagagaaaactggaactaagatgggaaaggtgtctttctcttcatcatggctttgttgtcttgaacttggactttgaagaatcaaggagtctagacatacattctgggtggtgggtgctaaggaggggcccgcccatgaagatggttctacctagaatctaggtcctctaackagcctggtttattccccagatttggaaagaggatggatttgagttg

SEQ ID NO: 419086 - DNA, 565 bp, Homo sapiens
gtttttttggtggagtttttaggtttttccaaatataagatgatacatcgtctataaacaaggataatttgacttattccttcctaacgtggatgccctttttttctttcyattttctgattgctctagcaatcagattgctctcccagtactatgttgaatagcagtggtgaaagtaagcatccttgtcttgttccagatcttagcggaaaggcattaattttttcccattcagtatgatactaattgtggatctgtcatatgtggcttttattgcattgaggtgtgtttcctctacaccaagttttttgagggtttttatcatgaggggatgttgaactttatcaaatactttttcagcatcaattgaaatgattgtatgatttttgtccttcattccgttgataggatggagcatatcaattgatttgtgtatgttgaaccatccttgcttccctgggataaatcctatttagtcatgatgaataatctttttaatgtgttgatgaattcagtttgctagtattttgttgagaatttttgcatcaatgtttatcagggatat

SEQ ID NO: 419087 - DNA, 378 bp, Homo sapiens
cttcccccacaggcgttacatagccatgtgccgcgagaagcagcccatggtgccagagtctctggctgactacatcacagcagcatacgtggagatgaggcgagaggcttgggctagtaaggatgccacctatacttctgcccggaccctgctggctatcctgcgcctttccactgctctggtaagtgcccaaattgctggagggccatctgttttgacccttaaaggggtagctcyttaccgtgctctcattgccgcctccccacctcccgctccagccctgccggggctaaagtgctgacagtgcagatagtggtcctctccgtgctaccgcactgtgggtacttgctgctccagcagggcacgcacagcgtccgt

SEQ ID NO: 419088 - DNA, 349 bp, Homo sapiens
attaatttttaaaatcgacatatgataattgtatgtgtttacggggtacataatgatattttgatacatataatatatagtaatcagatcagggtaattagcatatccatcatttcaaacatttatcatttcttagyggagaacagttaatatcttccatctagctatttaatattatataagatattattacctatagttaaactgcagtggtatagatcactagaacttatttctaccatctagctataattttgactgccttaacaaatatatccctttctagtatttccaccctctagtatcttttgttttactttttacttctatgagattaactttttttttt

SEQ ID NO: 419089 - DNA, 538 bp, Homo sapiens
gaactaaaccgcaacgcaaatataaagcctacttgattgtgttggataagttttttgacgtgctgctggattcagtttaccagtattttgttaaggacttctgcctcaatgttaatcaaagatagtggcctgaagatttgttattgttgttgctgtgtctctgccaggttttggtatcaggatgatgctggcctcatggaataagttagaaatgagtttttcctctttaatttttggaatagtttcactaggaatggtaccagctcttctttgtacaagtagtagaatttggctgtgaatccatctgtcagtctggtcctgggcttatttttttttggttggtaggctatttattactggttcatttttggagcttgttattggccttgtcagggatwtgatttcttcctgactcagtcttgggagagtgtaggtgccaaaaatttgttcatttattttagattttctaatttatgtgcatagaggtgttcataatattctctgacggttgtttgtatttctgtaaggtcagtggtaa

SEQ ID NO: 419090 - DNA, 536 bp, Homo sapiens
tttggagtaataaggattttcttcatcttaatttgtgtgtatgtgtttgccaaaactcatcaaactactctgaccatctcgacattttactgcaggtaaagtgtatctcaataaaattaaaataatatttaaaataaactgtgattccaagtatacarggaaataattaattaataaatataatagaaatgctttctatctgccagtggtgctatataatgcagattgagaaggacaagttcctagaagtggtaaagtcagaaactgaagtgtgttttcatgctttccttgtttaaaaagtagacgcagggtacatgtgcaagtttgttatataaatatattgtgtagtgatgagatctgtgcttctcatgtatccatcgccaaaatagtgaactttgtacccaatagttaatttttcaatcatcacctccctcccaaccgccctccttttggacttcccagtgtctgttattctcttctgtatgtccatgtgtacctagtgaaatattgaagcattttgtagccaaaaaagtcag

SEQ ID NO: 419091 - DNA, 579 bp, Homo sapiens
ctcaacaaacgctatctccttcataattatcaaatgtacaacccgctgctctatttccatacctttctgcatagaacttttatttcaatgttgaatcagtgtgaacgattttttttaaagacagttgaaaagacaatcaaaataaagatgcatagtgggaagttgcatgtatatcaactgaatgatgacaaatagcttagttttcacataaaaatggggtaaccagtcaggcacggtggcttatgcctgtaatcccaacacttcgggaggccaaggcakttggatctcgaggtcaggagttcgagaccagcctcaccaacatggtgaaaacctgtctctactaaaaatacaaaaattcagcatggctggggaggcctcaggaaacttacaatcatggcagaaggggaagcaaatgcatccttcttcaagtggcaacagcaaggagaacaagagctgagtgaagcgggaagccccttataaaaccatcagatctcatgagaacttactatcaggagaatagcatggaggaaattactcccatgattcaattacctcccactgggtcccactcaccacatg

SEQ ID NO: 419092 - DNA, 579 bp, Homo sapiens
ctcaacaaacgctatctccttcataattatcaaatgtacaacccgctgctctatttccatacctttctgcatagaacttttatttcaatgttgaatcagtgtgaacgattttttttaaagacagttgaaaagacaatcaaaataaagatgcatagtgggaagttgcatgtatatcaactgaatgatgacaaatagcttagttttcacataaaaatggggtaaccagtcaggcacggtggcttatgcctgtaatcccaacacttcgggaggccaaggcatktggatctcgaggtcaggagttcgagaccagcctcaccaacatggtgaaaacctgtctctactaaaaatacaaaaattcagcatggctggggaggcctcaggaaacttacaatcatggcagaaggggaagcaaatgcatccttcttcaagtggcaacagcaaggagaacaagagctgagtgaagcgggaagccccttataaaaccatcagatctcatgagaacttactatcaggagaatagcatggaggaaattactcccatgattcaattacctcccactgggtcccactcaccacatg

SEQ ID NO: 419093 - DNA, 525 bp, Homo sapiens
agaatgagtacaaggttttatccagtggtaaaagtagctctcagcatatggatgggagccagaaaggggatggagtggaaaggtggtcttcctctgggcgttgggccactcagccaccagactgtcctcccaccacccccgtcattcacttctttctgcggtcgatggcttactggagtctgtccatgtgttcttctgctggtgtgttcttctcaacgtccagccacttgtgtgtgtgaccacttgtgtgtgtgaccactagggtctcagggtttttataggcacaggatgggggcgtggagggccagagtgctcttgggaaatgcaacatttgggcatgaaagcagaagttygtattctcccttaggtccgtgggcacaggccagagcttggagccctccccagggaccccacccttctcccccagcacttccctgcaccccctcccatatcaatgttgcaatgaagtcatactagagtagagtgggacctaatctaatatgattagtgtgtttccaagaagag

SEQ ID NO: 419094 - DNA, 408 bp, Homo sapiens
aattttctgcatagcagaaaccgggtcttgaatccaggtgttctsattctgagtttatttctctaaacattggtaatgaccatagaaagtctattttaaaaggaaacacaaaccaaagactaataaaactatatgcaactagagagaattgtatcatgatttagatgagctctgctttctacccttctcaatttaagtgggggttcatgttatcccttactttcattgtcattttccttggtccagtgttctcctaggtctccaaatgaagctatcacttgcagtctgcaaaacacaacactgcactaatttaattctgttttatctcacgttgctctctaattggtttatgtatgtcaatcatctttctggctagacagtgaatcttcaacaggcaggaatcacact

SEQ ID NO: 419095 - DNA, 511 bp, Homo sapiens
gagtgggacctaatctaatatgattagtgtgtttccaagaagaggagaaaagacacagagacagacacagagggaagacagtcatatgaagatggaggcagagattgtaattatgctgccacaaatcatagaacatatggggttaccagaagctagaagaagcaaagaaagattcttctctaaagaatctggagagaaagcagtcctgccattgccttgattttaaacttttagtctccagaactgtgaaagaatawatttctgttactttaaggtacctggtttgtggtatttgttaaggcagccctagcaaactaatccagagggaaatctggagaaggaaagagtgaggagaagatatggaagttaagagaaagtggcacctggcgctgtgaaaatttggacacaccaccacataacttaccttactacacaagacctcaaattttaattaaactgtgcccaaatatataagtatcttaaagaaaatttctcataaaagcaagttaaa

SEQ ID NO: 419096 - DNA, 576 bp, Homo sapiens
gctgctttaagataatcacagctgaaatccaaatgaatctggtgctgagaaaaaattagagattaaatttttaaaataaaattgatgttttgacaaggagcaatgagaatragaaaagaagtcatgatgttcgcccaccagttcagaacatacccaatggcagttaccatgacatttgaggatgtgaccagtgcccctagatagtacttagaaacagtcttttcctgggtggatatgcaaactgacatgttttcaatcaagtaaatacccattaaatattgaataaaatttcaaatacaaaagctttatttgaagataattttatagcacacttctccacaaaatgatgactttttttttaacattgtgcaagtgtctttgcaagaaacctaacgtgacagtgcctcatttcaaatatacttatcttcacaaaggataactcttgctgataattgtctaaactagcttcagtttctaatatgtacatctctgtttgcttcaagagagtaattctaaattgtgtctcatctcaattttcttacagcattttactcaatgtatcttggctttgtatct

SEQ ID NO: 419097 - DNA, 408 bp, Homo sapiens
aattttctgcatagcagaaaccgggtcttgaatccaggtgttctgattctgagtttatttctctaaacattggtaatgaccatagaaagtctattttaaaaggaaacacaaaccaaagactaataaaactatatgcaactagagagaattgtatcatgatttagatgagctctgctttctacccttctcaatttaagtgggggttcatgttatcccttactttcattgtcattttccttggtccagtgttctcctaggtctccaaatgaagctatcacttgcagtctgcaaaacacaacactgcactaatttaattctgttttatctcacgttgctctctaattggttyatgtatgtcaatcatctttctggctagacagtgaatcttcaacaggcaggaatcacact

SEQ ID NO: 419098 - DNA, 571 bp, Homo sapiens
ggaggaagcatggcatagagataagggcaagtgccaactgtatgaagaagataatttctaactttcctttcagctctatgagtctaatggcattacagtcctaaggcaacagaaagggtgttttaatattaatataaagcaatcaaaacatccttctatcttcagcactatgataaagatataaacattttgttagaagaaaacctagagaatatatatttctacatgttagtatttttaaaagtatgaattatatcataattatcattgcaatgaacatctataaagtgttttatctgacacaagcagtaggcaaaacactacattaattttctcatataaatatcttatttagagcaggagataagtattgtgattatacctaaatatagataagaaagctgaggtttaaagaacctttctccyattaccaagacataaataagaagaacagaattttaatgactcttctgacaacaaatgcatttaattcaatacatacttaaaaaagaattcttaaatacaaactataagtgctttcttgcaacttcaatagtggggattggcagag

SEQ ID NO: 419099 - DNA, 596 bp, Homo sapiens
gtcttgcatcccctgagtttctgctgcctgtatgaagcatcttacccctgaaaacttctctcctcaactggacattcttaggccaattttattctcatagatttctgctcttcagcagtaatcaatgactgatatcatataatccaataatttcatcatcaaaaaggcttttgcaagtttaaattggcatgaatatggatgaacccagaattgtacccttcttggaagatgttgggattctgatatcagaaaaattgaacrtataattgacagtgagggggtagttttcttttgaaaataagtgaaacacaatagtcagccatttttagaagttaacattgtatcagaaagtgagaatttagaaaggtgggagtgaagaaaaaatttcttatttccaactaagttttgattgacctaggtgacaaactatgaagatggcttaggttatttcaggaacaaagagtgtgtgtgtgtgtgtgtgtttcaggggtgggtgaagagaagaaagttgagctgtcctcataatattaagtcaagccaggatccttcctagaatagggcatagacacaaaaattaatctttgttttgaacttcc

SEQ ID NO: 419100 - DNA, 569 bp, Homo sapiens
aaaaatctctgcctcttaatgaattctatttcaaatgttctcattataagactttcaaatctcattaactaaaccaagcattaaaaatacaataataataaaatgaaacaggaaactgttgatatgattagatttgggtaactttcctcttttagtgaggaagaaaatgtggtttgagtaaatgataactcaagcataggaagcgtactttacaaagcacaaggaatacatttctttacatgttctagtagaatcaacaattttcctagtcaattgtagctgagctagagttataaatataagtaggaaaatggtgtatcttaacaagggcatgttggcattagcatttttatgatgtgtattttcaacagtgatgcagaataaaaacacgcaccacataaagataccatcttctatttcccatcctcatktacaatggtccaagcctttattatactgtttattgtggaatttgaacccaagtttattgactgctatctactcaagacctctttaccacatttttctgaaaacgtagggcaaaacaacatgtgagcaagtagcatagg

SEQ ID NO: 419101 - DNA, 606 bp, Homo sapiens
ttttctagttttgtgaagaatgccattggtagtgtgaaaggaatagcattgaatctataattgctttgaatagtacagccattttaacaatgttgattcttcctatttatgagaatggagtgttttcccatttgtttgtgtgatctctgatttctttgacccgtgttttgtaatttatgttatacagaactttcacctccctggttagctggattcctaggtattttatactttttgtggttattgtgaatgagattgtgttcttgatttggctttcaacttgggtgttgttggtgtmtaggaatgttactgatttttgtgtacattaatttcgtatcctgagactctgctgaagttgtttatcagatcaagaaacttttgagcagaagctatggggatttctaggtatagaattatatcatttgcacacagagatagtttgacttcctctcttccaatttggatgccttttatttctttctcttagccgattgctctggttaggatttccagtgctatgttgaataatagtggtaaaagaaggcatcctttcttgtgccagttttcaatggaagtgcttctagcttttgcccactcagtataatg

SEQ ID NO: 419102 - DNA, 518 bp, Homo sapiens
tttatttttgtgttgtgtctctgccatgttttggtatcaagatgatgctggcctcatagaatgagttaggaaggagttccttctcctcaattttttagaataatttcagcagaaatggtaccaattctttattatacwtctggtagaattcacctgtgaatccatatgatcctgggctttttatatggattcaatttcagaactcaatattggtctgttgaggaattctatcacttcctgcttcaatctcaaaatgttatatatttccaggaatttatctatttcttctaggtttctagcttgtgaacatagaagtgttcataatagtctctgagggtttttatatttctgtggggtcagagataagatcccttttatcattttggattgtttttatttagatattctctcttctttttttattagtctagttgatggtctatctatcttattaattctttcaaaaaaaaaaaaacaggtcctggattctatgatcttttgtatgttttttgtgtctc

SEQ ID NO: 419103 - DNA, 643 bp, Homo sapiens
ttgaatctgtgctttactttattgcgcttctcagatattgtgttctttacaaattgaaggtttgtggcaatcctgcatcaagtgagtctattgctgccagtttccaacagcatgtgctcacttcatgtctctgagtcatattttgataattcttgcactatttcaaacttcattatttttacaccttttacagtaatttgtgatcagagatctttgaggttactattgttattgttttggggcactatgaatcacacccatataagaaagtaagcttaatttgttaaatgttgtatgtgttctggatgyaccattgaccagccatctgcctatctctctctccttggacctctctattccctgagacataacaatattgaaattaggtcagtgaataaccctacaattgcctctaagtgttcaagtaaatgaaagagtcacaggtctctcattttaaattaaaagcttgacataatgaagcttagtgagaaaggcatgttgaaagctgaggcaggctgaaagccagcccttttgtaccaaattgtgagtgcaaagtttaggcaaattgtgaattcaaatgaaaaatacttgaatgaaattaaatgtgctacttcagtgaacacaggcataataagaaagcaaa

SEQ ID NO: 419104 - DNA, 585 bp, Homo sapiens
agaaaaaaaaaatcaatctcagtattctctaaaggataaacataaaaagaatattaaaatgagtccaaaaattatatatgcattatacctttgaaaaagctcaagccaagaaatataaaaatttgctaaatttcccacagctaatcatagcaagtctcctaacgtctagtccaaaaccaaatcttatacaccaaaatagctcttttagcaatttagaaaaaagtgaaggcttatgatactggttcttatttatgccacaatgctgatgcctgaacatgtagaaaaaacactaaaagccacacctgagacacaaagatgcttctacactttacctgctttatgttcatttcctctccccttttatctcatcaactttattaggttaaaacaccacttaccagctttctctaaatgactccctatgtctggagtttggtggctccttgagatgcatagggcttggctggatatatgtgctttagatgmaggtctgtaaactttttctgcaaagggtcagatagtaaatggtttttgcttttttggccatacagtctttattacaactgctcatgctacaattactca

SEQ ID NO: 419105 - DNA, 430 bp, Homo sapiens
agaaaactaggtatattatgatttgtgttcttaatggaagcattcctcatgtgcactcaaacatgcatcttttgtttgtttgcatatcagccatataattattttataaaaataaatggaaatgtctcatacttaagatttttgaagcagagcagaagtacagtataagggaaaccaaaaaagayttgattgagtgaaagattaatgcacataaataggtggataaagttgatgaatcagataattttgtctttgatttaggtggtaatctgaggagaataataaaccttttttggcatcaataatactgtacttggaaaactcacttcaaatggaaccatttaagtggaatttaaaattatattttaagtgggacattaaaatggagtgagagttaagctaagagaaaaaatatcttgattgtgggagc

SEQ ID NO: 419106 - DNA, 576 bp, Homo sapiens
tgtgcactcaaacatgcatcttttgtttgtttgcatatcagccatataattattttataaaaataaatggaaatgtctcatacttaagatttttgaagcagagcagaagtacagtataagggaaaccaaaaaagatttgattgagtgaaagattaatgcacataaataggtggataaagttgatgaatcagataattttgtctttgatttaggtggtaatctgaggagaataataaaccttttttggcatcaataatactgtacttggaaaactcacttcaaatggaaccatttaagtggaatttaaaattatattttaagtgggacattaaaatggagtgagagttaagctaagagaaaaaatatcttgattgtgggagcccttggaaccatgccaaattaggaagagtcaaccgaaaggagcattctaagtgaggcaagaaaaaggtgtagaatgggcatcaggatagaaactaggattctagtttaatcacttttttgaaatattatattggagaagaagattaaataatatgaaacaaaaawcacagcaaagtgagtaatgaaaagtttgga

SEQ ID NO: 419107 - DNA, 632 bp, Homo sapiens
tatatcaaatcaagtaatttgatgccacagtattttggtggagcaggggggactgacactcaaacattattgatgggagtataagttggtgcaaattctatgaaacaatgttagtcatagatattaaattaatgtgttttgcgtgcacatatgattcacgttgtaggaatgcatgctccaaatatgatactagtaaacctaaaaaaattataagactatttattaaaacattgcttaatataggaaaagactagaagtaacgtaagtgttcattaacaaggaattgattaaataaattatggtaacgccataaagtaaaattgagtgaatgtcagaattagggttatggttaatakgaaagctgaaaaggaacccccaagactatttaaacaaaaaaagtcaagccatggaacagtgctaagtaagtgctgagacctcgcctttaaatatttcaatagataatattgagtttcatatacatgccttatgcacataaaatgtctccacaggaatacataagaaactcctaaccacggttgtctctgagaaagagaactagctgaccaacagactgaaagtagtctgatattttactttgtaaatatctgtactttttgacttttgtgtgatgg

SEQ ID NO: 419108 - DNA, 618 bp, Homo sapiens
ttttaaaaattaataaaatagtcgctatttttttatcccagctaggaaagaaagtctcagatttcccacatttttttacttaaaagagaaagaagaatactgcctttacttctcttttactttatttctttttcctcaacattccagatgtaaatacccttctttgtattcattatgctaaacacaactaacagtcttggaaatatagatataatataaatattatatgtagatatatttatatgttaatataaataatttagaagactctgaaaggyagcaataaaaagactgactggctagaaccttgaggctaaaaaaaaacacgatggtgtttcctgagttttctttttgcttcaaacatcctagttgctagaattatctgacaagaattttaaagcagccaatatatgtctttaatgagcaattatgaaaatacttgaaacaaatgaataaaatacgtactggcaaaataatagaagacataaagtagaaccaaaaggtaattttagacctaggaagaatgaaattttcagggtcaaacttcaagtctgtctttcaaatattttcagacttttaagttgcaggaaaataattagtattttgtactacttaatt

SEQ ID NO: 419109 - DNA, 550 bp, Homo sapiens
  misc_feature (1)...(550): n = A,T,C or G
nnnnnntcaaagagaatttctcttttatctaaactaataccttaggrgaaaatgaaattaatttaaataggagaacaaatacaagctctcattgacactggagctacattatcagtgataaaaatccaccttattacaataccacattccctggagtaaaaaaaaaaatacagtaccccctgaacctaaaataaacgttgaaaaaataaataaataaaattaaaattaaaacaaaaatataaatggtaggtataataagtattcctatatcagtatataaacctcaatctacaatttttcagttgggtcccttacagagaatacatgttttcctcttggtccctcaacccccagtcatttaatagggaaagacattttagaattatacaatacccacatctctttctcacaaaaggggaaaagatatttataattagaatataaagtagaattgttacacttaaaacctctctgacccttaaaaaaatactctagaggccttggaagggatgagacctataaatttgcattacataaaaagaggcttgat

SEQ ID NO: 419110 - DNA, 639 bp, Homo sapiens
ttttataaggggaagtttccctgcacaagctctctttttgcctgcagccatccatgtaagacrtgacttgctcctccttgccttctgccatgattgtgaggcctcccaagtcacatggaattcagagtccattaaaccctttttttctgcataagttacccagtcttgggtatgtctttatcagcagcatgaaaatgaactaatacaccccatcagctttatagtcagaataattccattgccatggtatatgacattctaggaatgagcattcctagtgacatgggactaagttcttgaacataaaaggggcaaaattgcttgagtttatctacgatgctttcttcaaaagatcttgatgaaaatgggggaatgtgaaattaaataattcaagctttattaaataattcaaatgtaaagttgttggaactttaaattattctgagccttgagaagaatgtgtccatgcagcctgagttacacggcatacaaccacaacttctacgtttttttctctataaataattaggaagaccaaacaacaccagagataagagccccatagatcactgcctctactcagataacaataaagtaatcttccttggaatgcagcaatctgtaactaatcaaattgct

SEQ ID NO: 419111 - DNA, 639 bp, Homo sapiens
ttttataaggggaagtttccctgcacaagctctctttttgcctgcagccatccatgtaagacatgacttgctcctccttgccttctgccatgattgtgaggcctcccaagtcacatggaattcagagtccattaaaccctttttttctgcataagttacccagtcttgggtatgtctttatcagcagcatgaaaatgaactaatacaccccatcagctttatartcagaataattccattgccatggtatatgacattctaggaatgagcattcctagtgacatgggactaagttcttgaacataaaaggggcaaaattgcttgagtttatctacgatgctttcttcaaaagatcttgatgaaaatgggggaatgtgaaattaaataattcaagctttattaaataattcaaatgtaaagttgttggaactttaaattattctgagccttgagaagaatgtgtccatgcagcctgagttacacggcatacaaccacaacttctacgtttttttctctataaataattaggaagaccaaacaacaccagagataagagccccatagatcactgcctctactcagataacaataaagtaatcttccttggaatgcagcaatctgtaactaatcaaattgct

SEQ ID NO: 419112 - DNA, 639 bp, Homo sapiens
ttttataaggggaagtttccctgcacaagctctctttttgcctgcagccatccatgtaagacatgacttgctcctccttgccttctgccatgattgtgaggcctcccaagtcacatggaattcagagtccattaaaccctttttttctgcataagttacccagtcttgggtatgtctttatcagcagcatgaaaatgaactaatacaccccatcagctttatagycagaataattccattgccatggtatatgacattctaggaatgagcattcctagtgacatgggactaagttcttgaacataaaaggggcaaaattgcttgagtttatctacgatgctttcttcaaaagatcttgatgaaaatgggggaatgtgaaattaaataattcaagctttattaaataattcaaatgtaaagttgttggaactttaaattattctgagccttgagaagaatgtgtccatgcagcctgagttacacggcatacaaccacaacttctacgtttttttctctataaataattaggaagaccaaacaacaccagagataagagccccatagatcactgcctctactcagataacaataaagtaatcttccttggaatgcagcaatctgtaactaatcaaattgct

SEQ ID NO: 419113 - DNA, 639 bp, Homo sapiens
ttttataaggggaagtttccctgcacaagctctctttttgcctgcagccatccatgtaagacatgacttgctcctccttgccttctgccatgattgtgaggcctcccaagtcacatggaattcagagtccattaaaccctttttttctgcataagttacccagtcttgggtatgtctttatcagcagcatgaaaatgaactaatacaccccatcagctttatagtcagaataattccattgccatggtatatgacattctaggaatgagcattcctagtgacatgggactaagytcttgaacataaaaggggcaaaattgcttgagtttatctacgatgctttcttcaaaagatcttgatgaaaatgggggaatgtgaaattaaataattcaagctttattaaataattcaaatgtaaagttgttggaactttaaattattctgagccttgagaagaatgtgtccatgcagcctgagttacacggcatacaaccacaacttctacgtttttttctctataaataattaggaagaccaaacaacaccagagataagagccccatagatcactgcctctactcagataacaataaagtaatcttccttggaatgcagcaatctgtaactaatcaaattgct

SEQ ID NO: 419114 - DNA, 652 bp, Homo sapiens
ctttccttcctcattctgaattaattttacaaatactagatatgggcataaagtattttaagactctcagaaataaactgcacacatgatcaaatcaagccagaattgccagtttttaggttattgcttccatcttaatgtcctttgaaataacgattctgactttaatgcatgtgctaagatacttctttatcgtttaataataccatttaactattatatgccaaattctatgctaagtcctaaaagtataaagacaaataccacattgtgcctctctttaagagcataaagaattttaagaaggagagatctataaacatataactctttstaatattctaaagtctggaatctacaaagtgtgcaattaaaataaagagaaataacacttataacagcaatgggaaagaatgggattcagggaagattttctagaagagttgccattggaggtagatattaaaggatgaagaaataattttccaggcaaagaagataagactgtagggagggtgtactctaagatagtacaggttccaaaaaatacagaagcgtgaatcacactgggcttctataactggtctggcattataatgtagagtatgagacaggaatggtaagcaatgattctggagagtcagaaagggcc

SEQ ID NO: 419115 - DNA, 582 bp, Homo sapiens
caatgtgttgtctttggcacatagaataaaaatcattagtttaatttctagtccacagattttgaagaaaaaaaaagatcacctaaagagaaaatagagaaaaactgtaagtattaatgtactattataagtctctattacaaagacaggtttataggaaataaaaaagcacataaagcatgacacaggctcattacttaaaataaatttttatggcagaattggccagacagacttttatactatcagataattaagtagtgatattagagttttttaaacaactttttaaaattatgagaatattcaaayattaacaaaaatagaaacaacaatataatgaaacctactgtacccaacacccagttgtaacaattatcaacagcctgctgtactatagtgtgtttggatgtcttttggggatgccaaaaataaaagcatttttttttcttataaaagatggtaaaaaaaaagggtcatatgtgtttaaaatcttctcaaaatatatactcatattttcaaaatacctggatctacaattcaagaagaggttaattttattagatagttactattattact

SEQ ID NO: 419116 - DNA, 573 bp, Homo sapiens
actaattcccattccctcagaatgtgactttatttagagacagagtcattaaaggggtgatgaatctactaaaaggccatcatggttggccctaatccaatcggattgctgtccttataggaaaaagagagttgaacacacaaacagacactatgaatgcacacacacagagaaagaccatgtgagggcatcccaaaatatgacactgtgacatgccaaactaaagaagcagcctcaaattctctctgatcttcttctctccccttctccatccttcctctctcccaaaacacaggataaggctgttttctgaagttcctattaactgcctagaaaccagaacccacaaaaggaacacatcagctccctgtgatctcaatatttatgcagaagggaagactgaggagttcaatcacacctaaaccaatttttttacaagataaatattttatattgggcttggtcaaattccaaacagaatcatttrcaagttaatttctgtctgctgggtttattcatttttcctgaaaatcatttacccctacactctccatctctcctctcctcagtgaa

SEQ ID NO: 419117 - DNA, 585 bp, Homo sapiens
tacttggatttcattgtctattgcagcaaataaagagggtaaaaccaggagatcaatttacatatcaaaacaatcttaacattgctattctgtataagtttttgcctgtatggtataatttcaggaaaaaatagaaaaattcctgcaatcttgttttacatatttttcctgcactgacattaaatgcttcaatagatatccctttgcaatattttcttttaataggcagtgtttttgattggagaagaaagggagaaaaggagaattggatagttagcccaacatttctaacttcatagtggtaacaaatttatctgaatgggtggttgcaaagacaagtgagctgtcaaaagcttgacttacctactatctcacatacacatgcacacacaaacatggatatgtgtagatgcatgtacacacacacacrcacacacacacacctacatgattcccttccatatacctgaaacatcctgagtgaataaagtccctagaggcaaaaagtcacctttctgagaaaactggaacttcaaagttaacaattcacacttttgctactttgctactcactatgctggctgt

SEQ ID NO: 419118 - DNA, 393 bp, Homo sapiens
taaaaaaaatttttttggttatgtaatctkaagcaacacacacaactgcctaaatctccatcattgctgcactatttctttcagtttgacagagtttttggttatataccaattaaaataaaaatacctctgtaaagaatcaaacataattagggttgaagcccatgacagaagcttattaagtgttagcagattcagatacatcatataccagtttgaagttttccctgaatagggagaagtggtcaaattggcaaaaagggggctggaatgggatgtttgagttttttgacctttctcatgtttttagactttagtgaaattttaaatgttaacttctggccagtaaattctttggagtctgggaccacccatggaacaccattcagtggg

SEQ ID NO: 419119 - DNA, 594 bp, Homo sapiens
tcattttaagagacctgttttcaacttctgagattctttcttctatttggtttttcaatattttcttggacctctcagagcttcttcaagattaatattttgaattatttttctaggaatttgtaaatttttccggattgaaatctcttgctgagaattattgtgatcttttggtggtgtcatattttcttgctttttcatgtttctcttgtccttatattgatatttgtgcaccttatgtaacaattgctcttttcagtttttggattaactttcatagaagaaggatttttcctgaagatatgttaaagttgttggttggcaaaggtactttagctttgattctgagtgcatgcaatagtgtagtctctgtatgatttcttcagctgtgaatagcatcagaggaatctgtgatttcctcagtggcttggctgaggttgttagtagaagctgtsgtgaggcattgatggggataggtatgccaagtgggccagttctcaagccccagtgtatcagtggcaggcggagtgtgcttgacctagggccactcagtggcatatacaggcactggtgttactggatccaggtgggcca

SEQ ID NO: 419120 - DNA, 575 bp, Homo sapiens
cttgatttaagcttttaaaattgccactttagagcagcctgtaatctggggataattttgctcttatactaaggtgatgtcctgaggattctacttaatgatcaaggtattataatatctttccattctggctagtaagaacacaaactattctcagctttttatgaggagttttcgacttcttgctttctggtgattccccagtctttgtggcttcattctcaggtctgcagctaagtactcaattaaagattcaaggatacctttatgcagatctccagggctcttgatcctcttttcaactaagtgagtctcctagctctgggatcatccctttgaaccacagtctgcaaagtgaacatctgggaatctgtagggcttacctcatttgttttgctgcctattgtccaatgtctaaaagtcattgtttcaaatatttgtccatgtggttcactgcctatggcttatgratatctgttttgcatttcctacatttggccctgttcaaagttattttatcctcagtgtcccaaatggaactctattattcactcagtcatggtttagacatcatt

SEQ ID NO: 419121 - DNA, 478 bp, Homo sapiens
tgtcctgtgcaacaacatggatgcagttagaagccatagtactaagagaattaatgcaggaacagaaaacaaaacactgcatattctcacttacaagtggtagctaaatattgagcacacatggacrtaaatatgggaacaacagatgaacaatagacactgggaactactagaggggggagttcaaaaactacctattgggtactatgctcactacctcggatgatgggatccatactccaaaatttatcatcatgcaatatttacatgtaacaaacctacacctgtaccctcttgtgtctaaaataaaagttgaatttttttttaaaaaattaaatcaatggtattttctctttctcccaacaactgatgtgcacacctggtcaattaagcagttatcttcccagcaattctaacgcttacacatgtggatgttcaaataaaatatcataaagctagtttcagactctattttgaa

SEQ ID NO: 419122 - DNA, 478 bp, Homo sapiens
tgtcctgtgcaacaacatggatgcagttagaagccatagtactaagagaattaatgcaggaacagaaaacaaaacactgcatattctcacttacaagtggtagctaaatattgagcacacatggacataaatatgggaacaacagatgaacaatagacactgggaactactagaggggggagttcaaaaactacctattgggtactatgctcactacctcggatgatgggatccatactccaaaatttatcatcatgcaatatttacatgtaacaaacctacacctgtaccctcttgtgtctaaaataaaagttgaawttttttttaaaaaattaaatcaatggtattttctctttctcccaacaactgatgtgcacacctggtcaattaagcagttatcttcccagcaattctaacgcttacacatgtggatgttcaaataaaatatcataaagctagtttcagactctattttgaa

SEQ ID NO: 419123 - DNA, 483 bp, Homo sapiens
ctctgtaaaatgaagttaataacagaagctattttatagcactgtggtaaggattaaatgagttaatatatgtgaagctttctgaagagcccttggcacatagtactgagctcartaattgatagctgttgtactattattattacttacacatggacatcccaatccttgaacgtatggtattattcataagggccagcactattcctagccagctccataaaaatgagagctgtatggttttctcttcttagcagcctgaagcaacaaagcatacatctagtccttgcctttatggatatccacttgcaggactggaaattcttgcctgatcaatcactgtagaactcaattgtttaagaactcagaagcttccagaataatgctcatctatcctctctaccttgtatgtgctgttccctgcctttgagatcctctcttgtcttctccattggaccagaagaggatagaaggtggccctaa

SEQ ID NO: 419124 - DNA, 579 bp, Homo sapiens
aataatgataaccactatacatcaaatactcattacgggggagaaactgggtcaatatcatggtcgcagaattattctcttgatatgagtgttagtttcttcagtttacagatgaagaaaaggaaactggtatgcaaaatgtcatataattgtctcaaatcacacagttcatcagaagcagaggtcaaatttgaacttacatttgcctgattccaagacctttgctcttaactgtatcataagctgatgtagttctacaactgaaacttaacatttacctccagagacaatggaagatactttagctaaaagtaaaagaaattttcaaaaataaggtttattaacgctagaataatttaacatagggagcctgtagaacttcatcactgtaggtgagttgaaaatgagaggatactaaattagaggttttatttaagagtgggtctacctaattgcctagtaggaagtgaaaacaaatgatatttcaagctttcttttaccctatgactttaaggaaaaacaataacaaccataaaacaccaccacctacracaacagtcttctgtgttttcccatgca

SEQ ID NO: 419125 - DNA, 582 bp, Homo sapiens
tttacaacggaggatacataatacaggaagttggttccacagatgataaaggagccgagaagccaaatgaaacggtgagaggaaacccttagcaacaccagggaaccactcctctccctgggctgcctagataaagggagacagcaaagtcactagagtccaggtgtcagggttactcagcagaagccagtttcaaggcaggcctgtcagacaggagctagtgccatggaaaatatacaacctagccagagataacaccaaaaatatataattaaagagaaattccctggtaccttcatttctgtcaccgctcagtctgctgcaggtcttcccactggccacacacagtctgaagcccactgacacataagcctgggaaacagcctacaggtatcagcccttcaagcaggggaacagcaaggaatagatctgaggcagcaatcagcactgtggcaaactagaataaacacacagagcagaatttgaaaaackttcaaaaatttctatcagagtagatgattctctgtatggtgctatttcagaacatttcaaaatacatgtattagcataaggaaaggttaa

SEQ ID NO: 419126 - DNA, 594 bp, Homo sapiens
ctctccttttggacctggcctgcctgcagggcacccatattctctgcaactatcatggggtaaatgtatggaggggrctggagcgtgaaggggttgtactgctcttctagggcctagaagaggtgggtgggtagatgagtctgcctaatccagtagtaaagtcttaggtggcccattgaggatgccatttttggaatgatggcactgaggcctggagtgcttatataactttgccaaagtcacaatgagcaagtgactttgcttagatttgaacctaagcactttggttataaacccaaactcttgaacacaatgtcctatttctgttttgttttttgtttgtcttgttttaattttttccacattctctaatcaaccttaccaagtaagctgttttacatctctgtcagattcctgcatctactcttgaatgcaacagctagcacagggccggcctggctcataatatgcattcaaaaatgggtgactttaatgaagtgatattatcagagtccttgtgatgcttgaatgaaaaagtgaagaatgagctagatcacggcaaggtcactccgatgcttgaaaaaatgtagagtc

SEQ ID NO: 419127 - DNA, 594 bp, Homo sapiens
ctctccttttggacctggcctgcctgcagggcacccatattctctgcaactatcatggggtaaatgtatggaggggactggagcgtgaaggggttgtactgctcttctagggcctagaagaggtgggtgggtagatgagtctgcctaatccagtagtaaagtcttaggtggcccattgaggatgccatttttggaatgatggcactgaggcctggagtgcttatataactttgccaaagtcacaatgagcaagtgactttgcttagatttgaacctaagcactttggttataaacccaaactcttgaacacaatgtcctatttctgttttgttttttgtttgtcttgttttaattwtttccacattctctaatcaaccttaccaagtaagctgttttacatctctgtcagattcctgcatctactcttgaatgcaacagctagcacagggccggcctggctcataatatgcattcaaaaatgggtgactttaatgaagtgatattatcagagtccttgtgatgcttgaatgaaaaagtgaagaatgagctagatcacggcaaggtcactccgatgcttgaaaaaatgtagagtc

SEQ ID NO: 419128 - DNA, 594 bp, Homo sapiens
ctctccttttggacctggcctgcctgcagggcacccatattctctgcaactatcatggggtaaatgtatggaggggactggagcgtgaaggggttgtactgctcttctagggcctagaagaggtgggtgggtagatgagtctgcctaatccagtagtaaagtcttaggtggcccattgaggatgccatttttggaatgatggcactgaggcctggagtgcttatataactttgccaaagtcacaatgagcaagtgactttgcttagatttgaacctaagcactttggttataaacccaaactcttgaacacaatgtcctatttctgttttgttttttgtttgtcttgttttaattttttccacattctctaatcaaccttaccaartaagctgttttacatctctgtcagattcctgcatctactcttgaatgcaacagctagcacagggccggcctggctcataatatgcattcaaaaatgggtgactttaatgaagtgatattatcagagtccttgtgatgcttgaatgaaaaagtgaagaatgagctagatcacggcaaggtcactccgatgcttgaaaaaatgtagagtc

SEQ ID NO: 419129 - DNA, 558 bp, Homo sapiens
tttattctcctgggaagcagatgacatcattttttatgcaaagtacactaagacagtagagtgctggtgaggtgctgataacgcagctctctgtcgggaatacgggagccctaacttccagtgtttgctgatttctgtggtgtaaatatttccaccatggcaaaatataagctactaatatgacatcactgaatgcagaactggggaaaattgtgcttagttagctcttgtgagcccacacaagctggcaccggcatacaacagcactaagggccgcrcacccatcactggaattagactgcacgtgcacatcaaggaagagagcctgtagcaagtaccatgacaagcaggatagggtgaagtgtgtcagttctggagcccaactgcatgtaggtttcaaagcccagctttgccattactaactgggaacttgtgcaaatttttaaaatattctgtgttgcattcgtatataaaatgaggatagtaatagtatttactttataacattgttgcaagaattaaatgaactgatgcatgaatagggtttaaaaagtatta

SEQ ID NO: 419130 - DNA, 563 bp, Homo sapiens
tctttttggcaaaactttataggtagcagtgtattcctccatcagaaagcacttaagaatgtgtttgtgtattgtcagtagctgctgatgaccaatccttaactccatgagaggttgcaaaatagtgatgttgcaattccatccttcctttttcattagaatgttttaaagagaaactaccccccatctactacttacctacccaatggtatagtttgtatgggaaatgcagggaatattaaaatgatagttctcaaaatgtgagctctgggccagaagcagcattacctgagaactgagaactgaaaattcttaggctccatcccagacccactgaatcagaaaactggggataaggtccagcaacatgtgtttatcatgccctccaggtaactctgatgtatactaacgtttgagaaacaagggactacacctgaagtcttgraatgcccttgctaaaagctgttagcttttactacactttataataccaaagttaggttccagattttttcccaagcacagtatctgcccacctagtctacaaatgaaagaatcacacc

SEQ ID NO: 419131 - DNA, 505 bp, Homo sapiens
ctgcactccagcctgggcgacaaagcgagactctgtctcaaaaaaacaaaaaaacaaaaaaacaaaaaacaaaaaaaaaaaacagaaaagaaaactagcagcggacaatgacaatattatgtttctagactttagatttaatgtagctttatcctaacaatattaaagaaaatattccacataaacagttttttagttattctataaataaaggttttctttttcctatcgaaaataatttggtcaggaattttcttcttcataatttttctgttgtagtagtttatttaaatattttctaagggggtttcaaatctgcatttttgatttctgctttcactataaaatggatggacagataaatcttactaaacttagagaaattgtgatttttagctaattartaagattcgggccaatgccagctgaaaacatggcacaaattcagacagcagttttaagaaaatttgatcagaagataaaacacatatgcaaaagcactaac

SEQ ID NO: 419132 - DNA, 565 bp, Homo sapiens
atgtgtttaaaaattacatcttgggctcaaacatttttaaagaaacatacattgaaattataatgtaaattaatagggtattaatggaattaagaggccacagatgacactgrctagctatttaccaaagctattttcctgttctttcttttcttcttagactgtatttcccagcctacctctattgagagagttgttacgaggttatgccaacaaaatgttcatggaaattatgtatgcgactgccaagcctgatcttccatacaatcctcaggcttgctctttctctgtgggctggttggatctcaatgcccagggtgaccaaggggtgggggatgggggggatgtgctgaagatggcagagcctccagccatctgagtttctgaattagtaacagagcatgtcacatcccttgcctctaactggactctaaaatgagcaagtaatgaactttaattatactaagctgtggagatttgagggtgtgtagctaatgcaattactagtattgtcttatttaacatacataccagaatatatacacaaacatactttcaggagatt

SEQ ID NO: 419133 - DNA, 619 bp, Homo sapiens
gcttgggacagaatttaggaggaaaaactcaatattgacctctacctgtgtaaaaaagacagaaagatttcctttatgctatttgctttactatttcttagcttagcacttcacattttaaatggaaatatttcaaagcaaataaaatacctaaaaagtagtcatggcattctatgcagtaaaaagaaacctatcagcagaaaggtgggatttatatttctgcagagcgtaccttctgagttacatgagcattaaaaaagatgggggaagagaaagaggtacttcaactatacagggataagtgtcacagtatttttaattaagaaaaaatactgactaaggagctaaagggagagctcttgttttggtagtatcagactgttgatgagagtagaaaatagtctgcgtgtgcctattaagttattttttctgcaccctgcatcaattcatattacagctgtcagagttggtacaggttttcaagcaaattcaggcaatgcattcacttttctttttccscatttattcttctctctaacatagggccttaagttgccctcagatttgcatcctgccttatcataactaaccatgatatttctagcaaaactggtgtcaa

SEQ ID NO: 419134 - DNA, 569 bp, Homo sapiens
  misc_feature (1)...(569): n = A,T,C or G
tttcatcacgtggctgtgactggggtctcagagcctngttttggctcaggaggctgcccaatttatgaattgtccatgctcaagtgaactcctttaattttaattcagctgaagtttttcttttgtcagatggtgtcagaagtggaatccaaagaagagctaacaacccccaggagcgctgagcgtggttcccactcggcccattgtgcccattgctctcttggagcagctggggatcgtggtaagttctctctcatattctgaagctccacggatttgtgttttgagacctctgagtttctttgagcaaatttctgattcaaactgggtttaggagtcatgacagaaactagagtgggtccaggattggattggatccagtaattaactggcttggatccaactagaggcctcttacatctgtctgggttagaaaaaaactgataataaatgccaatattgcagggggtataaattttggcttttgggaattcaccggaatttttgtgtcctattcatttgtttcacttgtcttatgtrcttagataggaaaaaatcactggctaagt

SEQ ID NO: 419135 - DNA, 566 bp, Homo sapiens
ctatttgcatgtttaccaaatggttactgaataacacatgcctaagaaaactaagcttttgcaaaagcttgttaatatttgcagtcctcaactgaactcggagctcacaaatgggctttttgcaaaggagcctgaattcttggcaatgcttgataaatgtcagtcagtttctttagccatctgcaaataaaggtatattagacaatgatgacttcataacagtcaaagwtgtataataattaatccagggacacctgtgcacagttccttttacaaagctatcacagtgtattatactataaaaatcataaaggattttttaaagaacagattttatctgatgtgctagcaaagctaaagacgaaataagctgcactgattattggttatcttttacagagactcacgttgcgacatgttaacagtaaccaatgtctcgatgaaccttctgaagaagacaaaatggtgcctacaatgcaggactgtagtggaagcagatcccaacagtggctgctaaggaacatgaccttgggcacatgaagatcatgtcctccaagccatgaaag

SEQ ID NO: 419136 - DNA, 566 bp, Homo sapiens
ctatttgcatgtttaccaaatggttactgaataacacatgcctaagaaaactaagcttttgcaaaagcttgttaatatttgcagtcctcaactgaactcggagctcacaaatgggctttttgcaaaggagcctgaattcttggcaatgcttgataaatgtcagtcagtttctttagccatctgcaaataaaggtatattagacaatgatgacttcataacagtcaaagatgtataataattaatccagggacacctgtgcacagttccttttacaaagctatcacagtgtattatactataaaaatcataaaggattttttaaagaacagattttatctgatgtgctagcaaagctaaagaygaaataagctgcactgattattggttatcttttacagagactcacgttgcgacatgttaacagtaaccaatgtctcgatgaaccttctgaagaagacaaaatggtgcctacaatgcaggactgtagtggaagcagatcccaacagtggctgctaaggaacatgaccttgggcacatgaagatcatgtcctccaagccatgaaag

SEQ ID NO: 419137 - DNA, 576 bp, Homo sapiens
aactcttcagtcttaaccactaagataatcaaaaagagcatttaattttctaaggtggagaaaggaaggaaggggaggaagagggaagcaagaataaagaagaaggaaaggaaaggaaagggaaggggaggggagggaagggaagagagaaagacgatgctaataatctgttttcataattttattctgaagagactcatctgaaakttcctgttcagaagtccattgatttgcaaacatgaacacctcgctagttttccgcaacttataactgtcagcaagtgtaaaggacatttctagattttgtcccttcttggctttctgtaaaccaagtgtgactccagatacccaactctgttactctcttttcggttactcttgtccacgcacagcatacatttccagcagtaaccaggtactcaagtataacctaataaagcaaccccacccacttcaggctttgatagatccataacttaccctgtcttgcttttcttcagcacctggtagaaacagaatgtgagctctcatgctcagaactgtgctttcgtcttcctcctcagccaaggagactct

SEQ ID NO: 419138 - DNA, 576 bp, Homo sapiens
aactcttcagtcttaaccactaagataatcaaaaagagcatttaattttctaaggtggagaaaggaaggaaggggaggaagagggaagcaagaataaagaagaaggaaaggaaaggaaagggaaggggaggggagggaagggaagagagaaagacgatgctaataatctgttttcataattttattctgaagagactcatctgaaagttcctgttcagaagtccattgatttgcaaacatgaacacctcgctagttttccgcaacttataactgtcagcaagtgtaaaggacatttctagattttgtcccttcttggctttctgtaaaccaagtgtgactccagatacccarctctgttactctcttttcggttactcttgtccacgcacagcatacatttccagcagtaaccaggtactcaagtataacctaataaagcaaccccacccacttcaggctttgatagatccataacttaccctgtcttgcttttcttcagcacctggtagaaacagaatgtgagctctcatgctcagaactgtgctttcgtcttcctcctcagccaaggagactct

SEQ ID NO: 419139 - DNA, 576 bp, Homo sapiens
aactcttcagtcttaaccactaagataatcaaaaagagcatttaattttctaaggtggagaaaggaaggaaggggaggaagagggaagcaagaataaagaagaaggaaaggaaaggaaagggaaggggaggggagggaagggaagagagaaagacgatgctaataatctgttttcataattttattctgaagagactcatctgaaagttcctgttcagaagtccattgatttgcaaacatgaacacctcgctagttttccgcaacttataactgtcagcaagtgtaaaggacatttctagattttgtcccttcttggctttctgtaaaccaagtgtgactccagatacccaactctgttactctcttttcggttactcttgtccacgcacagcatacatttccagcagtaaccaggtactcaagtataacctaataaagcaaccccacccacttcaggytttgatagatccataacttaccctgtcttgcttttcttcagcacctggtagaaacagaatgtgagctctcatgctcagaactgtgctttcgtcttcctcctcagccaaggagactct

SEQ ID NO: 419140 - DNA, 570 bp, Homo sapiens
ataacatgcatagcttataaaagattatcatcagctaatctgagtgtattgaaaccaagcaggatatattaacatgtatccttatgcttacatgctatgttttgtgattagagaatacggtttgaaaaaatccttttcaaattaaagctcttgggccaacagcaattagataaatctagtttctgactaatgttctatattcagattgctgcttggatattaaggtggagatctgatgggtagacagatagaaaggctcatacatttgttatgatgttgattcattttgtgacttcttgcctattacatccactatttattgctccaaaataagaagtatctcttctaggtcaagtttgacagtcagaagagaatgtctgtaatattccttcagtttaattcaattgtaacctaaaaccrccacatttatagcaaatatgttttacaataacaaggtgtattaggaagggtagacttgaaatatgttttacaatagcaaggtgtattagaaagggcaggcttgaaatggatgaatcagaatccaactgacaattctagcaatgagaaagt

SEQ ID NO: 419141 - DNA, 570 bp, Homo sapiens
ataacatgcatagcttataaaagattatcatcagctaatctgagtgtattgaaaccaagcaggatatattaacatgtatccttatgcttacatgctatgttttgtgattagagaatacggtttgaaaaaatccttttcaaattaaagctcttgggccaacagcaattagataaatctagtttctgactaatgttctatattcagattgctgcttggatattaaggtggagatctgatgggtagacagatagaaaggctcatacatttgttatgatgttgattcattttgtgacttcttgcctattacatccactatttattgctccaaaataagaagtatctcttctaggtcaagtttgacagtcagaagagaatgtctgtaatattccttcagtttaattcaattgtaacctaaaaccaccacatttatagcaaatatgttttacaataacaaggtgtattaggaagggtagacttgaaatatgttttacaatagcaaggtgtattagaaasggcaggcttgaaatggatgaatcagaatccaactgacaattctagcaatgagaaagt

SEQ ID NO: 419142 - DNA, 555 bp, Homo sapiens
atatttattcctcttcttactgaaccatgctttctcaaatgcttagatataatgcttgctactatgaaaacatgttagatggtagaggtacgggagggagaatgaaaaaaaatgacatgtataagaaagaaagaaaatgagttacatatgtgtatacacacatgtatgtatttatattcatatcaaaataaggaagaaatattaatgattatcatttcctttctgcaacttgaaaaattgtcatagctgatacttataatgaccattttccaatataccttttatatcccctatgacctgggtaagcacyttgatgggtgatgcttccttgctttgtagggtgacctaaatctttatttttgaaggtgtagtcattagaactgcggcctctattgagtcattctagtttccactgactttaacgactggacatgggagttctaagcaataccctatgaaatttcctgaattcaggaatactcttccttatccccaatgtgtagtagtaacccaatttttcattgatattcactcaatttttcattgatattcgag

SEQ ID NO: 419143 - DNA, 555 bp, Homo sapiens
atatttattcctcttcttactgaaccatgctttctcaaatgcttagatataatgcttgctactatgaaaacatgttagatggtagaggtacgggagggagaatgaaaaaaaatgacatgtataagaaagaaagaaaatgagttacatatgtgtatacacacatgtatgtatttatattcatatcaaaataaggaagaaatattaatgattatcatttcctttctgcaacttgaaaaattgtcatagctgatacttataatgaccattttccaatataccttttatatcccctatgacctgggtaagcaccttgatgggtgatgcttccttgctttgtagggtgacctaaatctttatttttgaaggtgtagtcattagaactgcggcctctattgagtcattctagtttccactgactttaacgactggacatgggagttctaagcaataccctatgaaatwtcctgaattcaggaatactcttccttatccccaatgtgtagtagtaacccaatttttcattgatattcactcaatttttcattgatattcgag

SEQ ID NO: 419144 - DNA, 604 bp, Homo sapiens
attgatattcactcaatttttcattgatattcgagatcaatctagcaaatacaataaatctcatttttgcctgtcgctttctrtttgatttattactgtatgtcccagaagatgcatttctccctttgtaatctaagacctctataccagcagaagctagtgttacagacagaggaagcaactacacatcggtggggttatagggagattggccactatcatttccagtccttgattctcagattcataagtcctgaatacgggagaaacagtacccatagtcactcattcagagtatatactgcatcctgaagaatatacaccccacccacaaggtgtggccaaccaactggctccataactgagtcttcaaaagactaatttgctcttcccacaggccagatacatcagggtaataaggaacatggtaagaccaatgaatgtcataaacctgaacccactgcaacattttctacaaagtgagttgctttgtcagaagtgatgccatgtgagacattgcgaaggagaataaagcatgttgtaaatgcaaggatggtgatattggaagaattgtgaaaaagcaattccacatacagaattagtg

SEQ ID NO: 419145 - DNA, 580 bp, Homo sapiens
gtaaaagagaccagatagaggaaacaaaatcctgaaatttgggatatgattattctattaatagtrttattataattttattgtatatattatagaaaatgtttattcatttcagagcatttagtcaacacgggtttattcattaactcctttcttcaaataattatttcttgctaggtactaaggacaattttattgctaggtattgaggcaagaaacaaatgtatttcctgccctcatggtgcttcctgtctaggaaggatttagctattatattaatcaacagtcaaccaaatatcagtctagtttcaatggtcatatgtgctttgaagcaaaagtcacataacaccataagcatatcaagcaggagaaaccccatgttttgggagtaacagaaattccctggagagtgacacttggttttgagttgtgaattaagagaaattaattaagaatttgggaggtaggggtggattctagctaaaggaaactttgtatttgcagactaggaggatgacaagtttaggaaacacaaaatgtagaagggggtgagggagacttgaacaagtgtacgagttga

SEQ ID NO: 419146 - DNA, 574 bp, Homo sapiens
ggcgcgcgcctgtggtcccaactactggagaggcagaggggagccaccacacccggctaatttttttattacttgcggagacgggggctcgctacgttgcccaggctggtctcgaacccctgagctcaagcgatcctcccgcctcagcctcccaaagtgctgcgattgctgagattacacgcgtgagccactcccacctggctacaactcagtagttatacaaactaccctctatgaaattcagacaataatacaccaactgctgtcttggagatttattggcaacaaggcgccacgataagcatcctacggccattacttccttycccccaccaggactgacccctcgcccgtacccaccgcccagcgcctcttttaccacatgtttaggacaaattgtcacattcgactttgaaaaccacccacggaaagcaagcgcgatcacccctacctcaacgctgaggtaccgaggcccagagaggtcggcaacttaaagttgatttaccagagacagaaatcggcacccacccgggtccttcccttcccgcacccccaaattctacggcctttccgg

SEQ ID NO: 419147 - DNA, 586 bp, Homo sapiens
aatcaacagtgaacacagtgaaaatgttgcaggagatgagaaaggaatgcaagttctgaaacctgcccaggaagagatttacctagatggcaggactagataataacatagcacagcaaacaattcattgctaaatttttgcacagaacataaggaatttggtctcatatatagcccaagggagtcgcagtactgactgaaataggctctgaaattattagggacatcactattatctccatagcctcagatatatatatacacatatatatatctgcatagtaaattgcactatagtttactcccatttaaattaaatctatttaatcttcattctgcaatggagaattttaaaattatgckcctgaccattcctttaatgaacaggtgaagtcctgtcagtaagttaaatatttcaacaactgtcaagtgcactcataagcagaagcttctcttgttattattgctgggtcatggccagtagaatggaacttctttacctcatcacaacaaggtaaatcaagaattcattatcttgagtttaactctggatgtatgtttcagcttctggccttgccacttgtct

SEQ ID NO: 419148 - DNA, 556 bp, Homo sapiens
cttgtttttgtcagatttgtcaaagattagatagtggcaggtatacagtcttatttctgggttctctattctgttccattggtctgtgtgtctgtttttgtactggtaccatgctattttgattactgtagccctgtagtatagtttgaggtagggtaacgtgatgcctccagctttgttctttttgcttaggattgaattggctatttggggtctattttgcaagcccaagagttcttaacagaaaagtaattatatacagaaatgatcaaccattaggaaattatgcattgttgatgggcacaaggtttatgacaggcagaaatttgcaaatgaactaagtagagttttacattacttttattttattttattgagaagtwaaaaaattatctgcagaaaacaaaatcaatcaaattcctctgttcatggtatgctatcctcttttctctttgttcaccttttatcttcttgttattttcaagccacccctgaccactcaactgcatttggatatatgtattttttcagattacacatatatatgtatatatat

SEQ ID NO: 419149 - DNA, 594 bp, Homo sapiens
gaataagcagtttctttttgcattttgaaaaacagaataataataagccaatgcagtttaccaattcctcaaaattgcttccattattttttataagtaacatcactgcaaattatgttttcataatctaccaaattattctttacttatttctttccctgtacctcaaagttattgccactttggaccaatctaaacaattcatctcctaccttggtatttacactcttcaagtgatcatacctggttttcttgtctctcctccccactctgctgccygtcttgtttgggtgagcaatacataattggttcttttaatctatcctcataagtcaattgcaccagccccttaatcatttttgttgtgcttctctgaaatctgtccaatttgtcaacatcgttctggtgctgggacattcagaaatgcatgcaagattctggtactgcctcatcaatgctttatacagaaaaaagatgatcacctctctttttctcttggtgagaagtctctgggcatgcagcttcaaaagcatataagattttttttgctataagtttatacaaaatatttccaggtaatttttttctctagcc

SEQ ID NO: 419150 - DNA, 512 bp, Homo sapiens
cccactggggaacctgaaaatccagatcacaggagaaggacttaaccttacctagaggtgaaatggatttagggagccaagcaaaayacaaaagtagaaaagccagcagaaagagcccataggcactcccaagtccccagcttgagcccagggaagcaatcccaggcaatatctcacaggggtccttggagaaggcagccagaagaactggggaggggtcacagggtgaaggaagcttctagctaaactttgtaataattttgactgagcatgaattttcctgagcagaatctatgggtggggtgcgaaggagaagtgcaagtatgagtacagaagcaacacgcaaaggcacgaacaggaaggaaggggcaggtctgagacccctgcttgcttcctcagcagagaggcttgtagcctggggcaagatctcagccctacactccagctgcctggatataaatttggtgctgttggcagggcacagtgggagtgagactagcctagctggctac

SEQ ID NO: 419151 - DNA, 629 bp, Homo sapiens
gagcctggaaacctctgtcgagagccaactccccactagtgccaaagccggagttcgaacaaatgccccccggtaactgcgcgcacgcactccccatccttcggtcccactctcactagaagctggctcccacttccagagaacctgtcccacacaagtggaaagaagagacgtgcaaaagaaggaaaaagcataaaagaaggcgaactgcatgggctgcatctactcacttaggagttctccgcgtctctcttcattcattcaactctgccgaagtgcagttccctctggagacccgggcgccggggtcagggtaggggtgggagagctgggcrgagggaacccggacacctcacggagggagcgcagcagggacaggcggccggctggacaggcaaaagggaccgcggaccgtgcgcgaccgccgggcggactggcctggcgccaatgtgcctttgtttatgtggcttgcgctgccgctgccaacatgcacctaaagtctccgcgcgtcgcgttcagcggcccgccgccaatcgccgcgctgccggctccctggactcctggcccgcgctcgctttggtatatttccgacctgacgtcacgagcagggccgattttaaggtgggaac

SEQ ID NO: 419152 - DNA, 629 bp, Homo sapiens
gagcctggaaacctctgtcgagagccaactccccactagtgccaaagccggagttcgaacaaatgccccccggtaactgcgcgcacgcactccccatccttcggtcccactctcactagaagctggctcccacttccagagaacctgtcccacacaagtggaaagaagagacgtgcaaaagaaggaaaaagcataaaagaaggcgaactgcatgggctgcatctactcacttaggagttctccgcgtctctcttcattcattcaactctgccgaagtgcagttccctctggagacccgggcgccggggtcagggtaggggtgggagagctgggcaragggaacccggacacctcacggagggagcgcagcagggacaggcggccggctggacaggcaaaagggaccgcggaccgtgcgcgaccgccgggcggactggcctggcgccaatgtgcctttgtttatgtggcttgcgctgccgctgccaacatgcacctaaagtctccgcgcgtcgcgttcagcggcccgccgccaatcgccgcgctgccggctccctggactcctggcccgcgctcgctttggtatatttccgacctgacgtcacgagcagggccgattttaaggtgggaac

SEQ ID NO: 419153 - DNA, 532 bp, Homo sapiens
gcagtgcccacgttcgatggaggacgtggtgcttgcggggggggggggagaggaaggggagagggtagacagtgaccgtgacccagctctttagaaaccccaaaagtcagagtgaagcgtcgccccttttcctttcgcagacaatgcagccgagcagcaggcaacaggtgcgccttctgcagaaaggtactctgattcccaccttctgcaaactctaatactttcgatactcctctgtgcccaccaactcgtaccccttccacgagttttaagggaataaatcgatcttcgtttgaaacacaaggtctatcacagcctcaatcttagagcccagaaagactggacaagaaaagcgaagcgggtggggattgggggcagcgtctccgcaaagcgtaaggtgtgagcctacagcccagccaggagaggggcccgagctggctstgggagcgtgtcccacccccgcggccgtccaagtcgccgccgcttctgctttgcaagtcatttcccctagccacgccgagagcgcagggag

SEQ ID NO: 419154 - DNA, 534 bp, Homo sapiens
tcagactattttgatgttatgagaaatacccttataaaaaccttagtgaggtttatagaaaggatgttgtgtaggtcattttattcatcatatcacaaactttctctctttctcttttataagaaccattgggataaattcctataggatcttagtatcaaggaaagttgtacttcttctgtgccattgtcctatttttgtttcatgagtatttcaaatcatttaagataaaagttgtctgttttcatgttgcttgctaggaagcttagagctaaatttgtgattgactcacagtatgatttacttayagagtcaattcatccaatccagtaggaggctccacatttttctgtgcaactgagttaactcattgtaaaaagtatgttatatatgcatctatgaataactaattctttaactccaaacagttcgcacacccatgttaagacacgcacatttgtttgcaacctaaaacccctccttttagatctctgttttggcttcatttagctttctttaggataatgtatgcca

SEQ ID NO: 419155 - DNA, 534 bp, Homo sapiens
tcagactattttgatgttatgagaaatacccttataaaaaccttagtgaggtttatagaaaggatgttgtgtaggtcattttattcatcatatcacaaactttctctctttctcttttataagaaccattgggataaattcctataggatcttagtatcaaggaaagttgtacttcttctgtgccattgtcctatttttgtttcatgagtatttcaaatcatttaagataaaagttgtctgttttcatgttgcttgctaggaagcttagagctaaatttgtgattgactcacagtatgatttacttatagagtcaattcatccaatccagtaggaggctccacatttttctgtgcaactgagttaactcattgtaaaaagtatgttatatatgcatctatgaataactaattctttaactccaaacagttcgcacacccaygttaagacacgcacatttgtttgcaacctaaaacccctccttttagatctctgttttggcttcatttagctttctttaggataatgtatgcca

SEQ ID NO: 419156 - DNA, 606 bp, Homo sapiens
cttcagatatttacatgctttgcctttcattttattctgacctctgctcraataatcttctttggtgggaattggctgaatgtcattgttaaattagcaactctggtctcttttttctcttcctttccctctctttctcttgcttcatttttcctgatttttaaaacatcattgacctcatagatatgcgcatgatacacacacacacacacacacacacacacacacgttaattgttttgttttctatctccctcactgtaagttaagctccccaagggtgaggacatttcccatcttgttcactgaaatatcctatgggcttccagcattgcttggcccaggaagacaacgtatgttttgtaataactcactgactgaatgagcatatgactgaatgaaatgtgctgttctctgcaggtgtgtcctcaactttccttctctgtatttcccattgcacttatcttaatgttctggaattgactagtttatagtcagtatcttgcacaaatctcaacagaggtctagaacgtctgggttgtgcttcagatccttaggaaccagtggcttgctaggccttcaacaaacatccaggaaatgtgtgtgc

SEQ ID NO: 419157 - DNA, 541 bp, Homo sapiens
ttcttccaattatgtcattgccttgtgctttgtaatggctgacacccatttgtcccctctctgcaaaaacataaaaattcatttcaggcaatgaaattcaatttgtctgcaagcaattctataagacataataatctgtgcagcattctaatctccttctacaatgttatgtcgagcctgggcagctttatctggcatttttctagtattataagaggataaatgggaaattaatgcttctagtaargcacctattaatgataatggaaagtaattaaaagcccaaagtaaaacatggaggaagtttgctccaatccagagcacatcaaaatgattttttttgtttgtttaacttgctgtgacagatggtattattagttcactattatccactcctctcctgaccttgctttcagtctttagccctggtgtctctatttgcccaattacagtaaaactgggcatggagataccagtggatctcctaatatttttgtcccttattcccctctgtagcagcaatcccacctccttgggatgt

SEQ ID NO: 419158 - DNA, 616 bp, Homo sapiens
ctttgcctcattcccatcagaagttgcagtccattctccaacccctcagatctggatggtctctataattgtttcgattaacaaaatatagcagaagtgacactgtgcaaggtctgagcacagcctttaacttatttggtactcttgaaagcgagctgcaatagaagaagagacactgccatgtagataagcctaagtcatgtggggaaaccttggaagagaagtgacatgtgaagggagagagggaggcaacaaggaccaccaaggcaccaggcatggaagtaaagatgccactgtggaagtggaccctccagccttaactctcccagctggtgccgtgtagaccagagacaagttgttcaggctagtccttaccartaacctgacccacaaaattgtgagcaaaataaatggttgctttaagccactaaattttgtgattattatatggcaataaataaacaaacatggatagcatgttgcagtaggaaatccagctctagagccattaaatatagattcatatgctgtcttaactttttacaacaatgtgctgatgggaagctcacttaaatgttcttattctcagtgttctcatctacatgatagggatgga

SEQ ID NO: 419159 - DNA, 616 bp, Homo sapiens
ctttgcctcattcccatcagaagttgcagtccattctccaacccctcagatctggatggtctctataattgtttcgattaacaaaatatagcagaagtgacactgtgcaaggtctgagcacagcctttaacttatttggtactcttgaaagcgagctgcaatagaagaagagacactgccatgtagataagcctaagtcatgtggggaaaccttggaagagaagtgacatgtgaagggagagagggaggcaacaaggaccaccaaggcaccaggcatggaagtaaagatgccactgtggaagtggaccctccagccttaactctcccagctggtgccgtgtagaccagagacaagttgttcaggctagtccttaccaataacctgacccacaaaattgtgagcaaaataaatggttgctttaagccactaaattttgtgattattatatggcaataaataaacaaacatggatagcatgttgcagtaggaaatccagctctagagccattaaatatagattcatatgctgtcttaactttttacaacaatgtgctgatgggaagctcacttaaatgttcttattctcartgttctcatctacatgatagggatgga

SEQ ID NO: 419160 - DNA, 592 bp, Homo sapiens
aatggctgataaacttgtagaaacccagtggttgtttgcagaggaatagtgagtctggaatcctgccgtctgtgcactactcagagatatctgaagaaatgtggttccagcagcccaaagctgaaaagagacattggtaagctagagcacgcccaacaaaagtgatgaacataagaaagtaattcaacatttccgatgatgcacatacacacaatacacacaaaacacatatacaacatatgtatcacacacattgaacacgcaacacacacaacacacaaacatatacaacacatgcatattacatgcatacacacaacatgcattaaccatgtatacaatgcatcatatgtacatcagacacacattacatacacaacacatccagtacaggtaaaataccrcatacacatatacatccacacactagacaacactcgtagcatatatgtgacacacatgtgcatatatgcccacgtgcttgtatgcacaaaacatccacataacacacacacagacacacacagacacacacacacacagtagagttgcctagcaagccaaggatatacataccatagtcccagcaaga

SEQ ID NO: 419161 - DNA, 538 bp, Homo sapiens
tgtgctgtagaagggaggtggactgtcaaatccacgtctgcagctgctgtctcaatgttgtaaaaattagcatttcagaagacaaaagatactcactgtccaaatcagatttcttcacaggtgaaaataaggaattttctattagaagcaacactcttctgaaaagccagtcagagcagcagcctgaagggaaatattaccggattccaagcagtcagcacygtgctcgttttctcggcctcagggactctgctcagcctgaaagcagtgcagaattacaccaccaatttgcaagcaaggggtcttgaatattaccaaccaaatacctgaagctacccctgacccctgacctgccatcgttgaagtggatcttggctgctccaattttgtgtcaagagagtgcacgcacagcaaaaagaaggaggctgtccttctgctggaagaagagggcccaagggatcccagtggaggaaactctcagaaccagaaaaccaagactttgaaaaatgttggtaactgacacactttcacacaggca

SEQ ID NO: 419162 - DNA, 538 bp, Homo sapiens
tgtgctgtagaagggaggtggactgtcaaatccacgtctgcagctgctgtctcaatgttgtaaaaattagcatttcagaagacaaaagatactcactgtccaaatcagatttcttcacaggtgaaaataaggaattttctattagaagcaacactcttctgaaaagccagtcagagcagcagcctgaagggaaatattaccggattccaagcagtcagcactgtgctcgttttctcggcctcagggactctgctcagcctgaaagcagtgcagaattacaccaccaatttgcaagcaaggggtcttgaatattaccaaccaaatacctgaagctacccctgacccctgacctgccatcgytgaagtggatcttggctgctccaattttgtgtcaagagagtgcacgcacagcaaaaagaaggaggctgtccttctgctggaagaagagggcccaagggatcccagtggaggaaactctcagaaccagaaaaccaagactttgaaaaatgttggtaactgacacactttcacacaggca

SEQ ID NO: 419163 - DNA, 510 bp, Homo sapiens
gctcctttggtaaagatagacaagtggaaaatacaccaataagagaattaaaaatcctamattaggaactcgattccttgctttaggagctttgggactgggtggagagtcatcaaacctccctagggtcaacttcattagctgtaaaataagggagttaacataaatattcttctagttttcttccacagctttcactctctgagccagaagtctattacgctgtagtagatagtgcaaacaaaggtgattttgaagcaggcggtatttctaatgaagtattgggaagaatgcccaggttaaagagctccaacttaacctgagtgtgctacaggaagaggaatacaactatttcatggaaaatgagcctaaagagaacaatgaccacaggaacattctgacctatttgtttccttgacctggaagcaccacttcacagaatgacagattaggaaaggacattgaacatgatcacattttccagtggatcacactgaggctctgagaaac

SEQ ID NO: 419164 - DNA, 621 bp, Homo sapiens
tgttaaatatacattatacttataacatttcacataaagtcrcatcatatagagttgcagtggttcataattacctttatgtcaaagatacaaaattagcagttaccatgaaatataaagcaggtaaatacaaagcaaaaaaagagaagttagaatcaatcaaaatgagaaggcatattctttggactacttgtacctttttaattgtcttctggataagcaggtctccaactggcattagaatacctccaaacacagccaggacagcaccaatgacagccccagcgatgagcccacagttccggtcacagcccatttttcttgttcaggaggtgaattagtgttaagcacctgtttcttgcaaactcctggatatgattaaagtggtttctacaagctctggttctatcattagaaagagatcataaaacagaagcttaaatatcagtacaaaaagatcaaagtacaaagaaaacacccactgaaacgtatcattttgcccgttctaaataaacaaatgcttttctttttgtttcaccaaagtggcttcctcggtccgtctcccttttcttgcttctaatgcctaccagtggcagaactaataatgtcatatctgaattt

SEQ ID NO: 419165 - DNA, 670 bp, Homo sapiens
attagcacttcaaaaatggcttttttgtcagcaaaaacataagaaggcctacagcaattacaggattatgttcctcttcaggatataagtcatgycccagaaaggcagataaaattaatgtctcttcttctgctcagttgaatatttgcttttatttttacctctatttcgaatctttgctaaggaaaggaagactttgtcttggatggtttagttaacaacatggcttatgttatgttttatgactaattaaaatggaactgaaacttgcaggatggtgttacaaattagtatgctcccatttggacctctcgtcttaactcagcaggttgtgtcttaatcctggagctctaggcactttcacgtggttattgattgaatccacagattcagtttcatacagcaaatgacactatgtagtcagcctcttaattacttaatgcagtatctgtgtgtcatgacaatatgcacattaaaacaagtagtgtaaatatagctgaaatgagcctggctgaggcaatttttataaaagctactctacgtgaatggaaggtgtctcaaattcagttaggcaaagtgtttcagtgaaaacgatgcactatcctaaaagccatttggatgatgtaatctcttatgacaaagagattacaaaatgacaaaatgaaaaaat

SEQ ID NO: 419166 - DNA, 670 bp, Homo sapiens
attagcacttcaaaaatggcttttttgtcagcaaaaacataagaaggcctacagcaattacaggattatgttcctcttcaggatataagtcatgtcccagaaaggcagataaaattaatgtctcttcttctgctcagttgaatatttgcttttatttttacctctatttcraatctttgctaaggaaaggaagactttgtcttggatggtttagttaacaacatggcttatgttatgttttatgactaattaaaatggaactgaaacttgcaggatggtgttacaaattagtatgctcccatttggacctctcgtcttaactcagcaggttgtgtcttaatcctggagctctaggcactttcacgtggttattgattgaatccacagattcagtttcatacagcaaatgacactatgtagtcagcctcttaattacttaatgcagtatctgtgtgtcatgacaatatgcacattaaaacaagtagtgtaaatatagctgaaatgagcctggctgaggcaatttttataaaagctactctacgtgaatggaaggtgtctcaaattcagttaggcaaagtgtttcagtgaaaacgatgcactatcctaaaagccatttggatgatgtaatctcttatgacaaagagattacaaaatgacaaaatgaaaaaat

SEQ ID NO: 419167 - DNA, 603 bp, Homo sapiens
gattttctcaaccctgtacagacatagtgaatgtgtgtacacatgggtggtatttttaacctagtcttaaccactgatttttcttgtgataaaagtgatgtcctgagacatttcaattgttgtggtatcatgctagttaataaatactcggatatcatatgacaaaattatattatyggcaaaggcaaacatctatagataggaagatgatgctggaagtcctcatttacacatgttatgctaatattttctaccaaaaattatcactgacattgaagatcacttgaatctcagagcatttatggatggcacttcataatttcagcgtcgtaacttagaatactctattcttttattaattttgaatttcttaatattattcatcagtttcatcatctgcaaaaggcagataataataatacctattcctaggtttgaacatgaaatttaaacaaggtaatccataaaatcacagttgctggcaattagtaagcatcccattaatgttagctttattgtcatgatatttttacttattcttttataaagtcttcaaaccacaatgttgacaatgttcaaatgcattcaataattgtttaatta

SEQ ID NO: 419168 - DNA, 603 bp, Homo sapiens
gattttctcaaccctgtacagacatagtgaatgtgtgtacacatgggtggtatttttaacctagtcttaaccactgatttttcttgtgataaaagtgatgtcctgagacatttcaattgttgtggtatcatgctagttaataaatactcggatatcatatgacaaaattatattattggcaaaggcaaacatctatagataggaagatgatgctggaagtcctcatttacacatgttatgctaatattttctaccaaaaattatcactgacattraagatcacttgaatctcagagcatttatggatggcacttcataatttcagcgtcgtaacttagaatactctattcttttattaattttgaatttcttaatattattcatcagtttcatcatctgcaaaaggcagataataataatacctattcctaggtttgaacatgaaatttaaacaaggtaatccataaaatcacagttgctggcaattagtaagcatcccattaatgttagctttattgtcatgatatttttacttattcttttataaagtcttcaaaccacaatgttgacaatgttcaaatgcattcaataattgtttaatta

SEQ ID NO: 419169 - DNA, 621 bp, Homo sapiens
agaggtgataatgaatgaataggactgaaatagcatcttaatagaacaaggtagatttttcatcacgttctcttgtggccattgtgatagagaccaaattttttgactgttgttgaagtgtcatcttgtattagtaagtattttatatttgccttagcttccttttggagaatagatatgatgttattcatttcttatatgsgagtacatggtataattttatttgcttgcctgataaattttagtgagtgttctacttaatggaaattctataggtattcaaagcaataagtgtgcattttctaaaatctgtattatttaacagatgatgccctattcattacatattagtgtctataaagattcattatatactatcaaaaagggaaggccccaaaccaattccacacaggcttattaagcaattaagcacctgtttgggggctggcactgttctagatataaggcataaaaaagcgattgagatatgaagtttacactctacctgtgctttttttttttttaatgaaaatatttcaaggcagcccaaaaagggcttttatggtttctttgtctgattgaaaatgaaaaacaagtgctgacaatctcagaatccgttaa

SEQ ID NO: 419170 - DNA, 606 bp, Homo sapiens
ctgacgcaagtcctgcccctgtaccctttccccattggccggggtcgggccgtacaatctaaactaattccggttggctaaacattggaacttttttttagataaggtcggcacgtaagggagagaggggaaaacgggacggggtgtctccaatgagctagagagctagtcttctttccacataaggaaaggaatgtgagctggtactgataacgcctggtactgtggcacgtctgggcatgtaacaaaggcagaaaggaagaaaaaaragaaaaagggaaaagggatggggggtagtatgaataaaaaaataaaggattgatcgggctatttgaagagaaacctcatcatatcccacaggagatttctcaaagaaactacaacagtactaccatttgacccagcaatcccttactggttatatacccaagggaaaataaagcattcgaccaaaaagacacatgcacttatatgttcatcgcagctctattcacaatagcaaagaaatagaatcaacctagatgcttatcgatggtggactggataaagaaaatgcgttaaataacaccacgaaatacaatgcagctgtataaaaagagatcatgg

SEQ ID NO: 419171 - DNA, 606 bp, Homo sapiens
ctgacgcaagtcctgcccctgtaccctttccccattggccggggtcgggccgtacaatctaaactaattccggttggctaaacattggaacttttttttagataaggtcggcacgtaagggagagaggggaaaacgggacggggtgtctccaatgagctagagagctagtcttctttccacataaggaaaggaatgtgagctggtactgataacgcctggtactgtggcacgtctgggcatgtaacaaaggcagaaaggaagaaaaaagagaaaaagggaaaagggatggggggtagtatgaataaaaaaataaaggattgatcgggctatttgaagagaaacctcatcatatcccacaggagatttctcaaagaaactacaacagwactaccatttgacccagcaatcccttactggttatatacccaagggaaaataaagcattcgaccaaaaagacacatgcacttatatgttcatcgcagctctattcacaatagcaaagaaatagaatcaacctagatgcttatcgatggtggactggataaagaaaatgcgttaaataacaccacgaaatacaatgcagctgtataaaaagagatcatgg

SEQ ID NO: 419172 - DNA, 556 bp, Homo sapiens
cttatcgatggtggactggataaagaaaatgcgttaaataacaccacgaaatacaatgcagctgtataaaaagagatcatggctccatggrtggagctggaggtcattatcctaagtgaattaacatgggaacagaaaatcaaatcatgttctcacttataagtgcgagctaaacattgagtagacatagacacaaataagagaacaatagacactgcggtctatttgagagtggaaggcggaatgagggtgaggattgaaaaacgacctatagggtactatgctgattacttgggtatcaaaattatctgtacaccaaatctccacagcacaatttagccacttaacaaacctgcacatgtaccccttgaacatacataaaagttggatagaaaaaaaggaatttatgccaagtaaggtggccaaatatacatattcaataagctatggaaagagtcacgaatacctgaaagtagaaaggtgcacatgcgcagttgagcttcctgcatctccatgttcataaaatggtgatgtaagggtggaatttttgaccctc

SEQ ID NO: 419173 - DNA, 607 bp, Homo sapiens
aattatgtaagtacagttgcttactgttttcatatctacaaaaattagaaatagcattttcattgaatttagtttcatgctctcaagtaaacttcatccacaaataatttaattaatggacaaagaaagaagctccatttatcttattaaataaatatattttcatttaagatttttactttttaatgattttcaaaatttggaatatatttatgtcctttggtcaaattgtgatgatttataattttaattccaaaaaaaatgttaatacttagagggttatatttcttttttttttcttttttcttttttctttttttttttttttgagaacgagtctcactcttgcccaggttggagtgcagtgatgcaatctcggctcactgcaacctctgcttcccaggttcaagtgattttcctgcctcagcctcccgagtagctgggactacaggcacgcaccaccacrcctacctaatttttgtatttttagtagagatggggattcaccatgttggccagactggtcttgaattcctgacctcaggtgatccacttgcctcagcctgccaaagtgctgggagtacaggagtgagtgagccactgtgcc

SEQ ID NO: 419174 - DNA, 619 bp, Homo sapiens
ttgtacttggaggttgagaggtaacctcacataaacagttttaatgtgtttgttataatgtcattctttaatagcattttatgtaagtaacactcaagcatggcaacataatagccctgagaaatacacaatttaaactatgtggaaagtagtattttatgaggtgaatagacaaatacattagagtcactagaatgaagatggcattattrttatttttttaatcttggagctagttcttccacctctcaatacctgtgtactatgaaggcaacactgttatgaaaccataaaaattaaaacatataccagaggtcccttaaggaaaacaacttattgacaatgaatttcaccaattggcatgcatgccagtagaatgtgttgtggtttcaattttgcagaggggcctgcattcctgtgcaaaaggtgcttggctaaaaggatactaggataaactcttaagaaaaaaaaattccacagtaatctgcagctttgtcatcacgcatggaattcaataaaattctcaatgtctctggttaaataaacattttttcttacttagtctgcttattttttttgtctagactaaagctttttaacaggctgcaaaacaagctga

SEQ ID NO: 419175 - DNA, 558 bp, Homo sapiens
ctcaatgtctctggttaaataaacattttttcttacttagtctgcttattttttttgtctagactaaagctttttaacaggctgcaaaacaagctgaatgtttcttttgactttrgctagcagaatatgtgtaggaaacttaccattttcttaaaaaatttttcacttagttaagacataaatcagcagtacattaaaattataagaaacacatcaaatattttaagactcaggttaaggtgaaatataagcaagggagatactgagaaataatgaagcaattagggagtagtgcagaattgttaagttggaagacctgttaagacaacttttaatttttgtggtttcttttttcttcactgacattattaaacattgaaagcccagaggtagcagaaagctgtaataggtctgccattcaaatgtgttaactggattttgaattaatttatggtttctttcctctaatttattaaaggctcattttacatgataaggtgttacctgacccaatgactgcagtttccccacctagatcattggcatttaacttgccat

SEQ ID NO: 419176 - DNA, 558 bp, Homo sapiens
ctcaatgtctctggttaaataaacattttttcttacttagtctgcttattttttttgtctagactaaagctttttaacaggctgcaaaacaagctgaatgtttcttttgactttagctagcagaatatgtgtaggaaacttaccattttcttaaaaaatttttcacttagttaagacataaatcagcagtacattaaaattataagaaacacatcaaatattttaagactcaggttaaggtgaaatataagcaagggagatactgagaaataatgaagcaattagggagtagtgcagaattgttaagttggaagacctgttaagacaacttttaatttttgtggtttcttttttcttcactgacattattaaacattgaaagcccagaggtagcagaaagctgtaataggtctgccattcaaatgtgttaactggattttgaattaatytatggtttctttcctctaatttattaaaggctcattttacatgataaggtgttacctgacccaatgactgcagtttccccacctagatcattggcatttaacttgccat

SEQ ID NO: 419177 - DNA, 563 bp, Homo sapiens
gttgacttaaaaatcagtatgatatctgagactggttttaataaaaggaagaatcattgaatttgagtactgaagttgaaaactagccatatttgttataaattcctcttaaaaaattagtagtttctactttgatttttctttytgatgatttcacaccttatttagaagtctaatacttcaaatttttccttcttatattgtttaatttgccacacagactagggaataagagaacaaacagtaataactgagtagtgccagattatattctttgagtctaaaataaataacttccaaaaaaagtaagtgcttttgtttggaaggtgataacataagaatataaaccaaactgcttcactgatataactcccaccaaatatcttcatggggtaggttactgatttttatcttcctgaataaggaaacaaaggtcagtgacagataccagtaactgattatttttacaatcttaaaaaaaccccaacatatttcattggaaccataaaaactcatcattttctctttatgaataactcatgtttttatacaactttaaatgc

SEQ ID NO: 419178 - DNA, 563 bp, Homo sapiens
gttgacttaaaaatcagtatgatatctgagactggttttaataaaaggaagaatcattgaatttgagtactgaagttgaaaactagccatatttgttataaattcctcttaaaaaattagtagtttctactttgatttttctttttgatgatttcacmccttatttagaagtctaatacttcaaatttttccttcttatattgtttaatttgccacacagactagggaataagagaacaaacagtaataactgagtagtgccagattatattctttgagtctaaaataaataacttccaaaaaaagtaagtgcttttgtttggaaggtgataacataagaatataaaccaaactgcttcactgatataactcccaccaaatatcttcatggggtaggttactgatttttatcttcctgaataaggaaacaaaggtcagtgacagataccagtaactgattatttttacaatcttaaaaaaaccccaacatatttcattggaaccataaaaactcatcattttctctttatgaataactcatgtttttatacaactttaaatgc

SEQ ID NO: 419179 - DNA, 563 bp, Homo sapiens
gttgacttaaaaatcagtatgatatctgagactggttttaataaaaggaagaatcattgaatttgagtactgaagttgaaaactagccatatttgttataaattcctcttaaaaaattagtagtttctactttgatttttctttttgatgatttcacaccttatttagaagtctaatacttcaaatttttccttcttatattgtttaatttgccacacagactagggaataagagaacaaacagtaataactgagtagtgcmagattatattctttgagtctaaaataaataacttccaaaaaaagtaagtgcttttgtttggaaggtgataacataagaatataaaccaaactgcttcactgatataactcccaccaaatatcttcatggggtaggttactgatttttatcttcctgaataaggaaacaaaggtcagtgacagataccagtaactgattatttttacaatcttaaaaaaaccccaacatatttcattggaaccataaaaactcatcattttctctttatgaataactcatgtttttatacaactttaaatgc

SEQ ID NO: 419180 - DNA, 563 bp, Homo sapiens
gttgacttaaaaatcagtatgatatctgagactggttttaataaaaggaagaatcattgaatttgagtactgaagttgaaaactagccatatttgttataaattcctcttaaaaaattagtagtttctactttgatttttctttttgatgatttcacaccttatttagaagtctaatacttcaaatttttccttcttatattgtttaatttgccacacagactagggaataagagaacaaacagtaataactgagtagtgccagattatattctttgagtctaaaataaataacttccaaaaaaagtaagtgcttttgtttggaaggtgataacataagaatataaaccaaactgcttcactgatataactcccaccaaatatcttcatggggtaggttactgatttttatcttcctgaataaggaaacaaaggtcagtgacagataccagtaactgattatttttacaatcttaaaaaaaccccaacatatttcattggaaccataaaaactcatcattttctctttatgaataactcrtgtttttatacaactttaaatgc

SEQ ID NO: 419181 - DNA, 383 bp, Homo sapiens
tttttatttgaaaatctaaggactttttccacatcactaaatacagacaatgctcccataaacaatgattccatatattacctaaccaaagcacaagagttatgaataataaaacaatggaaacagattaccacacagcagaaaaacgctctttgtcatgaaggttatagwtcagtgtaatttcttgctgaggaaaactgaacttttttttaaaagcctccttttatcttgtgaatcacacaaaggtgccgttgtgtgaaaacttggcttctggatttgcacacatcttgtttcttttacgaacgtttcctcacatcaatactaccgtcttagcacccaagctcttgtttcaatcaccatgttacagaggtgagcaggcagag

SEQ ID NO: 419182 - DNA, 591 bp, Homo sapiens
atcaatccatatgagatatttttattttcttttgttttattaaatcattaaagaaaatttcctagacagkcttccttcctgccttattttatactatctaatttttttctaatataagggagcacagcaattatccttaaacctttccactgtctctagccaagaaatcagcttgcatttataagtacagtaagtgttggctgcctcatgcgagtgatcaaacacagctcactactaagcaggtcattggaatagtcatttgtatatctatctcctgagtcttatgtaaacagtcctaagggggtttccctggaaactcatgtgccaaactgtctgctttcccctgcgcttctgagggatttgggggaacactgcctccttaatgagatctggccagtcccttcctcctggttgctaacctataaatgtattctagtcagggccagcttcatgggtgtgtcacccacagtcacacaagttcctgtgctcttcttgctcctaggtgtcagcctaggcagccccgtacacgatattaggggtaaattactgcaaaatgattagttctagtattaatttaaagtactattataa

SEQ ID NO: 419183 - DNA, 447 bp, Homo sapiens
gttgagccactgcgcccggctgtagtgtcctaaattttatggggcactgtgtgcagttgaaaatcatatgggcctttatttgtagcccatttgcctctgctctgaaggctggctacttatatccttgatgtgttcctgaagccattaaagttaagtgtacaagcatggcctatgtttcagactgaatcattccaaacataatcgttcggtttcttgcaactctgtctaattatttgtcaccatttagtaacaaaaataaatttaatgtgtttatatatagatgaatagaagatgctakgaaacctcagtcttctgtgtatggtggggtaggactgggggaggtgggagggagggcagcaggaattttaggggccttataggccagttaaaacctctacctttcttcctgccttttccggttctgattgctttgaaatgtgaaaagct

SEQ ID NO: 419184 - DNA, 523 bp, Homo sapiens
actcattcaatattaatgtcatttgcaactctgacaaatgtgatacaaaatgatttaaaattataactctattgctgttagaataggtatatgtgcatatattagcccttctccagattctrtgccacaacctagttgtgaatctatctggccttttcccaaatcattcttctttattcaatcaagtagctccatgcactacagagaagagtttctgcaaggggtaaagagttccaacagtaaccactgaagaaaccagggagtagtgcatgcgctccaatggctccctctctagacctgaaaactgattagtataacttctatggactctgagcctagatatgttgagcaatggacaggcctgggtactgcctagctctgtctgctttgaacttaaaactgaagtgagatagtgtacacatcccactgctgtagagtcacatacattagaaaacagaagtatcaagtaatttattctgttgaattctatggttagacagttctcaatctaacattggtcagg

SEQ ID NO: 419185 - DNA, 607 bp, Homo sapiens
tgttcctcatggcacagtccctcatgacttcccttggctaagggagggagttccctgaccccttgtgcttcctgggtgagacaatgccccaccctgctttggttcgccttctgtgggctgcacccactgtctaaccagtcccaatgagattagccagttacctcagttggaatgcagaaattacccaccttctgtgttgatcttgctgagagccgcagacagagctgttcctacttggccatcttgccaaagtgcccgatttgatacttttctattgctgcytttagaattctctttgtaattcactgttgacagtttgattataatgcatctcaggacagctttgtattgaatctattcaagcacctttgagtttcatggatccggttgccctatctctcctaagacggaaagttttcagcaattatttcattaaataatctgactgtccttttctttaactgttctgcttcttgaaatcctgtaatatgaatatgtgtttgcttaatggtgttctgtaattcccataggtgtctttactctttttcattttttccttttttctgactcatttcgaaactgaagaaaatccttcttctcatatctc

SEQ ID NO: 419186 - DNA, 581 bp, Homo sapiens
agcatccagaggccaagtaactgtcttcagttctgaaagctagtaaaagatgaagccaaggtttaaacctaggtcatctggctctgagacctgcatacttaaatctactctgtcttctctgcaatattctctattgcctatctgaagactatggtaggatggcagaccaactgtaattacctctctgatttcatcacacagttatcctctaacccttctaggcactagtccccaagtaaatcctgcactctcatgtctgtgtttctgttcatgctgttttttttttatttttatttatttatttttatttatttatttttttttgctgaaatgttctttccttatgcttttgcctgtgaaaatctctaaattattctgcaagactcagctcaaatgtcacctctactcaaatctttacccctagatcagcattacttaatgcctttctttccttctacrgtacatttaaaaatacagtcctattgcagtatctaccacagcctgatacattatgctctcctttctttaaaagcaggcattgattgagtctattcattccactgttgctagtaccatatgta

SEQ ID NO: 419187 - DNA, 540 bp, Homo sapiens
tttttaaataaaatcatcagtatactttcttgctgctaagatgaactagttagaaacttttttgagttgtcctgtattttggaaacattgaaaaggactttactataacttattgtctactgactccatggatgaattgagtattgtaatgctttatgtatcaataccttttttcaaagtttttcagcttttcacatgtgttcgataacatttaacttttctatggtggattatattaactttttatcataaattttaccatatattttttaaattgtattttaattttaaaaatttgaaaatgcctttttctgttttcttttttagctcagttttcaaaggatcagccrtgtgtgtgtatcatttatctgatatacagactgtgtttaatgggccttttgcccacaaagaagggcccaatcatcagctgatttcctatcagggcagaattccatatcctcgccctggaactgtaagtatccagggaaaattctttgttatgatgctttataaaaactcatttaacaggtaatgaatatc

SEQ ID NO: 419188 - DNA, 633 bp, Homo sapiens
ttgaaacttttaaaactgcatatatagttatagttatatacacatgcatccatatagatacacacaatttatttgcccaatcgaatgtcaaggttttagttagttagatttgtgagttacttgaaatggtttttaaaaaatcaaaaatcagcaacaaaatataagatctcagataattcctggtcaaatatatattcagttagaatccatgtgtcattgtttaaactaaaacataactactaaaatcctagaatttcatttactttttgaaaaggaaaatacaaaaataaagatgattaaaactgttgcgctacaacaattttatagattttgacaataagtatagtcaaactcacatatactctttgacttttgcataatatacaataactcctcatctaaacataaatatttatataaaattattttaagccaattagaatcacttcataaaccataggaagaaatygacctaagtttcagtaactttcaagaatgtgattcaataaatatgattatttattgaataaataatcatcgacaagattatttttatttcaattgtatttttaaaaatatcaaccaaatcagatcaataaggtgttttcttacaggttcaatatccaagtatgt

SEQ ID NO: 419189 - DNA, 483 bp, Homo sapiens
ttatagctcactgcagcctccacctcctggaatcaagtgatcctcctgcctcagcctcccaagtagccggaactaaaagcgtgtgccagcacacccagctaatatttgtattttttttgtagagatgggattttgcyatgttgcccaggctggtctcaacctccggggcacaagtagtctacctgccttggtctcccaaagtgctgggattatagacatgagccactgtgaccagcctcccattgctttttaaaaatcttaattcttaaactaataggcatatctgtactttgcttttcctgaaggagaataagcctgatctaaccataccttaaatctaagtttatgaatgctcattttttacatatatttttcacagttaagaagacatctgactttgttattgttttctctctcattctgaccaccttatccaaaaatggatggttctgtcttgcaactttattctatctcagctataag

SEQ ID NO: 419190 - DNA, 582 bp, Homo sapiens
aggatttaaatgtcaataagttacatagaatgaattaatcctttatatagtattttgtaatctttgcaaaatatttttgcgttcactacattgtgagtttatatctccacctataattctaaggcattggtattattatccttattaaacaaatgagaaaacacactcaaataagttaataaattatcccaagacctacaaatagtaggagattagaccaagaggtagacatcttcattcccagcctggtcctttttcatgtccccacaaattcatcctggtatgtgcagttaataatggcacagacagctcctgggagccactcagggtccctttcccactcatgtcaggtgacattacactggtctttctcaaagtcccagtggctggcctgattaagtgggcttgtccagagggtctcrtgaacctcaaataaccttctaagtttctctcagtaactgtgaccatttggagagaaaacaaatctatacacagaggaattttaaaataaggtgttattttaactttgtataagatgcataaaaagtttagctttcacttgaattttttaataagtttggc

SEQ ID NO: 419191 - DNA, 517 bp, Homo sapiens
atctctgagtaatctgtatgtgcctcaaggggaaaagctatgtagtgcttaygtggtgcagcctcatatgattgtgcaagtgatggtttctgtgaatggggctccctggagttgtgtagtatacaactgtaaaatcacactgtagccccatgctcatctctacatgaagagcagcgttttgatgaatgtttgatgaatgaaactctttgctctcttcaaataagtgaaaagctacttgcaaaagatagagcagatctttcattgctttagttgtttcccaagatggcaaaagtaatgccagtgggtacaaaagccagagagagataaaagcttttcaagttcagaagaattttctatgatgcaacacagccgaataatgaaagaggatgactagaggacagctgtgagctcctctcaccaaccctcaaccttagtagagaggagatgagtggttttcgggattggtggagaatattccatttttagaaaaggaagtggaggttgggctaaagtccaa

SEQ ID NO: 419192 - DNA, 517 bp, Homo sapiens
atctctgagtaatctgtatgtgcctcaaggggaaaagctatgtagtgcttatgtggtgcagcctcatatgattgtgcaagtgatggtttctgtgaatggggctccctggagttgtgtagtatacaactgtaaaatcacactgtagccccatgctcatctctacatgaagagcagcsttttgatgaatgtttgatgaatgaaactctttgctctcttcaaataagtgaaaagctacttgcaaaagatagagcagatctttcattgctttagttgtttcccaagatggcaaaagtaatgccagtgggtacaaaagccagagagagataaaagcttttcaagttcagaagaattttctatgatgcaacacagccgaataatgaaagaggatgactagaggacagctgtgagctcctctcaccaaccctcaaccttagtagagaggagatgagtggttttcgggattggtggagaatattccatttttagaaaaggaagtggaggttgggctaaagtccaa

SEQ ID NO: 419193 - DNA, 517 bp, Homo sapiens
atctctgagtaatctgtatgtgcctcaaggggaaaagctatgtagtgcttatgtggtgcagcctcatatgattgtgcaagtgatggtttctgtgaatggggctccctggagttgtgtagtatacaactgtaaaatcacactgtagccccatgctcatctctacatgaagagcagcgttttgatgaatgtttgatgaatgaaactctttgctctcttcaaataagtgaaaagctacttgcaaaagatagagcagatctttcattgctttagttgtttcccaagatggcaaaagtaatgccagtgggtacaaaagccagagagagataaaagcttttcaagttcagaagaattttctatgatgcaacacagccgaataatgaaagaggatgactrgaggacagctgtgagctcctctcaccaaccctcaaccttagtagagaggagatgagtggttttcgggattggtggagaatattccatttttagaaaaggaagtggaggttgggctaaagtccaa

SEQ ID NO: 419194 - DNA, 425 bp, Homo sapiens
atgaaccctaaggaacttgacaaaaccgtttcattatgatctccaggagaaggtcacttctcattcatcttgaatccatcctgttatctagcagaatgcctggtacaatgggtactctagattgtataatgaagtactagagttkggttgtataatggtactacccatctcaccaaaacactgtcacttttcttctaaacattcaaattagcaatttaagtctctatcttatgtaaatgatcagtatatccagtttttctttctagggactttctttgcctagaattgttcacaaggtcaatgtttaatcaaacttaaaaagctactcctattttcaaactgcaagtaaaggaaaacctagagaggctacttttccagtgatggacatcaggttgcctccaaccttttttaccaaaaaaaaaaaa

SEQ ID NO: 419195 - DNA, 425 bp, Homo sapiens
atgaaccctaaggaacttgacaaaaccgtttcattatgatctccaggagaaggtcacttctcattcatcttgaatccatcctgttatctagcagaatgcctggtacaatgggtactctagattgtataatgaagtactagagtttggttgtataatggtactacccatctcaccaaaacactgtcacttttcttctraacattcaaattagcaatttaagtctctatcttatgtaaatgatcagtatatccagtttttctttctagggactttctttgcctagaattgttcacaaggtcaatgtttaatcaaacttaaaaagctactcctattttcaaactgcaagtaaaggaaaacctagagaggctacttttccagtgatggacatcaggttgcctccaaccttttttaccaaaaaaaaaaaa

SEQ ID NO: 419196 - DNA, 425 bp, Homo sapiens
atgaaccctaaggaacttgacaaaaccgtttcattatgatctccaggagaaggtcacttctcattcatcttgaatccatcctgttatctagcagaatgcctggtacaatgggtactctagattgtataatgaagtactagagtttggttgtataatggtactacccatctcaccaaaacactgtcacttttcttctaaacattcaaattagcaatttaagtctctatcttatgtaaatgatcrgtatatccagtttttctttctagggactttctttgcctagaattgttcacaaggtcaatgtttaatcaaacttaaaaagctactcctattttcaaactgcaagtaaaggaaaacctagagaggctacttttccagtgatggacatcaggttgcctccaaccttttttaccaaaaaaaaaaaa

SEQ ID NO: 419197 - DNA, 582 bp, Homo sapiens
gtgggggtatccttcttctccctttatctactattcctccctgatattagaattaagaaaaaatgcaaagtttaggagataaatctttcctgtttctgcaagtcaaatacatgatcacaacttatttttaggataatttattaggtatcttttcacttctccatttctaactcaaaattccctttaggtttcaaaagcaataacaaaatcaaacaaaaattctccaaactgaggctccagtcaaccaacaaaaaaacaaatttaacctccacaaaagaaccctggcaagcatgatcaaatccaatattaccttttgacttagattaggacttaacataggagtaactaaaattasttgcacaactgccagtgcttgctcctactttagcaccttatcttttactagatcagaaatctctgaaccaaagaggaaaaatgtggtacaatgggaaatcagaagattcaaggtctggccacttattaagcctgcagtaatgctctgatgtcatccaaggctcaacttactataacattgccaagtggctgtgatgagaacttttacatcactggcaatgaataatg

SEQ ID NO: 419198 - DNA, 467 bp, Homo sapiens
ggcacatgtttacatatgtaactaacccgcacaatgtgcacatgtacctaaaacttaaagtataaaaaataaaaataaaaataaataaaaaaataaaaaaagaatgtaaaatattaaaaaaaaaagaaacttataaagagttttacttagaggagacaatttctttttatgtgattctgagtctcttccccagtgaaaagctggttttcagygcaactgtcactgtttctagccatgacatctcctccagtaataagctggaaggatcaacgatctgagataccccatctctcatagtacttgaagagctccagtgttataatttgaatttccaaagggaaaagaagattaacctagtccatctacaaggtcataaaggaccagtttaggtttcatcactgttctctctgccatagattcagctttatcctaaggctagttccctttgctatcacaggatacccatc

SEQ ID NO: 419199 - DNA, 429 bp, Homo sapiens
tttaaatcaatctctctctctctctctgtctctctctttgcatgtacacacagctccaattaaagcaaactctggtacagatgcctgttaactttcataatatagccacaaacctagctgctgaacattttagcacttaaaaccagctgttatctttaaacagttatgaaagtctgagttccaatgattccaattctgtctatacaagatacagctttargctggctgctcacagttctttctttactgctagacaattttccctaaagacctaagaccctgagggatctttgggcccagctgtatatgtattctctcaccaaaacatcctacctcctgaaaatctccatctgagcttggacactgctctcattacccacttgtcacacagccacctgtgggtaccgtcagggcacatatgagatgatc

SEQ ID NO: 419200 - DNA, 584 bp, Homo sapiens
ttctttctttactgctagacaattttccctaaagacctaagaccctgagggatctttgggcccagctgtatatgtattctctcaccaaaacatcctacctcctgaaaatctccatctgagcttggacactgctctcattacccacttgtcacacagccacctgtgggtaccgtcagggcacatatgagatgatcgttcctgtgcttaaggctatgggttcccccaaagagaatgaaacaagagccttactcctaaaaaatgaatctagctaagaaggaacatcttaaaamagctagaataatcaatacacattctgtgttccactgacattcatagtcatgaagtttaatgaatactctccaaattttattggttatgaaatatctaataaaaactcatggaagatagaaagttatgaccaggtaaggatatacaatggatttctggaaggctagtaatgctagtaatatgctctttcatatctaagtgggcattccatgtatatatgctctcttaacaatttgttgaaatcatctgccatgacctgagagctgagctataactaattttataactaagaagaa

SEQ ID NO: 419201 - DNA, 514 bp, Homo sapiens
ctagtaatatgctctttcatatctaagtgggcattccatgtatatatgctctcttaacaatttgttgaaatcatctgccatgacctgagagctgagctataactaattttataactaagaagaaaactggatgacctgaatcttgttgctcctcagatagtttgcaacatggtaaggaggttcttcttagagtggtcactagactttttagctcatcttttkctggggtcagaggcttgtgtttctgaacttcacacaacactgtcagaccctccttcctggaacactggttctttaaaactacagcctgctgtagaactgaaatgtgctctctctcttgcccagggcgttgtgtcccagcttcactaaaagacacctataagatctagcttcacatctgtgatggctaattttatgcgtcaacttggagagtgtttctggatgagattatcatttaaataagtgaactgtgagtaagcaaatttcctccatcatgtgggcagtcctcattcaa

SEQ ID NO: 419202 - DNA, 582 bp, Homo sapiens
agtttattatggtcctgttaatgttattactattattcacaacatcctcctctctctatttttctcaggtttatcaattggtctactgtaacttcatttttccagatggatagtgggtataataaatagctttagcaaaagctttaaatgacaagtttaaacataatattccaaatgaaaaaaaataaggaaatggcacacatgcgcacatgcacatacattcacaggtggctttttaacatggatgtagaaaggtgtgtatgargtggggagggagattcattgacaccaacagcattaagaaagccactgaggtggtttctttggctccagcaaaatttgggatcaatttttcttggcaagaattacgactccagggatgctaaaaggacattaaagtagccacagatagaattaactctatctataacagatagaattaacgattgctctggaagccttccagagtggtgggctaatatagcgtatcacagaattgggagcacaggggaaccacagaggtgagaaaccagtcctggtttctcaatcaccaccaatcaatgtggagagagtcattgtgtt

SEQ ID NO: 419203 - DNA, 603 bp, Homo sapiens
ctagttattggtagaaataattctagaaatttagaacaataaaactatttcccagtgttccctgagtgaagcaaagatacctacatttacctatctcatagtaattaggtgatgttttcgtgacactttgaatggaactatcaattgcctttgycaataaatgtcactggattctagaaaatgtattttgatgattctcttaaaggaatgcagaccccactcctcacatgacatgctgcccccattttaaattagaagtattttcaatctactggagtgattaggagttgggaggcctaaatttaggaaacactggtcctaatcctgtcttcgtgagtcattggttctcactctgctcctcagcttcctcatctgtgaagtaatggggctggactcagtgacctttaaggtcctcactatgcaacaccatcacaagccctttatctggtaattctaaatgtttggaaacaaggcccaaaagataaatgcattaaaagtttctagagcccaaaggcctggtatttacttagtagatagcctgctgcttttccaaaatccaaacaaaagaaaatttggtttacaggtgtttttgttatgggttgt

SEQ ID NO: 419204 - DNA, 581 bp, Homo sapiens
cctgggcttctttactttgtgtcatgatcctttgttaatccacctaagagaagagaatgcagacaccaacctactttggatgacacaggtgtgcaaactaactctttcccccttctttcctgacatatctatgatgatcttgggcatgttacctargaagagtcaggagggcaaactgtaaagtccaccttacaatagttcatttcttgaaagaatttttatgcatgtattttggacaagctctcatagagtcgctgactcattcattattcagttacttttttcttttttggacagatactatctgaaagacaagtcaagcttctgaaaagtgacttccaaattataaaacaatttctgatttgaacaaagttgtacttaggaaagcccattctttcttgtcttctaccatacatctttggggaagaaatgaggagccagttgccacatggcccagctcagcccaatccattttgaagcaggtgctctggatgaaagaatagccagaaatgaaggctgtgacctgtgtagtgctatgacacacatacacatgggatgcactggggacttgttttccaaat

SEQ ID NO: 419205 - DNA, 537 bp, Homo sapiens
cgctgactcattcattattcagttacttttttcttttttggacagatactatctgaaagacaagtcaagcttctgaaaagtgacttccaaattataaaacaatttctgatttgaacaaagttgtacttaggaaagcccattctttcttgtcttctaccatacatctttggggaagaaatgaggagccagttgccacatggcccagctcagcccaatccattttgaagcaggtgctctggatgaaagaatagccagaaatgaaggctgtgacctgtgtagtgctatgacacacatacacatgggatgcactggggacttgttttccaaataatgkgccctttatccctcctgaccaagacaggactcttgggaagatgcctccttgaatacaattaacatatggaacactttgcttctggaccattggtattttttgggtcatagcaatttgtattgagtggggaggactcatacctttgtaggtgcagaccagaagatcgacccactgatctgcatttattaagcaactacagcgaa

SEQ ID NO: 419206 - DNA, 537 bp, Homo sapiens
cgctgactcattcattattcagttacttttttcttttttggacagatactatctgaaagacaagtcaagcttctgaaaagtgacttccaaattataaaacaatttctgatttgaacaaagttgtacttaggaaagcccattctttcttgtcttctaccatacatctttggggaagaaatgaggagccagttgccacatggcccagctcagcccaatccattttgaagcaggtgctctggatgaaagaatagccagaaatgaaggctgtgacctgtgtagtgctatgacacacatacacatgggatgcactggggacttgttttccaaataatgggccctttatccctcctgaccaagacaggactcttgggaagatgcctccttgaatacaattaacatatggaacactttgcttctggaccattggtatttttkgggtcatagcaatttgtattgagtggggaggactcatacctttgtaggtgcagaccagaagatcgacccactgatctgcatttattaagcaactacagcgaa

SEQ ID NO: 419207 - DNA, 548 bp, Homo sapiens
accattggtattttttgggtcatagcaatttgtattgagtggggaggactcatacctttgtaggtgcagaccagaagatcgacccactgatctgcatttattaagcaactacagcgaagcaagcagcatgtgaaacattgtgggagtgcataggcatgaggcgcaaggcatgagtctgcctgcaggtggataggtcagtctggaaaatagataagtgaaaacaactgtgcamgtacctattcagtccctggcaatagagaggatggatcaatggagatagcaatggtcagggatgactttgcaggaaactgggtccaagggtggtaaaggaatgaaacagaagagaaggaccttgcccccttatgcagatgggtaatgatggaacatggtggggcctgagattctcatctgaaatcggcacaagcacctagttttccaggacagtgttcatctgagggctaccttccctgcagtggcagaagaatggctttaaaaatgaacattgtgctttttaactgggtgctttgcctccatgggtttagagaatt

SEQ ID NO: 419208 - DNA, 556 bp, Homo sapiens
taggttcatcagttgtagcaaacatatcactctggtgggggatgttgatgatggggggaggtagggaggctatgaaaaatcactgtaccttcctctcaagtttgtagtgaatctagaactgttccaaaaaaaattgtctattaaaaagcayaagctttgattatctttaatcatcatcataacagctagcactgagtgtttactcagtgccggacatctctctaagtcctttgtatgaattaattcatttaattctccaaggagccctcaaaggtaagtgctaggttcacctgcatttcacagatgcagacgcaagacacagaacaggtgtgtgatttgcacaaagtcacacagctatagctttcccatgcaggagtcaggatcctgatttcagtttcttccattgtttctgaagctttgtgctgcaccttcacgtctgagtggcagttgtaatatgaaggggaagaggtgaataattcagagcctgtctaggaaggctgtttcctgggcaaagaccaggagacttcccagattttgctgtggcttggactgtgca

SEQ ID NO: 419209 - DNA, 563 bp, Homo sapiens
gggtttttttttttattttgttaagtaaccacaaggaagataaatatctatctttatattctaattaaaatatcttcatttatttcagacaacaatttgcttgataattttatctttatagactttkaagtgatagcatacttgagtgagtctggtagcctttaattgcatagctatgcaatagtataaggaatgggtctctgctcagatgacatttgccagcaacaagcttttgaagaactgctttcctacccaaacacaaatgacatggaaattttttccttaagctgagtgacatttttcagttgacatttgtgttaatttatttgtataacatacaatgaaatgtttgcctattttaaattaaaaatgaattttatttcttatttcttctttataaggaagctatgttgcctccagatggaaaataccatttagagagctttagtttttctggtgaacacaaagatcccttgctgaatgtggcacagcacactctgggtgagatgcttaactcagactcatgacagcttgctgaaagaaagatttctgagtcagatatg

SEQ ID NO: 419210 - DNA, 645 bp, Homo sapiens
ctgttggtcaatggaatctggaacccttcttaacaaacctctgtgagttatatttattttgcagaagctctcctaatgatcacattagcagcaagttggaaaagcccagtgagtccaatcagactgactgtacttttgcatgttatcagtacaatatgttgcttcaactgaaaggctaaattctctaactgcccccaaaattgatccagacagcagaaagggaggaaattcattctactttaacacagcaattggtccagacttcacgcaatatcatttcagtctagaattttcatcatcactgccaaaaacatcatacagaaacattacatgacttgcactcagtttcactctccaaaaaacagccatcttgttccaggcctaaggagaaaaaatgaaattaamgggagatgaggtggggaggaatcacatggagcatttttaactgtttctcactgcctggtttctcagtttcacaacaattattgacaaatcaatgaagttttgatattaagaacagccagaagttcctccatatgtcaaatgctccatttctcaaactaaaaccctctattcatagttgcatgagggtatcttgctcgcctttttgcttttacttaactgtcctatatcccagatcattca

SEQ ID NO: 419211 - DNA, 611 bp, Homo sapiens
agaacctgtaaggatagcacacacacctgtttggttgtttgcactctgggaatcctcaccttccagtgaacacaccccatgaggagcagtgtggattccacggcagcactgctgagtctcttggcaatagccagcctgcttctcagccatttctatcccactttgtgtccctgcctggcctcatccttaccatgtgactctgtacaaatttccagccctctgggaccctcaatttatccatccataaaaaaacacgctggtctaaatatttcctacatctcttcaagcttaacttttttttcaattattgtacttactactcttcccccactgtgaaaaacaatcctcaccaattcctagagaaacttatacaaacccactgagaaatgtcgagcagttggtgcaaaatacccaggaattacatgaacatcattyaacataaaagagacccaaaacatactctcttagtatgggagatggaatctttcaaattctcagtaggttccttgtggccggtcaaacagttccacccaggcaaaggatgagcttagaaatatctgagccagacctttccccagctctgctctctcctcactggtatcactggagtt

SEQ ID NO: 419212 - DNA, 596 bp, Homo sapiens
gattccccattatttttgtaaattatccaggttagcttagctctgcagagaagtcactgaacgaaaacccaaagtaaaatctacaagcatcaaatagagatcttagcaagagaaggcacttgatgcatgtttcttgaaggaataaatttatttatttagatatttggagcttttcattttacaaaggaactcactgccaggttctattgtaggaccttctgggtayattaatgcatgcttatgctcatagctggttatcctctgtttgccacagtccccagtcatcctctgaccttctttctgctctctgccctggagcttccattccattttggtcattgagaggcactagcaggaaagcaaaggacaggaagagacagaggctggggtatagacttttaccctcgcattgcattcccctcttggttctggctttggctgctttctatgtcagccctagctcctctgctgcagctccagctctcaccaaggtccagtaacactactgctcttctcctcctaaacttcaaggtttaatggtttcccatggttacaaacccctgggtgcagagcctctgttggattccctaacccca

SEQ ID NO: 419213 - DNA, 477 bp, Homo sapiens
cctagtttttgacccactctaatgaaatcctgcttttatcatacaccatttcaagcctggtccagattcccctagtccaaatttctgaaaagttgggcaaaatccaggcttacatttatctttgcaatagctacctgagaagtaaattaatagtgtaaactagctagcatgggttgtgcttgacctagttaaaaaaaaaaaaaaaaaaactttaaagcatggaggactttttacactcacttagtatgcttttttacctayacttatctcatacttatctgaccctaattgcatcctaaatttattgagatgcatttcttgtaaatctttataatcagaccagtcccactccactgattcaaatcagtgaggcttgactgcctgtataatgattattcaactactgtcaattctttgacctcctacttttcaatgataaatgcaaagtgagtctgctctgcatggcattaaaactga

SEQ ID NO: 419214 - DNA, 590 bp, Homo sapiens
ggtatatgattatttcaaagtaaaaattggttacagtgtatgttaaggacagccgtggaggtaaaacaatcagaaaatggcagtctgaaggctgggcatgaaagtataacgagcagttcaacctttacagtttttgatgggagttattacaatttatgggattattgtatgagtaaactttctgctattttcaacatgtgggccacctcttttgatcacaatcagaagcctctctgtgtacctccccagaatcctctctgtcacttttgagcttgggcattagtgagttcatcattaagatgatccttgactggaggaaataaggcaaaggaactttgtgactaacaaaatcmtgtcttggcaaaagactagtatccaaaatctacaaggaactcaaataagctagaaaaaataataataataatcccatcaaaaagtgggcaaaggacacaaatagacatttttcaaaagaagatatgaacatccaacaaacatgaaaaaacgttcaacatcactaatcatcagggaaaggcaaattaaaaccgcaatgagataccaccttattcctgcaagaatggccataattaaga

SEQ ID NO: 419215 - DNA, 590 bp, Homo sapiens
ggtatatgattatttcaaagtaaaaattggttacagtgtatgttaaggacagccgtggaggtaaaacaatcagaaaatggcagtctgaaggctgggcatgaaagtataacgagcagttcaacctttacagtttttgatgggagttattacaatttatgggattattgtatgagtaaactttctgctattttcaacatgtgggccacctcttttgatcacaatcagaagcctctctgtgtacctccccagaatcctctctgtcacttttgagcttgggcattagtgagttcatcattaagatgatccttgactggaggaaataaggcaaaggaactttgtgactaacaaaatcatgtcttggcaaaagactagtatccraaatctacaaggaactcaaataagctagaaaaaataataataataatcccatcaaaaagtgggcaaaggacacaaatagacatttttcaaaagaagatatgaacatccaacaaacatgaaaaaacgttcaacatcactaatcatcagggaaaggcaaattaaaaccgcaatgagataccaccttattcctgcaagaatggccataattaaga

SEQ ID NO: 419216 - DNA, 543 bp, Homo sapiens
cagctctgagtccagacttgtctagtgaggggagtcagggtgcccacgaatggctggcaggactccctgggcaggaaggaagagtgccctcatcagactcctgttctttgtcaacattttccttcagcaccaccctaccctggaagctcctgaaagaaaagagtcactctacactcaaaatctctccttgtttacaagatatttggtgcacggatggaattattgcatcacaggccaatttcttcacctctcttaaaaattttatcacgtgaagcagcatgctgaaagatctcaatgctactgaagattgcaaaaccaagtggagattcatctgttttggaactctgtcaaaagacttttycatatacattccattcccttccacagctcacagtgtacctaccctgtactttcagagcagtgaggcagcttcttcacctttctcaagccagggcaggtcctgacaaattactctgtgtcaggatctttccaggagacattttccctggtaaaatgctcatgaaacttcactgatgtggacaa

SEQ ID NO: 419217 - DNA, 570 bp, Homo sapiens
caatcactgtctccaatatcctcccagtctatgggcccaaggagaagcttcatcttgtcaaccatcttggcgttctggctgcatttgtatttgggcttcctcactcattgttgacttacagaatcaatcttttccagtggattaggaccattaatatcttataagttgaatagaaaccaatgtaacctgcataaacaagagaacttagctttggttctgcctcagggcaggcctagggtaaggcaagtgggaggtattttgtacacaaaatttaaggaggctctcactatcaaggtactgtgagtacagggtctgcctggatatggcaggttgacactttctgtaccagtcatttaaatgctctgagyctcagttttctgtctgtaaaactgggacaatacccatatcatagagttgtggaaaatttagtaatataatgtttatgcaagtacattacaaactataaacaatacatatatacattggttttatcaatagtaataattttccttaatcatgacattgataataaccataaccaaaacatcctttgcagtgaatgtagcagat

SEQ ID NO: 419218 - DNA, 596 bp, Homo sapiens
gttcttaacatttcatgattatggaaaaatttaaatttgttcgttgttttttcctagagtgtggacacttacaaggggattccatgaaaatattgtggccctgacacatgcatgcccacatgccatttttctccctaagccataaagtttgttgcctgcactttccttatgtgaagctctgctgaaaagtcttgcctgaatggtggtcatacttccctcattactctttatactctgcaagtgacactttgtgtatactgcagccaccagtgtgacctgccatggcactacaatttgaacatcaatttaaatagattccctttggaagttaaggtagctagataaccataccatccttttctattaaaagcctcaataatgttaaaaatgtaagtgtaggcatacatgcacatgtgtatctggtttggggcagtttttctttgggtttaaaaacatagactttgaagcatagactgggtttgaattcagctcagatacttactgtcagattactgaatctgtctaagccagtttcaccattcaatmccattttatatcaaggattcagcaaaggagcatatatatagcacttaaca

SEQ ID NO: 419219 - DNA, 541 bp, Homo sapiens
gcacctttagatcagtaacatcttagagttgaggatatgtagtatgtcatatgtatttgtgtgtgtacgtatgtatttggtcaaaaaattgattcattgtcaagattttttcccctgagagcccagccacattttcytaaatgttacaataatggacctagttgcaagaatgtaaagttaaaaatgtaaagagaatgttttcaaaatgctatagctgcctaaaccttgcaaaatgaaaaacgagcacttcttcagcttggaacagtttataaaggaggcaagcatgtgttgtgtgatggttatgctggtgtatttgtgcagatgcatagcacaggctctgagagggtaagacttcatgattaatggtgtttattcttgacagaagcctcctttatttatctgcaatacagtttagcgattttatcaggcacctgaatgaaaaatattcagtcataccaatattgcagtgtaaattgaggagagtcactttttattatatctttctgccttatcatctgcacagtaattttctagcagaggt

SEQ ID NO: 419220 - DNA, 585 bp, Homo sapiens
aaaaacgagcacttcttcagcttggaacagtttataaaggaggcaagcatgtgttgtgtgatggttatgctggtgtatttgtgcagatgcatagcacaggctctgagagggtaagacttcatgattaatggtgtttattcttgacagaagcctcctttatttatctgcaatacagtttagcgattttatcaggcacctgaatgaaaaatattcagtcataccaatattgcagtgtaaattgagkagagtcactttttattatatctttctgccttatcatctgcacagtaattttctagcagaggtttgatatggaaaggctggatttagctgtacttgacacaaagcctcttcaatttctcctaaaagttcaggctgctcttagaaatgtgtgtgtgtgtgtgtgtgtgtctgtgtgtgtgtataatatataaaccttctctcttatccaagcaatttcaggatttgaaagaataaagataaaatgcacaaacctggatgggagaaatgttgttaatataaaaatagctgtgaactcactggtaaaagctcctttagtgttgaagcttgtggctcagtactgaa

SEQ ID NO: 419221 - DNA, 587 bp, Homo sapiens
tttgtaggatactcaagtgatgggtcactaaattttaaacaaaagtgtattcaagcaacagactttataacatggtcaaagctaagcaatgacagacaggggaatatggtttgaatcatagaaakcactggattttaggaacaaatggggccttaaaccttgtgagtagaatggagatcatctactccaaagcttctcatttgacagatgaaacagtgaggctcaaaaagctgtttttgataagaccatggtcctgtgcacaggttttccaagggtaatatgaacaagtaattcttgcacatcatagacatttccaatcagatgaatctctcctcctttatggtactggaagacttgctttctctctgaagaaggaactgcagaaggagactttgtagctccttgttaagtagccagactcattttcagtcctccatgatgctgttctctacgtcttgagcaaagttcccgaaggccatgataacaagacccctaagaaaagtatccccttatgtagaagttgatgctgcttttctgttgaataatatagacaaattgttccccatcactacatacactctacagta

SEQ ID NO: 419222 - DNA, 566 bp, Homo sapiens
agcatattagttcttctaataatgaattatatttatttttattatattaattaatttataatttgtaattaagaattataaatgaatattatattcatttatacttattaattccactttatatttatataatacatacattatataatacaacattttatataatagttacyggttttatccttcttaccaactctagtaatcaggggaagaagataagaaaatgtctttcatttattagacattgcagaaacaaggatacctttgcgtgaactatttggactccatttggaggacaaaaaagtctgctaaaataataatttaatatataatgtgtattcatggaattaaaatatttaaaacatatgttatttaaaaacaagttgtcatctgccatttggttcaggtacgctcttttctccacttctttttctcttctgttcttaattctaaaatgtgagaaacatacattgagctctctttaaacaaaagttagtgggatagaacgcagtcccatgctatgagatgtggtcatttagctctcaagtacttatttgaaccagcag

SEQ ID NO: 419223 - DNA, 566 bp, Homo sapiens
agcatattagttcttctaataatgaattatatttatttttattatattaattaatttataatttgtaattaagaattataaatgaatattatattcatttatacttattaattccactttatatttatataatacatacattatataatacaacattttatataatagttactggttttatccttcttaccaactctagtaatcaggggaagaagataagaaaatgtctttcatttattagacattgcagaaacaaggatacctttgcrtgaactatttggactccatttggaggacaaaaaagtctgctaaaataataatttaatatataatgtgtattcatggaattaaaatatttaaaacatatgttatttaaaaacaagttgtcatctgccatttggttcaggtacgctcttttctccacttctttttctcttctgttcttaattctaaaatgtgagaaacatacattgagctctctttaaacaaaagttagtgggatagaacgcagtcccatgctatgagatgtggtcatttagctctcaagtacttatttgaaccagcag

SEQ ID NO: 419224 - DNA, 572 bp, Homo sapiens
aaatatttaaaacatatgttatttaaaaacaagttgtcatctgccatttggttcaggtacgctcttttctccacttctttttctcttctgttcttaattctaaaatgtgagaaacatacattgagctctctttaaacaaaagttagtgggatagaacgcagtcccatgctatgagatgtggtcatttagctctcaagtacttatttgaaccagcagtatgttcattaagatctctttttaataacagtgcattgcatgttayagtggctggaatggactttctttttaattctttgaccttgaaattttaatttattaatgagttatatttacagtacagagtagagacaaatttggcacattgttctttgcagtctttcctggaaggaatgaaatcaattttagctataaacaattgcactgctcttgtacagtgatacttgtataacattgtttcagttgttggaagaacatgactaacatgtatttgtttggcttctctcttcacaagaagctcctttgattggcttagcggtagccctgccccctccaaagttaatacacagatgtcc

SEQ ID NO: 419225 - DNA, 548 bp, Homo sapiens
gataactcattttggttttaatttgcactgcactataaatgatgtttatggagagttagttaaaagataatagaaaaaccttatcatactaagaaataaagtataattcaaaatacatgatttttatttttaatatgtaagaagtgcataatgcctgagaaaatgctggaagtaattatgttaaaatgttgacattggttagcttggatagagtgaatggctatttcttttcttaaataaccacttgtctttttcattcatggaatattaagtccttttatactcagaataagagactttttttttttttttttgagacggagtttcgctcttattgccctggctggagtgcaatggcgtgatctcagctcaccrcaacctccgcctcctgggttcaagcgattctgcagcctcagccttgcaagtagctgggattacaggcatacaccaccatgcccggctaattttttatttatttatttatttatttatttatttttgtatttttagtagagacggggtttctccatgttggtcacactggtctc

SEQ ID NO: 419226 - DNA, 666 bp, Homo sapiens
tacatacctcaatgatgaaccttccttttagccccgtaaaggtttctctcatcctttttgcatttggtttttggccaagcaggctggaaagtataaaagccaaaagaggcaggggtggagcagccgggcaagcaggaagaagcatgtgttttctggcctccatctccccagcagttccagcatgttccgtaattgggcagcctggcctcaccgtccaacaggcatcctcatgcagcccgcagtttccatgctgctcactgtaaatgtctgatatctgcacgtcctctgagagcacagcccagaggctgagcatgctcacagacacccactcagcacctggccctcagaactgtgctgtccccagcctaaggcctcagggtccaatgcccayccctcttgctcctgcagaaatctaggctgcaaggtgctcctaatctctgtgtccctccagctgcaataggaaccctagtcacaacagatcttatggccacatgagcaaggacgggctcctgccaaggcatctggtagcttcctgcccaggtaaggtgggcctccctggtgggctctgtatttgttttgctgctggacagaagagctccttcttttagaatcatttgcagcagtggcctctacatactggttggaaatctataattatatggaata

SEQ ID NO: 419227 - DNA, 532 bp, Homo sapiens
tgaaattagacatatactctgaatggctactgcctcttacttaacttggaattggtgcatgaacatggctccagatatgctgttctgatttaatcttgtaaagcttaactttttttctacattcataagtttccatgaatccagtatttggggatcaacaattatcattttctcccatagaatttctgttattattcttggattgcmgcctgcaaacctgagtgctaaataggcacatgttcatgggatataaaatgacaggctcagaaagttacagcttaataagagaatgacttaaacaaaccaccaccaaaaagagatattatgttcactggctcctgcatctaaattcctgtgccatcagctactttgggttttaatttgccaatgacaaaaggtcagaagaaaccagacagatgactctctttccctcttcgacttggatcacacctccccacctgcttcagtgttcccctcttaatgacagacccaaattgttctacgtaatactccttaacacaatggtctcaaa

SEQ ID NO: 419228 - DNA, 532 bp, Homo sapiens
tgaaattagacatatactctgaatggctactgcctcttacttaacttggaattggtgcatgaacatggctccagatatgctgttctgatttaatcttgtaaagcttaactttttttctacattcataagtttccatgaatccagtatttggggatcaacaattatcattttctcccatagaatttctgttattattcttggattgcagcctgcaaacctgagtgctaaataggcacatgttcatgggatataaaatgacaggctcagaaagttacagcttaataagagaatgacttaaacaaaccaccaccaaaaagagatattatgttcactggctcctgcatctaaattcctgtgccatcagctactttgggttttaatttgccaatgacaaaaggtcagaagaaaccagacagatgactctctttccctcttcgacttgratcacacctccccacctgcttcagtgttcccctcttaatgacagacccaaattgttctacgtaatactccttaacacaatggtctcaaa

SEQ ID NO: 419229 - DNA, 532 bp, Homo sapiens
tgaaattagacatatactctgaatggctactgcctcttacttaacttggaattggtgcatgaacatggctccagatatgctgttctgatttaatcttgtaaagcttaactttttttctacattcataagtttccatgaatccagtatttggggatcaacaattatcattttctcccatagaatttctgttattattcttggattgcagcctgcaaacctgagtgctaaataggcacatgttcatgggatataaaatgacaggctcagaaagttacagcttaataagagaatgacttaaacaaaccaccaccaaaaagagatattatgttcactggctcctgcatctaaattcctgtgccatcagctactttgggttttaatttgccaatgacaaaaggtcagaagaaaccagacagatgactctctttccctcttcgacttggatcacacctccccacctgcytcagtgttcccctcttaatgacagacccaaattgttctacgtaatactccttaacacaatggtctcaaa

SEQ ID NO: 419230 - DNA, 627 bp, Homo sapiens
ttccagttataaaaccctcacctcctaatcacataaaatcagattttttatgatttttattagagaagaaccatgaggtctgtaggtataaccacaaattgcccagaagtgatattgttggaacaggaaactagactgttctgtgcctcaggtattcaaacttcaatcacttaagagagagaagagcttcataccaattatgggctctcatgacaaagtgcatataggatgtcaatgtctggatccagatgctcgaccctcatacaatcatctgaagcaggtacttggtgtcaggaaggaagctgaggggttaagtgacttacacaagtcagccagcaaagggctgagactagaatcctgtcctttctaattccaaaatcacatctgattttcctccaagaaaccaagtcaccagcacctatcttttctttattaaaagcatgygcaagtcaagtatattctaaaagataatcagctcgtaaaactgaataaggaaaaccagctgtagtaatcccctctgtaccaaatgctgaatcagaaaagacacctagctttctgataatcagattttcctagagcctgaacagggtgaaaagttattgaatgcagaatatttttactagaaca

SEQ ID NO: 419231 - DNA, 636 bp, Homo sapiens
gaatgggtaaagaaaatgtggtacatatacacagtggagtactattcagatgtaaagaagaatgaaatcctgtcatttgcaacaacatggatggaactgtaggtcatgatgttaagtgaaataagccaggtgcagaaagaacttgatctcacttatttgtgggacctaaacattaaaatgattgaactcagagggatagagaatagatggatggttaccagaggctaggaaggatagtgggggttgagcagggagtgggaatggttaatgggtacaaaaaaatagaaagattgaatgagacccaatgtttgttagcacagcatggtgactatagtcaaaagcaatgtaattgtacattttaaaataatgaagagagtacaattggattgtttatagcacrcataataaatgcttgaggtgatggataccccatttgccctgatatgcttgttatgtgttgcatgcctgtgtcaaaatatctcatgtgacccataaatatgtacatctactatgtacctataaaaaattaaaaaattaaaacataactttatttacaaaaaccggcccacatgtgatagtttgcagtttcctcctatagcatatactcttcaagttaaggctcctgccattgtgtaa

SEQ ID NO: 419232 - DNA, 548 bp, Homo sapiens
agttctcactcctgactcactgtccccagccatttgagagcaaagaaaaacaatgttcaggattatactctgcccataatacagagctgtcctcaggagacaagcctcttatttttgagggtataactatagacggcatttacgtgcaaactctgtacaatggggttcgatggagctgggcgccaagataggaaagctgcatgtctgagataactcaaaaacacaaggaatgatcatacagaactcgattaataaaatcacatattttcacaggaggaatacaaatataaatactgaaatattaaaacttacttacaaaatcactgcacattggggcttgaaaaaacagcagcacacaaatatccttaaacctggttcaacttaaaaggaatttttttwaaaaaatgagagagaaaaatatttaaaacacacatatactgcaggtgagaaaagtttgaaacctgaatggtaaaacagttccctctgagacctttctaagaggctagaggtactgacttttccaaatcataccaggagaaagggtagtg

SEQ ID NO: 419233 - DNA, 481 bp, Homo sapiens
tgaatccattatgtgttttttaaatgtaatgtcagcacttgtttgcacctgtagtgatgcattttcagtaccaactgcctatgaggaagaataaaagtgcatgatgctgtgcctataccaagaggcaggtcaaatatcacaatgaattgcaaaaccagttattgggccccagattattttgtgtttgcagacattagtcaatagcccctatatagaaatagcagttattgagttatgatgaaatccacttcgtagagacagtaagtakggcaaatctttttatccagccttttccttgtaataatgttctctagaggaaaactgacttcatacctggttgtatgacacatgtacagaacatgaacaaaaataaaaagaccagtcatggcagaagtcttgtcctacaactctgaagagaaaggagtccatgggagggagagagaaacagcaggacttttcgtctgatggaaaataagtgcag

SEQ ID NO: 419234 - DNA, 602 bp, Homo sapiens
gaagggcctaagatctggggccttagatctggaagagcagaaatctaagggccttccctggaggccccccacwaggctgtttaattttacagataaggaaactgatgttaaaagaggttagcagactgaatcaaaggcactcagttactcacatggcagaaccacaaattcaacctggtgggtcgaactctgagtgttcaccagacacacttctttctctcttagaaatcctcaaatgagaggcatggtgaaaagcattggcgggaaatgctatttataatagaaataataatacctgatgatattttgaagaaacggattatgcatatattaacatgatttttctaaccacatctaacatacctgatgagccagatctcatgtaagagtgtgttattgccattcacgttcattgaggtcatatctatttggctgcttaatggcaagtagctttttagctttttagatcagtttcataatgtaaaacctaatgtatttttctccaaagcattattcagagagcatatgcctaaatgtaaatgttgagatacttaagagcatgtgggtctttgtgtactctacttctgaggctgggctgggtt

SEQ ID NO: 419235 - DNA, 602 bp, Homo sapiens
gaagggcctaagatctggggccttagatctggaagagcagaaatctaagggccttccctggaggccccccactaggctgtttaattttacagataaggaaactgatgttaaragaggttagcagactgaatcaaaggcactcagttactcacatggcagaaccacaaattcaacctggtgggtcgaactctgagtgttcaccagacacacttctttctctcttagaaatcctcaaatgagaggcatggtgaaaagcattggcgggaaatgctatttataatagaaataataatacctgatgatattttgaagaaacggattatgcatatattaacatgatttttctaaccacatctaacatacctgatgagccagatctcatgtaagagtgtgttattgccattcacgttcattgaggtcatatctatttggctgcttaatggcaagtagctttttagctttttagatcagtttcataatgtaaaacctaatgtatttttctccaaagcattattcagagagcatatgcctaaatgtaaatgttgagatacttaagagcatgtgggtctttgtgtactctacttctgaggctgggctgggtt

SEQ ID NO: 419236 - DNA, 597 bp, Homo sapiens
aataaaactcaatgcttttttttttcattttgaacactgtaagtggaaattaaaatgtgccttgatacagaacactgttaattctttaggaacgaagccacagttatttcctatgttttttatttgtactttgtgatcaagatattgtggtgattggggttacctattacagagcagctcagcagttgagaacaagtaaaaataaattgtgttgtcttgaagaaaaaatatgacctgctggctgggcatggtggctcacgccctgtaatcccagcactttgggaggccgagacgggcagatcacttgaggttaggagttcaagactagcctggacaacatggtgaaactccatctctactaaaaatacaaaattagcgtggcatggtggcacatgcctgtaatcccagctactcaggaggctgaggcaagagaatcacttgaacccgggaagcrgaggttgcggtgagccgagatcacaccattgcactccagcctgggcaacaagagcgaaactccatctcaaaaaaatatatatatgacctgctacacaaaggaatgcagcagcacatccttaaagaccaatgagacagcagccc

SEQ ID NO: 419237 - DNA, 517 bp, Homo sapiens
atgcggtcacctggaattccacctccatggtgactgtgataagcatctgagcagctcccaacttctctgccctatggtggcacgcatgagtccccagtcctaccctaggagttttggtgcccacagaaagtaagtactgcctcrgactaatcacattattccaaaggaggtcgggccaccaggtaggggcaacacaaggaagtagctgtgatgtgtttaaaggtgagaatgacatgactactcaagtgtccacggtaggaaaatatccttgtaagatggctcttagagactttccaaggaggtgggttgttagataggcctttaaacataagcaggatttgaaggcaaagagaaagcaagtaactggtccaggagaaacaactatacaagcagggcaacaagggcagggcagcaccagagcagtggccaatgggagctgagtcgttgtagaagagaacagtgccaggcggcaggggaagagaggactggaccagtgcactaaggggctaagtgattt

SEQ ID NO: 419238 - DNA, 517 bp, Homo sapiens
atgcggtcacctggaattccacctccatggtgactgtgataagcatctgagcagctcccaacttctctgccctatggtggcacgcatgagtccccagtcctaccctaggagttttggtgcccacagaaagtaagtactgcctcagactaatcacattattccaaaggaggtcgggccaccaggtaggggcaacacaaggaagtagctgtgatgtgtttaaaggtgagaatgacatgactactcaagtgtccacggtaggaaaatatccttgtaagatggctcttagagactttccaaggaggtgggttgttagataggcctttaaacawaagcaggatttgaaggcaaagagaaagcaagtaactggtccaggagaaacaactatacaagcagggcaacaagggcagggcagcaccagagcagtggccaatgggagctgagtcgttgtagaagagaacagtgccaggcggcaggggaagagaggactggaccagtgcactaaggggctaagtgattt

SEQ ID NO: 419239 - DNA, 724 bp, Homo sapiens
tttattatatcctaattaaagtatttcacttaaaaaaataaagtattggccgggtgtggtggctcacacctgtaatcccggcactttgggaggccaaggagggtggatcacctgaggttaggagctcaagaccagcctggccaacatggtgaaaccctgtctctactaaaaaatacaaaaattagccaggcatggtggcgggtgcctatagtcccagctacttgggaggctgaggcggggagaattgcttgaacctgggtggcagaagttgcagtgagccgatattgtgccactgcactccagcctgggcaacacagcgagactctgtcttggaaaataaataaataaataaataaataaataaataaataataatgaagtatttcatttattaaaatacctgcatttatgattataccttagtctattggactttagtaagatagagttttattccattgrttgacagtaaattttatatatatatatataaacttaaatgtgtgtggtactgttattttattaggcaagatgatagctatattgtgtcagaataaagtgcgccccacagcattagtatacaggatagtgtcactaagatgaatggacttcaaatgaagaggcaagtaaaatgtatagttttcacttatttataaaaagcctacggtaaaggagaatcaagagaccataaaaagatgatgtactgttggcaattttacaggta

SEQ ID NO: 419240 - DNA, 667 bp, Homo sapiens
tttgaatactataggctgggcgcagcatctcatgcctgcaatcccagcactttgagaagcgaaggccagaggatcacttgaggccaggagtttgagaccagactgggtaacagagcaagacctcatctctacaaaaaaatttaaaaaaaatatatatgtayatatagccaggtatggtggcatatgctcgtagtcccagctacttgggatgctgaggtgagaggatcacttgagcaagggaggttgaagctgcagtgagccatgattgtaccactatattctgacctgggtgacagagcaagctcctacctcaaatatatatatatgtatctgtggtctacatctattttccaagagtgattgctgattcagtgaaaaatctatgctttaaaagatatatcaaagactatacttcccagcatcattgctatggttcattactagaaaagtttctccaactttgtagagcactaggagccagaaggaggaggtgcagtgttctctctttagtgtgaagccagctttgctcttcgggaaggaatgcagtctgagcgattccatttttaatttaagaatttttttcttaaaaaaagatacaacaaagagaatccaaacaccaggttaataaggtggtgaagattctgagagttgtaggagatgttgtaat

SEQ ID NO: 419241 - DNA, 650 bp, Homo sapiens
tggtgaatatatttatatatgtatgtatgtgcatatatgtatgtgtctacatgtatatacagataactttaaaagttttctttaatacacagggacaagtaaataaggaattygcataattttaaatttgattactatgcatcaagttaaatagtgatagaactaatctaataaattatttaaatatgccatggcatgagagaacaaataactaccaaagggaatacactgatttgctaagttagaatgaggttcagtgtaaaacagaggacgtgatcttagatataaacactggctatgtattcactgtgaggaaagggaaagaatggtcgggcctatagattccagtggattggttcatttggtgatgtaggtgaaggaattcacttttaagttgtactatattttcggtaaaataataatattagcttaaaatagggagtgaagaaattttctcactgaacagttatgtgaattggctaggaaatgtaatagccttgccaagaagtcctgagcatacactccatgcttgcggttataaatttaaagtgagacaagtccataccattgtgtgtgcatatgagtgtgtgtgtgcaagcaaagttagttgctttcaaattcactgatgtagttagaaggttatatagaaa

SEQ ID NO: 419242 - DNA, 594 bp, Homo sapiens
aattttagaaaactatcattgaagaatctaaggagagtaatggcatagtgataaaatgtatactaaaaaaaaaaaccgacctatagaaaccaaataactagcaattaaattatagtaagaaaatggtagaataataaaaataattaacaaaatttcaaattgtttttggctcaacaggaatgaatgtattcaaatgaaaatgtccaaataaaaaagttggaggtaagttaacatacaaagcatttgaaaagtgagtaagtatctcctattaaaaagttttatgaaaggaatgaaaccaatctagtagtactaggtgagttctcaaatttttgaattgacaaccacataatctcttaaaaattattgaaaaccataaagttattttatttatgtgaggtgtatctatcaatacatgccatattaaagcttaaaactgagaaacatgaatgtatttattcttttaaaaataacactattatttattaagaagaatttttaaaaaatctatttcctataacaaaaatttagtgtgaagagtagcattgttayacatttttaaacatctgtcaaatattggacaatagaaagcagctg

SEQ ID NO: 419243 - DNA, 593 bp, Homo sapiens
ggttctgtcgctttattctctggggactgtgttcaaaaacatcctcgaatacaataaaaggaaaagctgagtaagcacctatagtaacaggtaacaaagtattctagggatcagctgctgtgagttagttcacaagtgctttaagtacgtgttaatcaaagaygatgtatttttcatttctgacaataaacatctggggcatcctacatttttcctgggcaatttgcctttatcattatattttaatctctgatgcaatcttttatccgttctttagactttttcaaggatattgaacgacttgcttaatcattttaatcttcaacctgctacctaaaatttaggacaatatcactgtcaaactgttactctagacgagtgtcagtattaaaggctattaatttacgtaatcgaagtttcacatcaaggagcaacattttggaaatatttataactgttatcaaatgttaatatattttagagaggaagtgatcttcatcttaacatattccacactaataatacatatctgtaatgttcactttgtaaggagaaactaaccaaaaatccaggggttctgtttaaatgctgct

SEQ ID NO: 419244 - DNA, 569 bp, Homo sapiens
tttattttagcatattaaacattttgaagtattgtactgcatgttctcacttataagtgggagctaaatgataagagcacatggacacataggcagaacaacacacactggggcctactggagaagtggggaggaagaggatcaggaaaaataactaatggatacyaggcttaataactgggtgacaaaataatctgtataacaaacccccacgacaaacatttccctatgtaacaaacttgcacatgtacccctgaactcaaaatgaacatctaaaaagatatatatttacatacacacacacacatatataatttcatgaatgttatcagtttatagcagtatatggtaaatctacgtatatattttaatctatgctggattctagtgaccacttctttttctaagtatttaaattatatataagatataccaatatcatatatttcatcatataagtttcatcacattgagctataattcaaagaatttgctgtgttctattacctgtgaataaatttcctgtttatattttggctagctacgcactactcctcaattactaatac

SEQ ID NO: 419245 - DNA, 614 bp, Homo sapiens
cataatctttctcatctctgttttattcctcgttgcccatatgtaattgactaaactgaaattagtacagcaaatttttcttcagtttgttgaagttgcaaacattgattcttgaactaacagcattttttataataatgatatagrtaaagatcagcatcattagactatggagcagagttgcctgaacattcgtggaaaaaaataaattgaaagtggttattacaactatcctcactacacttccttgaaaatacacaggatatctattgcaaacttggatacaaaccattactctgctattaaacaatattagtctaaatatctatagtttaacacagttattgcctcattatacaggatgttgatcttatatagtgtagagttcaactgtttttctattgcaaaaatgaaacataccttacaacttcaaaaggcaaaatatactgtattaaaaggaattaaatctttgaaaaaatgaaagctgatatgataaatgatgctgtctactaaaatcatcagaataactaaaataattagtctcatcacagaagcaagagtcatttcaaaaagaataactattactcaaacactttaaaatattgataattgtt

SEQ ID NO: 419246 - DNA, 585 bp, Homo sapiens
tgtgtactcatccacctgaccctccaccagtgggtgcgtttcaagtggggaaaatgaaacagtgtggagcagggctttctccagtttatcctgttgtttatacagaatgagtaaaggaatacatacttggttaaaacgttcgttttggcttggtttcattggtggctggtcttacaccttaaagctcagttcgttccatctttagcagagctcctggtaaaaaatagcatattaaacacaaagtaagtaaaagaaaagaagtaataaagatcagagtagaaatcaatgtaatagtaaacagaaaagcaataggtaaaatgaatgacaccaaaagctgatkctttgaaaatatcaccaaagttgataaacctccagctagactgtttgatcagtgagaaaataaaaaatagaaaaagaaaaaaaattgacagcgtgtgaaaatggccagtatcagaaatgagaggaatgatttcattttagataatacagatatcaaaaggataaaaatggaatattataaataactttatgccaatgaatttgacagtttatataaaagaaacaaatttcttaacacaaactaga

SEQ ID NO: 419247 - DNA, 587 bp, Homo sapiens
ctcttccttccatttgagaagaggagagggsgaaagtaaagagcactttgcctaacaacttggatacctgctcagacaaagtaaattagggcatcaggcagagtcctgaagccctcatttcaggccctagctcttggatgccatttctagacaaccctgggcaacaggggaaatgactgccttgaggggaaggacacagtcttggaaggatttattgtctactgactaaagagcacttgaaccttctataaatatcagtggtttccaggtagtactcacggcaggccttgggtgagacccaatgctgtgctgatttcatatgtgatccagggcattcctagacatagtggccatggagagttactccgtatgtttgaggaaaggagaggaaagagtaaaggggactttgtctttcagctcacgtacgagctcagccacagtgatgtagaatatcaagtgggctcctgggttccctgatcccaagccttggctcctggatggcatttatggaccagaccttggccagattggcaccaaactgtccttaaaggaggccttggagtattcagtacaagctgactactgag

SEQ ID NO: 419248 - DNA, 587 bp, Homo sapiens
ctcttccttccatttgagaagaggagagggggaaagtaaagagcactttgcctaacaacttggatacctgctcagacaaagtaaattagggcatcaggcagagtcctgaagccctcatttcaggccctagctcttggatgccatttctagacaaccctgggcaacaggggaaatgactgccttgaggggaaggacacagtcttggaaggatttattgtctactgactaaagagcacttgaaccttctataaatatcagtggtttccaggtagtactcacggcaggccttgggtgagacccaatgctgtgctgatttcatatgtgayccagggcattcctagacatagtggccatggagagttactccgtatgtttgaggaaaggagaggaaagagtaaaggggactttgtctttcagctcacgtacgagctcagccacagtgatgtagaatatcaagtgggctcctgggttccctgatcccaagccttggctcctggatggcatttatggaccagaccttggccagattggcaccaaactgtccttaaaggaggccttggagtattcagtacaagctgactactgag

SEQ ID NO: 419249 - DNA, 549 bp, Homo sapiens
aatcaaaacaaaccactgaagaaagccacttaatkccaaaggaagagagtaagggaagaagaaagaaagaaaaagaagaaagaatccacaaaaccacaagaaaacaacaaaatgacagttgtaatttatccagagagaaaatctacaaagaaacattgaatgcatactgcactctagattaaatggacttaacaaacatttacagaacatttcatccaatagcagcagaatacacgtttctctgaagtgcacatggaacaatttcttaaggaaaagtcaaattacaggtcacaaagcaagtcttaataaatttaagaaggttgaagtcatgtcaagtgtattttctgaccacaatgatataaaactagaaaacaaaaacactattttgtaaaattttgaaatacatagaaattaaactacaagctcttggaccaatgtgtcaatgaaataattaaaaatgaaatttaaaaatttattgagacaaattggaatagaaacacaacataccaaaacctatagggtacagcaagggccattctgagagggaat

SEQ ID NO: 419250 - DNA, 657 bp, Homo sapiens
tttttaatttgcacaatcctttcttacagtcttccctacatttttgcaacctgtggctaaacagaccatattttgtactgtcctattaattgtttattttgaattgctttttgtaaatatgtgtttttacattaaggggacctccaagttattctttaaacgctccattttcttttaagcgaacattttatttgttgacagaatacaagattctgaagttggtttttaatgtctccaatttgttgtttctgttattttttgttgcttttccccaatgtcttggtaatctgagcacaggtccctggcttcagtcaccatactsactttaactatagtttaaaaacctgaaactccatctttctgagtaaaatatagtatcctctgaacaatcatcccactgaataatgaggtagaagatattttagaggtggaacaaagttacatgcaggaaaaaaacagtagatccaatctatgaataataagaatgttttaaaaaggatataacaaaataaataaaatcgtaaaattttactgttgtaaatttaaaatagaatgctttcaatatgttacagacaaaggtgatataatgcgaaaatacctcaaaacactccttatagtcaagaacacagagagtagaatctttaatggacagaaaag

SEQ ID NO: 419251 - DNA, 581 bp, Homo sapiens
atattttcaataacaaactttctggatggatgcaagatggatctcagttataagaattttattttacagtaaatgtagaatttattaagattaaaatttttaataacaatttttgagttaaaacattagcagataaaataaagatgatttaccaaagaattttgagctctaagtatcttgagtggtcacatttaatagtctgtaacaaaacaagcttgttatattagttatttttgctcacaattataatccaatgcaaaggttatttttcctcacattcataataatttaggggtgttccttttgaagaacaactgtcctcatttgtattttgattctttggagtaaattgtaaaaaatgtaaattgcaaaattaaactttatatggagtaacacctgtgctttttgtaccctgctgcatggggttatgcrttgtgatttgattattgctaaataccagctgttttgcatgaaagttataaaaacatagtgatcataaagtgatggtgaaaaataaaaattggagcatgacctaagctgtttttctctttaaaaaatttatgttctgaactatgatattt

SEQ ID NO: 419252 - DNA, 540 bp, Homo sapiens
acattatttgggaaatagaaatacctattaaaaattaccttaactaaacagattgaaaaaatgcaaaaatcaccaatcggtcattacataacttcatattaatgtaacctttaaacagagttagaaatacttaacaataaattaaacactaccctagttcattttattgctaatgcttaaagacaggatcagtcttttaatgacagagaaattatttgtgacatgagaaataatcatctttcctttatacccactacaataaatgttaaaattaagcatgaaccataaaaagtttaagcacactgtttcaccagaaactaaaacaataaagcataacacaacagtagcttcttttttacaggaatcctcttgacctaaaacattcttagttgagaaatcatttaagaatattttaaaacatatttttaagctaatggtatttactayaatttccataacatatagtttaacaatgtgtcaagttgttacagcaggtagacagcctgacatgagcagggtaagagagagcccccccagcca

SEQ ID NO: 419253 - DNA, 583 bp, Homo sapiens
tgagcttacccagaggcttgtttattattaaatgtaatgtgactctttcttttgaaaatcaactctgtgaaaacaagtctgataaaataagaattttgaagtatcaaagagaatttataattaaagcagaaatgtgaaaktattgttatttttgcatatttagtataatataaaataaacgctttgcttaaaattgaagatttgtacaatcactttttctatcacagtatcttaaaactagagaaataaaaatcagaagaatcactttttatttctttaccttatacatagtaaaaagaataaggaattaaactgaatgaactggttaaaatataggggctttattgtatgtagcattttctcagtgctttattgtcatagcaaatatttgttcctaaggtgtaaaaaattttaatttaaattttcaggcaatgagggaagatggaaccttattcattccctaaattccaaattttttggcttataaaatgctaaatggtagtttctcctgattattttgacatggaaccattaaattttccattgttttgttatatacacaactaaatgctgacactgattg

SEQ ID NO: 419254 - DNA, 655 bp, Homo sapiens
tattcaaaccataaaaaccttcattttgtgatcgtttttcttctgtgctagaaaaaawttttgcaaatattgataaggtagcatcagtatagatgatcaggtaggtacttcagttttgttaggatcatctttaactttgatagaattaattttaactttggcagattagggaactaacttcctttggcatttctagctagctacctaaggtggatctctcattagttaggcaagatgtgaacaggattcagcaattgtttggatttctgttgatggggagtgaagacagagaattcctattctgccatcttcctgacatcaatttttttcctttttttttttcttttttttgagatggagtctctctgtgtcgcccaggctggagtgcagtggcacgatctcggctcactgcaagctccgcctcccaggttcatgccattctcctgcctcagcctcccgagtagctgggactacaggcgtccgacaccacgcccggctaattttttgtatttttagtagggacggggtttcaccatgttagccaggatggtcttgatctcctgacctcatgatccacccgcctcaacctcccaaagtgctgggattacaggcgtgagccaccgcgcccggcttccttttcgttaaaaacattggt

SEQ ID NO: 419255 - DNA, 520 bp, Homo sapiens
ctccagctattccacctgtttctgagagcagatggaagccaggggtgacaaaaagcaaagcagtgggttkaaagagtgtgtggtctgaatgagagtggagatgtttgccactgatcctctctccatcttagagcagagtgagtgagataaaattagctaccagtttctccctgaggagaaaaggaactggaacacatgtctaactcctcaacttttttggccgcatcttgaaggacttaattccatactgactttctaggggcactgaatgggcttggcacaccctaatctcctgggggacggtaagagcaaagatgagattttggacaagctcactggtttcagaggcacccagaatctctggccaggctgattggttaggttcatctcctacacatggccagtctgacgagactgggagagttatagtctaatatgccaaaagcaataaagagagtcaaggaagatgaagaaatagggaaatatgttccaaatgaaataacaaagctccagaaactgg

SEQ ID NO: 419256 - DNA, 559 bp, Homo sapiens
agagaaatcttatatgtgtcagaagtatgaaggatatttctatgcagaaagatttaatcacttttagatctggagtgaaccaaagtaacgtctaacctagtactacccagtgacactcttttgtcaactgtttcttgcctatgatgagaaaagagattctaccagaacataaatcarcacaaccctctcttcattcagaaggactagttacaaaatgcttagtgaaatagtcaatttacatttagttgtaaaccccttatcttgtagattgttcttggacaaacactgatctaatcgattcctattatttttagataaggaacttgaagcccagaaaaacaaatgagatttaagtgaagtttcatatctatttagtggcaggactaattaagtagaatgcagataacatgagtacaaccaagttaagtgttctttaagtatatcatattgagtctgatggatattgctgctcactagaattgattttttaaacaacatactcaaatgtttaagtatttgactgtcttgataaaaacttttgaacagcatagaaagttgt

SEQ ID NO: 419257 - DNA, 265 bp, Homo sapiens
agaatattataccttccaaagctgtctttcagaaataaaggaaaggtaaataatttcccaggtgagcaaaaattatgggagttcatcaccactatacctgacwtacaagaaacactagagggatttcatcaaagagaaatgaaagcaataactaaaaatatgacaacacatgaaagtataacattgactataaggaatatagtcaaagttagaatacttgaatattataatgatagtgcatacatcacttgtaactctaataata

SEQ ID NO: 419258 - DNA, 576 bp, Homo sapiens
tgaacaatgagaactcatggacatagggaggggaaaaacacacactggggcctgtctggggatagagcacagggggagggagagaatcaggacaaatagctaatgcatgtggggctttaaaactagatgatgggttgatcagtgcagcaaaccactaaggcatgtatcaaacctgcacgttctgcacatgtatcccagaacttaaagtcaaataaaaaaattacaaagttatataacatcaataatataaaatgtgggggtaggataacttaaaatattgaatttttatatgcagttgaagttatgttcttattagcttaaaataaactgttataacttcagacattttatgtaagcctcatgataactacaaaggtaaacagatgtacacaatataaagcaaaaggattcgaagcatagcactrcaaaaaatcatcaaatcaaaaagaaagacagcaagagagaaagaaacaatggattctacaaaacaaccagaaaaaaatcagcaaaatagcaatagtatattcttacctatcaatgattactttaaatgtaagagtattaaattcttcaacc

SEQ ID NO: 419259 - DNA, 586 bp, Homo sapiens
gataacttaaaatattgaatttttatatgcagttgaagttatgttcttattagcttaaaataaactgttataacttcagacattttatgtaagcctcatgataactacaaaggtaaacagatgtacacaatataaagcaaaaggattcgaagcatagcactgcaaaaaatcatcaaatcaaaaagaaagacagcaagagagaaagaaacaatggattctacaaaacaaccagaaaaaaatcagcaaaatagcaatagtatattcttacctatcaatgattactttaaatgtaagagtattaaattcttcaaccaaaacacatatagtggctgaatgattgaaacaaaaaaccacaaaccaagatccaagtatatgctgcctactagaggcacactttaggtttaaggacacacatacattgaatgggaagcgttggaaagtataatccatgcaaatactaaacaaagtagagcaagagtgcctctctttatatcaggcaaaacagacattaagyaaaaaactgtcacaagagacaaagaaggtcattatataatgataaaagggccaggtcaatgaagaaattaag

SEQ ID NO: 419260 - DNA, 595 bp, Homo sapiens
cataaataacctgtttcaataaattttaagctttgtttccacggcagtatactttcaaggtctgggtctttttccttagaatagatgtgattactaaaagatgctatggtagtgattcattttgtgccagtctgtggttctttactgtgcttgagaatcatmtgtggggcttattaaaaagtagattcccatactcaacaagattctgattcattaggtctaagatgagaactggggggctatgtatttaataggttgatattaatgcaggttgtcttttggtcacaatttggaaaacaggatgaacatcacagcattttcaactttgagggttggtctcctcaaagtgttttttccttctttataatgtcataagtggaaacctgccctttagtggtcagttgtcacagacttattttggagcttatttctaagtggcttattaaatctgaaacctagctttttagaagcaaggacctcatttgattgttctatgttattttagtgaaggaaagttcaataacattaggatctttacaaaaaagcagaagaaaagaaaaaggaagtatttcttgaaggattcaagatttcattt

SEQ ID NO: 419261 - DNA, 635 bp, Homo sapiens
ggcatgatgaagttcatcttgtaatttaattactggtgttctttgggcctcttctatctggatgtttacatatcttggaagtctagggaagtttcatcaattatttctttaaatagattttccaaayattttgctttatttctcccttgggaataccaaggattcttaagtttagacactttatttagtcctatacttctcaaaggctttgtttattgtttttatttttgtctgactggattaattcaaaagacctgtcttcaagttctgaaattctcttctgcttgatttagcctattatggaagttttcaactatattttataattttttaatgcattttttatttccagaagttttatttttttttccttaaaggatatctatctgtttggtaaatttctcattcatattctgaattgatcttctgatttctttgtattgattttaagattactcttggatctcattgagtttcattaacatcaatactttgaattctttatcttgcatttcacaaattttatttcagttaggatccattgctagagagttagtgtaatcctttggggtgtgtcataacactctgctttttcatattccagtatttttatgcttatacttctcctctagaga

SEQ ID NO: 419262 - DNA, 624 bp, Homo sapiens
tccttgggcgactgaggcaggtatattgcttgagcctcaggagtttgagtacagcctgggcaatgtagcgagaccctgtctctaaaaaaaaaggtaaataaagtaaaatttataacaatatagtttataaactataagaactttaaacttaattgaaaattattttacatkaaacaatttttacgtaattttctttatatgtgaaatgtgctttttatgttgtgtttttacttttggattttatatatttactttttatacatactaatttttctaaggacctattttaacattagattttctttaagagcttaggtataatgtaatacatattttattctgaaaaacaactgcataagttatgattcttaagtattacccacagcatatttccgaaagtaaaatgaccatctctataaatttttaatagatatatacatttttcatagattggtatctctaagtgaatattctttttggaatcttgagtaaaatcattttatattgacatttaaaaatattttaaaagcaacattttagagagattgatattgattataaaattacatgtaaatgtacctaaagagttttatgacatagaaaatattaccttttttgtttctc

SEQ ID NO: 419263 - DNA, 560 bp, Homo sapiens
gattgtaggagtattcttaccatatctggtactttcatagttcttttggctcttgacaagaaagcagcatatttgttagtcaagttaggtaattcatcagaaattcccacaccctgtgaatgccaaaattcctgttgaaagaaggggttaaaaagagtacatcatttatttttatcaatacaagaggcactataaataataagtttgcaatgaagttcatcagtattatctggcattaaataaagacacatattcataaacaaataaaattttcaaaatatgacacagaaagaaaaagctgtaagtcaatgagatattaaaatggaaaaagaattgattatatgaacctctaggtaagtataatggatctgcacacattacttaaacatattagctatgttctatttcataaccagcaagttctgtytcaataatatattagtataagatacttagccaattatatagtattatttaacaatttattattaataaaaatatatttacatttaaccatttaattttgtggcaattctgggttaatatattttctaagcaaa

SEQ ID NO: 419264 - DNA, 627 bp, Homo sapiens
aactacagccttgtagtacaatctgaagtccagtaatgtgctgcctccagatttgttcttttagctttgtattgctttggctaagcaggctcttttttgattccatatgaattgtaggattgtttcttttaattctgtgaaaaatgatgctggtattttgataggaattgcattgaatctgtcrattgctttgggcagtatggtcattttcataatattgattcttgcaatccgtgagaatgggatgtgtttccatttgtttgtgtcacctatgatttctttcggcagtgttttgtagttctccttgtagagatctttcaccttggttagtatattccaggatattttatcttttttgcagctaaaggagattgagtttatttcattctcagtttggtcattgttggtgtatatcagtgttactgatttgcgtacattgattttgtaacctgagacattactgaatttgattatcaaatctaatcttatctctaggcttatccagtcaacacttttgagaaatctctagggttttctatgatatataatcatatcattggtgaacagcaatagttttacttccttttttgcaatctaaatgcactgtatttccttctgttgcctgat

SEQ ID NO: 419265 - DNA, 533 bp, Homo sapiens
tagagcattttctgtaactacttcagctcatgtgattattgttcctttttccatttactgggaggaaacttacagcgcaatagccaactactattatttttgcattaatatcagcagtgatcattgtgctgcaactgttagcagttttcaacttctaataaataatttatatatttcttaatacaagcagttatgaagtacttttacagttaaaatcttaccaaattatttttgtttattttaggatgttctccaggataagaaatatgattgattgtaatgttagtggtaactaaatttttttgctattgctaactcatcaagttttatcagcaccatgtcttgttatacttgtacttagacatttcaaaatcacttgtggcttacatgaatatattaagataatttaaattttaagatagtttgcyttcattgtaaaaagtattgaagattaataattttatatattttatatatttctaacatttcattataaaagctattcgatgggagtgcccaaaatttatatgaga

SEQ ID NO: 419266 - DNA, 565 bp, Homo sapiens
ttatagctgttattttattatatctaaattattcctgggaatgtatttattgaacatattttcatcatcatgaaataatttggagatttataaaatttgtgaaaacaggattttgcttgaccagaatastgtatataaactgaaagtcaggatatttattaatattgttatgaaattttattaaataattcattcagatctaagtgtacctggactcttatccactgagttttcccaaaattgttaaatgtagagaataaagaattctttgtcaatgaatattcttttttctcttataacttatttttgattctatagtaaaacaataaatattatcttagagatataatttcacatatattccagctcccatgtcgtttatccaagatgtgtcagctgtgaaacatctgttcctacagagaatcaaaaaaagggggtagaaatatattgcaaatgtcttcaacataaaaaagacatatagatagatcttacagattgatagaccttatttttctgacgatagatagatgataggtaagtagaccttacttttcttcatgtaaaa

SEQ ID NO: 419267 - DNA, 486 bp, Homo sapiens
atcttacagattgatagaccttatttttctgacgatagatagatgataggtaagtagaccttacttttcttcatgtaaaaattctcacttgaaaatcaaattcagcaaactgatattctaaaatcattttcttttcttgacaatctctcacttagaaactagatgtatcaaacaaaccatttttctttggragactgaaaaaaaatgtttccaccaaccatatgcctcattcatctagaagcaggagtatttggtgaaaacagaatttacttctgcttcctcattcatctagaaatgaaattccatattctattccagcatgaatctttgtgattagacattaaacataagtatctttcatcctagagcaaagatttagaagggaaataaatccacactaacataaggcaaataccaaaacagccacctcaaaatgtcaagttaaggaccttaccaaaattagagcagtctaggaaataagccaac

SEQ ID NO: 419268 - DNA, 626 bp, Homo sapiens
gccaccttcatttcctggcttgcggtcctgttcctcttcaaagccagtaatagcatgttgaatccctcttgtacttagaatcttccgacttccctttacagattgtccctgacgtcttgttttatttgtacttgttagagcgcatgtgattatattggactcatctggataatccaggatgccatcactattttaaagtcgactaattagtatccatcattatatttagcaaatatatgatggtaacaccaggggcaaaggtcatggaccaagattctgtttaccttaatttgcaaagtaattagcacacactgcttgcaacagaataaatgctgaatattagttgtttacagcagcaatactgccatgatgtgtgggtctgtacattctaaatgaatgtgatactctgatggaaattgcaaggtgtatcactctagattgtattttagatgttttatcatgaagtggggtgatatcagagtatttcaatgacaattttattcacctraaactgaggaacaaaaatcagagaagagctgttaatccttacacctcttctgagcattacaggggcttgatgattagacagcttcctgctcacggttaagggaacctgcgtttctaaa

SEQ ID NO: 419269 - DNA, 572 bp, Homo sapiens
ctctgctgactgcctcaatgctcaacaaaatctagttgctctgtgtgagttgggagattctgcttatagatctcctgctattttttttgttttattttgttctgcctcacctgatgaaatatttccgttgaaagtaatgattagtatttagctgaaggctaagcaaacctatgcaagttattggagccctttttctctataactccttcccaaccaatgctctgtcccacagatcacaactgatttagcttccccaaactccaactagtgtctcctcaacttggcaatatctccatttactgcttgagttcttaaccacggcatgatcctgatattggctccaggtggaagctgtggcaatggtaagatgtctcatttcttacttttctctcagcaatcacagttctgcactgcttcttctccaaatatgtgaaagcaactattctccctatatttggtcaagttttctaattatttatggtrggagggcaagtttcatactagtaactctttcataaaaagaaaaagttcttaattatatttcatgtcactgaatttccatgatataaacc

SEQ ID NO: 419270 - DNA, 545 bp, Homo sapiens
atttacgtaaaatacaatgaagttctctgaagagaattagcaagcactgagtttttaaacactgttttctttggcagtcttttgaaggaaaggactctgttgaacgacataatacaggtatctcagttgaattagctggcatatttgtaactaaccagatattgagatggcatttkattagcaaaattgtaaagttaaggtgaattcatgatccgcacttaaaaattaagatgaaaaacagattttaaaaaatgcttcctgtgtaatggattatctcaggatttggcaataacttgatatatgagacagatattgtaataattaaccccacacaaattgaggcaatgggcattctgagaataatggagaaactgagccttcatcttggacagctgggttctattatttttattttactgccacacttcaatctacacaacatgtacttactaaatatccttagataatttaaccaaagtgtaatttttggtcctaattaagtgaatctatagttccagatgccataggccatagctatatataca

SEQ ID NO: 419271 - DNA, 545 bp, Homo sapiens
atttacgtaaaatacaatgaagttctctgaagagaattagcaagcactgagtttttaaacactgttttctttggcagtcttttgaaggaaaggactctgttgaacgacataatacaggtatctcagttgaattagctggcatatttgtaactaaccagatattgagatggcatttgattagcaaaattgtaaagttaaggtgaattcatgatccgcacttaaaaattaagatgaaaaacagattttaaaaaatgcttcctgtgtaatggattatctcaggatttggcaataacttgatatatgagacagatattgtaataattaaccccacacaaattgaggcaatgggcattctgagaataatggagaaactgagccttcatcttggacagctgggttctattatttttattttactgccacacttcaatctacacaacatgtacttactaaatatccttagataatttaaccaaagtgtaatttttggtcctaattaagtgaatctatasttccagatgccataggccatagctatatataca

SEQ ID NO: 419272 - DNA, 595 bp, Homo sapiens
tttattagcattctttgattggaaacagtagaatagtatttcccatagaagacattttgaagaagaatatggtgtaacttataagtttgaaggaaaattagcaaagggcttaggaagttcagaaacgacatcaggatctaaagaacaggatccaatggactgtctcagagcaagctagcatacctaggttggcagtctcacaaagtcttcatgaaatgrggaggaaactgtttctaaagaattgagatgcagcaacttgaaaaaatgaaatggatgcaaatatgaaaagctaataggtaccaacatcagtatttcaagacagctggaaaatattgctaagattccaattaaaaataaaagataatacagcaattttgatttaaaaataccagcagcatttaaagcaaaatatccactagtatactaatcaaacagataactttttaatgtcagtcaatagaaattgatgttctcttctgatgcaactgtagcaactgtttaaattactcaatatggtaatatgaagctggcagtgtgtagactcatatgaagaaacaagattctattcatcgctacaactgcaagaagactagtt

SEQ ID NO: 419273 - DNA, 443 bp, Homo sapiens
acatgtattataatcttatggaaccattattgtatatgcagtccatcattgactgaaacatcattttgcagtgcctgactgtactttttgaattgtgaataataattacmgtcataatttactgggcagcagttatatattatactacattccattctaagtcatttcaatttagaattatcacatggttaactcaaggacagtagtcctggtatgtgtatcactgaagagacacacacatttctcatattggtatttatgcattcgttttcatatgaattagaagaagtacagcttctatttatattttccttttaaatgcaaaggccaacatgtaggtacacatagaaatattaagtaaataacaggaaatatacaaatatggaaacaattgtgaaagtatacatggaaaattaatattttggagagttttttttttacta

SEQ ID NO: 419274 - DNA, 443 bp, Homo sapiens
acatgtattataatcttatggaaccattattgtatatgcagtccatcattgactgaaacatcattttgcagtgcctgactgtactttttgaattgtgaataataattaccgtcataatttactgggcagcagttatatattatactacattccattctaagtcatttcaatttagaattatcacatggttaactcaaggacagtagtcctggtatgtgtatcactgaagagacacacacatttctcatattggtrtttatgcattcgttttcatatgaattagaagaagtacagcttctatttatattttccttttaaatgcaaaggccaacatgtaggtacacatagaaatattaagtaaataacaggaaatatacaaatatggaaacaattgtgaaagtatacatggaaaattaatattttggagagttttttttttacta

SEQ ID NO: 419275 - DNA, 443 bp, Homo sapiens
acatgtattataatcttatggaaccattattgtatatgcagtccatcattgactgaaacatcattttgcagtgcctgactgtactttttgaattgtgaataataattaccgtcataatttactgggcagcagttatatattatactacattccattctaagtcatttcaatttagaattatcacatggttaactcaaggacagtagtcctggtatgtgtatcactgaagagacacacacatttctcatattggtatttatgcattcgttttcatatgaattagaagaartacagcttctatttatattttccttttaaatgcaaaggccaacatgtaggtacacatagaaatattaagtaaataacaggaaatatacaaatatggaaacaattgtgaaagtatacatggaaaattaatattttggagagttttttttttacta

SEQ ID NO: 419276 - DNA, 443 bp, Homo sapiens
acatgtattataatcttatggaaccattattgtatatgcagtccatcattgactgaaacatcattttgcagtgcctgactgtactttttgaattgtgaataataattaccgtcataatttactgggcagcagttatatattatactacattccattctaagtcatttcaatttagaattatcacatggttaactcaaggacagtagtcctggtatgtgtatcactgaagagacacacacatttctcatattggtatttatgcattcgttttcatatgaattagaagaagtacagcttctatttatattttccttttaaatgcaaaggccaacatgtaggtacacatagaaatattaagtaaataacaggwaatatacaaatatggaaacaattgtgaaagtatacatggaaaattaatattttggagagttttttttttacta

SEQ ID NO: 419277 - DNA, 423 bp, Homo sapiens
  misc_feature (1)...(423): n = A,T,C or G
tgagtctcctaactctgctatctgtgctgactccattctcaggcaggctctcccttgccagggtacctgtagctccagacttatgtattaatagctcagtatcttcagtggaaagagaatgcatagtttgtaataatggtagagaaagacctggggtttgtgaatccaattggtttgttgatattatgctggctgctagaacagatcaccgcctcatgatgataaatcttctccttggatagatgctaggtagggaaamaacaacaacaacaacaacaacatattgaacacacagtgtattttcaaacaagctttaaggtggtcatatcaagatgtatgtaactgaaagagtagtgaaagcaattctatttgagtttttgcagtttcaatatcagaattggggtttccacgnagggaatntaa

SEQ ID NO: 419278 - DNA, 555 bp, Homo sapiens
ttttttggtggtgttgaagagccttgttttgccatatcatgagcgttggttttccagttccttctcactggagtagcccctgtcaaagggaaggcctggggctgaaggttgttgttcagattcttttgtcccacgaggtgttcccttgatgtattactcacccttttcctatggatgtggcttcatgtgagctaaactgcagggactgttgtctctcctctgggtctagccacccacctagtgagtctgtctggcttctggctgttactgggggttgtctgcacagagtcctgtgatgtgaaccatctatgggtctctcagctgtggataccagtgcttgttctggtgggggtgggaggggtgcattgcactctgtgagtgctcttagctttggtggtttaatgctctatttttgtgctgctcggcctcctgscaggaggtagagctttccagagagcatcagctatggtattatggggaggaattggtggtgggtggaccctagaactcccaagattatatggcctttgtcttcaggaaccagggtgggtaggg

SEQ ID NO: 419279 - DNA, 528 bp, Homo sapiens
atgagccttaagagatctgtagcttactcattcacctttttcaatggtyattcttcgaacccatctaccctattgtgaagaaacccaagtagctatgtggagagtcccacctgcaggagaactaaagcctccagttgagctcagtaaccatccggtagccagccatgtgagtagagccattctgaactttttagatatccctgtatcttagccaacaccatgtgaggcagaagaaacacctggttaataaacagaatcatgaaagataataaattgattttagaagccactaaatttttggatgcatgttacacagtaataggtaactggaatactacgtttatgtgacgacttttttttcttcaagatctctaactgttcatgggagtctatgacatagagtttttaaaagtcagatgaggactagcaatacaggtgttaagccatcatttagagtcattttcgaaaatttcaagtttttttctgaagagaagtgaaggctgaagagggttgaggagcaataaggat

SEQ ID NO: 419280 - DNA, 528 bp, Homo sapiens
atgagccttaagagatctgtagcttactcattcacctttttcaatggtcrttcttcgaacccatctaccctattgtgaagaaacccaagtagctatgtggagagtcccacctgcaggagaactaaagcctccagttgagctcagtaaccatccggtagccagccatgtgagtagagccattctgaactttttagatatccctgtatcttagccaacaccatgtgaggcagaagaaacacctggttaataaacagaatcatgaaagataataaattgattttagaagccactaaatttttggatgcatgttacacagtaataggtaactggaatactacgtttatgtgacgacttttttttcttcaagatctctaactgttcatgggagtctatgacatagagtttttaaaagtcagatgaggactagcaatacaggtgttaagccatcatttagagtcattttcgaaaatttcaagtttttttctgaagagaagtgaaggctgaagagggttgaggagcaataaggat

SEQ ID NO: 419281 - DNA, 587 bp, Homo sapiens
cagggtactattagcctaataaaataagttgggaagtgttccctcctccttttctatcttctgtaataaaaacattgtagaatatgtgttaattcctctttaaatgtttaaaagcacctaggagagaggatatattttgagagacttttaaaaatacaaattaaaaattatctattggacagagccatgtgtagaycttagcctttgcacttgcaaatcaaagctttacaagagatgctctccaaagtcaatcctttacacctctacaaccccatgattttaagaattgttgtttgacttctttatgcaatgcaaaatgatatagataatcttgtttatctttctacttacctacatcatagttatcagaaatgaaatagttctggaaagcccttcaaatgcctcaaaatagaggcaaggttattattatttttaaaatgaataccaatatgttaacatttctataggaagtagttggtaagcaaggatttctctgaaggagcttattgcaggtgctaatcagctcacactattttttactgtctgtgctgaaaaaagaattaattacttcagtaacctcacttctt

SEQ ID NO: 419282 - DNA, 561 bp, Homo sapiens
ataattccagtttgcattgatgcaacagccatttttagttgtctatttcatatccactctaatctctgttctcccttattaagaaaacctccttttcttggggttgcaaaggcaattgactgtgattgctctagagttgtgatatctaatatactaaccactagccacatgtggctgcagagcatgtgaaataagactagtctgtggctggcttcaccacctgctgattgaagagccccaaagtcttaaggaaacataggcagtagcyacgtagtggttatagtaagccttgggcaagacccagtgctgtgttggcaggtctgacccagtgcagtcccaatagtggtggccatagaagtgctgtgacatctctcccccagccccaggcagctcagcagagagagagagaaactctgtttgggagaaagtaagggaagaaaacaatagtttctgtctggcaatccagataattcttcctgatcttatccaagaccaccaaggcagtacctctataagtgtgcaagaactagtgttactgggcttggggtgccccctaatgca

SEQ ID NO: 419283 - DNA, 567 bp, Homo sapiens
  misc_feature (1)...(567): n = A,T,C or G
taatgagcaatcaaaatcatctgtaggtacaaaactcactggtgatagtaagttcacagaaaaacagagaatattatagcactgtaattgtagtgtgtgaactactcatattctaagttgaaagacaaaaagatatcaattaagaataataacttcaacaagttttcaagacataaacagtacaataagatatgaatagaaacaacaaagtaaaaaaaacagggagaccaaattacagtttttattagttttctttttacttgtttgtttgtatgtttatgcaatcagtgttaagttgtcatcagtttaaataatgggttatataatttgcaagccttgtagtaacctgaaatctaaaaacatacaatggatacacaaaaaataaaaagcaagaaactaaaacatatcaccagagaaaatcaccttcaccataaagcagtcagaacgaaagagaagaccacaaaacaaacagataacanataataaaatggcagaartaagttcttatttatcaatatattattgataacattgaacataaatggactaaactctcagaccaaaaga

SEQ ID NO: 419284 - DNA, 470 bp, Homo sapiens
ccttggtctgttcaacaaatatgtactaaacacgaaccattagtatcagcctgataaccagtcttatattgatgggtaggtataatccacacttctctacagaaaacagtggctcaagggccttaagatagcacttttgccatatttcttataatagtgtaggttttgtgggactaattgtaaacacggatttaaatgtttaacacatatgagttaaatctgtttctttcactcacagccctagtgagatgttgattgtractagaaaacataaatatgggtggttcctattgaacaactagcaactagtgcccagggaacttagctgcacccaccacctgggctgagggaaaaaggacagtgaaatgaaatagcaactggttgttaattgatatctttttgagaggctccaagaagacatctttacccataaatgtggtcatgctaccattagaaatctcctttgaaat

SEQ ID NO: 419285 - DNA, 602 bp, Homo sapiens
tgcttagcaatttgatactaatatgattaatacttatttaagacaagacccgtcactttgtattttccagaaaatatagtatttttagccttctttcttgccaatggaatttaaaagcaaaatttacatttattttggtgtgatttcaggcaaccagtaagtgtttagtaagtcctttaacaaatacaaaatgtcattcatctattcaagggaatgttattaaatggcaaattgtggcacacaggctgtactctgaaaataataatattcctgaaatttaaggggactgctcagattaaaagaaaggtggacaatgagttcagattgttcatgtacagagttcatagaaggctctaaaagcctggccatggccaagcatatacaataataacaataaaataaacgtttttactttaaaaatcctgaaaaataaatgttatcagtttctgcatttttaaataaattacacaaatattatcttccaatcagggaagaaattcaggtccctcttttcagtttctgtatacaagtggagtttaagaygaaggaaaaaggaagtagtttgatttcacttcctccttttgccttcttcatctattcta

SEQ ID NO: 419286 - DNA, 553 bp, Homo sapiens
ctaacacaaacctagaattcaacttttgaataaattcctatcaattgctttacttttctatagtttaggcataaaatgtrcagaaaccccagttatgaactttctgtatgctaggattctttgtggtaagcttttactgaatagctaagatactctaaactctgtcctatatgctgcttactatgtggtatgactataaagcaataacagatatttcaaaataaataccagaacatatatagcctaataaatgtttatttttctaccaagaattaacttaaatcattctaataatgctgccattgcttaaaacatttgctctccttttttgaaatttcctttatactctgggatactttttaaagaaaatatcctcaatgatggcaaatcttttttttttttggaagatttatcattaagagtaattctgtataaaagtcttattaataaagtgggtagctcacacattttaagtatagggacatcggtaaaaattatatcacaaatactgttgtttatcagaggcaaggcaataaagtgtcttgtaatacag

SEQ ID NO: 419287 - DNA, 599 bp, Homo sapiens
gggccgcaccttttcacctacatctgccagccactggatgtgacctacatcaggggaagaggtgcactcttgaatgacattgctatggtttgaatatttatcccctctaaaacttatgttgaaatgtaatccatgatgtggcagtgttgagaggtggagactttaagaggtgattgggtcataatggctctacccttatgaacagattaatgggttatcatgggagtgagcctggtgactttatacaaagaggaagagaaacacgagtagcatgctcagccctctcactatgtgatgccctgcaccactttgggactctacagagagtcccctccagcaasaaggccctcattagatgtggcccctcgaccttggacttctcaacttccataagaaataaattccttttctttataaattacccagtttcagtattctgttataagcagcagaaaatggactcatacagacagatttctttggtcaaggggaattatcatataggaacaaacagcagccaatactcctgtagtagtccattttcacagtgctataaagaaatactcgagactgggtaatttataaaggaaagaggttta

SEQ ID NO: 419288 - DNA, 599 bp, Homo sapiens
gggccgcaccttttcacctacatctgccagccactggatgtgacctacatcaggggaagaggtgcactcttgaatgacattgctatggtttgaatatttatcccctctaaaacttatgttgaaatgtaatccatgatgtggcagtgttgagaggtggagactttaagaggtgattgggtcataatggctctacccttatgaacagattaatgggttatcatgggagtgagcctggtgactttatacaaagaggaagagaaacacgagtagcatgctcagccctctcactatgtgatgccctgcaccactttgggactctacagagagtcccctccagcaacaaggccctcattagatgtggcccctcgaccttggacttctcaacttccataagaaataaattcyttttctttataaattacccagtttcagtattctgttataagcagcagaaaatggactcatacagacagatttctttggtcaaggggaattatcatataggaacaaacagcagccaatactcctgtagtagtccattttcacagtgctataaagaaatactcgagactgggtaatttataaaggaaagaggttta

SEQ ID NO: 419289 - DNA, 562 bp, Homo sapiens
caaagcaggccctgaagccacaagtgagtcacaagaaaaagtgactcaaatgccctcagtccctactattgctacattgccttctgtctcccagcctgcacctatggcctcatgaggagttccctataatcagttgaccaattataatattacaatcagattataatcagaggaaaagaagactcaggcctagtttacagatggttctgtacaatatattccccaacgtcctgaataagctaggttaatataatgaccttttgaagattcaattacagttccagctaagtggcaataccttacagtgctggggcagtgttctccagaaggctgtatatgctctgaatcagcatccaatctatagtgctgctacacccacagctagaattcacaggtctagtaatcaaggggtgaaaatgagagtggcaccactcactattatctctagtcacctactagcaaaatatttgcttcytattcccacaaccttatgttctgctggtctagaggtcttagctccaccaggaagaatgtgtccaccaggagacataacaatgattcc

SEQ ID NO: 419290 - DNA, 539 bp, Homo sapiens
gtctttcctcattctgatggaaattacttattgatgaagtctaaactgttgaatactaacactcatagtgaagagtaagttgagaaagagtagagggagcaataattacaagatkatgcctcaactggagcgtattataaataacaactacaatacagcctaagaaaataataagaaaagttaccctttaagacaggaatccatcattttactcaatgtcatcttttatcagcagactctcaaacattattggttctttcacataaattccacttatctacatatatcaatctgctctagagcaaagcaggcttgttacttgttgctttccccaccattatggcaacttgtgtgctgagacagataatgccaatcagaaaatatccacaaattaatttttagattatttttaattattcacccaattcctaagcaagctaatttattcaaaagaaaatgtccatagttgagtttcaagtcaaaacaaattgtcttgggggatctgtagtgaaaatctatgagattgtcttcccagaacc

SEQ ID NO: 419291 - DNA, 539 bp, Homo sapiens
gtctttcctcattctgatggaaattacttattgatgaagtctaaactgttgaatactaacactcatagtgaagagtaagttgagaaagagtagagggagcaataattacaagatgatgcctcaactggagcgtattataaataacaactacaatacagcctaagaaaataataagaaaagttaccctttaagacaggaatccatcattttactcaaygtcatcttttatcagcagactctcaaacattattggttctttcacataaattccacttatctacatatatcaatctgctctagagcaaagcaggcttgttacttgttgctttccccaccattatggcaacttgtgtgctgagacagataatgccaatcagaaaatatccacaaattaatttttagattatttttaattattcacccaattcctaagcaagctaatttattcaaaagaaaatgtccatagttgagtttcaagtcaaaacaaattgtcttgggggatctgtagtgaaaatctatgagattgtcttcccagaacc

SEQ ID NO: 419292 - DNA, 572 bp, Homo sapiens
aaatagcgtagattcccaggtcaagggctagcaataaactagaccaagtcaacaagaaatctagcagtagagaagcagaaattttaataaaactcagggagcaggggcaagaaatcctagtatttaattagttagacctctttcaggctcctgatatctgtgcagttatcctcattttattattatgagtttggtcatgtaaaacaacagcagacaaaatgktatactgcctctcccaacaatttttaaaaatgtatctgtaagcagaattattacattattttatcacagctatttttacaaaacaggataaaattattagcaaattaagccctagtaaagttgtaaactgttcaagcactttcctaatcaataaatcagagctcaaccaatcatttctagggtctctccaaacactaatattccatgtacttcaaatcgcaaagggatactgacagctcaaattaactgggacgaaattaaaacttaactttatcaagttatttatagcttttctcctgaatgttttctcttcttttaatctttaataactgcgtatatagcaaataagg

SEQ ID NO: 419293 - DNA, 572 bp, Homo sapiens
aaatagcgtagattcccaggtcaagggctagcaataaactagaccaagtcaacaagaaatctagcagtagagaagcagaaattttaataaaactcagggagcaggggcaagaaatcctagtatttaattagttagacctctttcaggctcctgatatctgtgcagttatcctcattttattattatgagtttggtcatgtaaaacaacagcagacaaaatgttatactgcctctcccaacaatttttaaaaaygtatctgtaagcagaattattacattattttatcacagctatttttacaaaacaggataaaattattagcaaattaagccctagtaaagttgtaaactgttcaagcactttcctaatcaataaatcagagctcaaccaatcatttctagggtctctccaaacactaatattccatgtacttcaaatcgcaaagggatactgacagctcaaattaactgggacgaaattaaaacttaactttatcaagttatttatagcttttctcctgaatgttttctcttcttttaatctttaataactgcgtatatagcaaataagg

SEQ ID NO: 419294 - DNA, 575 bp, Homo sapiens
acaccagtgtccaagtgtaggagaaaatggatgtcttagctcaaacagagaaagcaaattcgcccttcctttgcctttttattctattcagaccctcaatagattggataatgcccgttcacattggggagagtcatctgctgtactcagatcaccagttcaaatgcaaatattgctaatacctactatttgaattaaaattcctttaagattcagtaaatatatctgataagaaaatatttctggctacttgctattcctttcctttgagccaaaatgatmctgtagaatatgatcattcatcccccttactcatcagacttagccctaattttttttctgtccccccaatcaaattcatcctgcaacaataagaattttccagtatttaggatattcaaaaggatatattgttcactttaatgaaaagaccaaaaaaggaatgtcaaaaatatttttaacagtagtagtggcaaagccagcatgggtgcagggcctcctgaggtgactcgtttgaaagaaacatcattcatttggatattcaagtaatgttatattttttaaagaaacaatta

SEQ ID NO: 419295 - DNA, 575 bp, Homo sapiens
acaccagtgtccaagtgtaggagaaaatggatgtcttagctcaaacagagaaagcaaattcgcccttcctttgcctttttattctattcagaccctcaatagattggataatgcccgttcacattggggagagtcatctgctgtactcagatcaccagttcaaatgcaaatattgctaatacctactatttgaattaaaattcctttaagattcagtaaatatatctgataagaaaatatttctggctacttgctattcctttcctttgagccaaaatgatcctrtagaatatgatcattcatcccccttactcatcagacttagccctaattttttttctgtccccccaatcaaattcatcctgcaacaataagaattttccagtatttaggatattcaaaaggatatattgttcactttaatgaaaagaccaaaaaaggaatgtcaaaaatatttttaacagtagtagtggcaaagccagcatgggtgcagggcctcctgaggtgactcgtttgaaagaaacatcattcatttggatattcaagtaatgttatattttttaaagaaacaatta

SEQ ID NO: 419296 - DNA, 481 bp, Homo sapiens
ccaaatggctacacacacacttttttgaagaaaccaagactgagtcaaaacctttactgattattttccaaaaataacttggcttctcccattccttggacctttgctccttttcaatcttcctttaatatttggtccctgcctttttaatgctctcattaagtttatatgttccagattacaacgattctatttatagatgactatgcaatcccagtactggcctgcaacagcaacttccatttacacgaggcctcttaatgaaatctcattcctctgcgacccctgtgcctgcccygtgaacaagtttttcatgacccttcatcgcctaatgacagagagcaagaaggagaaaaacacaacttatcccttcaatgtcccctttcagcagaaagtagccagacagactcgacgtccattttcactgtgctgtttttcctttcttgagaccctaataggcagcagatagacatgagcatgg

SEQ ID NO: 419297 - DNA, 481 bp, Homo sapiens
ccaaatggctacacacacacttttttgaagaaaccaagactgagtcaaaacctttactgattattttccaaaaataacttggcttctcccattccttggacctttgctccttttcaatcttcctttaatatttggtccctgcctttttaatgctctcattaagtttatatgttccagattacaacgattctatttatagatgactatgcaatcccagtactggcctgcaacagcaacttccatttacacgaggcctcttaatgaaatctcattcctctgcgacccctgtgcctgccctgtgaacaagtttttcatgacccttcatcgcctaatgacagagagcaagaaggagaaaaacacaacttatcccttcaatgtcccctttcagcagaaagtagccagacagactcgacgtccattttcactgtgctgtttttcctttcttgagaccctaataggsagcagatagacatgagcatgg

SEQ ID NO: 419298 - DNA, 583 bp, Homo sapiens
atcagaggttttaggatttccctaaaggcctcccatatcagtctctgtcagcatacatccctggttttcagttgacagccaaaaaagcagagatgttctttattgacttcaagctgcaaagatagatcaatatcagaagtcagagtaagggaataataagggactaggagagaaagcttaaaataagctgtgttttcaacacaagcatttcctgtctggagcaaaaatgatgatgttttgcatagaaaaactgtttctaaatatacagagctgtttatcaaaacatgaaatattttgaaatgacaagataaacattctgctttggtctatttgggctgaaattgttgaaaaaattcttcaatgatacttgttaaagcatrgtgaggaagactttattcaagaccatgcaataggtatagggaccacagcaatggcaccacaatattagcaagtaggaatttatagccaagtagtagggtggggtcaatagatgaaaatttcctaagaggaaacatcaaggataaggaggattatggccaaaccaacctaacaggatttttgctgaggataggccagggtgatc

SEQ ID NO: 419299 - DNA, 589 bp, Homo sapiens
tttacattgctatgcaacagatctccaggactttttcatcttgcatatctgaaactcattaaacaactccaccattcctggtaactgtcacagggggtggcagggacaactatctgggccggtggctctggagtaaaagaatttaccaaaaacgcttgtaaagamaggcaaatttattaaagaaagtaggaaaagccaggcacggctcacgcctgtaatcccagcactttgggaggctgaggcaggcagatcacaaggtcaagaaattgagaccattctggcaaacatggtgaaaccccgtctctactaaaaatacaaaaattagctgggcgtggtggcgcatgattgtagccccagctactcgggaggctgaggcaggagaatcgcttgaatccaggaggcggaggttgcagtgagctgagatcgcaccactgcactccagcctggtgtcagagcgagactccctctcaaaaaaaaaaaaaaagagagagagagaaagaaagtaggaaaatacattgcaataaagcaaccggaaggctgcaaaagaggagccgactgcaaagagacaaagattagctggagattttat

SEQ ID NO: 419300 - DNA, 592 bp, Homo sapiens
tttagctgtaggcagggacactgcctctgtaagctgtaattcccgtcttcatctctmaaatggaggtaaaaacttcaacctcatgggactattgtgaggaccaaagggatattagagaacttagcttggcgtttggcatgtggtcagcactagaaaaataaaatatagatagaaataaaggcagtggttcttaacgggtggtactgcccccctgaaagcctttggggggctcttctggacgtcgcaatgactgtgatcatggctggtatttagtgggtggtggccatgcatgtgaaatgcccacaggcagaggacagccctctccccgcatgccaacagaaacactgggatgctcccggctcctctgctgtttcctccacacatttccctctggtcctttccctacaggccacagtctctcggccccatctgtcctgtgcactgtagggtgttgagaagcacccctggcttccatccactagatgccagcagcacccttcaggttgcaacaaccaaaagtgactctagacatttccaaatgtcccctggcaggcaaagtgccctggtggatcagcactgctatggggaaagg

SEQ ID NO: 419301 - DNA, 422 bp, Homo sapiens
tcagagccttcagccatgctctcatcccctcacatgacggagacacctgcagcacctgctctggtcgtgcatgtggggaacaagcctgcttggccccacctaaggctttctggtctggcagggggagatggagaaagaaccagatagttgtgcctcaatttctaacctgtaaaatggaaatactaggggttgtggtgaggctgaaatgagtaaaaagggcaatgcccagcccctggctcagtcgatggtgctgagaccaacacctgtgttactattattgataggaaaggtgttgacttcgtgtctctcttggtctttggggcagtgagcactcatggggcgggggctcttacgcggagcctggctttgyggccttgatgaaccaaaacatctcattcctttacctgccaactatgtactca

SEQ ID NO: 419302 - DNA, 663 bp, Homo sapiens
tccagccattttttttttcctttccagcattccctgttccttgttcccattttcctacatgctcagtccatagagcttgggtgaggctgaaccatcttccgatacaagggtgatcacatgacccagcacccaccaaaggagtccagcccctggcctcattgattggttccaggataggcaggtgaccaaggtttggtcaattagaacatttcagctctctaactacactgattggctttgggatgggcacatgaccaagttggtccaatcggagccaacccagggacattttcctggagcggctgggaaagaggagtctctcraaattcagcaactgctaacagcgaggagggggtaagtaagagacttccgggggccatctcgtgggacttgagaaggaagctaacacccaggaagcaggatcaggggaagggaaacacacacacaaagccctgattatcttgtttcagcctctgggtccagctgagcccaaagtcttccatcctggattcttgttacatgggacaataaatttccttttttttgcttaagtcagtgtgagttgggtttctactacagcaacttaaaaagctccgtcagacacaaatgtctggcctgtttgcattattttttttttcccaaaagcagctttcctcccatcat

SEQ ID NO: 419303 - DNA, 579 bp, Homo sapiens
ttttgctatgtccttttgaaaatttgagacaaggacaaaagcacggaacttctggatacctctctcttcttggcgcctacaaggttgtatgagaaagagagagaagaatgagatcccctcctcctgtaaccatcttagctgccctttgagatctgacttaaacaccttttccttcatgaggcttttcttaaccctgtcagctaatctttaacttaggctctggcttttgccacaagaggatacagstctctccaaggtcctgaagcactacttaagcacagttaaatctagtcactttttattagctttcattctcttcctacttctgattgtatttacatagcttttcagtctctaagatggggaataataatgattcctattttccagaggtgaggattaaatgatataatgtgtgtaaactgttgagattcatgccagacacacagtaggtgttaacttgtgctggttcctctcttccccactccccttatcatcttgtgcctatgttctgtctctccaatgagactttatattataaatatcaccatgtcaccccactgcctacagctttcaata

SEQ ID NO: 419304 - DNA, 557 bp, Homo sapiens
gtgcctgaatgttgagaggtgattgaatgaggacacctgaaacactgtggaggggaaggaggtggtgtttacctcaatagccacagcgatgtcaggggagcacagttcccaaatcctcagatcctgcagcaccttcaggaggacatggggtcgaatccgcaagtccaggttttctccaaacttctgcagtttcaccaggatctttttggcggggcggaagttctttagatcctctggcagtttggacaacagatcaaagtaccttcaattccaaaaggagaggacaagttaggaagctgctggaagatctgagcacctctggccatccatctccactttctctttctgctctctgtgatgtctccagggcagcagtattctttatctagggacctttcctctgtgacccacagatcaggcctgtctttacttttaggggtagaaaaagatggagaatgacttgcatttcattaaaaaataaaacaaagktgtgatttcaagggatgtatttgtaatttttctatcagacaatgtgaaatgttagaagaaaggaatgg

SEQ ID NO: 419305 - DNA, 443 bp, Homo sapiens
ctcttccctccatgtgaggcttcagtgagaaaatggcagtctccaacctggaagagggacctcaccagaacccaaccatgctggcaccctgatcttgggcttccagcctccagaactgtgagaaagaagtttctgttgtttaagccacccagtctatggtatttttgtaacagcagccaaagcagactgaaacagagtccaycccatctctgtaaagtggcatgacaatgaaaagcagttgctgtcacatcagtctcacctcccaggttatttctgcatttgctttgtttgtgctacacagagaaaaatcctcatgtgtgaagttaagaggttgcaaaagctaccggttttctttttatcaagttcccctgcagctccaggactctcaccaatccagaagcttgaaagcaaaaatggaagcatatttttgtttcaaacatgaa

SEQ ID NO: 419306 - DNA, 554 bp, Homo sapiens
ccatatgccccttctaccctcctgtctttcctttagagagctcaactgtgaagtagtcacacaaagttctggcatttgtggttattcctctraactccattttgaatagcggcagcacgtcttgatggtccaacccagaggggatgcaggggtggggagggctgagaggtgacagctttaggttctttagattcttgagagtgatatctacaaggtgaacaaatctttctctgtttatcttggcctcttctgatgtcacactttaagcattattatggtaacatttcctttttttaatgtaaagttttattttttctaaattttgttagaaatgctatgtttcccaggctggtctcaaactcctggcctcagccatcctctcatctcagcctcccaagtcgctattatggtaatcatgtttctatctccttaagatacaccttttctccagaccagcaagatagtgggaggagaaaaaggataaaggaaaaggaaatcccaatttatcatataaatcaaaggaagagtgagcattaaaagaaggtgctggcaac

SEQ ID NO: 419307 - DNA, 554 bp, Homo sapiens
ccatatgccccttctaccctcctgtctttcctttagagagctcaactgtgaagtagtcacacaaagttctggcatttgtggttattcctctaaactccattttgaatagcggcagcacgtcttgatggtccaacccagaggggatgcaggggtggggagggctgagaggtgacagctttaggttctttagattcttgagagtgatatctacaaggtgaacaaatctttctctgtttatcttggcctcttctgatgtcacactttaagcattattatggtaacatttcctttttttaatgtaaagttttattttttctaaattttrttagaaatgctatgtttcccaggctggtctcaaactcctggcctcagccatcctctcatctcagcctcccaagtcgctattatggtaatcatgtttctatctccttaagatacaccttttctccagaccagcaagatagtgggaggagaaaaaggataaaggaaaaggaaatcccaatttatcatataaatcaaaggaagagtgagcattaaaagaaggtgctggcaac

SEQ ID NO: 419308 - DNA, 554 bp, Homo sapiens
ccatatgccccttctaccctcctgtctttcctttagagagctcaactgtgaagtagtcacacaaagttctggcatttgtggttattcctctaaactccattttgaatagcggcagcacgtcttgatggtccaacccagaggggatgcaggggtggggagggctgagaggtgacagctttaggttctttagattcttgagagtgatatctacaaggtgaacaaatctttctctgtttatcttggcctcttctgatgtcacactttaagcattattatggtaacatttcctttttttaatgtaaagttttattttttctaaattttgttagaaatgctatgtttcccaggctggtctcaaactcctggcctcagccatcctctcatctcagcctcccaagtcgctattatggtaatcatgtttctatctccttaagatacaccttttctccagaccagcaagatagtgggaggagaaaaaggataaaggaaaaggaaatcccwatttatcatataaatcaaaggaagagtgagcattaaaagaaggtgctggcaac

SEQ ID NO: 419309 - DNA, 508 bp, Homo sapiens
cacttctgaaaatgcctgggatattacacacttcctgtcaatgacctataggacaccacttctggaaatgcttgggatattatgcccttcctgtcaatggcctacagccaatcagtaactgatacagggtacaaaaggctggcccccttgccttaggaaggaacaactctgcgatgtacttcatgcttcagattccccaccatgggattaaggtgaggttagacttcagctgaactcacatgtctgcccagcttctttccttgtcctgcctgctttcctcactctcacagaaattaatctctcccttaatcacttgcatgacaacccacctgggctctgctttttgagaatctacgtaatccagtctcctaygtttactcttagcttgttggtgtgtttgggcctgaaaaaaagatcatagagccagagaagatgaaagggagaaagcagaacagggaaataatcttaacctaggatatcccagctccataaccctcttctaaatgaa

SEQ ID NO: 419310 - DNA, 508 bp, Homo sapiens
cacttctgaaaatgcctgggatattacacacttcctgtcaatgacctataggacaccacttctggaaatgcttgggatattatgcccttcctgtcaatggcctacagccaatcagtaactgatacagggtacaaaaggctggcccccttgccttaggaaggaacaactctgcgatgtacttcatgcttcagattccccaccatgggattaaggtgaggttagacttcagctgaactcacatgtctgcccagcttctttccttgtcctgcctgctttcctcactctcacagaaattaatctctcccttaatcacttgcatgacaacccacctgggctctgctttttgagaatctacgtaatccagtctcctatgtttactcttagcttgttggtgtgtttgggcctgaaaaaaagatcatagagccagagaagatgaaagggagaaagcagaayagggaaataatcttaacctaggatatcccagctccataaccctcttctaaatgaa

SEQ ID NO: 419311 - DNA, 620 bp, Homo sapiens
aagtgcatttagaaacactaacagagaataagaagcatctattaataaccataggtttttatctacttcctttaccaaaaggaaaaggaagattctaaacttttgcaatgatttcaaggcccttgtttttttctgaacaggatataatgacatccttccttttttttttctttttttaaaaaattgttttcattttttatagagacagagtcttacaatgttgcccaagctagtcacaggatcatgctttaatgcatctcttctaagatgtagagcttcctctagtaccccagaacaaatcaggtccccattagtcactctcatagtacccggaattttttctttacatcatttgtcamaatgacaacaaaacacttactagtaaaatcatttgtatgctgcctgcccaatccactagaatgtaaacattatctcacatagtctgcacaaccatcttatgaggaacatatttaattttatagatgagaaaactgagacttagaaaggttgaatgcttcatctaaaatcacccagataacatgtagagaaatccaatatctgctgcagtaaagagtcatgaggacaggaaatacattactatcacaaaaaacagagatgaa

SEQ ID NO: 419312 - DNA, 553 bp, Homo sapiens
aataagttgaacccagttgattctgtgagaagttaagaaggcatgacttttggacacaaaggtactctatctgagtaaattatgatggctttccaagtcaaaagaacactcatgcccaaacagatgatgaaataaatatttcaaaatgaagacactcatgctccccgtgagttttccatgctgattggaaaatccaaaaagtctagcaggtttctggtattaaacttaaccacttgtcatagagtcacaacttgtcctctgcaaattgtgtgatccagactctttagttatgattcatcaagcatgagttttagttaacagattaaatgctatcctgccttcagaaaattaggacagtcaaccaakattttacttagagttgtatggattttaatgctgaaaacagaacaatattttcgttcattgtcaaaatgtctaacaggtctaggaaagactttttgttaaaaaacactgtagttagcaaagtcagaatctgagggcatttgtgtctataactagacatatgtcatcagattagagactcatgatacca

SEQ ID NO: 419313 - DNA, 631 bp, Homo sapiens
tatgggattcagcaagagcagcagtaagagggaagtttatagcaataaatgcctacaccaaaaaagtagaaagacttgaaataaacaacgtaataattcacctcaaggacctagaaaaataaagacaaaccaaacccaaaattagtagaaaaaaagaaataataaagttcacagcaaaaataaatgaaatggtagactacaaaaaatacagaagttcagtaaaacaaaaatttggggttttttttgaagataaaattgacaaggttttatctagactaactgaaaaaaagagggaagactcgaataaaaccagaaacaaaaacgagatataacaactgagaacacagaaacacaatgaatcattcgagactattatgagaaactatacttctacaaattggaaatcctagaagaaataaagtcctggacacatacaacttaccaagattgaaccatgaagaaatagaaaacctcaaaaaaccaatagcaagcaacaagatcaaagcartaataaaaagtctctcatcaaagcaaagcccgagacctgatggcttcactgctaaattctaccaaacatttaaagacctaatacaaattctactcaaactgttcagaaaaacttgaagagaag

SEQ ID NO: 419314 - DNA, 485 bp, Homo sapiens
caaagacgacaataaatgcctaactcttcaatacccagacactgaagaacatctactagcatcaacaccattcagaaaaatatgccctctccaaatgaactaaataggacatcagggaccaatcctggagagacaggagtatgtagctttatgcacagagaattcaaaatagctgttttgaggaaactcaaagaaattcaagataacacacacagaaggaacttagaattctattaaataaattaatagaaagttgaaataatkaaaaagaatcaagaaaggaaaccaagataattaaaaagaatcaagcagaaattctggagttgaaaaatgcaattgacatactgaagaatgcatcagtctcttactagcaaattcatgaagcagaagaattagtgagcttgaagacaggctacttgaaaacacacaatcagagaagataaaagaaaaaagaataaaacaggcctacaagatccagaaaattg

SEQ ID NO: 419315 - DNA, 595 bp, Homo sapiens
agaacaaaagggagaaaatccaaataaataaagtcagaaatgaaaagggagactttacaactgatactgcagaaattcaaaggatcactagaggcattgaacaactatatgccaataaattgggaagtttggaagaaataggtaaattcctagacacatacaacataccaagattgagccatgaagaaacccaaaacctgaacacaccaataacaagtaatgacataaaaactgtaatamaaagtctcctagtaaagaaaagtctaggatctgatggcttcactgttgaattctaccaaacatttaaagaagaactaataccaatcctactcaaactattcagaaaaatagaggaggaaagaatacttccaaactcattctacaaggccagtattaccttgatatcaaaaggagacaaagacacatcaaaaaaagaaaacaacaggccaatatccctgataaacattgatgcaaaaatcctcaacaaaatactagcaaactgaattcaaaagatcattcattatgaccaagtagggtttatccctgggatgcaaggatggttcaacatgtgcaaatcaatctatgtcatacatca

SEQ ID NO: 419316 - DNA, 500 bp, Homo sapiens
tgtgcaaatcaatctatgtcatacatcatatcaatggaatgaaggacaaaaacatatgatcatttcaattcatgctgaaaaagcatctaataaaattcaacatacctttatgataaaaatcctcaaaaacgtgggyatagaagaaacatacctcaaccctataaaatctggagaacaaggatgcccacttttaccactgttatgcaataggatagtggaagtcctagttaaaggaaacagacaagagacagaagtaaagggcatccaagttggaaaagaaataaatcaaattatccttgtttgcagatgatatgactttatatttgaaaaaatctgaagactctcccaaaaatctatcagaacttataaacagagtcagtaaaggttacaaaatcaacatacaaaaatcagtagcatttctatatgccaagagtgaacactctgaaaaaaatccagaaaataattcaatttacattagctagaaatataatttaataatt

SEQ ID NO: 419317 - DNA, 566 bp, Homo sapiens
cttggcctcatctgtcttcaggggaattagccacttgttccagttcctgttgcctctgtagacatcaactttaggtggacttttaaaacttcttgcaggcaaaagtcaagccacaaagtyctagcttatgcccacactatcacttgctgcttcctgccccaaaactttcgtgttgacactaaagcatgaaacatcacaggccatgctcagtaccaacacatgccaattcaaaagtgcagaaaatttatggccactgagacaaatcttggaccggtgggagataggagccagtgcataaataatttttccttcattctccagatacactatcctaaaatagcttttatatggattatcacaataaaggcacatgaggatgaataatttgtcatgtttagtgccaagcaacggccaattcggtgatgctttattgtatcatctctcttttcttgcctcactatgctttacgttcactactgccccctggtgtactgaagaaagagaacacaaacgtctgcctcagactgtgctttccagaaacccaggctaagacgagtaaagaatat

SEQ ID NO: 419318 - DNA, 592 bp, Homo sapiens
gaattttctgtgcattatcaagatgccctcttacatacagctgatatctgaagtttctacccagatcatctttaccaggttggcctcaaagggagaatctaaagaacctccttcccctacagccatacttttccctttatatacgcaaaaggatgcatgttgtgccaactgtgacctttacctgcaggtttcaggcagctatttgattttctgttcaaggagagcattgtaaccctagcaacagmtaccatggtgcagatggcagatctaatatccaaagtctgtttgatggggacacatactaacactgcaagcagaggaaccttttttaatactttaacaagactttaaattgagctgctctgcaaagcagaatcttcctctttcttagacacaataggactgccagtggcataccaggtttatcagctcttctcttcatcacccccaaacctagctggagttcaatctttaatctcctcctaagtcacagaatccagagagctagcatccaaaatactgagataacataccatggtctcacaccaggacaatgagctgtaggtaagttagtcaaatgtaggagcttctg

SEQ ID NO: 419319 - DNA, 588 bp, Homo sapiens
tagccctcactcgggcactacaattaggaaaaggaaaaaaggtaaatatatatatacagactctaagtatgcttacctagtcctccatgcccwtgcggcaatatggagagaaagggaattcctaacttccgagggaacacctatcaaacatcaggaagccattaggagattactattggctgtacagaaacctaaagaggtggcagtcttacacggcctgggtcaccagaaagaaaaggaaagggaaataaaaaggaaccaccaagcggatattgaagccaaaagagctgcaaggcaggaccctccattagaaatgcttatagaaggacatctactatggggtaatctcctccaggaaaccaagccccagtactcagaagaagaaatagaatgaggaaactcatgaagacatagttccttcctctcaggatggctagccaccaaagaaggaaaaatacttttgcctgcagctagccaatggaaattacttaaaatccttcaccaaacctttcacttaggcattgatagcacccatcagatggccaaattattatttactggaccaggccttttcaaaactatcaagca

SEQ ID NO: 419320 - DNA, 588 bp, Homo sapiens
tagccctcactcgggcactacaattaggaaaaggaaaaaaggtaaatatatatatacagactctaagtatgcttacctagtcctccatgcccatgcggcaatatggagagaaagggaattcctaacttccgagggaacacctatcaaacatcaggaagccattaggagattactattggctgtacagaaacctaaagaggtggcagtcttacacggcctgggtcaccagaaagaaaaggaaagggaaataaaaaggaaccaccaagcggatattgaagccaaaagagctgcaaggcaggaccctccattagaaatgcttatagaaggacatctactatggggtaatctcctccaggaaaccaagccccagtactcagaagaagaaatagaatgaggaaactcatgaagacatagttccttccyctcaggatggctagccaccaaagaaggaaaaatacttttgcctgcagctagccaatggaaattacttaaaatccttcaccaaacctttcacttaggcattgatagcacccatcagatggccaaattattatttactggaccaggccttttcaaaactatcaagca

SEQ ID NO: 419321 - DNA, 541 bp, Homo sapiens
cctgcctatcctggccaaggtttctgctctaaattctttcctatttccttaccttggtgagatgggctataagtctaggactcctacttttatctttcttgacaaatacctagagcaggtgcagctctagctgctcatctcacactccytctggcgtagaagatctgcctggatcttcttatcagaggcaactttctaaagattttatcagccaagaagagaaagtttgcaagccattacaagaagggaactagaaacttcttcaaggtacagaacttgtcttctttatttttacacttccagagccacaaagtgcctggaaatcaggtgttcaatgaatattggttgcactgaatatggattcctcttctcttccccctcccaacttcgtcctcaggatcagtggactcattgtgggtttcttatgaaattaccataaaaatagtttacatataatgtctaacatgtgatttcagattaacaaaactcccaaaatttagatgccctgactcaaaaaaaatttttgtttagaagtaacata

SEQ ID NO: 419322 - DNA, 520 bp, Homo sapiens
tataacatgtgaaaaaaacaagtgattatgttatatatttataactgtagtagaaatacaaatactgtgtttaaaaatcttcacatattagctcaaaaagatagaaaaaagttagccaaaatgtcaagagtaatcctttatgattgggggtgaggacagggatgattttttttgcttttcattttctatttttaaattatattaataagtatactttgtttttcacaagaaaaatgacatattacatttaataaaaggactatatgggagtcagaataattcttttcaaatataaaaattttctcaaagtgtattggtctaagtaagacattmatttcgtaaataagtcattaggttttgtggctttagtttgcttttctgcaaaatgagagaaatctgtttagtatttttgctactcaccctgaagcaaaataaataagttctcacactgaaaacaaaataaataaatagcagctaattcagagtaggtggaaaaggtgtgtttgtaaaaacaagagtg

SEQ ID NO: 419323 - DNA, 522 bp, Homo sapiens
attggtctaagtaagacattcatttcgtaaataagtcattaggttttgtggctttagtttgcttttctgcaaaatgagagaaatctgtttagtatttttgctactcaccctgaagcaaaataaataarttctcacactgaaaacaaaataaataaatagcagctaattcagagtaggtggaaaaggtgtgtttgtaaaaacaagagtgtttattttcatgtgtggactttaattcatattctcaatcaactattttctacagcctcacctttcccttcttaatgagaacagtatagttctcctattactagacaacatttttatgtgagccacactctcactcaccatatctatgacaacatgcccaataaagaatctccactagcccaagtctgtttccatagcactagccaacagaaaactatgcggcaatcagccctagaaagtaacctcttatttgttctcacagagatctatgaagaataatatattttaacttttccttgtctagtatcaccatgg

SEQ ID NO: 419324 - DNA, 600 bp, Homo sapiens
cccaaaatttagatgccctgactcaaaaaaaatttttgtttagaagtaacatatggtatgtagtttgggatataaggtgtgatcagaaataaataagttttcagactatatattagtcaaaaactggcaattaccaaaatggccttcaatagttgagtgaataaattgcagtatggtcatgcgatggagtaccatacagcaacaagaatgatcagtctatgactacacacaaaaataatgaatgaatctcacaaatgaaatgttaagagaataaagccatgtgcaagagagtatattgtatgagttcatttgtacaaaatataaaaacaggctaaattgatctatgctattagaaatcataacagtggttaccctacaggcagtggtcctcaactggggatgactttttttccaggaaatattgggcctatctctttatctggagagagatttttgttgtaccattgataggactgctactggtagccagtgggtagaggccaggaatgctgctaaacatccarcaatgcacaggacagccctccacagcaaataattgtccaacccaaaatgtcagtggtgctgggctgagaaacccta

SEQ ID NO: 419325 - DNA, 540 bp, Homo sapiens
tcttttgctctgtgatgaattcctgtgctctgtaaaatgtgcaaggttttttcatagcatgaatttccattgacagcatattttgaatggggaagtctcttgtggctatcctgtcccagtctcacacttgtttgttgggtacattgagggcacataacttgtttttttagttcataggtctctaatcgtgggaaacctcgtatggcagaatgcaggtccaaaagtcctggactctgatccagataaacggaagtctcaggaagaagtaagtgtattttgcatgtaggagggacatgaataattgtagccagaaaatggactatggtagattatttattaaaaaatgaccaaaattatttcctttcctatatctagacctccatgcaatgtgactttgcagctcctcccatatggagatggggtctatttccctacccctttaaatcagggctggytttgtgacctgtttcaactaacagaatgtggagaaactgacaccatgacagttctgagcctgggcctcaagaggccttgcacgct

SEQ ID NO: 419326 - DNA, 577 bp, Homo sapiens
agatttcttacacatcatttacctttgttctcaggcaagattactgtaagcagattcagcttttattctatttgtggcaaatagaacaaaaattttaccagtagctactctttctcagtggttcaatgaatattcctgaactaaatcgtaaacctaatttctcaggttacctcttgagagtagtcactttacgtggactgaagcagtcactctaacctccgtgttagatgctgtgatcgctgcacctgggtccttcccaggagctggggtgatggggtgtgttatgagaaagtgatgattcccaacaggtgaaaaaataatgactgcccmacacagtatgctctgcatctcactgcctctcatgtgagaattcagctcgtgtgatgtttttaattggttggttgtccattgctctgtagatgctgtcatcaccatagataccagggccagtcatccgttgattgttctatttgcatgatttgaaatatgaaagatcattaggaaaaaagtctatttaagataaatttggcatttttgatactttagtgttgagatttctagataacttttttcttac

SEQ ID NO: 419327 - DNA, 523 bp, Homo sapiens
tacatactgtttctcaacttctttcaaccacaaaacacctttctcatggagwatcttctaatagctccccaagttattgttctgtggaacaaagtttggaaacattagtctcaaataataatactctctatattatttccattccccccagccttcagtgattatttttaacatccaagccttacttcaggtgtcctctgaagacataagaaaatgatttgtatctttgtttggacatatttattagaggaagggttgctaaatttggcttgttacaaagcaaaacctaatccatgaagtgtttttggtatggtaaggacttggagactcttctgatgacctaaggccactttagctattaataatttggcagaacctctgagtcttagccaaattccacatcctggcccagagaaaccacttcacatcccctatggaaacattgcctagtccctcccaacagtggtccctgtaggcttgctggctctcaattctcagtcccttccacattctttcacagaga

SEQ ID NO: 419328 - DNA, 523 bp, Homo sapiens
tacatactgtttctcaacttctttcaaccacaaaacacctttctcatggagtatcttctaatagctccccaagttattgttctgtggaacaaagtttggaaacattagtctcaaataataatactctctatattatttccattccccccagccttcagtgattattttkaacatccaagccttacttcaggtgtcctctgaagacataagaaaatgatttgtatctttgtttggacatatttattagaggaagggttgctaaatttggcttgttacaaagcaaaacctaatccatgaagtgtttttggtatggtaaggacttggagactcttctgatgacctaaggccactttagctattaataatttggcagaacctctgagtcttagccaaattccacatcctggcccagagaaaccacttcacatcccctatggaaacattgcctagtccctcccaacagtggtccctgtaggcttgctggctctcaattctcagtcccttccacattctttcacagaga

SEQ ID NO: 419329 - DNA, 556 bp, Homo sapiens
tcaaactatttataaacctattaataacttaaatgtctttttactgaattcaaatgttctattgtcacatcaagttcagtatatcctacrtcaaatccagcattttcccccaaatccgacacctattctaactccttttacccattctttgatatctaataatggacagtcttctccaagactatttccttgaccactgaagcacagggtgatcactcaactcttgtaccgtgccagcctttagcacttatgacagcctcttttttatttatgtttatactggcttgaactaacatttaatttttcattcattcagcatttcttgggcactttctatgttccaaccaatgtttaaacagctgttaaagaacaaaacaaattagtcttctgtcctcttgaaagttacattttcagggggagaaagatacaaaaaatagataaatatgtaatttcataccacaatgacggctttcaaattgataatgtcaggctcaacctctccttttaattgtaattcatgtaaccagtgtctgctcaatatctttacttaaatatc

SEQ ID NO: 419330 - DNA, 601 bp, Homo sapiens
catataattcagcaatcccaccactaggtttatatccaaaggaaagaaaataggtatgttgaagagatatctgcactcccatgctcattgcagcattattcacaatagctaagatatggaaacaacctaagtattcatcaatagatgaaaggattaagaaaatgtggtatatatacagaatggaatgctacttaaccttaagaaattctgtcatttgtgacaacatagatgaacctaaagaatattatgctaagtgaattaagccaggcacagacatgaatactgtcttccagtatttggcagacctcccagcctgccaaaccatcttggcccacacaaatgaacactcyatcccgtcatccttctcaataggtcctcctacgttagcttccatctcactcatatgtggaatctaaaaaagtcaaactcatgaagtggagagtagaatggtggtcaccagaggctggttgtgggaaaggggaaagggaagatgttggcaaaatgtacaaagttttagttagatagcaggaataagttcaggtgatctattacatagtagggtgactatagttaataataatatattatagcagcatgactt

SEQ ID NO: 419331 - DNA, 594 bp, Homo sapiens
aaggaaaagaagttattttatgaaaaagatacatacacatgcatgtttatagcagcacaatttgtaattgtaaagatatggaaccaatctaagtgcccatcaaccaacaagtggataaagraaatgtggtatgtatacaccatggaatactactcagccatgaaaaggaatgaaataatgtcttttgcagcaacttggctggagctagaggccattattctaagtgaagtaactcaggaatggaaaactaaatattgtatgttctcacgtataagttggagctaaactatgatgatgcaaaggcctaagaatggtacttggactttggggacttgtgtgggggaaacgttaggagagggtgagggataaaagactacatattgagtacagtgtacactgctccagtggcaggtgcattaaatctcagaaatcaccactaaagaacttacccatgttataataccaaaaaaccacctgtacctcaaaagctattaaaataaacataaatttttttaatagtaaatatttgggtagataacagccatttttcctcaagttatttaaaatacatatgtctttaaaacgaaaattata

SEQ ID NO: 419332 - DNA, 463 bp, Homo sapiens
gcagaattagacacgtggggtggtgggaaaacagtacatattaagcctggtggagtggagagaggcatatgaggtgacttggaagagtgggaagattgtgggtaggtgagatgtgcrcacgtgccaggcagggcaactggagctgggaaacccaggcatgtttgggacacagccagaagtccctcttggcagcacatgtgtgtagggaagcagttagagatcaagctggagaggcaggctgggctgtactgtggagattcgcataccatgcagaggaattgatttaattctctagctagtgagccccattgaaggagggccatgtgtgtgtatgtggttttgtgtgtaatttttggttgtttgctcatttgtttttatcatggaaagacactgatgaaagtgggcttcagtaatattgatatggccaggggttgggggaggcagtggattagcaatgtgtttt

SEQ ID NO: 419333 - DNA, 607 bp, Homo sapiens
ccatcttctttaaagcaagtctgtgaagctttgggggcagataaattccaactccaccacttactggcaatgcaaaatttttgagttgtcccttccataaaacaggagggatactattttggagagctggtttaatgagacaatgtatgaggagtgctcagtctctagcaaaaggcaggtccttactacaaggctcatggatattaatcccttcatcttctcctcccgcctctctcctttcccattatacacagacattttgacttttacactataaggtaaagagamataataaggtcagctgaatggcttagggtttaggaaacaaactcaaaaagacatttccctctaactgttcttaaacataatcttccctgtaacatctttaagcaagtcaacacacacacagacacacacacacacacactacatatatatacacacacacacacacatatatatatatgtgtatctggcatggactctatagctggtcaaaaatgtcaagaaatgggccattactaccaatcatgtctccagtgttctcctaaggaggctaaaatcaggactgaagtggagaagtatggttggtgaattgcttagcaga

SEQ ID NO: 419334 - DNA, 429 bp, Homo sapiens
gaagccaacaagatgtccttcattaggtaaatggataaactgtaatacatccaaataattaaatattattcagcattaaaaagaaatgacctatcaagccataaaaagacataaaggaatctcaaatacatgtttctgagtgaagccaatcaggaaatgctacatactgtatgactccagctacatgacattctgggaaaggcaaaactatggagacagttaaaaaaaaatcagtggttgccaggagttatgggggacagagggatgagcagatggagtacagaggaattttagggcagtgaaactcttctgtataatactataattatggatattatgttcagatttttaaataaataaaactgaaatttaaaatagartaagagggaatcaggttgatttgtttcaactgaaattcatgatcacaaa

SEQ ID NO: 419335 - DNA, 548 bp, Homo sapiens
ctacatactgtatgactccagctacatgacattctgggaaaggcaaaactatggagacagttaaaaaaaaatcagtggttgccaggagttatgggggacagagggatgagcagatggagtacagaggaattttagggcagtgaaactcttctgtataatactataattatggatattatgttcagatttttaaataaataaaactgaaatttaaaatagaataagagggaatcaggttgatttgtttcaactgaaattcatgatcacaaagctcatgtctttatgcttcccagaaaaaaatattccctgctccattcaytctcatcctttcccagagtaacagttcatatttattttctctccttcccatcttcactctttgctgataactttattttctatttcacttgtaaaaaaaagtggtcatttgacaagaatttcaaaatctccagtctctacatctgctcatcttcatatatctatacctacattctgttatctctccttttcatatgggtgaactgtctttgcttctaaataatgtccac

SEQ ID NO: 419336 - DNA, 548 bp, Homo sapiens
ctacatactgtatgactccagctacatgacattctgggaaaggcaaaactatggagacagttaaaaaaaaatcagtggttgccaggagttatgggggacagagggatgagcagatggagtacagaggaattttagggcagtgaaactcttctgtataatactataattatggatattatgttcagatttttaaataaataaaactgaaatttaaaatagaataagagggaatcaggttgatttgtttcaactgaaattcatgatcacaaagctcatgtctttatgcttcccagaaaaaaatattccctgctccattcattctcatcctttcccagagtaacagttcatatttattttctctccttcccatcttcactctttgctgataactttattttctatttcacttgtaaaaaaaagtggtcatttgacaagaatttcaaaatctccagtctctacatctgctcatcttyatatatctatacctacattctgttatctctccttttcatatgggtgaactgtctttgcttctaaataatgtccac

SEQ ID NO: 419337 - DNA, 274 bp, Homo sapiens
aagcgctgagggaaggctacaagctggctgtgtgcccctcatagctaacatccctggaataaaatgtctacttccctggtaggcatcgccacggcatagtgatyggcacggtgaccgcacaccactggtcatattgcctccttgatctcaggagttggaaatgagaagatgccattgccgctgagagggggcactgtgttggtttgtggcgggaatggccatctccaccagcacctttttcttcatcatggcagtgtccctgcagtatcacatc

SEQ ID NO: 419338 - DNA, 587 bp, Homo sapiens
cgtccctctgggcttcctagagcctgtagagaggcagattgctcgtgtcctttgggatccagatcgagactgaggctgaggaagaggaatgcttgggtctggagcagtatgaaaaatcgtttcatcgtgctctgtaagaatttctaacacaatattctgaaatttaatattcaccatagcagctacagtttattcttgtgctctcattagagttgggagaaatatgacaccaagatttgagacagtcatgagattttgttggctgygcagtgatactttgaccagatgttttattaagatgtccagcatctctctgtttttctctggcaatttgcacaccaatgcatgtacagcctccaccctgtagttttggtcatcagatttaacagcaatgatacaaatctttgtgtaacttgtaagtcatcagtggtgctgcaaagcacctgaggtagtttttcagcccactcattgtcttattgtcccacagttcaatatcaatatcaggaggggatttaggagaaaatatgatattcacaagtttttgaactttggagttcactcctcctattcagtagaggcctaaaacg

SEQ ID NO: 419339 - DNA, 606 bp, Homo sapiens
accatgtccagacactaaataatgggtttcaaagaagaataaactcacctcccagaggaagagttgatttatcttcaggcattcagcactttccacactccctcaagtatgtgatatatgaacaaactgcaattgacatttttacaaaatttttaatgttcatctgtcattactgttctccaaggataacaattatttaagcaactaattagaaccaggaatgaaattattttatctcaacagataccttttgcatgcaattaaggaatgaagtttttttaaaaaaacagaaaaagtcatacttaytatttgttaattcaaaattaattaggacatccaggaacagctgtcgaggctcatttctctcagccctccccttaccttcatgctgcagtcacaaggaagtaaggcctcctctcctcacactctgcctgcctttgcgctcaaagctctctgttcctagagcctatttccctttctgcttcacctggttaattctcactcagacatcaaggctccctgtgaagctctctggcttaggcagccttcccgagtgccccatagtacctagtgctcagctttattattgcttgtaacacagctcat

SEQ ID NO: 419340 - DNA, 527 bp, Homo sapiens
taaggaatgaagtttttttaaaaaaacagaaaaagtcatacttattatttgttaattcaaaattaattaggacatccaggaacagctgtcgaggctcatttctctcagccctccccttaccttcatgctgcagtcacaaggaagtaaggcctcctctcctcacactctgcctgcctttgcgctcaaagctctctgttcctagagcctatttcccyttctgcttcacctggttaattctcactcagacatcaaggctccctgtgaagctctctggcttaggcagccttcccgagtgccccatagtacctagtgctcagctttattattgcttgtaacacagctcattctgaatgtctggttgcttatctacattttccattagacaatgaccgtctcaatggaagagaatatttcttgctcctctttgcatcttcagctagggactcaatgcttgctgaatgaatgaaaagtttttggtggaactagatgattgttgttcatgctgttctgactgtttttgtttgctt

SEQ ID NO: 419341 - DNA, 527 bp, Homo sapiens
taaggaatgaagtttttttaaaaaaacagaaaaagtcatacttattatttgttaattcaaaattaattaggacatccaggaacagctgtcgaggctcatttctctcagccctccccttaccttcatgctgcagtcacaaggaagtaaggcctcctctcctcacactctgcctgcctttgcgctcaaagctctctgttcctagagcctatttccctttctgcttcacctggttaattctcactcagacatcaaggctccctgtgaagctctctggcttaggcagccttcccgagtgccccatagtaccyagtgctcagctttattattgcttgtaacacagctcattctgaatgtctggttgcttatctacattttccattagacaatgaccgtctcaatggaagagaatatttcttgctcctctttgcatcttcagctagggactcaatgcttgctgaatgaatgaaaagtttttggtggaactagatgattgttgttcatgctgttctgactgtttttgtttgctt

SEQ ID NO: 419342 - DNA, 540 bp, Homo sapiens
agctttacattttttgatacatagtagagcaaatcttttcacattcttatcgaatataaggtattcatatacatttttctttcaaaagaaatctgaagtgaagcactgacgttccaaaaaaaaaaaacaataatttgattaaaattttattaaacatatttagtttggaggaggctgagataatcaagatataaataatgctggatattctcatctagtcagatgatgtctctccattaattaactcttgtagtccaagtaacattctgtagatttatccgcatagggaatactcactttttytaagtgtatatcaagatattttagagttttcaatgtgaatagaaactttttgcttgtacaaattcaatttgattcagtttgattcatgagaattcttttgagtttcattttatcttttatctgtcctcttaactcattgtttttattaatttttaatttcattttctgaaaattatatcagtggctgtgtaattgatgtttcattctaatatgtatatttcatttttcctgtcatat

SEQ ID NO: 419343 - DNA, 604 bp, Homo sapiens
ggggctcagaataaaaaggcagaacagcctctgcctgtttatctcttattcttttgcrggagttttgtgttacatacaaataaaaatttagagatattgtcgtatttcccagctaccgaagtcaactgtgaagaagaggcatttacatccctctatagcagtactaagaagagaggtatccttgactaaataagcaaggcaagattactctttccagactctaatttgggagttagcagatagaacatcaggcagaagttcctctgttggtgtcacctacaaagcaacaagcttgagaactctgtgttccaacttgggagctagtcagtctcccagagtgggggtatttggagagcaggcttgtgaagaaggccaaggaaacagaaaggacagctcttaggatacactttactgaagatatatcactcagacaagatgcccagaaagttcaggattaacaaaggtctagagtcttgtaactcacttcctatggaagtttattgtgaacaacaacagtaacaaagcagcctcaattctctaatcctgcagagggctaaagaacacctattactccctggagcttaatagagatgaaatcttagga

SEQ ID NO: 419344 - DNA, 604 bp, Homo sapiens
ggggctcagaataaaaaggcagaacagcctctgcctgtttatctcttattcttttgcgggagttttgtgttacatacaaataaawatttagagatattgtcgtatttcccagctaccgaagtcaactgtgaagaagaggcatttacatccctctatagcagtactaagaagagaggtatccttgactaaataagcaaggcaagattactctttccagactctaatttgggagttagcagatagaacatcaggcagaagttcctctgttggtgtcacctacaaagcaacaagcttgagaactctgtgttccaacttgggagctagtcagtctcccagagtgggggtatttggagagcaggcttgtgaagaaggccaaggaaacagaaaggacagctcttaggatacactttactgaagatatatcactcagacaagatgcccagaaagttcaggattaacaaaggtctagagtcttgtaactcacttcctatggaagtttattgtgaacaacaacagtaacaaagcagcctcaattctctaatcctgcagagggctaaagaacacctattactccctggagcttaatagagatgaaatcttagga

SEQ ID NO: 419345 - DNA, 604 bp, Homo sapiens
ggggctcagaataaaaaggcagaacagcctctgcctgtttatctcttattcttttgcgggagttttgtgttacatacaaataaaaatttagagatattgtcgtatttcccagctaccgaagtcaactgtgaagaagaggcatttacatccctctatagcagtactaagaagagaggtatccttgactaaataagcaaggcaagattactctttccagactctratttgggagttagcagatagaacatcaggcagaagttcctctgttggtgtcacctacaaagcaacaagcttgagaactctgtgttccaacttgggagctagtcagtctcccagagtgggggtatttggagagcaggcttgtgaagaaggccaaggaaacagaaaggacagctcttaggatacactttactgaagatatatcactcagacaagatgcccagaaagttcaggattaacaaaggtctagagtcttgtaactcacttcctatggaagtttattgtgaacaacaacagtaacaaagcagcctcaattctctaatcctgcagagggctaaagaacacctattactccctggagcttaatagagatgaaatcttagga

SEQ ID NO: 419346 - DNA, 604 bp, Homo sapiens
ggggctcagaataaaaaggcagaacagcctctgcctgtttatctcttattcttttgcgggagttttgtgttacatacaaataaaaatttagagatattgtcgtatttcccagctaccgaagtcaactgtgaagaagaggcatttacatccctctatagcagtactaagaagagaggtatccttgactaaataagcaaggcaagattactctttccagactctaatttsggagttagcagatagaacatcaggcagaagttcctctgttggtgtcacctacaaagcaacaagcttgagaactctgtgttccaacttgggagctagtcagtctcccagagtgggggtatttggagagcaggcttgtgaagaaggccaaggaaacagaaaggacagctcttaggatacactttactgaagatatatcactcagacaagatgcccagaaagttcaggattaacaaaggtctagagtcttgtaactcacttcctatggaagtttattgtgaacaacaacagtaacaaagcagcctcaattctctaatcctgcagagggctaaagaacacctattactccctggagcttaatagagatgaaatcttagga

SEQ ID NO: 419347 - DNA, 576 bp, Homo sapiens
gagtaaagatcagatcaccctcaccaatgtgggcatcatctgatagaacaagaaggtggaggaagggcaaatgtactccccctgtttgagctgggacatccatcttctccagaacttggacactggcactgtggttctccagccttggacttggactttggactgaattattccactggttttcttggttctccagaatgcagatggtggaacttctcagcctctctaattgtgtaagccaatttccataataaaataaatcttcatgtatacctayataaatctttatatatcttaaaaatcttcatatatataagatgaaataaatatttatgcctctgtgtgtgcatatactgttttctggagaacgctgactaatatactctgaaagtgaaattcaaattgagtgtaaatggagttatggaagaaatagctattggaggtaatttgccactgtttgaggcattccagaggaacttagggaaggcagacttaacaacataaatgaaaatagatgtgttcattcattttaggataaagatgtcccaagaaagtgacatggcaaaacaaaacaaa

SEQ ID NO: 419348 - DNA, 576 bp, Homo sapiens
gagtaaagatcagatcaccctcaccaatgtgggcatcatctgatagaacaagaaggtggaggaagggcaaatgtactccccctgtttgagctgggacatccatcttctccagaacttggacactggcactgtggttctccagccttggacttggactttggactgaattattccactggttttcttggttctccagaatgcagatggtggaacttctcagcctctctaattgtgtaagccaatttccataataaaataaatcttcatgtatacctatataaatctttatatatcttawaaatcttcatatatataagatgaaataaatatttatgcctctgtgtgtgcatatactgttttctggagaacgctgactaatatactctgaaagtgaaattcaaattgagtgtaaatggagttatggaagaaatagctattggaggtaatttgccactgtttgaggcattccagaggaacttagggaaggcagacttaacaacataaatgaaaatagatgtgttcattcattttaggataaagatgtcccaagaaagtgacatggcaaaacaaaacaaa

SEQ ID NO: 419349 - DNA, 576 bp, Homo sapiens
gagtaaagatcagatcaccctcaccaatgtgggcatcatctgatagaacaagaaggtggaggaagggcaaatgtactccccctgtttgagctgggacatccatcttctccagaacttggacactggcactgtggttctccagccttggacttggactttggactgaattattccactggttttcttggttctccagaatgcagatggtggaacttctcagcctctctaattgtgtaagccaatttccataataaaataaatcttcatgtatacctatataaatctttatatatcttaaaaatcttcatatatataagatgaaataaatatttatgcctctgtgtgtgcatatactgttttctggagaacgytgactaatatactctgaaagtgaaattcaaattgagtgtaaatggagttatggaagaaatagctattggaggtaatttgccactgtttgaggcattccagaggaacttagggaaggcagacttaacaacataaatgaaaatagatgtgttcattcattttaggataaagatgtcccaagaaagtgacatggcaaaacaaaacaaa

SEQ ID NO: 419350 - DNA, 590 bp, Homo sapiens
gataatttattttactgagcagaagaagacctattatttttcaatactcattcttctgtccatgagagtggcacacactagctgcttctagtcagctatcttggccctctgtgttgatgaactgtatgttggttttgaatcctgcaaatttactgcattcatttattagctctaatagctttgtggtggagcgtttaggtctttctcaatatgagatcatgttgtctgcatacraggctaacttgacttctccccttcccatttgtatgccttgtatttccttatcttgcctaattactctggccaggacttccagtattatgttgaataaatgttgtgaaagtagacatccctgtcatgcttcagattatgcaggaaaggctttcatttcttctcttttcagtataatgttggctgtgggtctgtcatatatggcctctattttgttgtattttccttctatacccagtttgattagggtttttaacatctgttaaaatgattatatggtttttgctcttatttttcttaatgtgatgtctcatgttttttgaattgcatatcttgaaccatgcttgtatactgggata

SEQ ID NO: 419351 - DNA, 590 bp, Homo sapiens
gataatttattttactgagcagaagaagacctattatttttcaatactcattcttctgtccatgagagtggcacacactagctgcttctagtcagctatcttggccctctgtgttgatgaactgtatgttggttttgaatcctgcaaatttactgcattcatttattagctctaatagctttgtggtggagcgtttaggtctttctcaatatgagatcatgttgtctgcatacgaggctaacttgacttctccccttcccatttgtatgccttgtatttccttatcttgcctaattactctggccaggacttccagtattatgttgaataaatgttgtgaaagtagacatccctgtcatgcttcagattatgcaggaaaggctttcatttcttctcttttcagtataatgttggctgtgggtctgtcatatatggcctctattttgttgtattttccttctatacccagtttgattagggtttttaacatctgttaaaatgattatatggtttttgctcttatttttcttaatgtgatgtctcatgttttttgawttgcatatcttgaaccatgcttgtatactgggata

SEQ ID NO: 419352 - DNA, 563 bp, Homo sapiens
ttcagtccttctagcacttcaagcctacgatgggagggtgatatggtttggctctgtgtcctcaaccagatctcatcttgaatggtactgccacaattcccacatactgtgagagggacctgatgggagataattgaatcgggrggcagtttcccccatactgttcttgtggtagtgaataagtctcaggagatctgatggtttcataagggtaaacctgtttctcttggctcttattctctctcttgctgctgccatgtgagatgtgcctttcaccttctgccatgattgcgaggcctcctcagccacatagaactataagtccaataaacctgtttcttttgtaaactgccaagtctctatgtctttatcagcagcatgaaaatggatgaataaagagaggctgacttgaaggtctctgaagtgccttagaggtctttttgccattgtctaggttatcagcacttgccttccttttagttgtgcaaatttctgaagcctgcttgtattcctcccctgaaaatgggcttttcttttctacaacatggccaggttgtaaattt

SEQ ID NO: 419353 - DNA, 563 bp, Homo sapiens
ttcagtccttctagcacttcaagcctacgatgggagggtgatatggtttggctctgtgtcctcaaccagatctcatcttgaatggtactgccacaattcccacatactgtgagagggacctgatgggagataattgaatcgggaggcagtttcccccatactgttcttgtggtagtgaataagtctcaggagatctgatggtttcataagggtaaacctgtttctcttggctcttattctctctcttgctgctgccatgtgagatgtgcctttcaccttctgccatgattgcgaggcctcctcagccacatagaactataagtccaataaacctgtttcttttgtaaactgccaagtctctatgtctttatcagcagcatgaaaatggatgaataaagagaggctgacttgaaggtctctgaagtgccttagaggtcttttygccattgtctaggttatcagcacttgccttccttttagttgtgcaaatttctgaagcctgcttgtattcctcccctgaaaatgggcttttcttttctacaacatggccaggttgtaaattt

SEQ ID NO: 419354 - DNA, 595 bp, Homo sapiens
tttttattatctgttcacataaaaacagtattagtaaggttagaggtaaaaaagtaaatgtaaatcttaaacatagtttctgaactgccttgtcactgagagttaaaaatcctctagcaacctaaccctttgcatctgacattattttttgtgactattcctctagtgaaataagtcactgacactttagtgtaagttactcctagtaaatcacttttacacaggttaaagggaagcacaacagaaaaactgtaaggaaggtggtgcagatatccagattttgcccaggacagcctaagcagaaagctgcttccctcacttccctccaaagtcaagaattgagagggaagatggccttccaattccagccactgatgagaataaattccggaaaaacatattaaacatagcgtttgacgcttctatccacagctggaaacattacacaaattttagtgagcccygaatgccagcagccataattcccaaattcttttttaaaataatgaactaatccaggtgaaggacctgcggcttggcgccatctggtgcctgcacagagaaagaacgttccatcgaggctgcagtgctgagt

SEQ ID NO: 419355 - DNA, 616 bp, Homo sapiens
tgatggacacgtgcttttttaaaacaaaatgtttacttcagaatagttttagacttaaagaaaagttgcaaagatagtaccctcactgagcttcccccagacttaacatcttatatcgccagacaacaagggccccaccactgctccattgctggcagaactccagaccgtccaggcgccactggtccttccaccaatgtccttctctggtgcagctgtcacaacactgccatgtctctttagccacctctggtctgggacagttcctcagtccttcctgggtttccatgtcctcctccattttgagagatactgactgtcccacgataggggttttctggtcttactctcatggtcagaccggcttaggcagtcttccccaaagaccgrggacactcttccccaaaatgcataacccagtttgactatgcgagtgaggccagacaaagctccatggagggttggtcagtgtttcttctcgtcccacctcaggatagggtgcacagggaggtctcgaggagaaggtggtctttcagtaaagccctgagggggctaaagcaagacaggctgacggctgggaggggaacagccctgaggctgcagacggccagtgcag

SEQ ID NO: 419356 - DNA, 470 bp, Homo sapiens
caggttcatccttctagagcttctccagttttgcttccatcaagagaaagcctccaatcacactagcccacaatggtctccccaacttgaacacaagttcttcactttaactcagaaatgtgacatttaccataaaagtttaccttatgaaatctggcacacctcaaattctgcattttttaaatgttcagggtgtcgtatctctgcaaatgaactatcagcccccaaaaggcaagaggtagttccatatgcactttttatgtcccagaaagtctccatgctgatatgagtatgtgctagttacagctcataagtattgctcagtaagtgagaaagcccttcttttcatttttgaatagtgagcaaagaatgrgagaggaactccaatctcataagtaattttgattagtgtcatccttaaaagaaaaacctaaggctttttaatgacaaaatgtggcataaggcacctg

SEQ ID NO: 419357 - DNA, 656 bp, Homo sapiens
  misc_feature (1)...(656): n = A,T,C or G
gcaacacctcttcctgttattttatcctgtgtcactcaccatctgtcatcattaacatttactgagcastaagtgggagagacagccgcacatttgtgtgtggggactgagtgcttggattgggtttgagtattgtccacagctttctaactgcccagcaatcttaaggctccatttcctcaaatgggaaatggggataacaatagggcccctctcgtagcttgttgagatcattaaatgagataatgtgggtgaaatgtttagtatagtgcctggcacatagtagatgcccagcgaacatgagctgttttcattatttgaaaatgaaaacaacagttttcttacttactgagtacatgtgtggcactggattgtagcctgaaacgggctatgcaagcatggctgagctaattacaaagtagaggggagccaaatggactcagggaggtggactatcatgagatgagggggaanggtgagaccctgagttcaaatcctgggaccgccgattatccctggtccctatttcctcactctcaatgtaaaggagcagatctgaggagtggttcccaaatgtcttctttgcaacattagcctgtaagatgtttcgtggaaaaagagtctcatgatcagatagacttgggaaacgccaaaca

SEQ ID NO: 419358 - DNA, 579 bp, Homo sapiens
gacactaaaatttatggaaaagttggaaattttaatgtgaagactggaaaacaaccaatggaatagaatttcctataatagcttaagagtctatgaagagtaaaaaaattgtaatgatcaagctatgcttattacctgaacatatatgtacgaaagaaaatttgtttaacttgcattggcaagtgcctcctcctttttttccccctttctctgctatgtagagcatctgcagttatagctagaatagtgaaaaagaaaaaaaacagcacctaaaaatgttaaaaatatattatggggatggatttaaaaccacagcaatgaaatgttgccacaacaacaaatttaactcaggtcctgaaaaaaatataaggttcctaatcaacttaaaatcataaatatcatggataaaatatgatagtaggttttccccagaacaagctggttctgcagaataattttgattggcaggatcttatggcatatatatttatactgaatatcagtttcagtctcaatattttgaygctcattttctattcaccagttttaacagtacatattgttttaagttgccacaat

SEQ ID NO: 419359 - DNA, 553 bp, Homo sapiens
ctagcatatttacagcggctacaggcttctctgtctaggaagatgccttctcttgactgcctcagtgatgttgctttctgaccatctgccccaccttgtctgcagcgtcccaggcagtttgaagtcatccgtccacctgcttcttaccttaatctgctttcttttgctcccagcaccatgtctatttgtcgttttctaggaatagtgaccttgactggcaggcaaactcttccctctcttctttcccctttttatttaaccttgattgagscttgagtcctgtgctgggtcaggcactgacataaaagtggatttctgtcctcagggctcacagcttactggggccaacgtgatacatagcagcatatgaccacacacagaaagtgaaccaaacccaggctggagggaggatgggtcagtggagactttttctattgttttgttgttttgagacaaggtctcactctgttgcctaggctggagtgcagtggtgactttttgtatgttttttggtttttgagacaaggactgattctgtcacccatgctggaga

SEQ ID NO: 419360 - DNA, 553 bp, Homo sapiens
ctagcatatttacagcggctacaggcttctctgtctaggaagatgccttctcttgactgcctcagtgatgttgctttctgaccatctgccccaccttgtctgcagcgtcccaggcagtttgaagtcatccgtccacctgcttcttaccttaatctgctttcttttgctcccagcaccatgtctatttgtcgttttctaggaatagtgaccttgactggcaggcaaactcttccctctcttctttcccctttttatttaaccttgattgaggcttgagtcctgtgctgggtcaggcactgacataaaagtggatttctgtcctcagggctcacagcttactggggccaacgtgatacatagcagcatatgaccacacacagaaagtgaaccaaacccaggctggagggaggatgggtcagtggagactttttctattgttttgttgttttgagacaaggtctcactctgttgcctargctggagtgcagtggtgactttttgtatgttttttggtttttgagacaaggactgattctgtcacccatgctggaga

SEQ ID NO: 419361 - DNA, 473 bp, Homo sapiens
tcttcttgagaaaggttcaatatttgctcattcaaattaactcagctctagccttctgtcaaagcattgtgccaaatgtaacagcatcattactttccttaatctagtttaaaaatagactataaacatattcctttttttttctgcacaaccatgtaggagaatttatctttctttacctgaaaacttttaattacttgcatttgggattccaaggctgtctcagtaatacaattaattttaatgaggagtctaagtttatcattcaatccaattattctaaattaagtgatcgtgtakttcacttcattgtcaattgattgtgattacctattatcaagtaaactcaatatatttatgataattttattaatcaggcaatgcctgctgtccaaaagccatggtttttttattctgtggctcatatatgggcaccttgaaataccgtgacatactgtgaaatcaatgcaaac

SEQ ID NO: 419362 - DNA, 473 bp, Homo sapiens
tcttcttgagaaaggttcaatatttgctcattcaaattaactcagctctagccttctgtcaaagcattgtgccaaatgtaacagcatcattactttccttaatctagtttaaaaatagactataaacatattcctttttttttctgcacaaccatgtaggagaatttatctttctttacctgaaaacttttaattacttgcatttgggattccaaggctgtctcagtaatacaattaattttaatgaggagtctaagtttatcattcaatccaattattctaaattaagtgatcgtgtagttcacttcattgtcaattgattgtgattacctattatcaagtaaactcaatatatttatgataattttattaatcaggcaatgcctgctgtccaaaagccatggtttttttattcwgtggctcatatatgggcaccttgaaataccgtgacatactgtgaaatcaatgcaaac

SEQ ID NO: 419363 - DNA, 468 bp, Homo sapiens
ttcacttcattgtcaattgattgtgattacctattatcaagtaaactcaatatatttatgataattttattaatcaggcaatgcctgctgtccaaaagccatggtttttttattctgtggctcatatatgggcaccttgaaatacygtgacatactgtgaaatcaatgcaaaccacagatgtttattaaactcctgcataggtagcactctactgggactattagaataaaggaaaatgtttaggacaattgctgctcttaagagccttatatgtagctgagttgggctgagtgtgtgggtgagtatgataacttgtcagaagggtgatgcaaaacaaaaggtgctggtgggtagagaaggcccagccgagaaggcttcagggtggaagcaggacttgggtctccaggaggctgtgaagcatagaccctattaggtgaatgccttacaagtactgacattgggaagat

SEQ ID NO: 419364 - DNA, 468 bp, Homo sapiens
ttcacttcattgtcaattgattgtgattacctattatcaagtaaactcaatatatttatgataattttattaatcaggcaatgcctgctgtccaaaagccatggtttttttattctgtggctcatatatgggcaccttgaaataccgtgacatactgtgaaatcaatgcaaaccacagatgtttattaaactcctgcataggtagcactctactgggactattagaataaaggaaaatgtttargacaattgctgctcttaagagccttatatgtagctgagttgggctgagtgtgtgggtgagtatgataacttgtcagaagggtgatgcaaaacaaaaggtgctggtgggtagagaaggcccagccgagaaggcttcagggtggaagcaggacttgggtctccaggaggctgtgaagcatagaccctattaggtgaatgccttacaagtactgacattgggaagat

SEQ ID NO: 419365 - DNA, 468 bp, Homo sapiens
ttcacttcattgtcaattgattgtgattacctattatcaagtaaactcaatatatttatgataattttattaatcaggcaatgcctgctgtccaaaagccatggtttttttattctgtggctcatatatgggcaccttgaaataccgtgacatactgtgaaatcaatgcaaaccacagatgtttattaaactcctgcataggtagcactctactgggactattagaataaaggaaaatgtttaggacaattgctgctcttaagagccttatatgtagctgagttgggctgagtgtgtgggtgagtatgataacttgtcagaagggtgatgcaaaacaaaaggtgctggtgggtagagaaggcccagccgagaaggcttcakggtggaagcaggacttgggtctccaggaggctgtgaagcatagaccctattaggtgaatgccttacaagtactgacattgggaagat

SEQ ID NO: 419366 - DNA, 523 bp, Homo sapiens
cagcttcgactccctatgatttcatccctgatcaatcagcacccctggctcactggcttcccccacccatcaagttatccttaaaaactctgctccctgatttgagtaatgataaaactctggtctcctgcacagccaggtttgcatgaattcctctttctctactgtaattcccctgtcttgatgaatcggctctatctaggcagcaggcaaagtgaaccctttggacagttacagattcttctctgggcttctaaggataggttccagcctcctgccatgttcttgcatagtggggaagaagttctattgtttggggaagcccagccccttctaattcctcctttgtcagagccctaccctttccaatgggaaagtgcaccctactcctctcctctccagccawgtgattcgggagggaacattcacaggtatagtgctctgctcacctggccagtcagagccagtcctggtatttttatactgaggcaaggagagagagcataggcatgttccatgaggg

SEQ ID NO: 419367 - DNA, 547 bp, Homo sapiens
ccccgggatgtttttctgtctcctcgwgacctcctgcactccccagctacactggctgcttctcacctttgatttttaactaccacccacccagatgcaaagaacttggaacatacacctccagcctgactttcccctgaactctagaccatgcatctgaccacctcctagacttctgtccctagaagctccatggaccggcagctcagactcaacatgccccacctggaacccatcatttccccctagccggctccctgtgtactcctgacctcaagggctgacaccactatcttctgcagagtcacactgactccccttcccctcgtgatctgctgtgggttgaatcatgccctccaaaaagacaagttgaaattctaagtcttcatacctgtaactgacacagtatttggaaatagagactttgcagatgtaattaagatgtaaatcaactcatgcctgtaatcccagtgttttgggaggcagaggcaggacaattgcttgaagtcgggaattcaagaccaacctgggcgacatagcaagacac

SEQ ID NO: 419368 - DNA, 547 bp, Homo sapiens
ccccgggatgtttttctgtctcctcgagacctcctgcactccccagctacactggctgcttctcacctttgatttttaactaccacccacccagatrcaaagaacttggaacatacacctccagcctgactttcccctgaactctagaccatgcatctgaccacctcctagacttctgtccctagaagctccatggaccggcagctcagactcaacatgccccacctggaacccatcatttccccctagccggctccctgtgtactcctgacctcaagggctgacaccactatcttctgcagagtcacactgactccccttcccctcgtgatctgctgtgggttgaatcatgccctccaaaaagacaagttgaaattctaagtcttcatacctgtaactgacacagtatttggaaatagagactttgcagatgtaattaagatgtaaatcaactcatgcctgtaatcccagtgttttgggaggcagaggcaggacaattgcttgaagtcgggaattcaagaccaacctgggcgacatagcaagacac

SEQ ID NO: 419369 - DNA, 557 bp, Homo sapiens
ctatttccttttacacttgtgaaatgtctggcacaaccagacaaaactgctgtcttttcctctcttcttcttttactaccattttccttcttgcttttcagacaacactaaaacttttaacaaaatttttgaagtggttttcttttggtagtctagaatacactaagtcatttcatgggtctttaccctgaaatgctacactttaaaaatggcagttttcttaattggcttaaaatcagtgtggcttggttttacttggtaaagttggtgtgattaaatatatgtgtgtgtgtatatatatatacacacacacacayatatacacatatatacacacatatatatacacacacacatttttaatcagaaagaaaaagacttgctaatttgaaaaagcattaaaaaaaagcaaatgctaaaaactacaataaaataaattaattggcaggttaaatgaatgtaaaatgaggaatgtatggtgaaaaaccgactaatagcattccagttgataaaattaaaaacctacttaggcttatagtttattttctaatgaagtt

SEQ ID NO: 419370 - DNA, 557 bp, Homo sapiens
ctatttccttttacacttgtgaaatgtctggcacaaccagacaaaactgctgtcttttcctctcttcttcttttactaccattttccttcttgcttttcagacaacactaaaacttttaacaaaatttttgaagtggttttcttttggtagtctagaatacactaagtcatttcatgggtctttaccctgaaatgctacactttaaaaatggcagttttcttaattggcttaaaatcagtgtggcttggttttacttggtaaagttggtgtgattaaatatatgtgtgtgtgtatatatatatacacacacacacacatatacacatatatacacacatatatatacacacacacatttttaatcagaaagaaaaagacttgctaatttgaaaaagcattaaaaaaaagcaaatgctaaaaactacaataaaataaattaattgrcaggttaaatgaatgtaaaatgaggaatgtatggtgaaaaaccgactaatagcattccagttgataaaattaaaaacctacttaggcttatagtttattttctaatgaagtt

SEQ ID NO: 419371 - DNA, 572 bp, Homo sapiens
atggttaactgtttgagaactgccaagctgtttttccaaagcagctgcatcatttaacattccctcaagccatgtaggagggtttgaatttatcygcatccttgccaatgcatcttattgtctgtcttttttattagaatcatcctggtggatataaagtgtatcactgtggtttgatttgcatttccctaatgactaatgatgctgagcatcttttcatgtacttattggccatttgtatatattctttggaaaaatatctattcagatcttttgcttattttaaaattgggttaattgtctttttattgtcaagttgtaaaaattcattatataccagatgcaaacctcttatcagacatatgatttgcaattattttcttctattctgtgggtcatctttgcattttcttgatggtatcatttgaagcacaatattttaaaatttcagtaaagtccaatttgtctgttttttcatttgtcacttgtacttgtgtagacacatctaaggaggttttgcttaactcgaggtcatgaagatttgcttctgtatccttctaaaagttttatgg

SEQ ID NO: 419372 - DNA, 572 bp, Homo sapiens
atggttaactgtttgagaactgccaagctgtttttccaaagcagctgcatcatttaacattccctcaagccatgtaggagggtttgaatttatctgcatccttgscaatgcatcttattgtctgtcttttttattagaatcatcctggtggatataaagtgtatcactgtggtttgatttgcatttccctaatgactaatgatgctgagcatcttttcatgtacttattggccatttgtatatattctttggaaaaatatctattcagatcttttgcttattttaaaattgggttaattgtctttttattgtcaagttgtaaaaattcattatataccagatgcaaacctcttatcagacatatgatttgcaattattttcttctattctgtgggtcatctttgcattttcttgatggtatcatttgaagcacaatattttaaaatttcagtaaagtccaatttgtctgttttttcatttgtcacttgtacttgtgtagacacatctaaggaggttttgcttaactcgaggtcatgaagatttgcttctgtatccttctaaaagttttatgg

SEQ ID NO: 419373 - DNA, 452 bp, Homo sapiens
gagatgcatagcagttaaacaacttctgcagtatcatcccagctggtcagtggcagagactggatttgagtcaggcagtttgtatctgagcctgtgttatatggcctcacaacatgcctccttatcttttgttaattttttttttttatgttttagttttagagacagggtcttgctctttcactcaggctggagtgcagtggcacaattatagcttactgtgcctcaaatccctgggctcaagcgatcctccagcctcagcctcctgagtagttgggactataagcacgtgtcacaacatctgggtaatttaaaatatttttttgtagaaatgagttcttggtatgttgcctgggatggtctcaaactsctgggctcaaataatcctcctaccctaacctcccaagtagctagggctacaggtgtgcaccaccacctccagctagtttttt

SEQ ID NO: 419374 - DNA, 600 bp, Homo sapiens
atagcagccttcagataaatctcagggatggtaaatgtcagttttcagacattaaaggtttcaggctctcaggtaatctctcctagatctgggagcatcttgggaggggagagacccagctatattaatggagattctctaaagatgcaaatttctctcacaaaagatggctttccacggctgtttcaatctgttggctctgtggaagccatttcaaaatatgtcaaagaaatatattttggggtaaaatctttagatttttcttaaaggtctgctgtcatgttgtgttttactagagtcaggttggaaagtaagccactcacatagggttaatggaaacctgtctgatgagattttatggtgtgccaggcatgattccccagtccccttacataggaatctgggcaagagagaaaagatcaacatttagtcctcatcacagtttggaggctgcagtccaagatcaagatcaaggtgctggcaggactggtgtctgaggaggacctrttgtctgttttcaagacagcaccttgtgctgcatcctctggaaacaaatgctgtgtcctcacatggggagggatgcaagggcaaaaaggaatg

SEQ ID NO: 419375 - DNA, 450 bp, Homo sapiens
ttgagacagggtctcactctgttccccaggctggagtrcaatggtgagattgtggctcattgcaacctctgcctcccaagttcaaatgattctcctgccttggcctccagagtagcagagattacaggcagccaccactatgcctggctaattgtatgaacttagaaaagtaacttaaacttcttagaaaccaagaactaaagaagttgcaggctgagtgtggtggctcatgcctgtaatttcagcacttcaagaggccgaggtgggtgggccacttgaggtctggagttcgagagcagcctggccaacatggtgaaaccctgtcttgaccaaaaatacaaaaagtagctaggtgtggtgatgtatgcctgtaatcccagctattcgggaggctgaggcaaaataatcgcttgaacctgggaggtggaggttgcagatagccatgattac

SEQ ID NO: 419376 - DNA, 378 bp, Homo sapiens
gttggaaaaactatatgtggcctctcctcgtgtttgcttgggcttcctcacatcatggcagctgggtgtatctgtatcaccttttaccacctagccttggaagtcacatagcatcagttctgccatagtcataagagtgtccagattcaaggacagagaatggagaccccaactcttgataggaggaatrtcaaaatgagaagaacatatggacaggaagcattggtgcagctatttatggaaaatacaatctgccacaactcccaaatagaattctggcctgtagtccatgacaacaaagggaagccaggattggagtggtcagttgtccttccaaagcatgtgagctaatatccctctctcagaaagagttcagta

SEQ ID NO: 419377 - DNA, 547 bp, Homo sapiens
aaccctctactcactcagcagcgttgggtgaagggtccratgatgggatcaggccctacagataatatttccccttagagggtccggttttttcctcccttaggatattgggtgcagaaagttaagccaatcctaacactcagcttgcaatcattctgacgtaacatagtagctgtctcacgagtccgtgtgaagagatcaccaaacaggctttgtgtgagcaacaaggctgtttatttcacctgggtgcaggctggctgagtccgaaaagagagtcagcaaagggtggtgggttatcattacttcttataggttttgggacaggcagtggagttaggagcaatgttttgcgggcaggggatggatctcacaaagtacattctcaagggtggggagaattacaaagaaccttcttaagggtgggggagattacaaagtatattgatcagttagggtggggaagaaacaaatcacaatggtggaatgtcatcagttaaggctattttcacttcttttgtggatcttcagttgctttaggagatctgga

SEQ ID NO: 419378 - DNA, 547 bp, Homo sapiens
aaccctctactcactcagcagcgttgggtgaagggtccaatgatgggatcaggccctacagataatatttccccttagagggtccggttttttcctcccttaggatattgggtgcagaaagttaagccaatcctaacaytcagcttgcaatcattctgacgtaacatagtagctgtctcacgagtccgtgtgaagagatcaccaaacaggctttgtgtgagcaacaaggctgtttatttcacctgggtgcaggctggctgagtccgaaaagagagtcagcaaagggtggtgggttatcattacttcttataggttttgggacaggcagtggagttaggagcaatgttttgcgggcaggggatggatctcacaaagtacattctcaagggtggggagaattacaaagaaccttcttaagggtgggggagattacaaagtatattgatcagttagggtggggaagaaacaaatcacaatggtggaatgtcatcagttaaggctattttcacttcttttgtggatcttcagttgctttaggagatctgga

SEQ ID NO: 419379 - DNA, 547 bp, Homo sapiens
aaccctctactcactcagcagcgttgggtgaagggtccaatgatgggatcaggccctacagataatatttccccttagagggtccggttttttcctcccttaggatattgggtgcagaaagttaagccaatcctaacactcagcttgcaatcattctgacgtaacatagtagctgtctcacgagtccgtgtgaagagatcaccaaacaggctttgtgtgagcaacaaggctgtttatttcacctgggtgcaggctggctgagtccgaaaagagagtcagcaaagggtggtgggttatcattacttcttataggttttgggacaggcagtggagttaggagcaatgttttgcgggcaggggatggatctcacaaagtacattctcaagggtggggagaattacaaagaaccttcttaagggtgggggagattacaaagtayattgatcagttagggtggggaagaaacaaatcacaatggtggaatgtcatcagttaaggctattttcacttcttttgtggatcttcagttgctttaggagatctgga

SEQ ID NO: 419380 - DNA, 584 bp, Homo sapiens
atctcctaatctgtgatactgtgataataaattaaggtraaaaaattatatggccatctccttaggtagataaataatttaatatctattcttaatcaaaacacaagcaaggttataataaccataatagaaatataagaaagcctaaaatttcatacaactcatttataagaaacctaagacaaacattactgatgttatatattttttcattaaatccaggagcaatataaggatacctactatcattaccgctatttgaattatattgaatgctcaaactcagcgttttttaactaactttgtcacactgatattttagaccagatagttacttgttgtgagagactgtctgatattgccaaatgttggataactagtacaaactgtacccagtgtataacttccgctttaattaatgagaaaagataaggaaaaaaaatacaaagtacacagactggaaaagaataaaagctattttcagataatatgattgatataaccaattaaaatgaaagacagaaaaattatgatcctgaccaaaaccataaagtgtttgaaaatttgcttgagaaaaaaatctt

SEQ ID NO: 419381 - DNA, 591 bp, Homo sapiens
caagatgtatcagccaaatagaaaattaattcattaaaaattgaaaacatcaattcgcatcacagttcagtacttgctttgcagaaggctctaaaaatgatgaccccaagtgttaatggcaaagagatagaaagtaactacatgccactcatttatcctgcttgactcagacctcccaacatcaaactttttgtcccgatcaccctcagcccctactgagaaagcctagagccacaaaactctcaatcattacctaatccaaagttttaggaactcagtctttgggcaacccagagaatgattgtcaggtggttttcagcaacttctcatcctcactttaattgcctccccactctgttcattcccccaggttcctttccttttctacaytttcctacccaggggatatatccttccctagcctcccaagatttcatgtttttcctgaacatctaagtatacgaattaccctatctgacccacaattcactgctatttctttttttaaaaaaaaccagatgtttatcttgtagcttgtattaaatatgataatacaagaacagttttaactctatactacaggttaaagtt

SEQ ID NO: 419382 - DNA, 591 bp, Homo sapiens
caagatgtatcagccaaatagaaaattaattcattaaaaattgaaaacatcaattcgcatcacagttcagtacttgctttgcagaaggctctaaaaatgatgaccccaagtgttaatggcaaagagatagaaagtaactacatgccactcatttatcctgcttgactcagacctcccaacatcaaactttttgtcccgatcaccctcagcccctactgagaaagcctagagccacaaaactctcaatcattacctaatccaaagttttaggaactcagtctttgggcaacccagagaatgattgtcaggtggttttcagcaacttctcatcctcactttaattgcctccccactctgttcattcccccaggttcctttccttttctacattwtcctacccaggggatatatccttccctagcctcccaagatttcatgtttttcctgaacatctaagtatacgaattaccctatctgacccacaattcactgctatttctttttttaaaaaaaaccagatgtttatcttgtagcttgtattaaatatgataatacaagaacagttttaactctatactacaggttaaagtt

SEQ ID NO: 419383 - DNA, 559 bp, Homo sapiens
acactcctgccattccatgaataaagctggatgcctgttaaattcgagcagtgttttatattttttgttcttattctggaggtgaaatatgctgtcattattatgtcaggtatgttctttataccttcttcacctctaacatctttattaatcatttcagtactgcttcatgtaaaagtctrgcaaggaatgaatttattttgcttctgctctacttaaatttctatcctctcttcttttgcccttctgagttagtgaccaaagaaaatctcctaaattctcctgctcatagaaaatgtgaaaaagaaaatggcaccaccaatgggctaccctagtggcatttatttctttcaataaatgtcatgaaagacatatttggaagaaaaagagcctgagctctactttaaatagacctaggtctgttttatttctgttctttaccaatcataagaacgttccaagattcctgctctatctgggcctcagtttcatcatttctaatttctaactatttaccttgcaatgttattgctgggattggaaaaaatgtatatggagt

SEQ ID NO: 419384 - DNA, 458 bp, Homo sapiens
taaatgatgtaatatatgataaaagagacaaattcaagccacatcagtctagaagataaccacatttaaaaaatattaagttcatacagttactctttaattaaaagaaaaaacaagaatctacagaccaacttgtctttgaagtttgaagatttgaaaaaaatgagtgacatgcaaaatgttcctttttcatctaagtagaagtattgagaacagccaatgtatctctctgtagctaaatataaggaaaggaaatagatggtttaagatggttacctacactaccatatcattaaactgtacaaaagttgacagtggtaaagaccagagtcctttaaaagcakaagtcggaacaaggtaattgatttatttgtaaaagtaaattaaagaaagcaaatctcatattatgctccactaaggtgtgagtaaggaacagttaataaacatcctgatggttg

SEQ ID NO: 419385 - DNA, 454 bp, Homo sapiens
gcagggccaaaagagttagatcaagagyccggccaaatgcaagcacagaacttttctggaactgtatcaatcagacaacattcagtattccatggagtgagactgaaatacaaaagaatcttccagtggggttctctccagaaactggagcaaaagtcttctttgctcaataaaatcatgaggctttatgcaataagttcaatgaacaagacttgtgaaatagactctcaccatattaattagtgaagacttacaggtctaagtccacccgcccacctttttttttttttttcaggaacacatactttgagaaatgactgctgagaagaattggaaagggactggaagcaatgatggctaaagaatctcgagaaggaagacagactatacatattttttctaggaaattaaaagggaagataatttcataattattgccaatgttgtaaatagt

SEQ ID NO: 419386 - DNA, 454 bp, Homo sapiens
gcagggccaaaagagttagatcaagagtccggccaaatgcaagcacagaacttttctggaactgtatcaatcagacaacattcagtattccatggagtgagactgaaatacaaaagaatcttccagtggggttctctccagaaactggagcaaaagtcttctttkctcaataaaatcatgaggctttatgcaataagttcaatgaacaagacttgtgaaatagactctcaccatattaattagtgaagacttacaggtctaagtccacccgcccacctttttttttttttttcaggaacacatactttgagaaatgactgctgagaagaattggaaagggactggaagcaatgatggctaaagaatctcgagaaggaagacagactatacatattttttctaggaaattaaaagggaagataatttcataattattgccaatgttgtaaatagt

SEQ ID NO: 419387 - DNA, 583 bp, Homo sapiens
aagtccacccgcccacctttttttttttttttcaggaacacatactttgagaaatgactgctgagaagaattggaaagggactggaagcaatgatggctaaagaatctcgagaaggaagacagactatacatattttttctaggaaattaaaagggaagataatttcataattattgccaatgttgtaaatagtaatctccatctctccatcagatagagaagaaaatgggattaaaatgtagtaagagaaatttagatggtttataacagtttgaaaggaatcatgagttaaatttcatagtgtagaggcaggaggctaagagaggataaagatataccgctaatgtttataaattctgtacattatccactccttacctctcaaaagcctctttgctaaaagtaggtgtcattatgtatgcaaataagggaagctatgccatgaaatgtaatccttaggctgctcatagtcttaagtacttttaataattgactcacttgaagtatttatgtagacctacttacaagraaaaatatgaaaataatgtaaataaaaatgttacacactttataattaaattc

SEQ ID NO: 419388 - DNA, 466 bp, Homo sapiens
aaaaatagatatcatcttttcacatatttctatggtaactcctagaatacagagtgttacttgggaaaatggggacaaagaggaaaaggaggacaaaggaaataatgaaaggaattatgsaggatagttgaataaaatcagatgacattgtaaccaaactaaactgggtccatttgcccaaacaacagaaagacaaagactggaattttgcagtgaggaaggtttattgtgaggcagctgaaaagaagactagggaatgctcaaatccatctacccaagctgggggatgtgttgggtttatgaggatagtgtaatgaagtatgatctgactggatcttgcaatgaggtgatgccagaatgcatgatctgactggatcctgaccttcttgccttgtactttttcttaattcagtccctgcttctcagtcctagcacttaggttctgcacatggttcatctgggcatg

SEQ ID NO: 419389 - DNA, 639 bp, Homo sapiens
tattcatatctgtagatttatagcagattggtgtgttttctgttttagattgcctgttttgtagtagagagatgcttctcaggacgtcgtgggatcacactgttcagactgatttccaacaggcacagcgtggtaaccaaagtctcccctttggctgatgagtgtaacattccaattgagtgaagtttcaaaactatttttacattacaggtttgggtaatatgggagcaggaaactgtttctattccacacatgcctcagtttactaagcaggaagttaccaagaaactaaagyaaaccagaactcctacaaattcttagagcatatattaaaagagtgagaatttactcacttcaacatcacagatcacttttaccttgcacttcttttaatttacttgtaaattactttttaatttacaaaattacaatcaggttatgtatttttgcccggaatatgacataagacataccatatccttaaagtattacattctgtggcacacaatttacttcatttttactttactggtaatgttgattttaattacatggttaggggattatccagattctgcatgatatagtttgtacatattaaagtgattttacttttagaatcaacatataatttatata

SEQ ID NO: 419390 - DNA, 580 bp, Homo sapiens
taatcaaactcccaaaggcaagaataaagaaaggaccctaaaagcagcaagagaaaagaaacaaaggagcaagtgagcttccatacatgcaaaagagctccaatacacctggcagcagactttttagtggaaattttacctgccaggagagagtggcatgtcatatttaagacactggacttaatctgcagcacagaccaaatggacttcatagatatttacagaagatttcatccaatggctgcaaaatacacattcctttcctcagtgcatggaacattctcaaggacagacagtatgttaggccacaaaacaagtcttaaaaattcaaaaaaatagaaattgtatcaagtatattatctgaccacaatgaaatagaactaggaatcaatatcaagaggaactttggaaactacacaaacatatggaaattaaacaacattctcctgaatgaccagtgggtcaatgaagaaattaagaaggaaatttaaaaataataytgaaacaaatgaaaatggaaacccaacataccaaaaattatgaaatactgcaaaggcagtactaagaggaaagtttatag

SEQ ID NO: 419391 - DNA, 605 bp, Homo sapiens
cttttccatttccactgtgcctgaactggtaaatgttgctaaactaactcacaagatcataactttgctgactggaatcactaaaattatagtgtataccatctgtgcagtgaccttaaaattgaatttgtaatcctgtcactgatatagagacctctactcttggaacaatttcggttgattggtagcggctacctgaatgtactgtatatgggggagggttgtgaaagtacagttgggctcagctggaaaaattgctgwgattgagtaatgatgtctatcatgtgtgaagaaagacaattgtggccttttatcatataattccctttttacattaacagtgaccccaaagttgcatttcaaacctataatcctagtcttaaactcattctgttaggataaagactattctttttaagacagaaaatgtcagcttgagctctatcaatttcctacttagtgactcaatttctttaaaacagatacatatattatctgcttaatggggaaaaaatcttccctacctctacttctgaaaattgtacacctacctctgtcctcagccccatctcctcctgcctcttaaggaaaatttccttttgaaa

SEQ ID NO: 419392 - DNA, 605 bp, Homo sapiens
cttttccatttccactgtgcctgaactggtaaatgttgctaaactaactcacaagatcataactttgctgactggaatcactaaaattatagtgtataccatctgtgcagtgaccttaaaattgaatttgtaatcctgtcactgatatagagacctctactcttggaacaatttcggttgattggtagcggctacctgaatgtactgtatatgggggagggttgtgaaagtacagttgggctcagctggaaaaattgctgagattgartaatgatgtctatcatgtgtgaagaaagacaattgtggccttttatcatataattccctttttacattaacagtgaccccaaagttgcatttcaaacctataatcctagtcttaaactcattctgttaggataaagactattctttttaagacagaaaatgtcagcttgagctctatcaatttcctacttagtgactcaatttctttaaaacagatacatatattatctgcttaatggggaaaaaatcttccctacctctacttctgaaaattgtacacctacctctgtcctcagccccatctcctcctgcctcttaaggaaaatttccttttgaaa

SEQ ID NO: 419393 - DNA, 605 bp, Homo sapiens
cttttccatttccactgtgcctgaactggtaaatgttgctaaactaactcacaagatcataactttgctgactggaatcactaaaattatagtgtataccatctgtgcagtgaccttaaaattgaatttgtaatcctgtcactgatatagagacctctactcttggaacaatttcggttgattggtagcggctacctgaatgtactgtatatgggggagggttgtgaaagtacagttgggctcagctggaaaaattgctgagattgagtaatgatgtctatcatgtgtgaagaaagacaattgtggccttttatcatataattccctttttacattaacagtgaccycaaagttgcatttcaaacctataatcctagtcttaaactcattctgttaggataaagactattctttttaagacagaaaatgtcagcttgagctctatcaatttcctacttagtgactcaatttctttaaaacagatacatatattatctgcttaatggggaaaaaatcttccctacctctacttctgaaaattgtacacctacctctgtcctcagccccatctcctcctgcctcttaaggaaaatttccttttgaaa

SEQ ID NO: 419394 - DNA, 605 bp, Homo sapiens
cttttccatttccactgtgcctgaactggtaaatgttgctaaactaactcacaagatcataactttgctgactggaatcactaaaattatagtgtataccatctgtgcagtgaccttaaaattgaatttgtaatcctgtcactgatatagagacctctactcttggaacaatttcggttgattggtagcggctacctgaatgtactgtatatgggggagggttgtgaaagtacagttgggctcagctggaaaaattgctgagattgagtaatgatgtctatcatgtgtgaagaaagacaattgtggccttttatcatataattccctttttacattaacagtgaccccaaagttgcatttcaaacctataatcctagtcttaaactcattctgttaggataaagactattctttttaagacagaaaatgtcagcttgagctctatcaatttcctacttagtgactcartttctttaaaacagatacatatattatctgcttaatggggaaaaaatcttccctacctctacttctgaaaattgtacacctacctctgtcctcagccccatctcctcctgcctcttaaggaaaatttccttttgaaa

SEQ ID NO: 419395 - DNA, 507 bp, Homo sapiens
tattgttaaagaataatagtcatgttttcaaaataaaggcttcatgatatagacctcctactttattgggcatgtttcagtcacatatgtcagtgtgtgtgtgtgtgcttgtgtgtgactttctctaactatacagaaaacatctgactctatgcatttctatcatattagtttctaatattatcttattcataaaattgatccaaacctctttgtccattgttgttcatttatttctgtatattatagtcwgtctgttgaaactttagagaatctctttattagagtgataaacttcttagtatcaattattttagaattaagagagtctgtgaaaatcatcatgtcttatttttgacattttggctttggatcttctagaaagttggcaaacgacagtgagaactatgggtaaggtttaaggttattataaaattagtgattagaaattccttcatttgagtcttgttgaatgaacatgactgtttttgtatttttgcttaccca

SEQ ID NO: 419396 - DNA, 476 bp, Homo sapiens
tagaaagaatagatttattctctggccttactggcagaataaaaatgttaaaagctaaatgttgaattcattgctaacgattaattcccctgtataatccatgtgttgtgggcatgttgtgagggcaaacggtcagcattcatattaatctgaaatatcagctgtgtaagtaacgttagcacttggctcaaaatatccccaatatatacaagggatggagtagaagacagaagtgcatgatggagacaggaacaaccctctaatttagccacttctgctataatgtataaggaaagtaaatggttttggatggattctatttaatcccatacctgtcaaaattattacctgtcagttctatacacactacctaacacttgaaatgtgatgatttttatagaaaaacaatgastatcacaggatttaatataaaaattatgtgaccaaaacaatcaagatttaataaaaacttaaga

SEQ ID NO: 419397 - DNA, 574 bp, Homo sapiens
gccttcatactgcatccaaaattaactgaaaatagatttaaaatctacatgtaaaatgtaaaactccmaaattttaggaaaaaacatcataggagaaaatctatgtgaccttaacattggccaaaagttcttatatgggacataataagcatgattcataaaataaaatgttggtatgtttcacttcattaaaaaaatgtttactgtgtgaaagtttctggtaagagaatgaaaaaacaggctatagacgatgaaaaaatatttgcaaatcacatactgaacaaaggatttttgttgaatcaaaggcctacatattctgggcaagcaaaggactatacattcttggtaaatatataaagcattctcagaactcaagagtaaacaattcaattaaagatgagcagattttccactggcacttaaccaaagaaaatacacaaatggcaaatgagcacattaagagaagttcaatgtcattaagtactagaaatatgcaaaataaaaccacaatgagattctactatgcacctacttagagtggaaaacgacactgataatctcaagttttgttgac

SEQ ID NO: 419398 - DNA, 596 bp, Homo sapiens
tgtgttattttctatacatagcatgttatgagttgatttattctgacaaatacaaaagcatggctctaactcattttaaatatgtaatggttatttttaagccaatcttgaaacaatgtgagattttatcttttattttatgtggctgacgaaactctacttttagagatcacacaggttttacttcatctttatctctgtcttccttttcttktttttccttatattaacctgctcccaaatctgaggctttattttatatatttttaaatactctcagcaaatttttaacagattattgaacatatagtgattgttctctattctaaagggtcatatgtatgaaggagtaaaatactgtaagaagtaggtaagaaaaatgagatttgattattttgcctgaaggaaatttacactcaaccagaactattgtacaatcattttctatgtttttttactaccttctgaaagcagtcctatgagatatgtcagcagcctcatggctcgatatacaagtgagggaatagaggtttagaaaaattaaataactgtctcaagttcacagagctattgggtaatgtgcactgtagtaatca

SEQ ID NO: 419399 - DNA, 556 bp, Homo sapiens
ttgctggcttaaaacagcaagtttaattctcacttatgttccagcccmgtgtattttggactaccctcccatcttatgatgatactacctggaacacacagcctccaaggacacattggcagaggaagaggaagatggcagagacacaaacaggtgcttacctttttgatgtgaaagcagtgcatttcataatcctttgaactggacccatagctaccgccagggctcccacctaaccaaaagggagggaacacacatagaaaattcaataagtcctaagtatttctgccatgaaaagaaacaaattaaatttagtttgttgaagttccaaacctcttttcacagcatcacagtatgctttctctaataatttccatttcagtcaacaatgaaattatttttcagaattcctttaacaaatgaaaaccagaggcttctatctcataaatatgactaagcaaatatacagacatgcacacacatataaatggtaattataatatacatggaattttgtacagtgtttattttattagcctaacatttaataatgaat

SEQ ID NO: 419400 - DNA, 557 bp, Homo sapiens
ttaactactttttgagttaaacagaaaatgcctttttccagttggatacatttttaaatggattttttgttcaaatgttttagaaatattcatccacatattgaaatttcttccataactttactttacatcaagaagattgaaagcccaagtaaatgacatgacaatgaaaatggaaatctggttagtaatttaaacttagcatgtctgagtataatgtgattacatcaastcttttgatgatatagttattaaaagattggcacaacaaaactggaaactttttgcaacttagcaaacattcactgaacaactttttttgtgtaagttctgtatgtagtattctgctatgaattctattgcatgatacaagcatgggatgtgtttcctcctctcagaacacttatacaggttattatgtatgtgattatgtagtatgaagtgatataaaggtgacatgcacatgaatgactaagagaaaataaaaattatgaaagaatcacatggtaatacacattgctatagagcagagattcttcaagaagttttcactaaaa

SEQ ID NO: 419401 - DNA, 554 bp, Homo sapiens
tgtaaaaataatactaattaagcagagagataaaatacwcacctatcaaacaattaaaacttatgaagaattcccaacattgaggaagatacaaaaaaatggacccatgtaatgctattgaaactgtaaactggtataaaatttttaagcagaagtttggcaatatgaagcaaatagttgaattatatatagtcacaattaaactaatcaactctcaggagaacggggtagtacattctcatgcctagtataagaatttatacaatagtggcccagaacaattgcttgagtttacagattacttcatctaacagttgcttatcatacaatcaaattcaatcgagtttgatagaaattagatttaaatatatagttttttctagttcatacatttaaaaagtgcaacaaaatgtaatacagatagtaaaccttgaattaaagagttgattatttattttgtttttgtacaaaatgtacaaacataaaataaattacagaattttagggttggaaattactttagaaaagtgcaagacttccttaaagattccagt

SEQ ID NO: 419402 - DNA, 554 bp, Homo sapiens
tgtaaaaataatactaattaagcagagagataaaatacacacctatcaaacaattaaaacttatgaagaattcccaacattgaggaagatacaaaaaaatggaccmatgtaatgctattgaaactgtaaactggtataaaatttttaagcagaagtttggcaatatgaagcaaatagttgaattatatatagtcacaattaaactaatcaactctcaggagaacggggtagtacattctcatgcctagtataagaatttatacaatagtggcccagaacaattgcttgagtttacagattacttcatctaacagttgcttatcatacaatcaaattcaatcgagtttgatagaaattagatttaaatatatagttttttctagttcatacatttaaaaagtgcaacaaaatgtaatacagatagtaaaccttgaattaaagagttgattatttattttgtttttgtacaaaatgtacaaacataaaataaattacagaattttagggttggaaattactttagaaaagtgcaagacttccttaaagattccagt

SEQ ID NO: 419403 - DNA, 545 bp, Homo sapiens
gctgaagtgggaggatcccttgagcccagaagttcaaggctgttctgaactatgattgtaccactgcactccagcctcgggggcaacacagcaagaccccatttctttaaaaaacaaacaaaaaaaaaagaaaagaaaagaaagtgaagacaaccctcagactggcagaaaatattttcaggtcatatagctgataagggacttgcactcagaatttataaagaattaataaaactcaataattataaataaccagttacaaatgaccaaaggakttgaataaacatttctccaagtaagatatatgaatggttaatcttgttaaatgatcctcaacaccactggtcattaggaaaatgtaaagaacacaatgtgataccactttacatttgcaagaatggctataatcaacaagacaaatagagtctaaataccagtaaacatgtagtgaaattggaacctccatacatccctagttagaatgtcagatgatgtagcccctttggaaagcagtttggctgttcaacaaaatgttaaatataatt

SEQ ID NO: 419404 - DNA, 545 bp, Homo sapiens
gctgaagtgggaggatcccttgagcccagaagttcaaggctgttctgaactatgattgtaccactgcactccagcctcgggggcaacacagcaagaccccatttctttaaaaaacaaacaaaaaaaaaagaaaagaaaagaaagtgaagacaaccctcagactggcagaaaatattttcaggtcatatagctgataagggacttgcactcagaatttataaagaattaataaaactcaataattataaataaccagttacaaatgaccaaaggagttgaataaacatttctccaagtaagatatatgaatggttaatcttgttaaatgatcctcaacaccactggtcattaggaaaatgtaaagaacacaatgtgataccactttacatttgcaagaatggctataatcaacaagacaaatagagtctaaataccagtaaacatgtagtgaaattggaacctccatacatccctagttagaatgtcagatgatgtagcccctttggaaarcagtttggctgttcaacaaaatgttaaatataatt

SEQ ID NO: 419405 - DNA, 604 bp, Homo sapiens
attattctattatgtggctgggtgacaatttagtgctagaaaggcattcaagctgctggacaattatttaatgtgtctttggtaacctctttcttacacccttcagtgactgtcccaatactaatcactgtcctcatgctgtcccacaacccagctcctgctctcccatttgcaatagaaaaatctcatcactcaaagtaccaaatagcacagtattgtagcactgtattgccgccctatcttgcttatctttcctcaccatytgattgtaaatcatttaggaagtagcatttcttctttatctttgtatcttcaatggctagtatacaggaagatccagcatacatagatgggtattgttcattgttctctttctttgctcattctcttcttgctggaattccttccaccctatcctgtctctgtcttcttgccatccttcccacttattgcagaattacttctgaatttgtttggtaatgtattacacatctatctcctctcagaaggcttccttgaatattcttactctgggctacctgtgctgactatgctcacaaaatgcctttcaataactctgttatcattattatattgcctctat

SEQ ID NO: 419406 - DNA, 604 bp, Homo sapiens
attattctattatgtggctgggtgacaatttagtgctagaaaggcattcaagctgctggacaattatttaatgtgtctttggtaacctctttcttacacccttcagtgactgtcccaatactaatcactgtcctcatgctgtcccacaacccagctcctgctctcccatttgcaatagaaaaatctcatcactcaaagtaccaaatagcacagtattgtagcactgtattgccgccctatcttgcttatctttcctcaccatctgattgtaaatcatttaggaagtagcatttcttctttatctttgtatcttcaatggctagtatacaggaagatccagcatacatagatggrtattgttcattgttctctttctttgctcattctcttcttgctggaattccttccaccctatcctgtctctgtcttcttgccatccttcccacttattgcagaattacttctgaatttgtttggtaatgtattacacatctatctcctctcagaaggcttccttgaatattcttactctgggctacctgtgctgactatgctcacaaaatgcctttcaataactctgttatcattattatattgcctctat

SEQ ID NO: 419407 - DNA, 618 bp, Homo sapiens
agatctgcctttatactagtttaggtgaaaacataataggtgaaaattttagctgaccacaaggaagaagtcccagttctaggaaacagagtctcattagcttggttgtagtagaggaaatctagaatttttttggagtaaagaaatcctttgagctgggtagacaaaattttaccagattgaatggtaaatatatggaggggaaaccagctgtggtataactggggatggttcataggtgggcaagcagcctgggaagggagattggctcctgcacattaggaagggcccagagagacttgccaaagagtttggattttattctgtagatggtgaaatttatttcaaggaaggrgttatcactgtcaggtatacacattagacgtgattggggcagtagtgatagagccagaagggaatcatcgtggagctgaggtgacagacctgctaagacagagacctgcaattgaaaatggagacaatgatgagaaccaaggaaaggtccttttgataggctaggaattgagcaaattgtggagtcttcatacaaggccttgaacacagaatgaggaggaacgggttttggggaaattagtttgattttctattagataattt

SEQ ID NO: 419408 - DNA, 641 bp, Homo sapiens
tgatttaactcaggttatggtataaaggttatgatggtcttttaaaacattgacaagttttgcctctcttttatttgtatcctgaaagcatttgttcaatattggagctatttcttttttaagcggttggaagaattcattagtgaaaacatttagcttgacattttctttattggaaggcttttaataatgtattaaatatttttatagatacaactattccaattttctatttcttcttttgtcagttttgttaatatgtgttctaccttcaggaaattgtctactgctctgcatttttaaattcattgctacaaatttgtaatgttttcttattatatttttatgtttgtataatctattgtggttagcctttttcatttcttactttggtaaattgtaccttttctctttttttccttgaacagattgattagatgatgattaattttattaawatttttaatgaactagcttttggatttgtgctttcctctgctatatgtttgatatgtgtttcattattttctgttcttatttttatgatttcctttattctaatttcctcagttttgaatattgtgtgtctccattttcttgagataattggataaattttaacctttcctctccaacatatg

SEQ ID NO: 419409 - DNA, 433 bp, Homo sapiens
gaaaactagattaaagaaaccagtaattaaaatagagaacttcagatgtatttaatggagatgttctttactaaaatactaggaataatattggcttgaagcattacagtgatttaagaaataagaagtaggaagcatggagctggctaaggtacaatatttatagacagtttttggatgtaaatcaaaactctaccaggaaggtttagaaaggaatggatacttyattaggtaaggttcaatctacaactgtgagtcaattgaaagttaatagcagctttgttaaaggtcatagataaatggctgctgtagttttaatgaatattttattcatgtcacctttaaattagttaaattttgaaagaataatgaagtaatgccaaaggctccttccaggatcattgaaagtgtaatttaattttaaggctttaga

SEQ ID NO: 419410 - DNA, 641 bp, Homo sapiens
ttcatttttctgaagtgttagtgaattattattcaaaaatacattatacataaaatgaatttgttttcaatttataattaattgcctttggaattaccagacaagcagggaactaattaatgatttcttaatggacttcgtctaaggcaagctagttccaaattgcaaagtccttttacaaaagagcataattaatgtttgcataactatttagagattcatttgttcattcaacaaatgtttatttgcactttactctgttcccaaccttattttaggaaatatgaatagagcagtaaattaacatgcctgaccttatggtgcttacattcctgtggaaaaaaaaccaactgattaaaacaaaaaatctaaacaaataatgtacaagataaattcaggtggaaattagtggaaaaaaaacaagtgagaagatacaaaataagggtatggtattttagataatgsagttagaaaaggcctctctgaagagatgctttttagtagaatcttgaataaaaagagaaagcatgccctacagatctctggagaaaaagcatttagggaagaaggaatggcaagtgcgaagggcctgaggtaggaagttgtctgatgtgttcaaggaagaggaaagaagcttattt

SEQ ID NO: 419411 - DNA, 534 bp, Homo sapiens
atgttttcttctccccaatttttaacatgcttgctccaatgaaaataaagtcttgcttgcagatgtaccaaaggagacatctcattcattgactttacttttttataaagtcatacaccagtgccaattctttttgtatatgctatgtagtacaggttcttccttctttatctaaaatttggggtatcaatttcacattgggaatttatttgaaatcagtgagagaaatatttctatctgraagatattatatttgagattgagtcaggcatcatactgagaaaaggatcaaggaaatataacaactgttgaaaaactgaaactcaatgtgtaaaatattatcaaacatggaagtagaatacagtgaaggtgcacaattgaaaagagcatttttctttgacaatttaaacagctgtatctgtatttcagtgctgaaatcctctgtgcatttgcttaacaacaatgtcttcccatacccatgcttaaataatttccttctgaaggataaaagataggcactaaaaattatatttt

SEQ ID NO: 419412 - DNA, 541 bp, Homo sapiens
gtttgttttttgtttttaaatctttttagtgggcagagataggatatgtgggtgtgtgtgtctgtttgtgactcataggttcatatagctacttataattcaaattcagcactgtagagttttttgaatttaatcactttttaattmcatctatatttcctttctgccatgccaaaaagcctggttcttaaatatataggggatgatagaatgtttcattctacacacacaacagtatcaaaataacaatactaatactactgttaataatatgtaattgaaagcatataaataatttcttgcatatactcttattaccacttctatcttttataattatagttgtttttagcataacatttactagaatttttttctagtacacagataaaaaacacacaagcttgcatgcaacggtgttccccaatcgatacactctagttgatattttaaaaataatagaaatgaaaaatgtagagcacagaattatttttacttttaaactcattacatttcaaaaatcaacgaggtacgattcctt

SEQ ID NO: 419413 - DNA, 483 bp, Homo sapiens
ctttaacaaacggtgatgagacaattggatacctatatgtaaaaagaatgacttttkacccctaccttaataccatatacaagaattcactcaaaaggaataagaaatctaaatataaaaatagaaagtataaaactcttagaagaaaatataagagtaaatcttgatgattatggatttggcaatagattcttagatatgacacataaagacacccaacaagagaaaaagacaatacattggactttatcaacattaaaaattttggaatactaggcttaatatctgggtgatgaaataatctgtacaacaaccccccatgacacatgtttacctgtgtaacaaacctgcacatcctgcacatgtacccctgaacttaaaattaaaaaaaaaagaaagacaaatgtcacatgttctcacttatttgtgagatctaaaaattaatttaactcatggacatagagagtagaaagatggttacca

SEQ ID NO: 419414 - DNA, 590 bp, Homo sapiens
agaattggttaaacccattatgcaactaggtctgcctttaacacttgmagaacctggaataaaggtgatggaggttatataggaaagatgagatacacattttacatattctcttatttgccagttttaaaaaatgctttgttttggcagaagagattgggaagatgttagctaaaagatacaaaatttcagttaagatgaataagttcaacagatctattgtaaaacatggtgactgtaattaataacaatatattgttgagaaaaagttttaaagttctcactaaaaaaatgctaagtatataaagtaatgtatatgttaaatagcttgatttagccattccataatacacacatatttcaaaacagcatgttgtacttgataaatatatacatttttatgtattaattaaaataataaatattaaaaataaattcaaagaaatgatttgtttctttagaatcttctaaagatgatgactatttttccaaatgaatggctgatattttaatatatttgatacgtttcaaaatattgcagttagtatgtttattcatgcttacattatttgatttttatccagtaaaaa

SEQ ID NO: 419415 - DNA, 494 bp, Homo sapiens
cttggtaaacatgtgcatacagagatggggagaagtggarttactaataaaatcaacctatcatggtctgccctcatggagtgtataattattcacatcccttccacataaaaaatatgttcttcccatctgatgatgatatgatatgaatgtttggttcccaccaaaattcatatgttgaaatcctaacctccaagatgatagtattaggaggtggggccttttgggagatggttagtgccgcactcatgaatggcaccactgcccacataaaataggcccaaaggagctcttgcaccccttccacaatgtgaagacatatctagaaggtgctatctgtgaaccagaaggtggaccctcaccagacactaaatccactgactccttgatcttggatgttctagctttcaggactgtgagaaataaatttctgttgttaataacgtacgcagtatatagtattttgttataacagcccaaacagactaagatac

SEQ ID NO: 419416 - DNA, 540 bp, Homo sapiens
ataaatgtatcatccagaatattctattttacaaacaaatataaacacaaaaaggagcaaaaataaaaataaaacattcctaaacttccattcaattatttcttttattggacctaaattgtagaacatctacaatttttgtagtcatctaccatttgtcagccatatttcaggctaaatagtgaagaacatagatgtagattctgtaaaaaaaacaaaacaaaacaraacaaaaactgagaatcagctgccatcccttctctgtcctttacttcaaagccaaatttcttgtttctttacaatattattttcccttgtgtttaccttctcactttctattcacccctccacctccagaagttccataccaaatagctaaccagtaagtggttaaaccttatcaaatttgacatttgatcaaatttgatccttatcaaatttgacattcttttagcatttggactgattactctctcctggatcctctttcctctgttggttgcatgaaacttaccttttttggttcctggaagatttttc

SEQ ID NO: 419417 - DNA, 601 bp, Homo sapiens
tctgccatcatcgttactcaagatgacaggctcaacctggaatggaattgatttattagactttttttattcagatgaagctaacacataactataaattctctgattaatgaaaagattctaataccagagctaacacatcttcatgatttggtctctaaagctaatttaagcaaagttgtgaataccactccataaaaaacacctattgctgygtgtgtgtgtgtatgtgcttgtgtgagtgctcgtgcattcagtgataggcccatgaaattttatgagaggtgaaagggattcttttggtgacatcaattttattggtagtaaaatgttacagagcttttgtgatagtttttctagaaagaggagtaggatatgaaatttaaatgtattgccttgaagtcaatttctgatagcttaacattattttaactaaaatgaaaacacacagtgcaacgtttttcaataagtagactgagaaatgattgatttagtaatcacccaaacttccacaccatgcagaaatgctctaaataccatttcctagaagtcaagtttgagtactataggggatagagagtttagtatttacagttttaga

SEQ ID NO: 419418 - DNA, 601 bp, Homo sapiens
tctgccatcatcgttactcaagatgacaggctcaacctggaatggaattgatttattagactttttttattcagatgaagctaacacataactataaattctctgattaatgaaaagattctaataccagagctaacacatcttcatgatttggtctctaaagctaatttaagcaaagttgtgaataccactccataaaaaacacctattgctgcgtgtgtgtgtgtatgtgcttgtgtgagtgctcgtgcattcagtgataggcccawgaaattttatgagaggtgaaagggattcttttggtgacatcaattttattggtagtaaaatgttacagagcttttgtgatagtttttctagaaagaggagtaggatatgaaatttaaatgtattgccttgaagtcaatttctgatagcttaacattattttaactaaaatgaaaacacacagtgcaacgtttttcaataagtagactgagaaatgattgatttagtaatcacccaaacttccacaccatgcagaaatgctctaaataccatttcctagaagtcaagtttgagtactataggggatagagagtttagtatttacagttttaga

SEQ ID NO: 419419 - DNA, 604 bp, Homo sapiens
tttgtttttgggggactattctatggacatgcattgatgtttttacatttactttatatcctttatatccagcaatattgccaagttaatttatcctttctagcagtttctttatagacggcattgatttacayttttgatacacacaattatgtcattataggaatatagttttatttttccttttatttatatatgctctttctttcgtctttcattcattctttctttcttttttcctcttttcctattacttttcctagtactagctaggacctgcagaacagtatttttaaaacattgatggtaaaattggaacttttttcttcccaaatataggagggaaagtttttgtcatctgttttgtcatcattaaatatactattacctgtattccctataggttttccataaatgcctttgtcattttaaggaagtttctttctatttctagtttgctaatatcatttctatagctaattgattttgaattttaattgaataacttttcttaattgagacgattgtgttttcttctttattatgtgtattgatagatggtgatgattgatttatgaatgttaacctagtctttctctcttag

SEQ ID NO: 419420 - DNA, 604 bp, Homo sapiens
tttgtttttgggggactattctatggacatgcattgatgtttttacatttactttatatcctttatatccagcaatattgccaagttaatttatcctttctagcagtttctttatagacggcattgatttacacttttgatacacacaattatgtcattataggaatatagttttatttttccttttatttatatatgctctttctttcgtctttcattcattctttctttcttttttcctcttttcctattacttttcctagtactagctaggacctgcagaacagtatttttaaaacattgatggtaaaattggaacttttttcttcccaaatataggagggaaagtttttgtcatctgttttgtcatcattaaatatactattacctgtattccctataggttttccataaatrcctttgtcattttaaggaagtttctttctatttctagtttgctaatatcatttctatagctaattgattttgaattttaattgaataacttttcttaattgagacgattgtgttttcttctttattatgtgtattgatagatggtgatgattgatttatgaatgttaacctagtctttctctcttag

SEQ ID NO: 419421 - DNA, 572 bp, Homo sapiens
acggtagtgtgtgcctgtagtccgagctactcaggaggctgaggcagaagaattgcttgaacccaggagttcaggtttacaaatagtgtagtgattatgccattacgctccagcctgsgtggcagagcaagactctgtctcaaaagaaaaaaataaaaacaaaaacaaaaagcaagaaaggaaagaagaaagaaaagaagaaactgcaaggagagaagaaaattctaaagttggttcaggcgatctaatataaaaagaagagaattctagaaagagaaaagataaacaaaattgaataagtacaattgttggagaaatatttcaagaaaagacccaccatattgtttgcaaaaaagaataaagagtgaaccacactgagacacataaatacgaaagttctgaaccttgaatacaaaaagaagatcctaagcacttcaagaggaaataggaggtcacatgcacaaggtaagaagtcaaaagtgcttcagaaatctctaaacaaaacaaaaacaagtaaaaatgaaaacactagaaactagaaaacaagagtacattgctttcaaagttttgag

SEQ ID NO: 419422 - DNA, 572 bp, Homo sapiens
acggtagtgtgtgcctgtagtccgagctactcaggaggctgaggcagaagaattgcttgaacccaggagttcaggtttacaaatagtgtagtgattatgccattacgctccagcctgggtggcagagcaagactctgtctcaaaagaaaaaaataaaaacaaaaacaaaaagcaagaaaggaaagaagaaagaaaagaagaaactgcaaggagagaagaaaattctaaagttggttcaggcgatctaatataaaaagaagagaattctagaaagagaaaagataaacaaaattgaataagtacaattgttggagaaatatttcaagaaaagacccaccatattgtttgcaaaaaagaataaagagtgaaccacactgagacacataaatacgaaagttctgaaccttgaatacaaaaagaagatcctaarcacttcaagaggaaataggaggtcacatgcacaaggtaagaagtcaaaagtgcttcagaaatctctaaacaaaacaaaaacaagtaaaaatgaaaacactagaaactagaaaacaagagtacattgctttcaaagttttgag

SEQ ID NO: 419423 - DNA, 584 bp, Homo sapiens
ctgacctggtcatgctgttgccactttggcaaatgcattgtccaacataatgcatgttggacatgcatgttggacataccactagggtggtatggtagaatattcatgaagctacctctctaaacatgctggttgactattcccgttattgggtatgctgtttgccttgtctttattgcaatgargcaagtcacgtgcattgtgttggtccaagtaacaggataactaggaaaagtaagtagcctatcaatagtgggacaagcactggggtttgtcttacgtacccactgtaccttggattttgccatttagtggtattgtgaattttatttgatcatttattggatatacccacttcagagtagattaagggatatgcagtagctttgtgaatatgctatgacctagaagaccaataggaaatagtaaacacaatggttaagaactcaagttttagaaaaacagcatctcaatttgttaaaaaagaatggttcactctcttattgtgtaatcctaggaaagctatttaacttccctgtgcctatgctttctcatctgtaaaatggaaagtataatcattatat

SEQ ID NO: 419424 - DNA, 450 bp, Homo sapiens
atataacacaaattgccattagacatgcaaatgcaaattaaaacaaaatattaaatggaaaacaattaggaagatttataatacttcttgttaggaagggttaaagaagataaaaattcaatttatagagatggttgtgtaaaatgtttcgtgctttccagtgggcaatctggtaatgtattccaaaatttaagtttgaatataatttgatccacttctgaaagtttatcttaggctaagaatagtgcaagtgtacaaaaatgtatatcccactatgtatgctccatgttgcttataatgaaaaaattctggaaacagcctaaatgtcaatgaataatgaatagattaaataaattggagtatgagtatatgtgtacagtgggggaaaattgcatatattccaaaggaaaaggaatttttttacwttttaaaatgggaatggatatatga

SEQ ID NO: 419425 - DNA, 479 bp, Homo sapiens
ggagtgtattggagaagaggaagctttggtcccttcatctacttacaggagtactagtctcatcttggaggccccaccctcataggtaaaggccccacttccaaataccattacctttgggattagggcttcaacatatgaatttggggagaacaaaaccattcggttcagagcagttgaagactccaatacctgcaaactgttccaattcctgaattgacattgtgagtctactgcttcttgtggtaggaaacagatgtcacttgctcaacatttttatgtaatgtgcagggtwtttagttgtacctagtagaagaagtagaagcaaacgtatctccttcaacttagaagcaaaagtccatattgtttcttttttttaatcaatgcattcttatttagaataaacatttttgagaatggatgtgttcatttacatttaagtagagacaatattttcctcatggcagatctggttctgt

SEQ ID NO: 419426 - DNA, 588 bp, Homo sapiens
tctaaatcagaaagacatattgtcactatcttgaattgaccttagtatcagtctactggaaaaataaaagggaaacaaattaagaataataaaataaaaatacaactccaaaggaatttcaccttcattgactaatacctataaaatagaacctatacatatgtattgtcgtttgaattcacatgactataaaggaaggtaagatttcttctcaacaatttatgaattagaatgctgattcagagtgttacataatttacctgaggtcacatagctaggaaatagcacagggcaattcaaagccaggtctgtcaggctccaaactctatttctctgtagtatatgacattgctctttctaaatacatggccttcacggatggagctctcaagtgaactgagctaaytgaagattcaatgacttgcataaactatttcctcctcatcatctgattatgtatttaaaggacatcttgcgtgccctccaaaccccactctttctgtaaggtcccctttaatttgcattttcttgtgaagcctgcatctgtgccattgcagtgattatatactctccttaacacagatagaa

SEQ ID NO: 419427 - DNA, 481 bp, Homo sapiens
ctccccagccatgctgcactgtgagtcaattaaacctctttccttcataaattacccagtctkgggtatgtctttattagcagcatgagaacacactaatatagaaaaactgttctttggtaggatagatataaaagatagaaggactgataaagaagctatcttaatagttccactgggaaacatctaaacaagttcagtggttgcagggacagaaaacagggaaaggatatgagaaataaataaataaataaataaataaataaataaatggacagaccttgggcttgattgtatatgaaatcaaagaaggcaggaaaaacttacattcgtattatgtgtactattttataactattatatgtattatttttaagccaatatgctcacctagcaatataattgtgagcataaataaaagacttaaaacacttgcacaaaatcatttaataactgaataatataccatcacagaaattag

SEQ ID NO: 419428 - DNA, 449 bp, Homo sapiens
ctgattttaatattaaatggctatagtggaatacagcattaggaatttataagttcaagktgagaaactattccaaaatatagacaaaaaaaaaaaaagaaagacggggtttaagacacagagacacagaagctcaatccaggaaatccagtgtttatcaaataaaagaaatgaagaggcaataaaggaaagaagaaagtggctatggatgtagatcccaatggcaaaaaatcagaaggatggcaccatctcagcagcagcagagaagtgactataaacttcacctgccttctggaaaaagtgattgtttattggaatatgaggagaaaaagatgacgaaaaaaggaaaagcaaaagaaattaacctagctatttctaaggatttcgaaactaaaatgttaaatattatttaccaaataaggcagcagcaaatatataagattaaaaac

SEQ ID NO: 419429 - DNA, 582 bp, Homo sapiens
tttatcattatcaagtgtttaaccatcatttgtcatttctttgtgttaggaacatttcagttccactcttcgttattttaacatatacaaaaaaaawttttgactgtagtcacctcgttctgttctgctatcaaatagtagatcttatgctatctaagaatgtttttgcactcattaactgtctccatattttctcctcttccctgctacccttccttgctggcctctgttaacaatcattctactctagctattcatgagttcaattgttttcattgttagttcgcatctataagtgagaacctgtgaaattcgtctttctgttcctggcttatttcacttaatataatgtcctccagttccatccacgttgttgcaaatgacaggatttcatgctttcttaaagctgaatactatttcactctgtatatgtgccatatctttattcattcatctgttgagaaacacttaggttgatttcaaatcttggctactgtgaatagttctgcaataaacatgggggtgcagatatttcttcaatatactgatttcctttcttttaaatttatacctagcagtggg

SEQ ID NO: 419430 - DNA, 620 bp, Homo sapiens
tgctgcttttaggatattttctttattccagaactttgaaagtttgaaatctgcttggtgttctatgacstttttgtacttaattattggcatctttctctaggttttgatcattttctgttattattttattaaacaaactttctactctgatctctctctctctctctacctcctcattagggccaataactcttagatttgccatttggaaactattttctaagtcttgtagatgtgctttattattttttatctcatgtttttctcctctgattatgtactttttatatagcttgtcatcaagatcactaattattttattgtttgatcagttctgctgttgagagacttcgatgtatttttcattttgtcaaatgattttttagctccattcctgcttgattttaaaaattattttattaatctctttgttaaatttctctgataggactctgaattcctttcttgtttttttttttcattattttaacttttattttaaggtcaggggtacaaatgcaggtttattacataggtaaacttctgccatgggttatcttgaattttgttgagcttcctcaaaacagttatttttaattctctgtctgaaaggtcac

SEQ ID NO: 419431 - DNA, 474 bp, Homo sapiens
ttctggttcttgtcatgcttacaagtagtgtcatgacatcagaagtcatttccttgcatttttttttctactgatacaaaaggttttattgagcaattgaagatagtacctctagctagccctatttagaatacaatcatctcaattctttcattgagaaggtaatttgctttggaatgatgtactatagtactatcagacatggtagaagaaaaattaaggtcatccaaagcattttagaattccagtaagcagcatctttaaagggtctgtgggactgtaggtataatttgtgcaggaaatggtcctaaatggtaagcaaatccatctcttaatgttacaggagtgctagaatatctaaaatacttcamgataaattatttaactaaacacagagtcattttgatctttaattactttggaattctaggattttagataattttattaaaatactctctataaagatttatg

SEQ ID NO: 419432 - DNA, 530 bp, Homo sapiens
tgaatgcttggagaaaatgttattatcaatttactttcctgtcatcattttaaactgacatgttttacatgactcttttgggcagtggttgattttttattttaactagggttgcatatggttggggaattcccatctcaccttgcaacatacacaataaatatatctgattcatttctatgtaattaaaaaaagtaaacatgaagtcattacttcagcctacagactaggcaaatttcaaaattgagcagtaggagtcttattacaaacatttataggtttgaagaaagaaaaccagaatcagaagataaccacagagtatcttccgagtactaaaaaaaacttatgccaagataataattgcagtattatattattgaatattaaaatarctggataataatctgtatacatatttagtttaagcagatattggcaaacagtttttcaaaattgctataccaatttatcctcccacaacaatcatgagagtaccagttgctctatacattcaccaaatctttggattt

SEQ ID NO: 419433 - DNA, 568 bp, Homo sapiens
agcagtttaaaaagacaaagagggacactatataattatcaaaggtcttgtccaacaggaaaatatcataatactataaatatatatgcatctaacactggagttcccaaatttataaaacaattactactagaccttagaaatgagatagacaacaacacgataatagtaggggacttcaatactccactgacagcactaaacaggtcatcaagacagaaagtcaacaaagaaacaatggatttaaactataatctagaacaaatgaacttaacaggtatttccagaacattctatgcwacaactgcagaatatacacttctcttcatcagcagatgcaactttctccaagatagaccatatgataggccacaaaacaagtctcaataaatttaagaaaattgatattatatcaagtactctctcagaccacagtggaataaaattggaaatcaactccaaaaggagccttcaaaccaatcaagtacatggaaattaaaaacctactcttgaatgaccattgggtcaacaatgacatcaaaatgaaaatttaaaaattatttgaact

SEQ ID NO: 419434 - DNA, 560 bp, Homo sapiens
ttggcacatggtcagccacagtaaaataaagcaccactcagactcctaaatgccctacttccaggctttagctcctggagagtgtttttaggcccaccttgggccagaaggaagcctgttaccctgaaaaaacagactgagtcctggaagaagtcaccactttatgactaaagagcccttgggtcttgaataaacaccagtgatatccaggctacagtcaccacaaatctgggtcagttatggccgtgggcagagattctgcttcaggaaaggacagggataagtaaagaggattctgtcttgcaacctgagtattagctcaaccccagtaaaagaaagcaccaagccaattcstaaagtccctgataccagtccctagctcatggagggcatttttagacccaccttgggccagaagggaacctgctgcactgaaggaaaagacttagtcctggcaggattcatcacccgctgacagaggccttgggccttgaacaaactcagcagtatccaaggaatagtcacaacaggccttaggcaagaaccagcttgtttcaggt

SEQ ID NO: 419435 - DNA, 590 bp, Homo sapiens
tttggggaaaagtaaggaaagaaaacaagagactctcccatgtaatccatggaattctcctggatcttacccaagaccaccaaggtggtacatmtacaagtctgcaagagtcttagagttgctgggcatagggtgctgcctaatgcccatatggctgcagtgaccaaagacttagaacacaacactcaattccctttcaatacatggaaaaccttctcaagtaggacaggtatagacaagcctagactgcaaatattagaataaatacctagttcttctaaaagagacaacagtgaccaatttcagagtgacaagaaatgtgacctttcagcattcaaaatagctgttttgaggaagctcagtgatatccaagaaaacacaggagaaggaattcaaaatcttatataaatttaacaaagccattgaaataactaaaaagaatcaagcagaaattctggagctgctcttcaaaattctgctgctctgtaaaaattcaattgacaaattgaagaatgcaacagagtctctcaacagcataatttatcaaacagaagaaagaatgagtgagtttgaagatagactatttgaaa

SEQ ID NO: 419436 - DNA, 460 bp, Homo sapiens
aaactgatttttaccctggggtatctgaatactattttgaatactcttaactttccttatgtgtaatttacatgttattaactgtaaatgagacccaaattaaaaacttttaacaacaaactcttctatccttattttaacaaaaattgagaagtgactgctctccattgttttttaatgaagacaatataaggttttggagagtcatacataattcttctaccaaaatccaatttktatggcagaaaaattacaatattataaaagtagggacatgttctctttattaactattttaacaggagttcttacatttgagacaatcaggaaagtgtcagaataagctaatatgtgttatgtgtgctcagtagatagtaatttatgatcataatcctgtcagtctcattttatttactagtcaaggacccctttggcctaatcactaacaaaagtgtcccag

SEQ ID NO: 419437 - DNA, 554 bp, Homo sapiens
agctttaagaggtgataagatcactgtgttagctaagatcatttatatactataacaagcaaattgaggaatttcagtgaattcatacacaattgtatttttgtttttgctgaagtagaggtaagcaaccttttttaaaaaaatgaccagagaatcaatattttagcgttttggggcaatagagtctttgtcayaactactctgccattttaactcaaaggctgccgtggaaaggtttgtatgttccatcaaattttgacttgtaaaaaacagggtagatgacaggctttggtcccagcttactgtgacaacagttggctgccaacacttaatcatctaaaacaccagtctatctattggaagtgtgtaggctgcctgtgtgctcatgaggaagaggaaactgttttggtgaatggctagctcaactcgcttcagccattatcataacaacatcttaatttttacattatttctatagttctaaaaacttgcttacagtatatgtgtgtttcactataaacttacaaattagataatttggatcttttttagaa

SEQ ID NO: 419438 - DNA, 554 bp, Homo sapiens
agctttaagaggtgataagatcactgtgttagctaagatcatttatatactataacaagcaaattgaggaatttcagtgaattcatacacaattgtatttttgtttttgctgaagtagaggtaagcaaccttttttaaaaaaatgaccagagaatcaatattttagcgttttggggcaatagagtctttgtcataactactctgccattttaactcaaaggctgccgtggaaaggtttgtatgttccatcaaattttgacttgtaaaaaacagggtagatgacaggctttggtcccagcttactgtgacaacagttggctgccaacacttaatcatctaaaacaccagtctatctaytggaagtgtgtaggctgcctgtgtgctcatgaggaagaggaaactgttttggtgaatggctagctcaactcgcttcagccattatcataacaacatcttaatttttacattatttctatagttctaaaaacttgcttacagtatatgtgtgtttcactataaacttacaaattagataatttggatcttttttagaa

SEQ ID NO: 419439 - DNA, 601 bp, Homo sapiens
taccccatttaccgtggtgtgattacacattttatgcttgtatcaaaatatttyataaatatatacacttacctcatcaatatatacaccaaaatatcccgtaaatatatacatctaccatgtacccataaagattttaaaaactaattatataaataaatatctcaaatataacttgtgtaaaactgtactcttgaacttctcactttaagatctactcctcctaccttcttggtaattcagtctcccccgcttctcccctccactttttctcttttctcttctcttctcttccatcctgtctcatcccattgcatctcatcttatgctattctaatcactcccaacaatctatcaactcatcatccagagtgtttctatcagaacagatgtcagatgctattcttcttttgctcaaaggaaagaatgtcatggttgtcctccatgacaacccattgcatttggaataaaagtagtctttaaagttgcctccaaagccctatatgatcttatctcctaatacttttcttaaatcatttcttgctccttttccagtcacttatggcgttcacccatactgctttacttcatcttttgccaa

SEQ ID NO: 419440 - DNA, 601 bp, Homo sapiens
taccccatttaccgtggtgtgattacacattttatgcttgtatcaaaatattttataaatatatacacttacctcatcaatatatacaccaaaatatcccrtaaatatatacatctaccatgtacccataaagattttaaaaactaattatataaataaatatctcaaatataacttgtgtaaaactgtactcttgaacttctcactttaagatctactcctcctaccttcttggtaattcagtctcccccgcttctcccctccactttttctcttttctcttctcttctcttccatcctgtctcatcccattgcatctcatcttatgctattctaatcactcccaacaatctatcaactcatcatccagagtgtttctatcagaacagatgtcagatgctattcttcttttgctcaaaggaaagaatgtcatggttgtcctccatgacaacccattgcatttggaataaaagtagtctttaaagttgcctccaaagccctatatgatcttatctcctaatacttttcttaaatcatttcttgctccttttccagtcacttatggcgttcacccatactgctttacttcatcttttgccaa

SEQ ID NO: 419441 - DNA, 591 bp, Homo sapiens
tcatagcaccatttactgatgatattgtgcttttcccagtgtaatatgctcttgacacctttgttgaaaatggttcactatagatgtatggaattgttttggcaaatctgttctagaccgtatctgttccattggtctgtgtgtctatttttatgccagtaccaacctactgcatacaatcttggtaggttgtatgtgtctagaaattaatccatttcttgtatgttttcaaattcattggcttactgttgcttatagtagcctctrataatcctttgaatttcagaagtattggttgtaatgtctttttcatctctgattttatttatttggctcttctttatttatttatttttagttaatatggctaagatttgtcagttttgtttatatatccaaaaaaacttttcattttgtagtcttcggtattttttgtttcaatttcatttatttctatgctgatctttatttctttgttctactaactttggctttggtttgctcttttcttgtactttaaggtgcattatcaggttatatatttgaagtttttctgcttttctgatgttggcatttataaacttcctcctt

SEQ ID NO: 419442 - DNA, 591 bp, Homo sapiens
tcatagcaccatttactgatgatattgtgcttttcccagtgtaatatgctcttgacacctttgttgaaaatggttcactatagatgtatggaattgttttggcaaatctgttctagaccgtatctgttccattggtctgtgtgtctatttttatgccagtaccaacctactgcatacaatcttggtaggttgtatgtgtctagaaattaatccatttcttgtatgttttcaaattcattggcttactgttgcttatagtagcctctgataatcctttgaatttcagaagtattggttgtaatgtctttttcatctctgattttatttatttggctcttctttatttatttatttttagttaatatggctaagatttgtcagttttgtttatatatccaaaaaaacttttcattttgtrgtcttcggtattttttgtttcaatttcatttatttctatgctgatctttatttctttgttctactaactttggctttggtttgctcttttcttgtactttaaggtgcattatcaggttatatatttgaagtttttctgcttttctgatgttggcatttataaacttcctcctt

SEQ ID NO: 419443 - DNA, 421 bp, Homo sapiens
gcgatatttctcccatttgcttttgaaagaagagaaatatggctctgttccacctggctcaccagcggtcagagtgtaaggttatctctcttgttccctcaacactgctgttaccctggtcttttttcaasgtgtccagatttcatattgttcaaacacacatgctgtacaatttgtacagttaatgcaattattacagggtcctgaggtgacatacatcctcctcagctgacaagattaagagactaaagtaaagacaggcataggaaatcacaagggtattgattggggaagtgataagtgtccatgaaatctttacaattcatgtttagagactgcagtaaagacaggcataagaaattataaaagtattaatttggggaactaataaatgtccatgaaatcttcacaatccacgttc

SEQ ID NO: 419444 - DNA, 421 bp, Homo sapiens
gcgatatttctcccatttgcttttgaaagaagagaaatatggctctgttccacctggctcaccagcggtcagagtgtaaggttatctctcttgttccctcaacactgctgttaccctggtcttttttcaaggtgtccagatttcatattgttcaaacacacatgctgtacaatttgtacagttaatgcaattattacagggtcctgaggtgacatacatcctcctcagctgacargattaagagactaaagtaaagacaggcataggaaatcacaagggtattgattggggaagtgataagtgtccatgaaatctttacaattcatgtttagagactgcagtaaagacaggcataagaaattataaaagtattaatttggggaactaataaatgtccatgaaatcttcacaatccacgttc

SEQ ID NO: 419445 - DNA, 421 bp, Homo sapiens
gcgatatttctcccatttgcttttgaaagaagagaaatatggctctgttccacctggctcaccagcggtcagagtgtaaggttatctctcttgttccctcaacactgctgttaccctggtcttttttcaaggtgtccagatttcatattgttcaaacacacatgctgtacaatttgtacagttaatgcaattattacagggtcctgaggtgacatacatcctcctcagctgacaagattaagagactaaagtaaagwcaggcataggaaatcacaagggtattgattggggaagtgataagtgtccatgaaatctttacaattcatgtttagagactgcagtaaagacaggcataagaaattataaaagtattaatttggggaactaataaatgtccatgaaatcttcacaatccacgttc

SEQ ID NO: 419446 - DNA, 560 bp, Homo sapiens
gagagcattttctaggaagtgttcagattcagccatgtctccttctcctcagaagcaaatggaaggacttttcagagagatcacagaaaatactagcataatctcctggtgccatacagggaagtgtgcctgggggaggtgagtaacaacagggtgggtgccttgaaaatgttcattggatggaggcagagcaagatggccaaatggaagcttctactgactgtcctccttgcaaaaataccaaatggaacaactttctgtaccaaaaagcaccttcatgagaaccaaaaatcaggtaagtgatcacagtacctggttttaacttcctatctttgaaagaggaactgaagaggataggaaaggcagtgtggaattgccagtacttcccctctctcctgtcccctagcagcagatgcaggatatggacagagaatctgtgagcttggggaaaagacagcacattgaatgtgggactttgcatgggcaggctgtgctcccagcactgagcagarctcatctggtgcctataaagggagcatttagataagctctagacagag

SEQ ID NO: 419447 - DNA, 581 bp, Homo sapiens
gggaatgactttgtcttatggtttcagtattagctcagtcgcagtagaatagagcatcaggtagatttctgagattccaacttcaaaccatggcttctggatggcatctctggacctgcctggggcccaaggaaacttgttgcccgaagggaagaaaagaagtctggttggcttcataacctgctgattatggagccttagggctytgagcaaacataggtggtagtcaagtggtggttacagtgcaccttgggtgagactcagtgctgtgctggctttaggtctgatccagcacaatcccaatggtggtggccacagggttgcttcttacacgacttccccagctccagacagctcagcagagagaggagactctgtttcctctctgtttggaagaacgtaagggaagataacaagagtttctgtctggtaatccagagaattcttctggatcttatccaagatcaccaagacagtacctcaaccagtctgtaagaatcacagctttacagggcctggggtgccacctaatgcagataacagctgtagtgaccaagaacttgtatgataaaagacaagtt

SEQ ID NO: 419448 - DNA, 581 bp, Homo sapiens
gggaatgactttgtcttatggtttcagtattagctcagtcgcagtagaatagagcatcaggtagatttctgagattccaacttcaaaccatggcttctggatggcatctctggacctgcctggggcccaaggaaacttgttgcccgaagggaagaaaagaagtctggttggcttcataacctgctgattatggagccttagggctctgagcaaacataggtggtagtcaagtggtggttacagtgcaccttgggtgagactcagtgctgtgctggctttaggtctgatccagcacaatcccaatggtggtggccacagggttgcttcttacaygacttccccagctccagacagctcagcagagagaggagactctgtttcctctctgtttggaagaacgtaagggaagataacaagagtttctgtctggtaatccagagaattcttctggatcttatccaagatcaccaagacagtacctcaaccagtctgtaagaatcacagctttacagggcctggggtgccacctaatgcagataacagctgtagtgaccaagaacttgtatgataaaagacaagtt

SEQ ID NO: 419449 - DNA, 575 bp, Homo sapiens
taagtttttcatctatatttttaaatggctttcaaaatgattataaccgcttttagaatacaatcaagtcatgggaatgtcagttttattgaactattatcagcattaggtagtgcattttttccttaattttgctagtgaaacaagtggaaaatgataactcatagctatgacaatttttatttttgattaggaggtagaacacttctctgtatgttttattagaatttcctctttatgcaacttatactaccgaactttacacatgcatgaatggtaacacagaagaattattatttttaagagttttataatctcttatgtttagtacataacaactatcagattttgattrttgataaattttttattaatttttaattttgcataagccatttttgccaaaattaaagtattaattttgtcatatacatcggtgctattttattattccttccatattacagataaacgcaaactatatttaccctagggctttgttgttgttgttttgggttttttgaattaaaatttaattcaatctgacaggtatttttggtgcataatatagagtt

SEQ ID NO: 419450 - DNA, 583 bp, Homo sapiens
ttgactgaactattttgtttttattgcatttattctctgttatcttgttgataatattgtggtttattattattttatttcttatcccagagattacaatatctttcctctacttattagagtccattgcagattgctaattttaccatatattggaaaattccagaacctttcaacactttgattttgctcatgtytcacttgttttacgtcatttattacaattctacatttgtttaaaccccaaaatacattgttgtcattttaaagttattattttttagttttactacacattcaccattttgatgattagttccttactgtactaacctgcttttatctgagatcattttccctcactctagagattgtccttaatatttattgagcatgggtctgcaggtggcaaattctttcacttttctttgcccaaaaatatcttaaagttacttttatttttgaaggatgttttcaatagatacacaatctattttggcaggtatttctatttctcaatttgtaagtattattccataaaatttggcttccaatttttctgttgaaaagtcagctttcacat

SEQ ID NO: 419451 - DNA, 506 bp, Homo sapiens
ggaccactcatggagctgttcagattttcatacaaaaagaggttgtttttttttctggcaatattatctgtcacaattatcccttcacttagtagttagaagtcggggggtgctaagagcaatttccacagatgctttgtttgtggagaaaagtaggatggcccctctgcttgtcttagtgcagagcaaggaatggcttcgaagccatwccttgagtactgaggtctctgtgtagtcttacttcttttctgaatttttcagagtcttctgatagttgcttgatatattttgtctatggttttcagttctatgtagtagaaagaatagagtatctccccccagtcctctaagtagaaataaaaattaatataaaaaattaagtaatgtgcttattacttgatcttgcctcaaaccagatatgcagtctgtatgaaatttaatcattcttattttaatgtgattataatgctgtattctagcatacaattatagcagtttttttgata

SEQ ID NO: 419452 - DNA, 506 bp, Homo sapiens
ggaccactcatggagctgttcagattttcatacaaaaagaggttgtttttttttctggcaatattatctgtcacaattatcccttcacttagtagttagaagtcggggggtgctaagagcaatttccacagatgctttgtttgtggagaaaagtaggatggcccctctgcttgtcttagtgcagagcaaggaatggcttcgaagccattccttgagtactgaggtctctgtgtagtcttacttcttttctgaatttttcagagtcttctgatagttgcttgatatattttgtctatggttttcagttctatgtagtagaaagaatagagtatctccccccagtcctctaagtagaaataaaaattaatataaaaaattaagtaatgkgcttattacttgatcttgcctcaaaccagatatgcagtctgtatgaaatttaatcattcttattttaatgtgattataatgctgtattctagcatacaattatagcagtttttttgata

SEQ ID NO: 419453 - DNA, 644 bp, Homo sapiens
acaatttacagtaactttatagtgtttacacagtctgaatcttttgagttacattttcataagttaaccgaatactcagtgaataacttggttgggttaatctcttccttaaattttaaaatatctttagcgctttacataagatatattttttagaatttcagaatagaaagaaatcacaattaagtataaatatacttttagtgccttttagataaagacatgggtaaattattaagtatttataatattactatctcttatgcactagatctttaaacaatctgaaatattaataaagaccattaattgttattactattaagtaacgtttctacagttcatctagaggaatttttttcagaaaatgaattcagtgaaacattggtcttatagtatattgwggcatatgttgaaataaatttgggctaattttttgcattgattctgccaactatcctctgaaacttacctatatcttattcttagttccctccttattcagcttaaattgtgtattttatcatttgtcttagtgtgtttgaactgctattacaaaatatcataaactgggtagattttaaatagcagaaatgtatttatctcagttctgaaggctgggaagtccaaaattagaacaccag

SEQ ID NO: 419454 - DNA, 631 bp, Homo sapiens
aatgcaattctcctacttcaggcctgcacccctacaggtgaacatacttaatatgtttgttcagacttccatactggcttgttttattttaaattcattagcatcagcctccagtgagttcttaatgctacaaaataatcatattatgtttccctgacttataccttctctcaacccactggatgattctttcatactttcccttaaggtttaatagctttctctcatctgtattctcaggagataactctgactataaaagtagaagcgatcaacatgaactttcaaaaactccctctgtgatatctccctagctgcctggatctgtagtcatatgctctgccatcactcctttacctctggataaacatctgttctctttgcagtggccttcccttccacttatacctttgctctgtcctctttttagtcccattccatcctgtaacagttccttccrttctctcctgatacatcatttttcattctctactgggtatttctcatcaatatgaaaatacactattcttttatcttaaaaatattctcttcacttcatttttctctctacttcaaccccacctattccttttccccttatagaaaaacactttgaaagagctttctttct

SEQ ID NO: 419455 - DNA, 531 bp, Homo sapiens
cattggacgttgggtacatatgacctagtgagataccagctgggttggctaaggggatacttgcatcacccttctcccaactttaggcagtgcagcttgcaactgtgggagaagacggaagagtaaagaggactttgtcttgcaacttggattccagcttagccacagtaaaaatgaagcagcaagcagagtcctgaagtccccattccaggccatagctcccagatgatgtttttagacccacccagggccacaaaggattccaatggcctgaagagaaggacccagttctggcagaatttacaacctgctggctwaagaatccttgagccttgaataaacatcagcagtagccaggcagcagtcgccatgggccttgggaaagacccaatattatgctggcttcaggtgtgacccaggacactcccagctgtggtgaccataagaagagactccttctgtttgaggaaaagagagggaagggtcttacaactttggcacatggtcagccacagtaaaataaagcaccac

SEQ ID NO: 419456 - DNA, 485 bp, Homo sapiens
aagacttggcatactgcttctgaaaagttgctagttctaggtctaggagcagtttcctttgatagatggacattgaaagcccttcgaggggcaatgagaagaacggggcattcctgcttcagcctcaaccattagctcccctgtgaggcctcttgactccccagcagagggaggctccctttgtccatattcccacaatctgccctgttatagcacttgtcatgggctgctctgagcacttacgtgcctctaccacttgcctgggcaggctttaaggacagggaccatacaagttactatttgagtgtcttagatattaacacaatgtctagcacacagtaggtatccaatcaatgtttacttagctgaacttagtttgtaaagcagataattaagagtgkgatagagttgtttccaaatatttgaaagacttggaggaaaaaggcactggctgtaatttatgtcactttagcagaaaggaccca

SEQ ID NO: 419457 - DNA, 508 bp, Homo sapiens
ttacataatttattgacaaataatctcaaaaccagtgtactacaagaagagtgagctgcattcttgagttacatgagaaaataatgcaattaaagatttctgggttataacggccgattgaaaaaaatgtgtctagcatttcctcctcctaaaccaagccagactacagttaagagatttcttagaaagacggaagtcttcaaggatggggaaaatagaaaaggagacagggatgacaacaacaaaagtctgcagggctgacggatgctgtcctaaagagtcaaaattggacctaaagagtcaaatctaaagtcagtatcagagaagctgaaaaccaacttgtggaatccccaaaaggctcatgaactggcaccagcaggtccmtttggatctggttgttaagcagaagaaagggaaataaaacagggatttggtggaagttatttaagatggatctagattcctacatcaccttggccactgcatatcactgagggattcctctctc

SEQ ID NO: 419458 - DNA, 537 bp, Homo sapiens
aatatagcatagatgcaaaatggaaaatgacagaacttgctcaaaataccatagatccacatgaacactggtgttgggagaaaatgatatctatgtcagggactgtatccctgggtcggagataccacacaggttattattctacacaggggctatgatttggctggtgttctcatgcattgtggaagatgaggcattttataatgtaacttactatccccaaaataagttagatattattgccccaatcctatagatcaggaaactgaggttcaaaaacctgtagataactgatccaaggccacattgccagtractggcagagctgggcttcaaacccagattccactcccaagccaccacacaggagagggtcttcgtgatattaggttcacataccaaggatgtggggaggccatatctgaatcaaacccttttaggcccaaagcctaatttcttgccatgacactaaatctctgtagacaagcaccaagaccagcaacaggcgggggtgaagaagctgtcacggaggtgacg

SEQ ID NO: 419459 - DNA, 549 bp, Homo sapiens
aacataacaagaggattcatagtgcataactgaacttgccgtaaaggaagcttcatcccatggggccagaaaataagcgggacctgaaagctaaaatagaaatatatgagccgatgatgtcattgcctggcttgagggttccggctcaacaatctagaagctatgtctcagcacaagacatgagaacttgggtcctccaaagtcagggagctggaagtaaaacctctgactacaatcactagggaaaaaaatttttaaaaatctactcaccaatataggaagatgacaaggaagtggtgtgtcccagcctgagctctaggtggaaaaagagtccccaaataagtgataacrccaaatctgtgcctagggtgggttttctgatttgaatacacgttatctcagtggtacagaagtctcaaaactgggaaagttaatataaaaattagtctcatagtgataatagctttgagtgtctgacagaagcaaacacaaaggcctctgggggaatgctcccataccaggccaaaaaggattttcctattttttaaa

SEQ ID NO: 419460 - DNA, 544 bp, Homo sapiens
tgcctggcttgagggttccggctcaacaatctagaagctatgtctcagcacaagacatgagaacttgggtcctccaaagtcagggagctggaagtaaaacctctgactacaatcactagggaaaaaaatttttaaaaatctactcaccaatataggaagatgacaaggaagtggtgtgtcccagcctgagctctaggtggaaaaagagtccccaaataagtgataacaccaaatctgtgcctagggtgggttttctgatttgaatacacgttatctcagtggtacagaagtctcaaaactgggaaagttaatataaaaattagtctcatagtgataatagctttgagtgtctgacagaagcaaacacaaaggcctctgggggaatgctcccataccaggccaaaaaggattttcctattttttaaaaaacctttctaaagatgtcayaattttaaaaaatcacaaaatacatgaaaaaatgatttactttgagtaagtgagggaaaaaaaacccataggagaattagagccccacaaacttaaa

SEQ ID NO: 419461 - DNA, 529 bp, Homo sapiens
cttgtccttagggccacattgttccaatgaccatagatcataatattttcaatattgaatatatcactgtttattccttcactgttttgtttttgttttggaaatggagtctcactctgctgcccaggctggagtgcagtggggctggcacgatctcagctcactgcaacctccacctcccaggttcaagtgattctcctgcctcagcctctccagtagctaggattacagggacgtgccaccacgtctggctaatttttgtatttttttagtagaggcagtgtttcaccatgttggccaggctggtctcgaactcctgacctcaactgatctgcccgcctcagcctcccaaagtcctgggattacaggagtgagtcatctcacctggtctattcctttactgttgaatgactacccattaagattttaacttaaaaaatttaaataattgacrtcatttattataaatgtagggttagtttttaaaactagaattaatgaatcagaggaaatatatttgaggttccag

SEQ ID NO: 419462 - DNA, 529 bp, Homo sapiens
tagaattgccctgagttcacagattggtcatcgaggtcaaagaaatcaagtgacttctggaggccacacagctaataaacagcaaggcaaygacttgaacccaggtcttctggttccaggtccagagctcttttctctatattctaaacacttgcaagcaggggaaatgttatcagtcccctacactctccagtgactattctgtgtctttcctagggttttaggtgagctcaatttgatagaggtatacaacataaagtataactcaagacttcacactaaggctgacatgatttaatgcaaggatctcatgcagaaaacagcatcttcaatgtactttcttctcccaacactaccacccattctttcctccagtgtcttttgggattttagcttcctctacacttttaggataatccattatagcaggaatgaaagcagagagaccagctagaagaggctagggacaattttatataaccctgtactgagaatgtgggattgttcccttaagaaaaccacagtggct

SEQ ID NO: 419463 - DNA, 544 bp, Homo sapiens
gacccaatgggctggtatcacacagaaagccttcacaactcaggggagcagtgtgtgcaaaggccctgaggtggaaaggagcacagtatgttctaggatctgaaagggagaactcaaagcaagaaggagaaagattctagaagacgctggtgaggcaggctggaggctgaccmggaaagaccttcaggagatgtggaagagtttggagtaatgagaagccattttaagtacaggaatgattccatcgaatttgtgtaagatcagtctggccgctgggtggaggctttctaagatggggttgaagagggatggggaggagtaaggaaggctgtagaatgaccaggagtccacaggaggcaatgtgagaaattgtggcttgaactaggctgagggaagcagaggtgaacagacaatttccaaagatacttagaaagatatgcaaagaagactaggtccttgccctcaagacttactttttctgagcatggaaagacacacagaaagaggaattgtaggctgggcatggtggctcacacctgtaatc

SEQ ID NO: 419464 - DNA, 538 bp, Homo sapiens
ttttctccttccacccaacatgcgaagcatgtacctttggccttcacatgattgaaatgtttgctatctattttcttctgcattcaagttttcagctggttatctacataataattgactttttttctatacagaacctgagggaaaaatacccttcaccatcaaacactgcagcctccacccacccccatcttgctccctacccctaagcagacacaatcctttaaaacacacaacataatcttctttatttaattgtttaatcagtttacattccacaactgacagattatttattttttccatgaacaagtcatttaattaattaccagacacttgtttttcttcaatcratggaaatacaatatttctgccaattcgaaaaagaaaattgcaagatgcagtcagtttcagtgaagtccccaaatgctctctgcttcctcagtcctttcaaagtcacaggaacctggcaatttcccttttcatcccccctcccacttccctgttaaatttacctctcagaacatcacaatagttt

SEQ ID NO: 419465 - DNA, 577 bp, Homo sapiens
ctggttacaatggagaggtagaaagcaaagcctgctgggagggaatgaagagaaaaataggtgggtgagaaagaagaaacagtcaacatagctttatcaaggagatgtgctataaagggctggagatgatgtagctctagaggacatcttttaaaaaacaattgtagatacaagagcatatttgtgtgcctatgggaatgatgggataaaaaaaaaggtgatgatgtgaaagagagcaataatagaagtagcaaaccaggatccagggtaaaactgagtcacaagaaaagtgtacacaaaggagtcacrtggagacacacaggagaatgaaataagggataagaatgagaccaagaggaaatactagatgaatagattctagcagtggaattgagggtagcaaatgctcaaaagataaagaggattctcttgagggccacctcagatagactggtagtggatgcctggggctgtatgttgaggagacgagtgaagctttgtccaggctccatgggagaaagtgcagtgatcagtgatgcatcccccagtattctgacctgaatcgtttatggagcct

SEQ ID NO: 419466 - DNA, 566 bp, Homo sapiens
ttggattttttccagaacattttttgagtcggtcttctgcaatggtattgttctagtttgttctttgaaactcagctttcaagttctgtgtgtgcattcaatattgggcaattttgaacgcatacttagaagagcggccaaaatgtagattagagagagaaggtcaaacaacttctcatcctgtgcaatttctgcaatcctaagcctgttataacacagagtgttccaggacctcccacagatccatgaaatgtattctctgggttatggtctgcatgtgatttgctgttccttgatgtcaagcttgctgttcatctgaccctcaagatccagtcagagtcttcagtcacactcaccctctaatttttttgtrtgtgtgtcaccaagtttttgtcttctgtaattcagttcacactaaaaaaaaaaaaactttttatttcccccctatatccctaaagtggttcttcctctttccctcccctcttcttccctctgtctctctgatttctcagtttgatcctgatgtgaataacatactacccttagtcttacatttctaattttta

SEQ ID NO: 419467 - DNA, 577 bp, Homo sapiens
ggatttcaattcaagatgtgattttggtgaggacacagagccaaaccatatcattagcctaagctctttagttttgaaggttttctatgtcttctagcttctcttaaaaacgattttcctcattctatttgaagaagtccagagatgtgatcatcttccttgtaggtcatcgctatatcttattagctaacatatagccaagccagtatttatcttctgtatttgagtaccttctgtattgtggcctattctcattggaacatgaaattttagtttattctttgaaattcctggcacctagaaaattatcttacaaatgggtcagtcatggtggctcacacctgtaatcccagcactttgggaggctgaggtgggtgaatcacgaggtcgggtgttcaagacgagcctggccaacatggtgaaaccccgtctctactaaaaatgcaaaaaattagctgggcatagtgccrggtgcctgtaatcctagctacttgcaaggctgaggcaggagaaacgcttgaacctgggaggtggaggttgcagtgggctgagattacaccactgcactccagccagg

SEQ ID NO: 419468 - DNA, 609 bp, Homo sapiens
ggtatccccctgcttctggaattgttcactggaagttacgagtgtcagagactggacttacctagggtatcctgagacgttggtgataggcaaaaaagatttcatctttttgatgagacttcatgttcttttcttgggtggttgtttagctcttttctggctttggatttcacacactcaaaaaaatatgaatatcttaacactggttccattggtttcacacctccacaatttggattccttgctccaaactgtactttggttttccacagacattcctcatttctrttttactctgtttgttgatctaattaactttgctggaatatattctgtcctatttgtggggaatggagttatttttgccttagttcatggattagaaggaaactgtcacttcatttctggcatccttctctttacccactttcattccgctggagaacgaacttgctaatcagattgttagaagaagattttgattgggaccacgttcgttgtattaaagtctgtgctcagggatggtatacaaccttgccctttctcacttcctgtgtccagggtttgcatgaagcaggcagggcctgccttagctggcttcctcatctc

SEQ ID NO: 419469 - DNA, 605 bp, Homo sapiens
ctttttttttctgtgtagcttctttccttctggcattctaaccggcaattttcagctgccattgtctctttaaacaccattttctgtctcttcagcaacatctccaggcactgtttggattctcctttcttgctcctgcagtttggaggcactgttttaattctcctttcctgctcctgccgtttggaaattgcctgtatccagaaaactagggcaattgtagggctctttattttgtttcccttttctcaaggaccgcagtcttgcgctasgtgttgtcctgtgtccaaaaacaattgttccatgtattttgttgaacattctagttatttaccatagaagattaagtccagggtttgtcactatattatggatgatagtcatttttgtcactttcaaatctgtttattgtaatcagcatatgcttggattatgtgaggaattattataggataactttaaccattgctaatttatcatgaatatggggtctgacttctgtcatcttagcttaagctcttggaggaatatttcttttatttaattcaacaaatactaatgatcattccctatgctcatgcactgttaccagtgttacagatgta

SEQ ID NO: 419470 - DNA, 605 bp, Homo sapiens
ctttttttttctgtgtagcttctttccttctggcattctaaccggcaattttcagctgccattgtctctttaaacaccattttctgtctcttcagcaacatctccaggcactgtttggattctcctttcttgctcctgcagtttggaggcactgttttaattctcctttcctgctcctgccgtttggaaattgcctgtatccagaaaactagggcaattgtagggctctttattttgtttcccttttctcaaggaccgcagtcttgcgctacstgttgtcctgtgtccaaaaacaattgttccatgtattttgttgaacattctagttatttaccatagaagattaagtccagggtttgtcactatattatggatgatagtcatttttgtcactttcaaatctgtttattgtaatcagcatatgcttggattatgtgaggaattattataggataactttaaccattgctaatttatcatgaatatggggtctgacttctgtcatcttagcttaagctcttggaggaatatttcttttatttaattcaacaaatactaatgatcattccctatgctcatgcactgttaccagtgttacagatgta

SEQ ID NO: 419471 - DNA, 636 bp, Homo sapiens
tctccttccaatctgccatctctattagctttgcccatggtgtctttcatcgagcagttctcctatgttttttaatataatcaagtttttaccttatgggttgtgtactggctgttttaagaagggtttttcctacccttaggtaaagaaagttttctcctacattttcttatcttgattttatacttttaccttccataattaggtctttaatcttagagtccaccatgcgcgcactattaagtagggaatcaattccactttccagcatagagtgaaccacttttctgaaaaccatttataaaataatctgcacttttcccatttacttataggacctccttaattttatgttaagattccatatataaatgagtttgtctgcaagctctctgttacgttactcaggttaattttcagttcytggatcagtaccaaaatattttaattatatggatttttagctggtcttaatatctgatatggaaagtctcaattattcacccttccttcagagctgatttatgggatttatttttctatttaaacattgaaatgtatgacattgctcaaaatatccagctagaattttgattaggttgtggtgacattatatattaatttaggaaaaagtca

SEQ ID NO: 419472 - DNA, 596 bp, Homo sapiens
tagccttatgtctacaggaaataatcattatttcctctttggtgctgggtgctacttttttttaacaaatattttatttgcattttttattttttgagacagcatctcactctggttgtagagactggagtgcagtggtgtgatcttggttcactgcagccccaacctcccaggctcaggtgattctcccacctcagcctcctgagtagctgggactataggcgcatgccagcacacccggctaattttttgtatttttagtagagacgaggttttgccgttgttgmccaggctgagctcaaattcctgaactcaagcaatctgcctgcctcagcctcccaaagtgctggtattaagcatgagccaccaggcccaatccgtggctgttacttcattcaaaatacctttattgccactgtatcttccagccatgattgtccttgaaaaccttctatcttggctttattgaaattattcttatttgaatgattttccttttattggcaaggccctcaacaatctagaccaagatgagttcatcaggaaatgaaaggtaacaactaataagacaagtgtcacttctaaaacacgataaa

SEQ ID NO: 419473 - DNA, 596 bp, Homo sapiens
tagccttatgtctacaggaaataatcattatttcctctttggtgctgggtgctacttttttttaacaaatattttatttgcattttttattttttgagacagcatctcactctggttgtagagactggagtgcagtggtgtgatcttggttcactgcagccccaacctcccaggctcaggtgattctcccacctcagcctcctgagtagctgggactataggcgcatgccagcacacccggctaattttttgtatttttagtagagacgaggttttgccgttgttgcccaggctgagctcaaattcctgaactcaagcaatctgcctgcctcagcctcccaaagtgctggtattaagcatgagccaccaggcccaatccgtggctgttamttcattcaaaatacctttattgccactgtatcttccagccatgattgtccttgaaaaccttctatcttggctttattgaaattattcttatttgaatgattttccttttattggcaaggccctcaacaatctagaccaagatgagttcatcaggaaatgaaaggtaacaactaataagacaagtgtcacttctaaaacacgataaa

SEQ ID NO: 419474 - DNA, 406 bp, Homo sapiens
tggagtctattcctggtgaagatactgtgaatattgttgcaatgacaacaaaggctttaggatattacacaaattttgttgataaagcaatgcagggtatgagaagattgactccaattgtaaaagaagttctactcttggtaaaatactatcaaacaacatcacacgctattagggaaatcattagtgaaaagaagtgtcaatcagtatgaaaaatttcattgctgcgttattctaagaaattgccacagccactgaaccttcgggaacaccaccgtgatcagtcagcaaccatcaacatcaaggcaagrctctccaccagtaaaaagattaagactcactgacagtccagatgattgttaacattttttagcaatatatatttttttaattaaggtatatatat

SEQ ID NO: 419475 - DNA, 568 bp, Homo sapiens
attcactcttccatttgctctgttctaccttcatcagagttactggttgtagtgaaagctaccaagagccaaggaggaaaaatattaagcagagaatttgtccaaatattttttaagagacatcaattcataagatatacttttccagcttttaatcatgtattagttactagtagaaaaaataactgtaggaagcaattagctatataggtttataaacatgattgtcaatttggaggtccaaaaaatcctatagccttattctcttatataaatcataggtcagcacattgaagttaagagacagagaaattgagaaagtggtaaatggaacaggtattatcattatgcattactaggaaagagctaattccaaaatgggaatgaaaaattttgttatactgtagccatggttacayagaaggatgtaatcattgcagcaaaatgtgtatcatctttgtgtatcatttatttgctttgtgttatctctactgggttagctaatttctgccccatgtactaaaagttgctggttactctgagtatactaagaacagagtcctgaaaa

SEQ ID NO: 419476 - DNA, 631 bp, Homo sapiens
ttgtgtgaggaattcaattattaaactagatggaaatgctttaatacagcacaatatttcctggaaaaatattatgtagccaacttatggagcctgatataatagaaataacactactaaataacacaagtaaacggaatgaaaagatctaccttactatactcattgacatgtgacctattagaagttacttaaatctctgattcttcatcttttcatttataaaattaaatcatagtagaacatagtttgctatttcatggatttctatgaagctcaaatatagtagtaataaatgtggaagcaactataagttctttctagctcctcaacgccataggttctttctagcttctcgacctggatagaatctatgagacgtgccccttctgaatcgcactttttcaaatcccccaagtgggctgcacctacatgtgctggagccccagactagaccatttctgtaagttgggcttctagattttctgagcagtaaacagagatggccttgagttcaatctatactatgctctgtatatgcagtggggtctgggactggtgcccagcactgagctkgatatgtatgactgttttgtaatccagggagaagtagcatagggcagtagaaaga

SEQ ID NO: 419477 - DNA, 624 bp, Homo sapiens
gtggctcagctatctgtaaaacaagaaaatatgtctctttgtgggatttttccctactcaggctgggatataaccttggttttcagcgggttaatcatctctcataacatggttaactggtagtgcaaaactgttcataatgttctgattttttttttctgtacagttaagaataaagtaatacagttgctacctaatcactgccttgaggactttgctgatgtccgtagcctactaagccgaggcaaactaaggtcatataatttaaaaagcttccatttcccctatgatatctttgagcacagattaactgaaatcattagccaacatttttcactccactgatgagaggcgggatggggttgcacagcactctgtcaacccttacataactattcatactattttggagyagacttggaaacttactaaatatttcttggctgtcagagttactgaggctttgccagaaaccgatccactcatatggtctaaccatctttggggaaggctaatgcatacagtgtggatgtcttgacgtcatccactattctcccgtaattgctatgctgcaaaaccttttgtgtttgagttttgtgaacttttgaaatttgacactgctga

SEQ ID NO: 419478 - DNA, 624 bp, Homo sapiens
gtggctcagctatctgtaaaacaagaaaatatgtctctttgtgggatttttccctactcaggctgggatataaccttggttttcagcgggttaatcatctctcataacatggttaactggtagtgcaaaactgttcataatgttctgattttttttttctgtacagttaagaataaagtaatacagttgctacctaatcactgccttgaggactttgctgatgtccgtagcctactaagccgaggcaaactaaggtcatataatttaaaaagcttccatttcccctatgatatctttgagcacagattaactgaaatcattagccaacatttttcactccactgatgagaggcgggatggggttgcacagcactctgtcaacccttacataactattcatactattttggagcagacttggraacttactaaatatttcttggctgtcagagttactgaggctttgccagaaaccgatccactcatatggtctaaccatctttggggaaggctaatgcatacagtgtggatgtcttgacgtcatccactattctcccgtaattgctatgctgcaaaaccttttgtgtttgagttttgtgaacttttgaaatttgacactgctga

SEQ ID NO: 419479 - DNA, 533 bp, Homo sapiens
tccaagttttaccttgattgttaagggaggataattgcttactgaatgcagtgtccacagcctccagcagccctcttgaagtcatgtactgcaccattaaatgaaagctggtaaatagacaagtctaccccgatgacraatatttgggttcctctatgctttatttaattaactcaaaatagtttgcagatattgtttaattattacgcatttcattcgtcagtgtctttttgtgctttttaaaaatgtgaagccacaaacacttttgttataaattcaaaactttgtgctaagaaactgaactgtaaagaaatctcaggtgttgggacatgacctttcaaaggtaatttgctgcagtgtacagtcttaatctgatccagccatgggagatatgtgatttggtgccctacatttgcagggggtgtaggttagcatagaaatgaacttttgctgtcagaatgtgagtggtttttgcgatttttatttgcttagagtaggggtgaagggtgtcaaagtgggagtgaagaaaatgg

SEQ ID NO: 419480 - DNA, 628 bp, Homo sapiens
ttcaggcaattctctggagcatttagttactggctagagaaacatttttttctttgtagaaatgagaaaaacctttaaagatcatatagccagaacaactgcttcatcatagaaatgtgcaaatgagttcccaggagttaagggctcttggtctctgatatacaacatgtttgtgacagactctgaggtcagagtctgtctctgaaatactgccgtttctttctatcctgagaaaggctgtatctagaaatctctaagacatacaaaggtgaagaaagctgactgcctcacgttcttaagatattactcaagtctcaagtcaatattaatgcacatcaatcacgtgatgacattctatagcacagacaacacaaagaacatgtaggaagcacctgttagtckttctggcacttaaaattaaacatagaagaacagcaccattcttagttgcctagagttattttaagtagagaacattttttttaagatgggtaaataatttattcacatcctcaggctgactgtgaaacctatatcacccttggatgtactggacactttaatagcaacaacagagagaaattggagggaacagagagttctaattgcttctattaggaccacaaca

SEQ ID NO: 419481 - DNA, 628 bp, Homo sapiens
ttcaggcaattctctggagcatttagttactggctagagaaacatttttttctttgtagaaatgagaaaaacctttaaagatcatatagccagaacaactgcttcatcatagaaatgtgcaaatgagttcccaggagttaagggctcttggtctctgatatacaacatgtttgtgacagactctgaggtcagagtctgtctctgaaatactgccgtttctttctatcctgagaaaggctgtatctagaaatctctaagacatacaaaggtgaagaaagctgactgcctcacgttcttaagatattactcaagtctcaagtcaatattaatgcacatcaatcacgtgatgacattctatagcacagacaacacaaagaacatgtaggaagcacctgttagtctttctggcacttaaaattaaacatagaagaacagcaycattcttagttgcctagagttattttaagtagagaacattttttttaagatgggtaaataatttattcacatcctcaggctgactgtgaaacctatatcacccttggatgtactggacactttaatagcaacaacagagagaaattggagggaacagagagttctaattgcttctattaggaccacaaca

SEQ ID NO: 419482 - DNA, 578 bp, Homo sapiens
gtgtcagctaaaacaggtccatgggcaagagatcatattaaaagacccctgaaacttagcattttcaatgacatgataaaatctgatttgagcaaacacaaatacacagggtttcttttttgtcattgttattttattacaaacatgccgtttctctatatttccttatattttactataaaagaatatagctttggcataacactaaaataaagaaaaacccttaagttttgcagtgtttcatttgcaactgaatgctttactataggaaatacaaattctgtttctccgtcttgttttttttccttcgtactctgccctgagatttgcttttgaagattcctaagatagatgttaaggggaagagggagggaggactcatcttytatttagaaggttacagaatgttgttatctttggccacctcacgccagtcttcacctgacatacttttactgagttttgaaaataaaataataaaaataaaatagtgtttaattacattattcaatggtagctagcagagcagttcttttatatttcatgagaatacatatatgtctttaaatactgtctga

SEQ ID NO: 419483 - DNA, 530 bp, Homo sapiens
cgtgtatgtatgaacatctagaatctttttagttttaaagagctggggctctgggatcgagacggaactaaatatagaggatactgaggaattatgagcagaatcgtgggcaagctttcatcatcttcataaataaataacgaaggcaaaggacacaatgcagaagggtcaaggaaagagaagtggtggaaaaatgaaaaataatatgagggaggatgttgcaaagggagacagaaagtttggaacacttatgtttaaaagaatttgagacttagaaagtgactgaaaaaagtacatayaagtctctgcatttacctccttgtttcttggccatggctttcaactctctctctctctctctctctctctctctctctcactctagagactaatttgtaatctcaaattttgaaatgtaaactctgaaatattagcatggattactttcactcttatcttaaccatagcatttaatgccacattttaaatgtcatttgttgtttcataaataaaatggaaaactgtagcaa

SEQ ID NO: 419484 - DNA, 589 bp, Homo sapiens
cttcttggtccttggcaaggtcattactgtgccgtgagtctgttccccaagatgatgtatgtcaaagcataaagagtggtatagccaagaaacaaagaacatggactaacagattctagagtaagtaaccttacttaaacaaacaaaaccctcaaaatatagctttagggtatacatttgatgagttcttatgaagcctgttagagtagacattgtatttttttttcacacaaaaaggacaaattctagccagaagtcaaatataggatttaaccattatttgtagtacaatagaatggaaagtgaatcaaaagtaaatatttactcatagacattggcattataggtagaatattctcaataatatttaaaccatacatttaaatataatttaatttaaatatataatataaataaatataatttaaatcayaactcccagacacatatttagaaaagcaaagttgatcaaccaaatgaagcaaaaatagcaagttatctaactggtgaaattctgcattttttataatgttgtataactcaaacataattttaattttgctgttgttattgttgcttattggattgg

SEQ ID NO: 419485 - DNA, 566 bp, Homo sapiens
ttcttgggaaatacagctcaatgcttcttttaatgtactttgcagaaatcccaaacacagtgcacaaaatagaaataaaatgtcttgttgttactgatggtgaaaataggaaaaaaatacrtggttttctgtcttattttggaaatttaaatataaaatgaaatgaataggctaacacaaatgatttattatttgttttataattgagctattatttatttacaataaaaaaccacaaatatatttttgaatactcattaatttccataagttcatagaagctggctttgtaaactttcccttatcagagaattcatttaaatacagttctgtatataatgaggttttcttccctttgcttccgcctgaatatttagcagtatagaaacttgacaggttaggcaattagaatataatttataatacaagaatcatgcatatgaactgcttcctgcccataatttaaaatgcaagtcaaatcaaagatctcttatgctagaccagaagaaaaatttcctatgaacggaatattataatatattaatattttacttatatcttcaagt

SEQ ID NO: 419486 - DNA, 619 bp, Homo sapiens
ctgcttactgttgttacactgtctgtcactattcctagttttaccattctaatcaggttttgaaagtagagattaaatgatattatagaaaagaaagaagaaaaagtattctagttgaaaaatccaatcaggattccacacaattgtgtttagagtacaaatatctgactttgaggaagactacactactggatcatattgttggcaaatcctggtttatttttaatagtataattggttttacttagccagatgtttaggtaatgtatattgtggaagatgcttcattaagaaagagttatgcggtttttaaagagaagacatatgttaaacatgcagaggggccctaaggagtaatttcttrctttgatgctttatgtaaaataaaaatctaaacttatattgtttcctcttcacgtttttctagaatagagcgtgagaagcatggaaaggtaagatatcctcaatgcagtaacagattctagggaaagcaaggtttctgccttgtccttctctccctctgttcctttcacgaacccttattgaatcattgctatgtggaaggcacagagcctaaaacttgagggcatcaaattggagccaagattccctccataac

SEQ ID NO: 419487 - DNA, 594 bp, Homo sapiens
gctgttttttttttttttaactttttatagatgtaggaggtaaaagtgcagttgtattacgtggatataatgcacagtggtaaaatctgggttgtagctttcccagtcgcctgaacagtgaacattgwctccaataggtaatatttcatccttcacccgcctcccatcatcccactttcaggagtctccagggtctgttatttcactctgtgaaatacaaatattttaaaaaagggagaaccccaaatatccctagggctcaactgtctatttgcaaacatctaatttctttctattgtgcagatattccaaaattatgttcaaacagaagttatttacacaatgttaagaagaggaaaatcaataaaaataaatatttacacaaaaagggacacggacacttctctgaatatccttaatgcgctacctaacactgcttggagtgcttcagtgtttttttgttttgttttgttttgttttgagcatcattagcatttgtcaaataaaaatcaatctgtgtccgaaagatcccctgtccctattacagctccatcaacctgtcactgttgtggtcttgtgcaagctgccagccaa

SEQ ID NO: 419488 - DNA, 502 bp, Homo sapiens
ttcatccttcacccgcctcccatcatcccactttcaggagtctccagggtctgttatttcactctgtgaaatacaaatattttaaaaaagggagaaccccaaatatccctagggctcaactgtctatttgcaaacatctaatttctttctattgtgcagatattccaaaattatgttcaaacagaagttatttacacaatgttaagaagaggaaaatcaataaaaataaatatttacacaaaaagggacacggacacttctctgaatatccttaatgcgctacctaacactgcttggagtgcttcagtgtttttttgttttgttttgttttgttttgagcatcattarcatttgtcaaataaaaatcaatctgtgtccgaaagatcccctgtccctattacagctccatcaacctgtcactgttgtggtcttgtgcaagctgccagccaattacaaatcaaccttaactatcttctatcttagaatctcagtttataaacag

SEQ ID NO: 419489 - DNA, 529 bp, Homo sapiens
tgatgtggtcacctcagaaatatctttatgtagaaggaataggcatagtatgggtacatttaaagataaatgtacttgtttttgcaaacttcctcctagatcagtttgaaatcataactatgtcctaacattaacattttatttttcactctactcctgtttgtttaccctttgcaagtgctgggggtgctagtaaatgatagggcgaccagaggttaaagactgatcattctttcagccaaaattattgaatatttattctaagaattgcgaggggaaacaaaatwaaaaaaaagatatgcccctgcccttatgaaataatcaattccaaataccaaattaataatgatcatcatcttcaccatagcaaacacttatacagcactttctaaattaacttgttttatcctcaaagcaaccctatgaagtaccaccttcattttattgataaggggattgaagacagacagaggtttagcaatttactaaagggaacaaatcaagggaagttagaaaccaggcagtctgg

SEQ ID NO: 419490 - DNA, 618 bp, Homo sapiens
gaggacacaataacaagacgagcatctgcaagctaaggagagaagcatcagaggaaaccgagactgaggacagcttcatcttgtttctagcctccagaactgtggcaaaataaatttttgttgtttaagccactcggtttgtggtatttgctatggcaactctagcaaacgaatataccaaccaagaatcaaaactatcacttcttgtttcagtctaaaaccataggtatcatctaattaaaagttcaaggctatttaaattttacaaagtactggaayttgtcattgtcctttaacatgctggggagactaatgtccattcttctcctgagaagatatagtctgttggtaatgggaaaatgttcatgagaatatcttacacttatatcccagacaaggtggccccaagtccaggggaagcatagctgtcattgccttttaatcacacggagcataatttttgctgacttcagagctgagaatgttaaggcatcactctcttggaaatgaaattagtagtgacaggacaaataggattgagcatggctttatgcttctaccattatttccacaagctaaagacagcatgtatttgcgcagcacaagtcaaaactgtcc

SEQ ID NO: 419491 - DNA, 607 bp, Homo sapiens
caggtggatgacttgagcccgggagcttgagactggccttggcaacagtggcaaaacctcgaatgaaagaaaggaagaaaggaagaaaggaaggaaggaagraagaaagaaagaaagaaagatagaaagaaagaaagaaagaaagaaagaaagaaagatagaaagatagacaatataataacagagagagacagcttgttcccccgtctaaaataaaaaataattttaaaaattaacccttcttttaaacagcatagaaattgattctactgaatagaatattaccccacctacatggcccatcacctattttattgtcagaaagtggttactcttcttttaactttccactattaattattatttgatttgtagcaatgtggaacttgataaggaatttggaatcagagacattggttaaaatatttgtctaccacttttaaatggcatttcatcagcttcatttgtgatggatcaaaactgtaagggtatttcaacataacttaccgctaggaacctcagcaccttggttgaagaaaaatggcaactaaggcaaagggcacagagcagcatcaaggcagacttgacttctgcagctggagtctaa

SEQ ID NO: 419492 - DNA, 617 bp, Homo sapiens
tttttaccttaatccctttgcactcggctgctggtattaaatggtcaccaccattgaactaatggaggaggtgtgaaggaagttatcaaagaaaattttgactggataaattgcaggacttaacttacaacctgtaatttaaactataaaggtaaaaaaacatttatggcactaatgcagttttggatcctgactgaagagaggatttgggtaaatatagagaatagtcttggtggcaggaagaaatgatgagagagacaggagagagagagagaataactaataaccttatataaaaatgaataaaatctgcctttcctattgtattttagtcaatgtttggtttttccatacactaaccatttcacaacattaagcacttttataactactttataaacgcataaactactttataagggaatatactgagattcagcaagcttaaatgattgtctaagattccaggctatggccaactgactctaagtctgttactctcctagacagataaaatgagtgaacaacttatattcctgttccaacataatttgaatatkatttacatcaatgcaaggaggcacaagaatgtatttggaaagaacaaaactccaagt

SEQ ID NO: 419493 - DNA, 560 bp, Homo sapiens
agaaatgtttaaagttgtgggggggaatcaaaattaaaaaagaaagtgcatgcaagagctctttctaacacacataaaaagtacatatatttatataatacaggaatcaatcctacaaatgtgtaattgcctgtgtatgtatacacatgcctccaacagaaaagtgggcaaagcagatatttcagaaaaakaaatataaatgaccgctcaagataagaatagaaaaaatgatatcttctaattcaagaaatgcaggttaaaattagattttttttttttttttagtagagatgtggtcttgctcaggatgacttcctcgcttcaagagatcctccagccttggccttctaaagtgctgggattacaggcatgtgctactgtgcctggcccagatttaaattttttactaaaattaagaatggcaaaggatagagggaaataatgtctccacatagcagctgcttaaaatgggtgaatatgtaatatgtaaatactataccaataaggttgatttctatgaagttgcttcttaaaaaatgcttgaaacactctagtgtctt

SEQ ID NO: 419494 - DNA, 595 bp, Homo sapiens
ttaactagcaaacatctgggggagaagcaatctaggcaaagggaaaagatcttgcaaaggtacctaagccacaacctacgatacagaagagtgggcatatggtgggagctaggcaagaggacataaagcctgagaagggacaaaaactagatcatgtgaggcctgagagtcactgtgaggacactgatgtttactttgcatgaaaggagatttggtgcaggttttgagcagaggagtgacttargttttgaaagactctctctggttgtcttgaatagaccagaggaggtgtggccaagaatggaagccaactgggtatttgaagacttcaagactcaggtttcttatttagccagtacgtagtaggttgttattgagtacctttccatttctccgctaatgtggtgatcctttggcatctatcaacattcgttgcaattatcacgtttttggggcagcattatgagttaatgttgtcctcaggctctcttttcctgaatgcccccaaatctgtttggtctggttgacaacacctacctacacctgcatgccacaactttcatactctgagattctttgtcggtgtcccataaca

SEQ ID NO: 419495 - DNA, 595 bp, Homo sapiens
ttaactagcaaacatctgggggagaagcaatctaggcaaagggaaaagatcttgcaaaggtacctaagccacaacctacgatacagaagagtgggcatatggtgggagctaggcaagaggacataaagcctgagaagggacaaaaactagatcatgtgaggcctgagagtcactgtgaggacactgatgtttactttgcatgaaaggagatttggtgcaggttttgagcagaggagtgacttaggttttgaaagactctctctggttgtcttgaatagaccagaggaggtgtggccaagaatggaagccaactgggtatttgaagacttcaagactcaggtttcttatttagccagtacgtagtaggttgttattgagtacctttccatttctccgctaatgtggtgatcctttggcatctatcaacattcgttgcaattatcacgtttttggggcagcattatgagttaatgttgtcctcargctctcttttcctgaatgcccccaaatctgtttggtctggttgacaacacctacctacacctgcatgccacaactttcatactctgagattctttgtcggtgtcccataaca

SEQ ID NO: 419496 - DNA, 590 bp, Homo sapiens
tctagaaatttagaaactaagatattatttaggaattatgggaggttgtcatacaacgacctttacaacttttaggtaactcttaagaaaccaaattcagaggtacgatttatagctcyagaagatatcccagaagacagaaactcatggatcccttaataataacagcataaaaattctggggtaaaatttttgtaaagaatgtgcttcatcatatctttcctgagtaacactgactctggtttctgagttatatacaacatacatgagtaaaatttcataaatatacatcagcattttgtcccacccagacttcaactgttgtttatattctttgaagattagatttcttctagtgaaacagtatgggctatgagttgccttaagaattatgaacatacatccaataataagaattcagtaattatgacacaagttacaacaattttaagaattgttttatcattaatgggctgtaatttaaaacaagcttctctaatctcaaattagcatcactagtggtcaaaaccagtgtttgttgatacagagctttaaaagttgtatgtatctgattcatgtgattagatgtc

SEQ ID NO: 419497 - DNA, 604 bp, Homo sapiens
tctacttatcccactggtttcatcagcatcaaaaataaagctctgaatggcattcttgagaattctgtgatttaaaatgttctcagaattctctctttgtaagtgaatcattgacttaatgaaaattaaactgtaattgtatttctaagtctatccagtgaatacttattaaggcagttacatttatgtttatgaattaggaatttaaccaatagcagttttattgtgcaactcatgaaaccgagggctctacatggacctctcttggtacaaaatcayattcattgagacttcaacatggtataatacctataattgtagaactgcaaattttaaggcttttggaaaaaaacatgctaaaagggaagttcatcctttgtgcatagtaaactttctcccaattatcagctttcttatattcttgaaagaaacaacaatgacaggctgcgcatggtggctcatgtctgtaatcccagtagtttgggaggctgaggcaggcagatcacgaggtcaggagttcaagaacagcctggccaacatggtgaaaacccgactctactaaaaaatacaaaaattagccaggcatggtggcactcttctgtaa

SEQ ID NO: 419498 - DNA, 558 bp, Homo sapiens
agagggctggagagagctgtgaaaggccagaggagagaaaggtgtaccatcatgaggacacatagagtagagaaggtataacactgggagacagcatagaggggagaagggtgtgccaacaggaggcgacaaaaargggagaagatgtatcattaagaggcaacatggagaggcgaaggtttacaatcaagaggcaacacagaggaaagaaggtgtgacatcaagagccaacataaaggggagagggtgtgtcaagaagaggcaatatagaggggaagaaggtatgtcataaagaggcaacatggaggggagaatttgtgccatcaagataaaacatggtggggagaggatgtgacaatcaagaagaagcacagagaggagagggtgtgccatcaagactcaacacagaggagaaagtgtggaccaccaagaggtaacatggagggcagaagggtgtgcatcgagagataacctggagtggagagggtgtaacatcaagaagcaacatttaaaaaaaaagaaaagtgtaccatcaagaaacaacagggaaagaagtag

SEQ ID NO: 419499 - DNA, 558 bp, Homo sapiens
agagggctggagagagctgtgaaaggccagaggagagaaaggtgtaccatcatgaggacacatagagtagagaaggtataacactgggagacagcatagaggggagaagggtgtgccaacaggaggcgacaaaaaagggagaagatgtatcattaagaggcaacatggagaggcgaaggtttacaatcaagaggcaacacagaggaaagaaggtgtgacatcaagagccaacataaaggggagagggtgtgtcaagaagaggcaatatagaggggaagaaggtatgtcataaagaggcaayatggaggggagaatttgtgccatcaagataaaacatggtggggagaggatgtgacaatcaagaagaagcacagagaggagagggtgtgccatcaagactcaacacagaggagaaagtgtggaccaccaagaggtaacatggagggcagaagggtgtgcatcgagagataacctggagtggagagggtgtaacatcaagaagcaacatttaaaaaaaaagaaaagtgtaccatcaagaaacaacagggaaagaagtag

SEQ ID NO: 419500 - DNA, 558 bp, Homo sapiens
agagggctggagagagctgtgaaaggccagaggagagaaaggtgtaccatcatgaggacacatagagtagagaaggtataacactgggagacagcatagaggggagaagggtgtgccaacaggaggcgacaaaaaagggagaagatgtatcattaagaggcaacatggagaggcgaaggtttacaatcaagaggcaacacagaggaaagaaggtgtgacatcaagagccaacataaaggggagagggtgtgtcaagaagaggcaatatagaggggaagaaggtatgtcataaagaggcaacatggaggggagaatttgtgccatcaagataaaacatggtggggagaggatgtgacaatcaagaagaagcacagagaggagagggtgtgccatcaagactcaacacagaggagaaagtgtggaccaccaagaggtaacatggagggcagaagggtgtgcatcgagagayaacctggagtggagagggtgtaacatcaagaagcaacatttaaaaaaaaagaaaagtgtaccatcaagaaacaacagggaaagaagtag

SEQ ID NO: 419501 - DNA, 554 bp, Homo sapiens
cagcttgtgcttctgggaaggcctcaggaaacttccaatcatggcagaaggtgaaggggaagcaggcacatcttatatggccagaacaggaagaaggtgctatatacgtttttctttttycttgttttttttttttttttttgagactgagtttcactcctgttgcccaggctggagtgcaatggtgccatttcgactcaccacaacctccacttcctgggtacaagcgattctcctgcctcagccccccaagtagctgggattacaggcgtgtgccacctagcccggcttattttgtatttttagtagagacggggtttctccatggtggtcaggctggtctcaaactcccgacctcaggtgatccgcccaccttggcctcccaaagtggtgggattacaggcatgagccaccgtgcctggccataccatatacttttaaataaccagatctcgttagaactctatcaggagaagagtaccaaagggatggtcctaactattcatgaaggatacactcccttgatccaatcctctcccatctggcccccagtg

SEQ ID NO: 419502 - DNA, 554 bp, Homo sapiens
cagcttgtgcttctgggaaggcctcaggaaacttccaatcatggcagaaggtgaaggggaagcaggcacatcttatatggccagaacaggaagaaggtgctatatacgtttttcttttttcttgttttttttttttttttttgagactgagtttcactcctgttgcccaggctggagtgcaatggtgccatttcgactcaccacaacctccacttcctgggtacaagcgattctcctgcctcagccccccaagtagctgggattacaggcgtgtgccacctagcccggcttattttgtatttttagtagagacggggtttctccatggtggtcaggctggtctcaaactcccgacctcaggtgatccgcccaccttggcctcccaaagtggtgggattacaggcatgagccaccgtgcctggccatamcatatacttttaaataaccagatctcgttagaactctatcaggagaagagtaccaaagggatggtcctaactattcatgaaggatacactcccttgatccaatcctctcccatctggcccccagtg

SEQ ID NO: 419503 - DNA, 607 bp, Homo sapiens
cagaaatttaaatcaagctatccttgttatttttactttacagagcatacatttaattgtatttaacagaagaataatgaattgcagaaaaagtgaaggaattattaaaattaagatatctctttcttcaacaaagggatagtaattgttcctgaaattgtccccaaaattaaagtagtgggagttcataacagcattaagaagctggacatgtgtttattattttagtatacatcaattggcttcttgttttgaaggcagaggaaacaaaaagctttactacttctgctctttatcttgattattgttattatttttgggctttataacatgtaaattctgttctgtaatcataatwtcccaagtgatttaatcataatgttatattttaaagtgatgaatgctcattcccactttgtttacttcatcttttctgttcttaattgcttactttgatgcaagtctttcaactggaatttgacaaacagcagtgatttttttgtttttttttgtgagggggatgatcgtttctcaagggctctcatgtttatttcttgaattcatgcatgcttgtgaatctgttctttgtgtttatacttgaataaaa

SEQ ID NO: 419504 - DNA, 606 bp, Homo sapiens
agcattccaggattggattggattggatgaaattgaagcattggatcacaatggagtgtaaacctaaacctctctgaatacgggcagtgaaagtgtgtaattcatggcagaaacttaaatttgaaaaagaggaatgttagaagtaataagaagaaatgaagtgagaatcccagagccttcattacatgccaaaataaagtagacatgtattacattcctcccttctgtgggtcccttccacacctgttgttgctttcctggggaattagccaaagtgatacaatttctaagttttagtggggagaaataattgtatcccaggaacaggaggccaaggttcaatttttccaccattgttcttgttttttaatatctttgacagaggagaggactattgatttagtatagtggttcagggaaagcaaaaggcacatcatgtacacacagcacaggaaactttttagtatgtgtttataaawtgcatcacccctggctcagagcttcgtttgattttttttggggggggcgggttggttgattggttaattggttgattggtttgttggacacgttatgttggagaaatgacccctgagaggtgagtca

SEQ ID NO: 419505 - DNA, 520 bp, Homo sapiens
tgctatgcattatgtgtcttaagattgtgagaacagctacgtatataccatatatacctatatattaacatatttaattatgtgaagtcaattactactataattgttgcctttattttgcaaatgattaaattaataaatgaaaaatgaaattggtagtccaaggtcacacagctagtttctggtacagctgtattttaacttaggcagcttgactyttaaccagacaatgcacgtataaaggcattatactgaaagacctgtagaacatagcagaatgcattaagaaatacagtgaagatcaattataaatccagaggaaaaataaaatgaaatgtaaacatagtatattatttggttctatagcaagtgacgcattatgatcatcataattaaaataccatttatgaaatttcaagtttttaaatcaagctaatagacatagcataaaaggcttaaaggtgtttaacaggatataaacttgatcacccttggcaatttaaaagtaaaatacaggcca

SEQ ID NO: 419506 - DNA, 501 bp, Homo sapiens
ttcttttcagtatccagtgattatagtatattttttctttgataaggtcataatatgattaatcaagctcatgatttctacaggatagaaatatctgtgtagataaacaatgtagttaaatgaaaaagcagaaggagtctttaaaaagtagaggaaaacataaaatccattgtgtttaaatgctttgttgatggatttacctgatgtaataatttctgcatccaaactcaccacctctaagttggtttaacttcagggaaattttataagcaaaaccattgcattatcgtaggaacagtgactactcacaataacttttttagggatgagtcactgtaattacaggtcccatgrgcattctggtgaacttgagctggaaagagaaagttttcccactgattaagaatgtcattttgtgattgttaaaacctacataatttatgtatttattattattactattacttttctattaccattagcaggtgttttgaaaaccaa

SEQ ID NO: 419507 - DNA, 614 bp, Homo sapiens
gctacccaccttctaatatcaacaagtgaagactatttcttttttaaccctatttaaagttatatggtgatatggtttggctgtgtcctcacccaaatctcatcttgaactgtggttctcataatctccatgtgtcgtgggagggacctggtgggaggtaattgaatcatggggcagttacccccaygctgctgttcttatggtaatgagggagttctcatgagatctgagggtttcgtaaggggcctttccttgctttgcttggcacttctccttgctgccaccatgtgaagaaggacatgtttgcttcccttctgccataattgtaaatttcctgaggcctccccagccctgcagaactgtgggtcaattaaacctttttcctttataaattacccagtctcaagtatgtctttattagcagcatgtgaacagactaatatacatggctccaatatcattcctttagaggacacattccattgctaatttgcagaaggatttgattgtagaagggagtgtatgtggagtttcctcttacatggggtgggagttatcttctgatttgcttaaaacatctcttaaattacttaaaaagtatgtatttcatagac

SEQ ID NO: 419508 - DNA, 630 bp, Homo sapiens
atgatttgcacttgttgaacattcttgtatcctggatatacagtccaggtggtcatgatgcatgagttttggagtgtatcactgaattcatgttgcaagtattttgttaagaatttttgcatcartatttatcagagatactggcctgtagttgtctttatttttgatacgtttttggttttggtatcagggtaatgctggccttgtagaatgagtttggaaataatccctctgcttctgttttttcagaacagtttgagtatgattggtattagtttttctttaaatgtttggtagaattcagcagtgaagccatcaggtcccaggcttttctttactgggagaatttttattattggcttaaatctcattatttattattagtctgttcaggttttggatttcttcctagttcaatcttggtaggttgtatgtttccaagaagttttccatttcttctagattttccaatttattggcatatggttgctcatagcagccactaacaatcctttgaatttctgcagtatcagttgtagtgtctactttttcatctctgattttatttatttggatcttctctctttttttcttagtcagtctggctaaaggttttccaattttgtttaa

SEQ ID NO: 419509 - DNA, 565 bp, Homo sapiens
tctagcacacagtaggatattaggatcggaatatcaaaacagacctatgagttttagttgtgaatttatgagttagcgtcattagatggtaattaaaccatgggaatgaatggcattcacagaggcaaatagttagaagacctagaataaactctgagaaacacaaaactgtagtggcttggaagagcagaagcccctgaaataatgataaagaacaaccaaaggatgtggaaaaccagaggacatcttgtcacagaggcagcaggaaaggatgtgctttacagaaatgaaggttcgagagtgcagtgctcccaggcaatcgagtcaaataaggactgagatgtgcctatttataggagtcccataggtgctagtttgcccagaaaagtctgaatttaggctaaaatggtatgactaacccatctttcrttctcaaatgtgtcccattttcaacaataaatgataaacctattgttggtaaggatagttttgggatgttagggagtacaaaaactagcaagcagtgggttaagagtggagttgtagaaattaaaacagaaaccca

SEQ ID NO: 419510 - DNA, 567 bp, Homo sapiens
agagtgcagtgctcccaggcaatcgagtcaaataaggactgagatgtgcctatttataggagtcccataggtgctagtttgcccagaaaagtctgaatttaggctaaaatggtatgactaacccatctttcgttctcaaatgtgtcccattttcaacaataaatgataaacctattgttggtaaggatagttttgggatgttagggagtacaaaaactagcaagcagtgggttaagagtggagttgtagaaattaaaacagaaacccactttgtataggtcgttctttgaattggttatggcagaatgagagggattagatgagagaagcatggagaagagggatgttaccctaaggatcatgtttaaatgttggtgggaaaaagaatacatacagttgacccttgaataayacagttttgccctgtgtccacttatatgtggattttcttccttttcttctgcccgtgaggcagcaagaccaactcctcctcttccccctcctccacagcctactcaatatggtgatgatgaggatgtagacctttatgaggctccacttccattt

SEQ ID NO: 419511 - DNA, 529 bp, Homo sapiens
ggttgatgcccctgggaaaggagcccttgtttcctcttcacgtccccagtataacacaagacgtggcatacaaaaacactccataaaaatttatggaaagtatagcattgaaaattttgctcaggggccatgcacagtggctcatgcctataatccacagagtgataccttatctctactaaaattacgaaaaaaaaaaaattagccaatcatggtggtgcacwtctgtagtaccagctacttggagagttgatgtgggaagatctcttgagcccaggaggttgaggctgcagtgagccatgatcacaccactgtactccagcctggggaacaggtgagatcctgtcttaaaaaaatttgaattccagtaaaaagacacaaaaataattttaaaatgtcttgctttatagtaacatgtactatttattgatttgcaacaggcactttacataaattacctacactaagccttatgctaaccttataaattactattatgagttccattttgagatggagaattgaggtc

SEQ ID NO: 419512 - DNA, 437 bp, Homo sapiens
tcccataaaacagaagaagccatgctgtcccataatgaacctgctgcctctagcatgcgctcacctcagattgaaagccrgaagtcagaggcagttagaaggagcagatggtgtctgatgaccaggctgtgacttcaggtctttggaaggcccaggaagtgaggcattcttcctcctaagtgcctacccttcctgaagcaagggctgaaagagccaggggggtttagtttagtgtgttccgaatgagttaatgggtgacataccagtgagtattttctatcacattaattttaatgtattctacttgtctgatgtaaaagactcaaaatgacctcccagtgttcctaattagtgctctcagtacaacttctttatcatttcttagaagtggcttctactatgtttctaaatttagaaaaaattacaatttataagtt

SEQ ID NO: 419513 - DNA, 419 bp, Homo sapiens
tagacttctaagattttttagctaagtccctggctcccagcacctctggacctgcctgggacctgggggatatagccacccgggaggaaagcataggcctggttggcttaamcacctgctgattgtagagctccagggccttgagtaaacagaggaagtagccagggagtggttacagcaggccttgggtgagacccagtgttgtgctagcttcaagactgacctagtacagtcacagtggtggtagccacaggggtgctggtgtcactccacccccagcttcaggtggtccaaaatgcatagagagactctttttgttttggagaaagtaagggaagagaacaagagtctctggtaatacagagaattctcccagatcttatctaagaccatcaaggcagtacctctatgagtctaaa

SEQ ID NO: 419514 - DNA, 533 bp, Homo sapiens
gctatttggaggatactcgaagaaattcaagataatgcagagaagaaattcagaattcttctaaataaatttaacaaagactttgaaataattgaaaagaatcaagcaataattctggagctgaaaaagaaactggcatactgaagaaagtatcaaagtcttttaatggcaaaattgatcaagccgaagaaagaattactgagcttgaagacaggtggtttgaaaatccacaatgagaaragactaaaaaagaatgaagcatgcctccagaatgtagaaaatagcctcaaaagggcaaatctaaaagttatcggctttaaagaggaggtagagaaaaagacagaggtagaaagtttattcaaagggataataacagaacttttcaaacctagagaaagatataaataatcaagtacaagaaggttatagaacacatggagatttaacccaaagactacctcaaggcatttaataatcaaactcccaaagatcaaggataaagaaagaatcctgagcacatcaagagaaaagaa

SEQ ID NO: 419515 - DNA, 666 bp, Homo sapiens
gccaggagagagtagcatgacatatttaaagttctgaagggaraaaataaaaccgttaccctagcatagtatattcaatggacatattcttcaaacacgaagtagaaataaagattttcccagacaaataaaagttgaggaattttatcaacatcagacatgtcctgaaagaaatgtcaaagggagtacttaaatcagaaaggataggatgttaatgagcaataagtaatcacttgaaactacaaaactcactggtaatagtaggtacaaagacaaacagaattatataacattgtaacagtgatgtgtagactactgttatcctaagtgtaaaaattaaacaatgaccaaaaaaaaatataactacaacaacttttcaagaaataggcagtacaactacgatataaatcgctacaacaaaatgttaacaagtggggacaacgttaagtagtagagtttctattagttctccttcagcttgttagtttatacacacagctttaagttgtttacaggttaaaataataggttataagatagcatttgccatactcatgctatcctcaacccaaaaacatccaattcttataaaaaaatctagaaactagtccatatcatgtgagaaaatctcattgactaaaaggaaggcagaaagaaagaaagaag

SEQ ID NO: 419516 - DNA, 555 bp, Homo sapiens
tttttttttttgtcaaaaagatctggcctttgaattcagatcagattcagtgtagttaagaaaatatgtcaaaacaaatatagtcagaaattcacagtacctttgtgttctgtttaggctattagctgagcctttatttaccatttttggtgcttttgttatcgatgttatgttttaaaaatatatacatgtttctggaactayatatatgtctgtgtgtgtatacgtatatgtacacatatatacgtctatatacatatatatgtgtatatatttgatgttaaaagcttttatcaaatgtgtgtgtgtgtgtatgtatatacacacatacatgtatatgtacgtatacatacacacacacacacacacatatattttaagagatgtgttgcccaggctggagtacagtggttattcacaggtgtggtcataattcactgaagcttcaaactcctgggctcaagtgatcctactgcaccaagccttcctagtagcttggagtacagttgcgctccactgcacccagcttataattttttgattaacagcaattct

SEQ ID NO: 419517 - DNA, 555 bp, Homo sapiens
tttttttttttgtcaaaaagatctggcctttgaattcagatcagattcagtgtagttaagaaaatatgtcaaaacaaatatagtcagaaattcacagtacctttgtgttctgtttaggctattagctgagcctttatttaccatttttggtgcttttgttatcgatgttatgttttaaaaatatatacatgtttctggaactacatatatgtctgtgtgtgtatacgtatatgtacacatatatacgtctatatacatatatatgtgtatatatttgatgttaaaagcttttatcaaatgtgtgtgtgtgtgtatgtatatacacacatacatgtatatgtacgtatacatacacacacacacacacayatatattttaagagatgtgttgcccaggctggagtacagtggttattcacaggtgtggtcataattcactgaagcttcaaactcctgggctcaagtgatcctactgcaccaagccttcctagtagcttggagtacagttgcgctccactgcacccagcttataattttttgattaacagcaattct

SEQ ID NO: 419518 - DNA, 555 bp, Homo sapiens
tttttttttttgtcaaaaagatctggcctttgaattcagatcagattcagtgtagttaagaaaatatgtcaaaacaaatatagtcagaaattcacagtacctttgtgttctgtttaggctattagctgagcctttatttaccatttttggtgcttttgttatcgatgttatgttttaaaaatatatacatgtttctggaactacatatatgtctgtgtgtgtatacgtatatgtacacatatatacgtctatatacatatatatgtgtatatatttgatgttaaaagcttttatcaaatgtgtgtgtgtgtgtatgtatatacacacatacatgtatatgtacgtatacatacacacacacacacacacatatattttaagagatgtgttgcccaggctggagtacagtggttattcacaggtgtggtcataattcactgaagcttcaaactcctgggctcaagtgatcctactgcaccaagccttcctagtagcttggastacagttgcgctccactgcacccagcttataattttttgattaacagcaattct

SEQ ID NO: 419519 - DNA, 546 bp, Homo sapiens
tctcttcttgccttgttttaaatgtgatattatttaacattctgtggcttctggaacacagttggataaaaattattgttgtacagttttaaaaacagaattattcttttgaattgcgtttcataagttcagttcttattgcctttcccacctcaatgattatcccagaaatctgaamattttataataatgaatgtaggcttatgataaagtggtttcaattaacaaaagtattgctgtgataaagtagtttcacctttgagtaaaacttgttgattgcactaagtggaccatttttgccatttcattctggaaaccagagattgcggattttaaattttcttttaatctcctgaatcagcctggattataacatgctgtattttctgtctcatgataaccatattgctgtaaaatatgagaaaattataaacattgttttgtttaaataattgatagtagtaaagtaaatattttaggctatgtttacatttgtaaaagaagatttgagcagtaatttcatcccttagagaaagcccatttggg

SEQ ID NO: 419520 - DNA, 546 bp, Homo sapiens
tctcttcttgccttgttttaaatgtgatattatttaacattctgtggcttctggaacacagttggataaaaattattgttgtacagttttaaaaacagaattattcttttgaattgcgtttcataagttcagttcttattgcctttcccacctcaatgattatcccagaaatctgaaaattttataataatgaatgtaggcttatgataaagtggtttcaattaacaaaagtattgctgtgataaagtagtttcacctttgagtaaaacttgttgattgcactaagtrgaccatttttgccatttcattctggaaaccagagattgcggattttaaattttcttttaatctcctgaatcagcctggattataacatgctgtattttctgtctcatgataaccatattgctgtaaaatatgagaaaattataaacattgttttgtttaaataattgatagtagtaaagtaaatattttaggctatgtttacatttgtaaaagaagatttgagcagtaatttcatcccttagagaaagcccatttggg

SEQ ID NO: 419521 - DNA, 622 bp, Homo sapiens
tgaaatactaatcttgcaacattttgtgctttttcatttacatccaaactaagtcaagagttgtccttccattatcatatgctggatttagtttggatataaatgaaaattttattcctacattcaagtggttgtccattaactatttctattaactttctagtagttgttcattaactattctccaaactttgaaatcagcaaaatatgtaaccatatccatctttggtattttaagcttaattatcataaaagctcttarggaaatttaagcattaatacagaaaatgtatcttttctttgaaaataaccaaatccattttaaaaaggaattgtttatacagtctgggattttacccaagttacaatttttaatgaatgaaaataaatatataatcaatgtaacaagagagcgaatacaatctcaaagcttaatttaacattgctgatgacttaatgaaactgtatttacctcagagccctgatttgataaggctgttcattattttttagggcacacctattatttattcccataataactctaacaaataacaacataataactctaacaaataaaagtaagcaaaaaagaaaaaagaaggtgagagtaagaaaatgt

SEQ ID NO: 419522 - DNA, 583 bp, Homo sapiens
ataaattacttcagtatgcagttatcttataattacctatatttctgcaattgataaatgaaaattcggaatccaaactttaatgctagctcatctggttgatttctattcaaaacattaatggaagactgactatgcactatgggtaggcactgagccagtaactgtgaaattaaaaataataataagatttgccttcggggagctgaccatctctacataccacttttttttccttaggagacaaggtctcaccctgttgcccaggctggagtgcagtagcgcaatcatagctcmctgcagccttcaactcctaagccagcctccaactcctgagctcaagctatcttcctacctcagctttccaagtatctatgactacagtacaatgatattacagtatagtcctattacttctgctgatttacagaaattaatcaccaggtaacaaccagaaaatgaaataaatcaatgaggtagtatttcagtactgtaggaaaataatccatttgtttagataaattaaatagaataatatgaaattcaacatgaataaagttaagaaatcaacctttacatagaa

SEQ ID NO: 419523 - DNA, 569 bp, Homo sapiens
gatcttttgtatttctgtgatattggttgtcatagctctcatttcatttctaattgagcttatttggatcttctccttctcttggttaatcttcctaatggtctatcaattttatttatgttttcaaagaactgctttttgtttcatttattgtttgtatttttgtttgtttcaatttcatttagttgtgctctaatctttgttatttattttcttctcctgggttaggttttggattgatcttgattctccagttccatgaggtgtgaccttagattgtctatttgtgctcgttcagactttytgatgtaggcattcaatgctatgaactttcctcttagcaccatctgtattagtccattttcacactgctgataaagacatacctgagactgtgaaatttataaaagaaagaggtttaatggacttacagttccacatgaatgggaaggcctcacaatcgtgggagaaggtgaaaggcacatctcacatgagggcagacaagagaagagagaagagagcttgtgcagcgaaagtctccttttaaaatcatcagaccttgtgagact

SEQ ID NO: 419524 - DNA, 608 bp, Homo sapiens
gatccatccatgcatttagaatctaataaaaaatactagttaagtgattataacttcgtagtatcatttacttaaggagagtctaagacatgcaacatttccagatgtaatcacgatgttgagtaccgtccagggacaagaatgagaatgctaccagctcaagatctgccttctgatggatggggataagcacttgttcattattgatccaactgagaaatttaatggtgtgcaaacaatgtaagggattgtgatacattttcaaactttatttgaaacaatgcgttaaagtaatggtaataaattactatgctggatgaacatggattatggctgtttaagaacctatgaaaaatgtactagtaacttcagagcaaatttatcattgaattatttccaaaagctgatgactgcatacacaaattaaatattacgatgttcttaaaatgcattctgttataatgtaaattttgtataaaatgggactattgtggacctcaccaagaaggtttattactagaactagattgaaratggaaataaagtcacagaaatctcctgtttaattgtagacaaacatggatgcttatttatttactttaatagtt

SEQ ID NO: 419525 - DNA, 640 bp, Homo sapiens
ccttttagtttgttctggtcttttctctcccttcaggaacttccattagtacacaaccagctaggtatcttcctgttagaaatgaaagtgtgatgggcagtctttagtaccagcttagccagttttccctagtcttaaaatttgattcaggcttagtttgggcttaatttcacagctgcacccaatgattcacatacacacatgaataacttaattctttgaatagttcttagaatgtccatcacgaaaacttaaaaatacattgagaaaacccctaaaacaatatagaatatactttgtactttttgtttatcctctaaccttgtgaccacatggttaatactaatcatggtattattggttgcaaaggaaatgaaaataacagcccacaatattctatataatttatgaaaggttaaggtatcatatatgaaaactgagaactcccccaccccaaacacattttggattttttgcatgtcagtaatgaagttcacttttcaccacctttccagttggaacatataaaatgtrtgacctctaatgcctaatacattaatgatctattgaactaagttaacccttataaagttcatagaagtgaaaatgtggtctagaacaacactgtttgatagaactt

SEQ ID NO: 419526 - DNA, 578 bp, Homo sapiens
atacatcatagagatgtaaacayatgtgtatgtgaagtgtacatgcaaaaatctacatgaaatcaacagccatgaaagaacagttttcttgagatctgttaggcctgtcatgtgcacacactgcaatgcaatagaacagatttattttctcattctacaaacacttcctgaacacctatatcatgtatgaagcattattttgagtgtttaggacacaatgatgggtatgaaaaattttgccgcactacttacaaaagaactacatcagaactgcatgatgaatcttaatttaaataaggtatcttggctgggcgcggtggctcatgcctgtaatcccagaactttgggaggccaaggcgagcagatcagttgaggtcaggattttaagaccagcccagtcaacatggtgaaaccctatctctactaaaaatacaaaaaattagcctggcgtggtggcaggaacctgtaatcccatctactcagaaggctgaggcacaagaatcgcttgaacccggcagtccgaggttgccaagagctaagatcatgccactgcactccagcctgggcaacagagtgag

SEQ ID NO: 419527 - DNA, 578 bp, Homo sapiens
atacatcatagagatgtaaacacatgtgtatgtgaagtgtacatgcaaaaatctacatgaaatcaacagccatgaaagaacagttttcttgagatctgttaggcctgtcatgtgcacacactgcaatgcaatagaacagatttattttctcattctacaaacacttcctgaacacctatatcatgtatgaagcattattttgagtgtttaggacacaatgatgggtatgaaaaattytgccgcactacttacaaaagaactacatcagaactgcatgatgaatcttaatttaaataaggtatcttggctgggcgcggtggctcatgcctgtaatcccagaactttgggaggccaaggcgagcagatcagttgaggtcaggattttaagaccagcccagtcaacatggtgaaaccctatctctactaaaaatacaaaaaattagcctggcgtggtggcaggaacctgtaatcccatctactcagaaggctgaggcacaagaatcgcttgaacccggcagtccgaggttgccaagagctaagatcatgccactgcactccagcctgggcaacagagtgag

SEQ ID NO: 419528 - DNA, 578 bp, Homo sapiens
atacatcatagagatgtaaacacatgtgtatgtgaagtgtacatgcaaaaatctacatgaaatcaacagccatgaaagaacagttttcttgagatctgttaggcctgtcatgtgcacacactgcaatgcaatagaacagatttattttctcattctacaaacacttcctgaacacctatatcatgtatgaagcattattttgagtgtttaggacacaatgatgggtatgaaaaattttgccgcactacttacaaaagaactacatcagaactgcatgatgaatcttaatttaaataaggtatcttggctgggcgcggtggctcatgcctgtaatcccagaactttgggaggccaaggcgagcagatcagttgaggtcaggattttaagaccagcccagtcaacatggtgaaaccctatctctactaaaaatacaaaaaattagcctggcgtggtggcaggmacctgtaatcccatctactcagaaggctgaggcacaagaatcgcttgaacccggcagtccgaggttgccaagagctaagatcatgccactgcactccagcctgggcaacagagtgag

SEQ ID NO: 419529 - DNA, 448 bp, Homo sapiens
atttatgctttttcaattccttaaatttaccagttttacaataagctctgttgtatttcacaaatcctatggcaacatctttaaggttggctgtttttctcttttgtaaattagcttcatagattatttttatagtgaaygcattaaaatagtattgaagtttaattttattgaaaaacattgcattactcagaggatcatttggcattttttatccttcacaatcataagcccctagtgtaactagtaaacactagattgttggtggtgttataatagaaaagtatttctcatatagcacttcagggtgggcatttctggtcagtggatggctttcttccaaccctcagagcttcagagccttctgcatctagccagcaaatgggaagagtagagaaggctcacctgtttcttaaggcacagacctggaagttacttcacttttgct

SEQ ID NO: 419530 - DNA, 597 bp, Homo sapiens
gaatcactatattaattgatatagcatactaaggagttccctgagcaatttggaggtaaagctgaggaaggactaaaactctacttgatgtaagaatggccccatcatggtttaccatgyaccctatcctatcccgggagagataaacaagaagggagcttcacaatcaagggtgtctatttgaataggtctacttttggatacgcccaatttaaatagttcatcctagtctaatctcttaacagaaaaccatgcagtctttctcagcagcacccgtctctatctgaatggctctaagccaaatttttcacctgacccaagctaaattttagctgaccttctttctactattctgatatggcacattgaagtgtgatttggagttctggaagagttatatattctcttttggaatgctttcagaaaagggtttactcactatggttccctgtggaatcagatataaagaatgctttctatttgcatagcccttctaacctaaatatatcaaaatcaatcttgaaaataattttcctggtgaccgtcatcctacacagaagccactgtttaagtttcaatatttatctgccagagtgc

SEQ ID NO: 419531 - DNA, 612 bp, Homo sapiens
cttccggctgatttaacccttggaatgcttccaggcatgctcacagccatgtgwctttaatcatgtgagttaatcaccgttcgagggatacatcgagaaaagcagtggcttataggaagcctgggaagcattgcagttgtgttattaagcctgcacttctgggggctgtcatctcttcaaataaggacactgagaggttggccgtgtgcccttacactagtttttgttagtaacaactgacataggcaattacagaaaaaatgaattaatatttatgaatttttaagtgactttaaagaactcctaatggtagtggagtgaaagtagcaagtcaccttgatccttctaaggccaccatgaacttcagtccagctctggaagaaaatcagaattggaaagtggtctaataatcaggccagtctgattaatagtgacaattagtattggactacagtgcataaccaactgattatgaatcattcgagcactttaggtaaattttcaatacaggcaattaaaatgaaaagactcatgatccttacataatgacttcattaaattaattcaattctgaggttggggaaaattttcttttgtagaaaggaaccagca

SEQ ID NO: 419532 - DNA, 612 bp, Homo sapiens
cttccggctgatttaacccttggaatgcttccaggcatgctcacagccatgtgactttaatcatgtgagttaatcaccgttcgagggatacatcgagaaaagcagtggcttataggaagcctgggaagcattgcagttgtgttattaagcctgcacttctgggggctgtcatctcttcaaataaggacrctgagaggttggccgtgtgcccttacactagtttttgttagtaacaactgacataggcaattacagaaaaaatgaattaatatttatgaatttttaagtgactttaaagaactcctaatggtagtggagtgaaagtagcaagtcaccttgatccttctaaggccaccatgaacttcagtccagctctggaagaaaatcagaattggaaagtggtctaataatcaggccagtctgattaatagtgacaattagtattggactacagtgcataaccaactgattatgaatcattcgagcactttaggtaaattttcaatacaggcaattaaaatgaaaagactcatgatccttacataatgacttcattaaattaattcaattctgaggttggggaaaattttcttttgtagaaaggaaccagca

SEQ ID NO: 419533 - DNA, 612 bp, Homo sapiens
cttccggctgatttaacccttggaatgcttccaggcatgctcacagccatgtgactttaatcatgtgagttaatcaccgttcgagggatacatcgagaaaagcagtggcttataggaagcctgggaagcattgcagttgtgttattaagcctgcacttctgggggctgtcatctcttcaaataaggacactgagaggttggccgtgtgcccttacactagtttttgttagtaacaactgacataggcaattacagaaaaaatgaattaatatttatgaatttttaagtgactttaaagaactcctaatggtagtggagtgaaagtagcaagtcaccttgatccttctaaggccaccatgaacttcagtccagctctggaagaaaatcagaattggaaagtggtctaataatcaggccagtctgattaatagtgacaattagtattggactacagtgcataamcaactgattatgaatcattcgagcactttaggtaaattttcaatacaggcaattaaaatgaaaagactcatgatccttacataatgacttcattaaattaattcaattctgaggttggggaaaattttcttttgtagaaaggaaccagca

SEQ ID NO: 419534 - DNA, 583 bp, Homo sapiens
aaaccttaatggagctcactaaatggacktgttaagccaaactcctgataatggatacacccagataaccaaggcacactaatggaatacctccagagataatcaaacttccactaattaaataaaatgttttcctatatttaagaatttactatctacacccaagcattttaccaaaatagaaggtcgctatgttattagcctaatgcaactctaatgatgatctgcacttttagagtattattcactggagcacctgagggttttggcaaatgtgattcttctcccagcttgaaatctctttcatttcctgctcctcactctttcagtcctgtgtgtattctccaaattcagtgctttccctttaatttgtctatttgtgttcctttacttcttatatttggtgtgatttctccccctgttaaatcctctttgctttcaactttcttaatagttattttaaaacctaggttttgtttaagatgacaagtcaatccaagagactgttacaaagacagtttaatatctacatcatagtcatatatacaatagatgctttataattattcaagaagggaagtac

SEQ ID NO: 419535 - DNA, 627 bp, Homo sapiens
aaaatatcatttatgagaaaatgcatctatgggatctaatgaaatttgatacagtaactcagaaaaaatacaataaattaattaatttacaatcaagttcaagaaaggaagccatataaataatataattcatgtgtaataaatataaaatcagacttcttcaaaattagaattgtggggcacttttacatagtctcaacaagtgaaaattatatatcaaataactggtctgtgaaaaatattttcttttgtactctgatccaaggtcagcttagcccaaattcagacaattgggttggacaatttaaaattagttgacagaaagaaattggtagtgtgaaagttaaaacttcaaaataaacatgatgaaggtatttgtgataaattaaatcatcccttgatgactataaatgactcacaraaatatagtttacattgatctcatttggacagtagtttacttactttgctaaccttaactgtatattaaggatatgtactcattgtcaagacaagggagatttgggaatttcagagagccatttgtttacttgtaaatgttaaaatttctatagacaggctacacagtatatattatctatattcattcttattatttggcaaata

SEQ ID NO: 419536 - DNA, 568 bp, Homo sapiens
tgactcaactttcatgcgtcttagattctaagtcaagacaaaacagtaaaatgatttcagatactgataaatactatgaggaaaattaaacagggttatgtaataaaaattgattcaaggaatgtgaaggaggcaaaaagaggctgagattggatggtcagagaattcctgagtgataggaaaggaccagttatggaaagatctagatttgttgttgaagatttccttaacaagcactgtatatatttatttgacttatgctaatagaaatctatttagyacattttggaaggattttcttaagttataagttagtcacaaggtttatagtcatatatgcagatactatcgtatattctacaaaactcgggaattctgagactttagggtctccaagaaactaacgttgaaatgggcagtattttcaaaagcatgttccagtagacataagatggttacagatgtattcctcaaaaaaaaaaaaaaaaaaaagagagagagagaaaaggtcctgtggtcaaatacacttgggaaccagtccatgagcactaacatattaaggtcttga

SEQ ID NO: 419537 - DNA, 568 bp, Homo sapiens
tgactcaactttcatgcgtcttagattctaagtcaagacaaaacagtaaaatgatttcagatactgataaatactatgaggaaaattaaacagggttatgtaataaaaattgattcaaggaatgtgaaggaggcaaaaagaggctgagattggatggtcagagaattcctgagtgataggaaaggaccagttatggaaagatctagatttgttgttgaagatttccttaacaagcactgtatatatttatttgacttatgctaatagaaatctatttagtacattttggaaggattttcttaagttataagttagtcacaaggtttatagtcatatatgcagatactatcstatattctacaaaactcgggaattctgagactttagggtctccaagaaactaacgttgaaatgggcagtattttcaaaagcatgttccagtagacataagatggttacagatgtattcctcaaaaaaaaaaaaaaaaaaaagagagagagagaaaaggtcctgtggtcaaatacacttgggaaccagtccatgagcactaacatattaaggtcttga

SEQ ID NO: 419538 - DNA, 566 bp, Homo sapiens
attctgcctgaaagtagaaaatccggtaattaacttgacttttccttagcaattgtagcagttcagttwatcccagggcctaaaaaacttttgggttataagggaatcctagtggctgcacttgactggctaagttcatctcttatataatatgtattttttctgggcttgtgggtgagaatcagaaccttttcagtatgaggtggaaaggtgggtgaagttacttcaagttccatgactattgagaaaggtatcagtcacagtaattttttttcaagctagaagagacattaagaatacccaggactaaaaaacctgcaggttctgcacatatatcccagaacttaaagtataataataataataaaaaagagtgcccaggtcttcattttatatatgggagaataaggcccacagaagtttgggtaacttatccaaagtcatcataaccatatatacatgagaaccactgggttataattttgctgtcatgtcattcttttaaagaaaattattggcattatttttcctatctctctcccataacaataaaatccctttctgat

SEQ ID NO: 419539 - DNA, 566 bp, Homo sapiens
attctgcctgaaagtagaaaatccggtaattaacttgacttttccttagcaattgtagcagttcagtttatcccagggcctaaaaaacttttgggttataagggaatcctagtggctgcacttgactggctaagttcatctcttatataatatgtattttttctgggcttgtgggtgagaatcagaaccttttcagtatgaggtggaaaggtgggtgaagttacttcaagttccatgactattgagaaaggtatcagtcacagtaattttttttcaagctagaagagacattaagaatacccaggactaamaaacctgcaggttctgcacatatatcccagaacttaaagtataataataataataaaaaagagtgcccaggtcttcattttatatatgggagaataaggcccacagaagtttgggtaacttatccaaagtcatcataaccatatatacatgagaaccactgggttataattttgctgtcatgtcattcttttaaagaaaattattggcattatttttcctatctctctcccataacaataaaatccctttctgat

SEQ ID NO: 419540 - DNA, 532 bp, Homo sapiens
ctgcacctggccccacattattttaaatccagtccactgttartgggcatctaggttgatttcatgtctttgccattgtgaatagtgttgcaatgaacctatgaatgaatgtgtatttttggtataatcatttatattcctttgggtataatgggattgctgggttgaatggtagttctaagttctttgagaaatctccgaactgctttttatagtgaccgaactattttacattctcatcagcaatgtataagcattcccttttctcctcaacctcaccaacgtctgttattttttgactttttaatgataaccgttctgaatgatgtgagacgttatctcattgtggttttcatttgcatttctctaacgattggtaatgttgaacagttttttatatacttgtttcccatgtgtatttctttttttgagaaatgtctgttcatattatttgcccattttttttaaatggggttgtgttttgcttgctgatttaagttccttacagattctggatattagacctttgtga

SEQ ID NO: 419541 - DNA, 568 bp, Homo sapiens
cccttttctcctcaacctcaccaacgtctgttattttttgactttttaatgataaccgttctgaatgatgtgagacgttatctcattgtggttttcatttgcatttctctaacgattggtaatgttgaacagttttttatatacttgtttcccatgtgtatttctttttttgagaaatgtctgttcatattatttgcccattttttttaaatggggttgtgttttgcttgctgatttaagttccttacagattctggatattagacctttgtgagatgcatatgccaaatattttctcccattctgtagattgtctgtttactccgttgacagtttctcttactgtgcagaagcttttcagtttaattaggtcccacctgtctakttttgtttttattgcaatggcttttggagactttatcatgaaatccttggcaaggcctatgtccagaatggtagttccttgattttcttttacagccattaaagttttaggtcttacatttaagtcttcaattcatcttgagttgatttttgtatacggtgaaaggaaggggtccagtttcaa

SEQ ID NO: 419542 - DNA, 568 bp, Homo sapiens
cccttttctcctcaacctcaccaacgtctgttattttttgactttttaatgataaccgttctgaatgatgtgagacgttatctcattgtggttttcatttgcatttctctaacgattggtaatgttgaacagttttttatatacttgtttcccatgtgtatttctttttttgagaaatgtctgttcatattatttgcccattttttttaaatggggttgtgttttgcttgctgatttaagttccttacagattctggatattagacctttgtgagatgcatatgccaaatattttctcccattctgtagattgtctgtttactccgttgacagtttctcttactgtgcagaagcttttcagtttaattaggtcccacctgtctagttttgtttttattgcaatggcttttggagactttatcatgaaatccttggcaaggcctatgtccagaatggtagttccttgattttcttttacagccattaaagttttaggtcttacatttaagtcttcaattcatcttgagttgatttttgtatacrgtgaaaggaaggggtccagtttcaa

SEQ ID NO: 419543 - DNA, 598 bp, Homo sapiens
atgctccactatagacattcccatgtcagagacctctgggctctttccaggctggaattctgtttccaccaactctccaggcaattatcactagcagctcaaatgtcatgggagttrtgggatctcccatagctaggatctcagaagcccctggtgaaggtgagccactccatgcctatttcacttaccctttctttaggaggctcttgggcccagaaatgagtcctggtgctcggcaaccccctgcagtgttcccaactttctctactttcagcctatggtctgtgtcctttttgtgtccactctccatgccttctttccaaagacttgttcagagtatgctggtctccttgatagtctagtctctttcagtgggagaatttcttcctggctgtatctagttggccatcttggctccctaaaaaaattaacagtgatttttgatacttagaccaaagtgattctaaaacaaactgtgtttatttctgagcaaaaatttcaggatgacacccttttcctttatttacaaaatagatctccagcccgccatcctgtgcacagaatacctgggcaggatatgtatctatggagagaaaga

SEQ ID NO: 419544 - DNA, 598 bp, Homo sapiens
atgctccactatagacattcccatgtcagagacctctgggctctttccaggctggaattctgtttccaccaactctccaggcaattatcactagcagctcaaatgtcatgggagttatgggatctcccatagctaggatctcagaagcccctggtgaaggtgagccactccatgcctatttcacttaccctttctttaggrggctcttgggcccagaaatgagtcctggtgctcggcaaccccctgcagtgttcccaactttctctactttcagcctatggtctgtgtcctttttgtgtccactctccatgccttctttccaaagacttgttcagagtatgctggtctccttgatagtctagtctctttcagtgggagaatttcttcctggctgtatctagttggccatcttggctccctaaaaaaattaacagtgatttttgatacttagaccaaagtgattctaaaacaaactgtgtttatttctgagcaaaaatttcaggatgacacccttttcctttatttacaaaatagatctccagcccgccatcctgtgcacagaatacctgggcaggatatgtatctatggagagaaaga

SEQ ID NO: 419545 - DNA, 598 bp, Homo sapiens
atgctccactatagacattcccatgtcagagacctctgggctctttccaggctggaattctgtttccaccaactctccaggcaattatcactagcagctcaaatgtcatgggagttatgggatctcccatagctaggatctcagaagcccctggtgaaggtgagccactccatgcctatttcacttaccctttctttaggaggctcttgggcccagaaatgagtcctggtgctcggcaaccccctgcagtgttcccaactttctctactttcagcctatggtctgtgtcctttttgtgtccactctccatgccttctttccaaagacttgttcagagtatgctggtctccttgatagtctagtctctttcagtgggagaatttcttcctrgctgtatctagttggccatcttggctccctaaaaaaattaacagtgatttttgatacttagaccaaagtgattctaaaacaaactgtgtttatttctgagcaaaaatttcaggatgacacccttttcctttatttacaaaatagatctccagcccgccatcctgtgcacagaatacctgggcaggatatgtatctatggagagaaaga

SEQ ID NO: 419546 - DNA, 564 bp, Homo sapiens
agttggccatcttggctccctaaaaaaattaacagtgatttttgatacttagaccaaagtgattctaaaacaaactgtgtttatttctgagcaaaaatttcaggatgacacccttttcctttatttacaaaatagatctccagcccgccatcctgtgcacagaatacctgggcaggatatgtatctatggagagaaagaaaggccacttagggttggatatcccgttttttctcccatggactttctcatctcatcttaactgaatgactgctctttaataagttaggtrtctctaatgttcaaaagaaatttcattcctaagaaaaggggactagaattaaaactgctattttacaatattgtccataggttattatctcttcatcacctaattccttctcctcgctttctaatagttttaattttcacttggatatccatggggattctgaagcactgattccactcccagctctgtagagatggaacacttccctaagacaatcagcacatgatgtccctgccccctctctcctttacgatagtgattagtttaggtattg

SEQ ID NO: 419547 - DNA, 564 bp, Homo sapiens
agttggccatcttggctccctaaaaaaattaacagtgatttttgatacttagaccaaagtgattctaaaacaaactgtgtttatttctgagcaaaaatttcaggatgacacccttttcctttatttacaaaatagatctccagcccgccatcctgtgcacagaatacctgggcaggatatgtatctatggagagaaagaaaggccacttagggttggatatcccgttttttctcccatggactttctcatctcatcttaactgaatgactgctctttaataagttaggtgtctctaatgttcaaaagaaatttcattcctaagaaaaggggactagaattaaaactgctattttacaatattgtccataggttattatctcytcatcacctaattccttctcctcgctttctaatagttttaattttcacttggatatccatggggattctgaagcactgattccactcccagctctgtagagatggaacacttccctaagacaatcagcacatgatgtccctgccccctctctcctttacgatagtgattagtttaggtattg

SEQ ID NO: 419548 - DNA, 569 bp, Homo sapiens
actcacccacaaatgaaagtatttccccacaaatccagcccatcagtcttgaagagatgactgctacctcaaatgcacagatatcattgcaaggtcataaacacatacacaaaggaaaaatgacatcaccaaaggaccactataattttccaatgygaaaccctaaagagttagagatctgtaagcttcctaaacaaggaattaaaaataattattttagagaagctcagcaagatacaagagaactcaataatatcaatcataacaacaatatatgaataaaactggaagtgaagcaaagagattgaaagatcaaaagaaagcaaacataaatcctggagctgaaaaatacagtgaatcaactgaaaaaatgcaatagggaacttcaacagcagactcaaccaagcagaagaaagaatctctgagattgaagataggtcttttgaaattatccagactaaggagaaaaaaattgaaaagagtaaagtaaacctatgggacttaagggacactaataatgaaaccaatgtatgcatcataaaagtctcagaaggaggattgagaaaggg

SEQ ID NO: 419549 - DNA, 574 bp, Homo sapiens
acttggtttctttggcttcaaaaagtaagggagaactaatgattaaagggaggcaagtttttgctcaacttaagaatgccctttcagacaattctaacccaaatggcaattatctaaatcaacgactaattacagatttatgcatccaggggaaggctgaacgaggggaagcctaaggtcattttcaattctgaaattgtgtttatgttaatgcagattaatcagagagaagagccaacgtctcgtctacctttttttgttgaaaacaaacaaamcgtgattgtatgtcaactttggaaaaaaacaacgtagtgtgggtaagtgaagaatgattgtgaatggactgcttcagtgcaatcgtaatattgttatcagaaaatcaaaaggcataaaaagcaaaaagaaaacggcttatttatgcagcaattcgaaagatgacagaacacaaacctgatttaaatgttattcactccctccctcagattggtctgcacacctccttcctttaatttcccgcactctcctatgatcttttgcataattcacattctcttgccatgagactcagtcctgt

SEQ ID NO: 419550 - DNA, 645 bp, Homo sapiens
ctgcagattcaatgtaatcgcaatgatgttattttttttttttggcagaaatagaaaagcctattctgaaatttatataaaatttcaaggaccccaagtagccaaaacaatcttgaaagagaagaacaaaatggaggactctcattttctgattgcaaaacttactacaaagctgcagtaattaaaacagtgtgctgttgacataaagatagacatgtagaccaatacaatagaatagagagcccagaaatagaccctggaatatgtggtcaaatgatttttgacmaagatactaagaccattccatgggaaaggagcagtcttttcaatgaatggcgctgggacaactaaatatttacatgcaaaagaatgaagttggactcttataacctaataccatacaccaaaattaactgcaaaataaaataaatacttaaaactataaaaatcttagaagaaaaacagagcacaagctttatgacattggatttggcattaatttttggatatgacaccaaaggcacaaacaacaaatgaaaaatagacaaaattggactttatgaaaatttaaaaattttgtgcatcaaaagacagtatcaacaaaacaaaaaggcaacacacagaatgggataaaatatttgcaaa

SEQ ID NO: 419551 - DNA, 592 bp, Homo sapiens
tccttaataagaagctgatatagttaggctttgtgtccccacccaaatctcattgtgaattgtaatctgtataatccccataatccccatgtgtcaagggagagaccaggtggatataattgaatcacaggagtggtttcccccatgctgttctcatgatagtgagtgagttctcacgagatctgatggtttttataaaggactattccccctttgctcacacttctccttcctgccgccttgtgaagaaggtgccttccttccccttcaccttctaccatgattgtaagtgtcctgaggcttccctagccatgctgaactatgagtcaattgagcctctttcctttatagattgtccagtcttgggcagtcctttatagcagtataaaaatggaccaatacagaatgtttaaaaagagatagccaaactattagctcatagctcatttgtatggaaattttatttctaggaggagtaaccataggatcaccattagaacaatcctgkctgcagtcaggaaaacaatagctccagagcatgcactcctagtaacagccacttataatcttcctaatgaaacagaaaacagta

SEQ ID NO: 419552 - DNA, 583 bp, Homo sapiens
attatttttaaaatatcttatctttctctcctcatcatgctgttcttttctacctttatgaacctgtggagtataataactatttttaatatctgtcatttctgggcctatattttttcaatgggctttctcttggattgaggtcatttttctgttttgttttttctaagcctgttaacttttgaatagatggcaagacgtaaatgttaagtgccatggatactgggttgtgttgtattcttttagtttagacctcattatgacatgcagttagttgcttagaaaaacaactttgcaaaacttgtttttaagcttcagtaaggtaaatccagagcgccatttaatgtaaaataatmtaatcccactactaaggcaatacccatttaagagctctagctaatggtccatgtgctgtacaatggtgagactttttcttgtgtgaacacagcctccatgtcttgtgtgagctcttggccttattcagcttcttgtgctttgatttcccttttgtggttctttttccgtctcagtagttttctctcacacatgcagagatcagtactctgccaaatactcaagtaga

SEQ ID NO: 419553 - DNA, 594 bp, Homo sapiens
tcctggggaatttgatgttcctgtagaacattcaggcagtaatttccagtgggcaacaggatctagacttaggtaggactgtccaatagagccttctgtgatcatggaaatatcttaaatatacactgtccagtatagtagcctgtaaccacatgcagcttttgagcacttgaaatatggccagtgcaaccgaggaactgaaattttccattttgcttaatcttaaacttatttattaaatgtatttaaattgaaatagccacttgtatctaatggctatgatactggaaagcacagtcctaaagagagagacttgggactgtcatttattgagagctcccactggctcagcactttatatacattttaaagcaatttaatcatcccgctaccctatggagtaggtggtattaagaaagagttaagttcttactctgtcctttaaataggaaaagagtatattgtaaagaagagcatgtttactctgaaatatgtatgctttctagatattctctgttggcagatatttatacatctttcacaatcaagtaacaattttattcktttcttccaggtggtttgctctgttagagg

SEQ ID NO: 419554 - DNA, 531 bp, Homo sapiens
tttattcctacctcaaactattgaatattcagtcatttaagttttctgtagatctattctcatagatcagtggctctcgaattggtgtgagcatcagcatcactagtagggcttrttagaacagactgtataaaggtgctatttatcgctagaatttctgatccagtaggaacaggggaggggctacagaattgcatttctttccttttttttttttttttttttggttggggggttgttttttatttgtttttgagacagagtctccaaacactgtgagctgagttcagtggcacaatctcagctcactgcagcctccgcctcctgggttcaagtggttctcatgcctcagcctccctggtaactgggcctgcaggcgcacaccaccatgcctggctaattttttgtatttttagtagagatgttgttttgccatgttggccacgctggtctcccaaagtgctgggattacaggcatgagccacagcacctggcccagaatttgcatttctaacaagctccaggtgatgc

SEQ ID NO: 419555 - DNA, 601 bp, Homo sapiens
ctatgtatcaggtacttggctaagcccatttcatccctcaacttatttaattctcacagtaatccaatgagttaggttttgttgttgttgttgttgttatccctattttaaaaatgagagaattggatcttggaaagactgagtgacttaattgggatcacatggctagtaagtggcaaaggcaggatttgcacccatggactctgattccagaacatgtcctcaaaacattaaacagaattgcrttcttcataaagagaaaactattagctgcaagagatagcaccttgaccttgttgtcatcatgatctactcatttagttctctcttaactcacagggaaaaagtggttagtttgtggggtgagcctgtagtcccagctatctgggaggctgaagtgggaggatagcttgagcctagaagttccaggctgtagtgtgtagtgattgtgcacttcaggctgggcaacatagcaagaacctatatctataaaaaatgtttcaaaaagtggttagtttgttgtgtagcctgtattacaaaggaaagagaaaagagaagtactgttgtgtgctcctcagcatttcttcctcttcagtttctt

SEQ ID NO: 419556 - DNA, 601 bp, Homo sapiens
ctatgtatcaggtacttggctaagcccatttcatccctcaacttatttaattctcacagtaatccaatgagttaggttttgttgttgttgttgttgttatccctattttaaaaatgagagaattggatcttggaaagactgagtgacttaattgggatcacatggctagtaagtggcaaaggcaggatttgcacccatggactctgattccagaacatgtcctcaaaacattaaacagaattgcattcttcataaagagaaaactattagctgcaagagatagcaccttkaccttgttgtcatcatgatctactcatttagttctctcttaactcacagggaaaaagtggttagtttgtggggtgagcctgtagtcccagctatctgggaggctgaagtgggaggatagcttgagcctagaagttccaggctgtagtgtgtagtgattgtgcacttcaggctgggcaacatagcaagaacctatatctataaaaaatgtttcaaaaagtggttagtttgttgtgtagcctgtattacaaaggaaagagaaaagagaagtactgttgtgtgctcctcagcatttcttcctcttcagtttctt

SEQ ID NO: 419557 - DNA, 601 bp, Homo sapiens
ctatgtatcaggtacttggctaagcccatttcatccctcaacttatttaattctcacagtaatccaatgagttaggttttgttgttgttgttgttgttatccctattttaaaaatgagagaattggatcttggaaagactgagtgacttaattgggatcacatggctagtaagtggcaaaggcaggatttgcacccatggactctgattccagaacatgtcctcaaaacattaaacagaattgcattcttcataaagagaaaactattagctgcaagagatagcaccttgaccttgttgtcatcatgatctactcatttagttctctcttaactcacagggaaaaagtggttagtttgtggggtgagcctgtagtcccagctatctgggaggctgaagtgggaggatagcttgagcctagaagttccaggctgtagtgtgtagtgattgtgcacttcaggctgggcaacatagcaagaaccyatatctataaaaaatgtttcaaaaagtggttagtttgttgtgtagcctgtattacaaaggaaagagaaaagagaagtactgttgtgtgctcctcagcatttcttcctcttcagtttctt

SEQ ID NO: 419558 - DNA, 449 bp, Homo sapiens
ctacctatggtcaattgatttttgagaagatgtcaagaacacaccatgggaaagtacaatttcttcaataaatggtgttgggaaaactagatatccaaatgcagaagaatgaaaatggacccttatctcattttttctttatgtttcaaaataaggraaataataattaaaaatagcttaaaaaatccatttgatgtctaagttctttgtggttggaaatagaaatagggcagcagctatagcctaacagaaagaatattggttgcattgtgggaagactcaagttcaaattctggcttggccatttagctccatatgatagtgagccaatcactttagttctctgagcctcagtttcttcacagactaaataggcataatataaccttaattcaagagtgtgggacaactggatatccctatgcaaaataataaagtggcaccccctt

SEQ ID NO: 419559 - DNA, 612 bp, Homo sapiens
attgttactttgtatccggtattgtgtaagtactttatatgtactacttttctactttcaagaacaaataagaaacatacttacaaggaaatattgattttggtcctcagttccaagaaatgtgataaactgattcataaaataagcattctgaaattgtttgcaatactttattgagtgagtttaggtaagaaaccagagattcttatagttacctaygctgatagaaataaggaatgttgtttaatttttcaactttatttcctcatcggaagaaatggaagaatggttttcactacagaaaaagagctctagggcaatgttttcctttgcaacactgaagagagaccagcccctctcctgtggggagtgcctaggataaagaaggaaggcctccatcctggactgcatagtaggaatagaggaacaaagctctaacccaacttcctgttgttccctgagtcacacgttaaggattttctcctcagtaactgagaagtctgggctataatagaggagttctcagaccccctacatgtgtcacattctatgattgctctacatatatggttgcacaaagtgtgtcgcatcagtaggtgcccactgaaagca

SEQ ID NO: 419560 - DNA, 561 bp, Homo sapiens
tgcaccttttgtcatgcagaagataaagtaccaggcagctcagagcagtggaaagaacatttaattttgacccaaacctctccatcctgattctggctaatccatttactagctctgtttctactcagtctcccagccgcagttcttatcctacaaaacaaggatacctgctacctcaccctactgcttacatccagtcacttcatgaattctgtagctgataaagtgtcatacagttataagacacaataatgattaaaaacatttctggatcaacttccagaccccttctatttatgttttcctgtaaattgaagtcattattcactgcagctctcaacactgtcagacccaggaaacttctagttgtcatttttctggaatcctatttttgtgtttctccagtagctggaacygctgccactctgcttgtcagtctcagacatcctgattctcactcaccattctagatgaacaagcctcttacctgagacccacgtatttcacattctcttctgccaggttgctgtgaataacttcagttcttcaataactaaattt

SEQ ID NO: 419561 - DNA, 561 bp, Homo sapiens
tgcaccttttgtcatgcagaagataaagtaccaggcagctcagagcagtggaaagaacatttaattttgacccaaacctctccatcctgattctggctaatccatttactagctctgtttctactcagtctcccagccgcagttcttatcctacaaaacaaggatacctgctacctcaccctactgcttacatccagtcacttcatgaattctgtagctgataaagtgtcatacagttataagacacaataatgattaaaaacatttctggatcaacttccagaccccttctatttatgttttcctgtaaattgaagtcattattcactgcagctctcaacactgtcagacccaggaaacttctagttgtcatttttctggaatcctatttttgtgtttctccagtagctggaactgctgccactctgcttgtcagtctcagacatcctgattctcactcwccattctagatgaacaagcctcttacctgagacccacgtatttcacattctcttctgccaggttgctgtgaataacttcagttcttcaataactaaattt

SEQ ID NO: 419562 - DNA, 589 bp, Homo sapiens
actttttgattttaccctgagatgggaagccatctggaagagtctgaacagaggagtttcaggaactgacttatgttttaaaataatttatctggctgttatctggagaatagagcaatggaacaaggccagaagtaggaacctactaagaaacaattgcagtaatctaggtaacagatgatggtgatagagaccgaaagaggtggcagtagaaacagaatcagtaggaacttgagtctgggtgtttttaatgtacacgtggtatttgctgatggatcggatatgaggtaggagaagattgaagagtaataccaagattttggcctgaggacctagaagcacaaaactgccatttactaaggtggagtaggctgtggcaggagcaagtttagagggatgaaatcagaagtctagtttaggacatgccataaagaatgctattattcatctaagtaatgagcagttggtgccatgagttcagagttcaggggagaggggaataaaatagatgacacttatagccatgggtctgratgagtgagtttagtgagagaagaggtctaaggcctgagccctgaaacacaccaca

SEQ ID NO: 419563 - DNA, 594 bp, Homo sapiens
gcctgtggggttttctatgtcttttccatgttatatgtgaggtctcctagcctgaagttgggtgacatggatccttgttatagatcttactggttagctaagaaatctcaacttccttcagggtagcttataaactattttaartaaggttactaacatatgtatagaaaatcaggaaagatttcatattttccaaagatccatactcacatattcaaagaaagaactttagactatttgctatcacactaggaaaaattatgaagtttgaatctgtgaggaaatgtacagattatctagcactgtaactagaaataatcacaacattaaacatgttttttgagtggatgctaactgccgatcactgttctctgcagtttgtacgtataaattaatgtaatccttataatgcctgatgagataggtacaattattattaccactttacagatcaggaaaccaagacacagatagattgcccagccctggtaagttgagtcagagtggaccctaagtagcctggtttgagaccataggttctcctgtgtataagaaaatacagccatttttagcaaccatgcagagtgaattaag

SEQ ID NO: 419564 - DNA, 594 bp, Homo sapiens
gcctgtggggttttctatgtcttttccatgttatatgtgaggtctcctagcctgaagttgggtgacatggatccttgttatagatcttactggttagctaagaaatctcaacttccttcagggtagcttataaactattttaagtaaggttactaacatatgtatagaaaatcaggaaagatttcatattttccaaagatycatactcacatattcaaagaaagaactttagactatttgctatcacactaggaaaaattatgaagtttgaatctgtgaggaaatgtacagattatctagcactgtaactagaaataatcacaacattaaacatgttttttgagtggatgctaactgccgatcactgttctctgcagtttgtacgtataaattaatgtaatccttataatgcctgatgagataggtacaattattattaccactttacagatcaggaaaccaagacacagatagattgcccagccctggtaagttgagtcagagtggaccctaagtagcctggtttgagaccataggttctcctgtgtataagaaaatacagccatttttagcaaccatgcagagtgaattaag

SEQ ID NO: 419565 - DNA, 555 bp, Homo sapiens
aagaatcaaccttcaagaaggaggagaaatagcttggtctcatcttgtctcttttctgttctctcttgcttttttctttgttctatcctctacaatattgaaaagtgtaaaatacaaacactataggattggccatctagagtcctgggttttagacttggtctggtctgctataatcaacagtgtgatcttagacaagccacttggcctcctgggaccccagtctcctcatttggaaataagaaggcaaattatcttaagagtcctttcttaggctgattcttggaatcacctaaacaatccasaaatactaggacttcctggaataaaattaggaatccagatggtctaatactaatgcttagacccactccttcaccaaggcactagataccccaaatgaaacacctggacctccccaggaaccaaggtcctctggatcctctggcctgacagtcacaggaggatggtctgagataagtctgtctggtcctaaagtaatgcatacttgacaagaagttggttatcttgacatagcattactccttgtgaaaa

SEQ ID NO: 419566 - DNA, 545 bp, Homo sapiens
gtaaaatacaaacactataggattggccatctagagtcctgggttttagacttggtctggtctgctataatcaacagtgtgatcttagacaagccacttggcctcctgggaccccagtctcctcatttggaaataagaaggcaaattatcttaagagtcctttcttaggctgattcttggaatcacctaaacaatccacaaatactaggacttcctggaataaaattaggaatccagatggtctaatactaatgcttagacccactccttcaccaaggcwctagataccccaaatgaaacacctggacctccccaggaaccaaggtcctctggatcctctggcctgacagtcacaggaggatggtctgagataagtctgtctggtcctaaagtaatgcatacttgacaagaagttggttatcttgacatagcattactccttgtgaaaaatgcccttgagagctttgtttattctcttcacctcctcatcagtagtactgtgctaacatttctgttattcatcatgttttaaaattagcttctta

SEQ ID NO: 419567 - DNA, 545 bp, Homo sapiens
gtaaaatacaaacactataggattggccatctagagtcctgggttttagacttggtctggtctgctataatcaacagtgtgatcttagacaagccacttggcctcctgggaccccagtctcctcatttggaaataagaaggcaaattatcttaagagtcctttcttaggctgattcttggaatcacctaaacaatccacaaatactaggacttcctggaataaaattaggaatccagatggtctaatactaatgcttagacccactccttcaccaaggcactagataccccaaatgaaacacctggacctccccaggaaccaaggtcctctggatcctctggcctgacagtcacaggaggatggtctgagataagtctgtctggtcctaaagtaatgcatacttgacaagaagttggttatcttgacatagcattactccttgtgaaaaatgcccttgagagctttgtttattctcttcacctcctcatcagtagtrctgtgctaacatttctgttattcatcatgttttaaaattagcttctta

SEQ ID NO: 419568 - DNA, 562 bp, Homo sapiens
gctgtataggaagcatggtgccagcatccacttctggtgagggcttcaggctgcttccactcatggcagaagaagaaggaatacagggatcacaaggctagaaaggaggccagagagggctgggccggggaggtgccaggctcttttttacaaccagctggcaggagaactctcgcaggaactaacrgtgagaactcactcatccccaccacccagcggaggatattaatctattacgtgagggatcctccctcactgaccccaacacctcccattaagccccacctccaacactggggatcagatttcaaatgagatttggaagagtcaaacaaaccaaactgcagcactccctaaggcatctattcttatggtcctatacgtagctcacttcttatttctaaataattattttccttggaaattatatttactaacagttttctatctcctttaagcagatgatgtttatgttttgatatttatttatttttatcagctggttactttcatcattcattagccatttattgagtacctattatgaattatgtactgtgct

SEQ ID NO: 419569 - DNA, 598 bp, Homo sapiens
gggtggacattttaggcactgtgataagttggtggggagatatttttaggcagggggaaaagaagcaaaaagcatttccagcactccttgtattggcctatgggcaaggctggccatggtaattgtttttatatttggctttgggaagatgtattcagcagcctggaattatagcagggggtggagacatcagaaatgatgcttagccttcatttccaaggtttacgagggtcggtggtttcatatgtaatttgttttggcagagtcttttcttttttggcacagcctgcttctgaaatcattgtgtcttgatattgatgcatttaagtttagcctttgtcttgcaattattataaagtatacatttaacttccatagttgggtaggaattaaaccttttgctttctatcacaaatgagtcttgcagcattctcttctctattttcctacatgtctgagataccttttcatttttgaggaaatttatgaattgaacttctcataatataggtaacagcacaggatgtgatctggatctgtttatttctgtaycactttgttctgtgcaaaatgataaatattctgatatgctcatttc

SEQ ID NO: 419570 - DNA, 518 bp, Homo sapiens
ttatgtaagtctatttcattttgaatttatttttgtatatgtcataagctaaagttctgatttcattcttctgaatgtggatatccagttgttccaacattattattattaaagaaactgttttttcttcgttgtgtgttcttggcacctttgtggaaaatcaattgactgtaaatccatggatttatttctgggctttctattctgttccattggtccacatgcctgtttttatgttagtaccatgctgttttgattactatagctttgtagtcagcttttttctttttactcaagattgttttggctattcagagtcctttgtggttccatataaatttcaggattttttttttctatttctgtgaawaaatgttattggaattttgttagagattgcactgaatctatagattactttctgtagtatgaacattttaataatattaaatgttaatatttaatattaatactaattcttctagcctctgaagatagaatatcttttcatttattgt

SEQ ID NO: 419571 - DNA, 615 bp, Homo sapiens
gtcatttggatcagacttaaataagcctcaacatcacttgaaaattatttctgttaccatgccatgaagaaaactaaactgagttttctcagtttggagagcaaataccataaaatgaaatgaagmcaaattaatttagacctgtttaaaactttaattgatttgatttactctagcttattcaccaataaatggaatgtggtgaaatgatcgtcatgtatctttcagatttttatgttctatttacatgggttttcaagagctttgttccaacgagcttgttttgtgattctgagctccttcagaaagtagtttcatatttaatacatcatgtttgattgttgctaagcatccttttggtgcaaattaataacaacacaagcactagcttcaaaagccaaatacaggatggggctggagcaaaggatgctagactgactgccctctgacttgcaaaaccagggaggatttcacatgtgaatctctgtaacaatttgtttttcttttgttttggcttcttctccagtaaagaagaaaataagaatacaacattgtgattgtgaattgctcaatgttgattagctcctctctaattcttgtgctaaaaagaaagct

SEQ ID NO: 419572 - DNA, 531 bp, Homo sapiens
ttgtttttcttttgttttggcttcttctccagtaaagaagaaaataagaatacaacattgtgattgtgaattgctcaatgttgattagctcctctctaattcttgtgctaaaaagaaagctcatctgcagaaggcaaaaaggctgccaggtggagaaggatggctgatccaggactgagctgaccgcaatatgaagggmaatgaaatggttttgtgtagtcatattaggcactggaacctgcaaatgaagccaagggtcagttaccgaaggcacgacacatgtaggaacatgaacctgaagacagctgctaaaccaaaagattgagcatcagaggagcaagctcaggcttaacaaatagtgagaatgacagcaggatattcaaccatggtgacagtttagggctgaatttgtttagcccatgcaaaacccaagcctggaacgttcgcttaccatttagctttatcctgcaagcttgctgggtcctgagggcctctgagtgttgtgagtggtagaggcagctggcaggtggt

SEQ ID NO: 419573 - DNA, 606 bp, Homo sapiens
ctggacatcttctttacatgttaaaagatgattgttaaagtattcattaaaatgtgaagaaagtttgaagagctaattcagaaaaatatcttatattacatatatacataattaggttartatataagaaataaaatatcaggatcaataagaaaaaagatagttgctatgactgaatattaatttttaatttgagtttcctagaagccagagaaaaagaaaaacacataaatcacataatcctcatagtgagaaaaaaataccagttccccagagtaaacaaagtcttcctggaactagttctaaaagaaaagtatcacgtgaaccttatatgggaaacagtgaacaagaagtgtcctaaaacaattgaagaaatagtttccatgtggaaactgagattaaccttccttaaaactcaaggctatgatataaaagcacaactttgttgttataattctgcaaggatctgctgaagtcttccttccaaattccatagacatgtgctctctaggtctacatatttttagaaaaacacctggttattagaaaacctccttccttccttgaaccagagatagacagtcacagatctgggtcgcagggagg

SEQ ID NO: 419574 - DNA, 467 bp, Homo sapiens
agggaaaaaaaacaaaacaaaacagatttaacctccagagtacaatgatatgcccttttaataatttaaatattccttaagacaacaaatataactataaatgtcacttttacctataaggaatgaacaacacaagaaaaacagtgaaattcctaagtattccttatatattttatgtctaatttaactgttacctgctttaatatttaaaactaatatttggtgatccattttcccaccctcaagttcctatagttcacttctattttatttttacaacatatattcagtgatacttaaaccatagtgaattattatcttcatatttagtctttgttacagatccctagcrtgaattttccaaccagccttaatgttttctaggttcttccagagttcgagattttagcttttattgttaccttttaaaaatgtatttattacagtaacataaacataataatata

SEQ ID NO: 419575 - DNA, 517 bp, Homo sapiens
ctttagctgcacaggtggtgaagctgtgctttctgtggggcagccaccagccctgtgtggctatgaagcatttaaatgtggcaagtccagattgagatctgcagaagcatttagtacacattggatttaaaagtgaagtatgaaaaaatacaaaatatctcattaaaatgtttataytgattacatattgaaatggtcatactttagacatagttggttctataaaaatatattattaaaattaattgcacccatttcttttttccttttttaagtgtgactacaagaatatttaaaattgcatctgtaactcagaaaatctttctgttatataacagtggtacagtactggaattaagagctgggctctgaagtaaacctacctggattcatagttgggctactgacacacaggccagatgaccttgggtaagttccataggcaatctgtgcatcaaatttcatatttataaaactatgaaggataaaagctttcctatttcagagggctgtttga

SEQ ID NO: 419576 - DNA, 552 bp, Homo sapiens
tgtaaaacaggaaaactaagaaacagaaaggttaaataaattacccaggattgcacgataaatcagtatatcaggacaaggatctctgaaaagatgtggaagggattaggagtgtctggtggtggtaggaccaaaaacatactgaaaccagaagtaccagtaaggcagggggccacttaaatccaaagagttctatggatggagtaaacctgtgactcagcagtcaggaaggcgagggcagtcagagcttcccctgatcagagctcagggcaaatatgtgaaagaaaaaaaaaaaagccagagctcaggacaaatatgtgaaagaaaaaaaaagccagagctcagggcaaatatgygaaagaaaaaaaaatcactcagagaatgaccatgtagccaatgcagaagaacaaggcaagggaaggtcaggcaaggctgattttcaaaatttttgtcagataaatttctttcattaaattgattgagaactataaaaagacatcagaaaagcagtcaggaacctgtaaatcaggggaggatgtaggcagtaggcgg

SEQ ID NO: 419577 - DNA, 632 bp, Homo sapiens
cctgtgtctgactattcagcattgcaagtcatttgcattctttaggtattatttagataatattatttaagacatttcactgtatattcttaaaaaagagtttgaggaactcttttttaagagttcaaacttactttcatttcgagtcagggctacaataaaatgaaaaggacggctatgatgaaaacagaaaaaaaaaaggggacaatattgaatgacagacaagaaaataatgccagcttcgtgacaatggggctatctactatgcttataatgcgtgaataagtaaatgatataatggcatcaaaacttactataaacagagatcagagtgwtcttgaatatgggcctacctatctgggaagtataaaattacctcattaaagtgaaaactctgctttaaactttaatttccctatttcaaaattgcttttaaggtaaaaatgttctaaaaacatgcctggagtctcaagataaattaccagaaattaacaactatgtggttttttatttttctattagaatttaggaataagtttaactattttttcctggtcattgaaatataaattgaaaaaattttaaattgaaatgtcaacttataaacctgtaacacagataactatattaaa

SEQ ID NO: 419578 - DNA, 562 bp, Homo sapiens
acagacaacacggggatattgtcaactacagtctgtatacaactccatttaggttatagttcatgatgtaaaaagaaacctttaggcccaacttaaaatacatgtagtttcatggtacacctccccaacttcatctcccccacgttgtgcatacgagagagaatcatacaatggccccaaccaagggaactcgtgggcattccatataatacttaagacacattttgacagaatataatataactctacaagttatgtttttagaaagagtattttcatgggatggttaacaccaatattcatttggaaaataagatactgccaacctacatgctgagacacaaacatttctttctccaagggcttgacctcaacaacatgccaccttagtagaatacctttgcgaacctttataaactatatatatataaaaaaaaattctccctgtgagaaatttgtttcactgtaatctgacttaacactatagcctaagttacatgagaaaaaaaaatgartatttctcttaggatataaaaaaacaagagacacaagtaagactgtt

SEQ ID NO: 419579 - DNA, 240 bp, Homo sapiens
actgtgtcctcaaatggtagaggagcaaacaagctctytgagccctcttttataagagcactaatcccattaatgaggccctgccctcatgaacttatcacctcccaaaagcctaacgtcctactatcatcatcttgggagttaggatataaatttgtggagggacataaatattcaatccagagcagacattaataggttggtctacagaggttaaggcattaaaccttgaggagttaa

SEQ ID NO: 419580 - DNA, 635 bp, Homo sapiens
gggcctacctatctgggaagtataaaattacctcattaaagtgaaaactctgctttaaactttaatttccctatttcaaaattgcttttaaggtaaaaatgttctaaaaacatgcctggagtctcaagataaattaccagaaattaacaactatgtggttttttatttttctattaraatttaggaataagtttaactattttttcctggtcattgaaatataaattgaaaaaattttaaattgaaatgtcaacttataaacctgtaacacagataactatattaaaaataacttctgaaagactgatttcacaaatttaaggcctagaaaattttaaacatgtaaacacctgttctctaagttatagtaatataatgttaagatttttaaaatatatttgactttttaaaaatattgtgtttacaacaaaattctactcatagcaattcaaggaatataattagaggttttatgaaaatagataaatccttatttaatagaaagtattagcattgatatttttaatctacacaaatggaatttaaaaatttccaaaagtttctgttaaagatatacagttttgaagtgttaagcttgtctaaaagagttctaacttctgcaggaagaaaagtgc

SEQ ID NO: 419581 - DNA, 661 bp, Homo sapiens
tttagacaggagctaagaccagctgagtaaggtagccactgccaggattgtgaaaaggttgaggaagggaatgtcaggatagggataaatactgcaacctctctccctctcaaatcctgccctccaatttcctacctgtgtctgccacttgcccaaacaacaaaaatccagagtataaggaattctggataatgcagtccacagaggtcagctcctgggacacagaataaggcagagaagggaatatatttaaagggcagagaataaccaacacagaaacttattcaatattttaaaaagayatactggtgaaaaagaaacaaacctggactgacaaagtgactgtgtgagactttaaattgtcctggagcccccagtcttctgtaggccaaatgtaggaaagctgctcatctctcttgagttgaagacttggagcctaatcaagcaatatttcccatcacctggggaccatcccttctgcccagcacatacgtttggtttctatggatcagtgattcctgtgtatctccctttccttccctttctgaatggaagtatttatgaagttatcatgctcttgcttttgccattgcatatcagatgtataggggacaggtaacttgtcttatagttcatagatctctgggtcataaggaaccac

SEQ ID NO: 419582 - DNA, 661 bp, Homo sapiens
tttagacaggagctaagaccagctgagtaaggtagccactgccaggattgtgaaaaggttgaggaagggaatgtcaggatagggataaatactgcaacctctctccctctcaaatcctgccctccaatttcctacctgtgtctgccacttgcccaaacaacaaaaatccagagtataaggaattctggataatgcagtccacagaggtcagctcctgggacacagaataaggcagagaagggaatatatttaaagggcagagaataaccaacacagaaacttattcaatattttaaaaagacatmctggtgaaaaagaaacaaacctggactgacaaagtgactgtgtgagactttaaattgtcctggagcccccagtcttctgtaggccaaatgtaggaaagctgctcatctctcttgagttgaagacttggagcctaatcaagcaatatttcccatcacctggggaccatcccttctgcccagcacatacgtttggtttctatggatcagtgattcctgtgtatctccctttccttccctttctgaatggaagtatttatgaagttatcatgctcttgcttttgccattgcatatcagatgtataggggacaggtaacttgtcttatagttcatagatctctgggtcataaggaaccac

SEQ ID NO: 419583 - DNA, 661 bp, Homo sapiens
tttagacaggagctaagaccagctgagtaaggtagccactgccaggattgtgaaaaggttgaggaagggaatgtcaggatagggataaatactgcaacctctctccctctcaaatcctgccctccaatttcctacctgtgtctgccacttgcccaaacaacaaaaatccagagtataaggaattctggataatgcagtccacagaggtcagctcctgggacacagaataaggcagagaagggaatatatttaaagggcagagaataaccaacacagaaacttattcaatattttaaaaagacatactggtgaaaaagaaacaaacctggactgacaaagtgactgtgtgagactttaaattgtcctggagcccccagtcttctgtaggccaaatgtaggaaagctgctcatctctcttgagttgaagacttggagcctaatcaagcaatatttcccatcacctggggaccatcccttctgcccagcacatwcgtttggtttctatggatcagtgattcctgtgtatctccctttccttccctttctgaatggaagtatttatgaagttatcatgctcttgcttttgccattgcatatcagatgtataggggacaggtaacttgtcttatagttcatagatctctgggtcataaggaaccac

SEQ ID NO: 419584 - DNA, 445 bp, Homo sapiens
agatccctatctgaaacaaagtaaactaaagatgtttttcttgatcaatgcatagcaataactgctgttcaaacatgtgaggaatcaccagtaaattgggggatagaaagcaggamaaggagcttttttctcttattttttttcatttatcagttttcccatttgtccatcctttcctataatcatggaaatttttatttttacactcctctccccatttttttatcctagattgccaccacaccaaggttttctagagttaggcagaaagagaacctgggcctagatgctaatggaaactatcccatgctttctcagactctctttcctccccagagacaagaggagcaaaacaggagttgatggctcattgctgttgcttctgtggctgccctgtttggttgacctgagctttttttaaaaacctccactcttgacgcttaac

SEQ ID NO: 419585 - DNA, 576 bp, Homo sapiens
ttcatcatcagttatccctagtgattcaaatttagcacaaacctgctgtgagtacatattaattaggtgaatacagtagaatgcaatcataacatgagtcttttaataactattctttgtttgatttttattttagaagtttgaagttattttgttgaaaatctagaaaatctttatgtgagcaactgaggttcgggtagcccacaacagtttaaatcaaacattaacttgcagtaaaacactactgaaagtgtctttgattttgaggtgcagagagctgtttcaagttaagttgctatattagtctgttctcatgctgctaataaagacatacctgcaaccgggcaatttattaaaaaaaaaaagaggtttaattgactgacagttccacatggctggggaggcctcaccgtcatggtgaaagagcaagggatgtcttacatggtggcaggcaagaagtttgtgcagaggaactcctgtttataaaaccaccagatctcatgagacttactcactaccrggagaacaggatgcgggaaaccacctcggtgattcagttatctgcacctggcccca

SEQ ID NO: 419586 - DNA, 563 bp, Homo sapiens
aaaaatttttacactttatctcgggctgcttctaaaccctccaccagaaagaattaatcctgcaagcacttaaaacaaaactgatgtgaggaagataataaaacctgtccagggtacagacatccagatttgcaatttagggtgggaagactttagagaccttgtctaacagggctaaagagtatccttatggttttaaagtaggtacattgttttttgtaagcatttctagggttatataagacaaatcagagtctgatgtattgaacacaattggatcttattctgccatatttgtttttaattcacgatttttmaatggatttactggtcatatttctcaggtcatggcaagattttttagtcttaaacttatttagctcagtccttctagatcaatggttctctgccctgaaggtgtagcaaaattgtttgatagcttttgcaaaatttacatacccagcagcctccccatcagctgaataagaattgcaatgtggatgtggcagaggcaatcaggtatgtggggttagaagaagctgtcctggtcattctgttgccac

SEQ ID NO: 419587 - DNA, 563 bp, Homo sapiens
aaaaatttttacactttatctcgggctgcttctaaaccctccaccagaaagaattaatcctgcaagcacttaaaacaaaactgatgtgaggaagataataaaacctgtccagggtacagacatccagatttgcaatttagggtgggaagactttagagaccttgtctaacagggctaaagagtatccttatggttttaaagtaggtacattgttttttgtaagcatttctagggttatataagacaaatcagagtctgatgtattgaacacaattggatcttattctgccatatttgtttttaattcacgatttttaaatggatttactrgtcatatttctcaggtcatggcaagattttttagtcttaaacttatttagctcagtccttctagatcaatggttctctgccctgaaggtgtagcaaaattgtttgatagcttttgcaaaatttacatacccagcagcctccccatcagctgaataagaattgcaatgtggatgtggcagaggcaatcaggtatgtggggttagaagaagctgtcctggtcattctgttgccac

SEQ ID NO: 419588 - DNA, 569 bp, Homo sapiens
aaacatgtggagtgtaaaaaaaaagctagacacacaaaataatatatactgtatgattccatttacrtaaagtacaaaaataagcaaaactaatctctgctgttaggaatcaggataattattatccttgtgtgcagggaggctattggggtgctggtaaccttttgctttttgatctgagtgttggttacacaggagcactcattttatgaaaattcattgagctatgatatgtttatgtgtactttgggtatgaatgttccacttcaattaaaatttttacaaagtgatgtgacaatgaaagcaaaatagaacctattataatcaagatttagtaaataatcatagatcaatatatcagtgaggaaggtgatcagaaagataatcaataaatctttggggcgtgaagatggagacctgttaaagctgagaaccaaccaaagaaggatttgcactgaacagcttagcaatgaatgttcttccagagaggctatttgagaggtgctcccacattgagctgcctcacaagagcaagacatcaactgagaaggcatccctagggaccaaaa

SEQ ID NO: 419589 - DNA, 616 bp, Homo sapiens
ctgtctctaaaacaaaacaaccaacaagcctgagcttcagcagcattagtggtgggaaatcaggccttcctatggcatcttcccagtgggaggtaactttcgctgtgtggtttgagggacaaatcaacagggcacccaggaaggtctgtcccatcctggtttgagaagccccactgtgccctcatccaaaaggaagatccaagtacacacttggcttgggttctccccactccagttatcttctggtttcagtcaggctgagtgcctggcattaattaggtaccccaaatctattgctttttcctttcatctcatgctttttaaaactattacaaaactatatatatattttaaaaaactgttaatgttaattgaatataagatcctaatgagtttaatttggttatatagttattttaaggtagtggaaatacaaaatgacaccataattttaaaaactggtggaagggtcaataagtcatctggccttatttggttagaatgctcaaacagagaatttgtacctgaaaacataaagtgtaatttaaaaaaaagccaaaaaacaatttwaagtaaatatagtagactttatagagatttccatggactgatagct

SEQ ID NO: 419590 - DNA, 490 bp, Homo sapiens
ttctggcctgattcattctgrtaagttgacacattccaatagggttgcttgtgataaaggttaacgcattgccctttatgcttattatgctttctctacaaagacatattcaataaatatttatattaatttatctttttgttttgagacagtttatagggtcatatgaatggagtcaggagatctatgtttgaagcttggctccacttactacttgtgtgaccttgagtaggctatgaattttagtatactcaactttaaaacagatggtggtgataatagcaactctgtcattaagataaacctcaagtttcttatttgacaaaatttaataggttcttctttgtgtaaaagaatttaagggctatgtaccagcactgttctaggctatagagactcagcagtgagtccctgatatcctggcattcatggagtcaaatacaattaattaagatattatataatttcacaggtggtgacaactgctgca

SEQ ID NO: 419591 - DNA, 490 bp, Homo sapiens
ttctggcctgattcattctgataagttgacacattccaatagggttgcttgtgataaaggttaacgcattgccctttatgcttattatgctttctctacaaagacatattcaataaatatttatattaatttatctttttgttttgagacagtttatagggtcatatgaatggagtcaggagatctatgtttgaagcttggctccacttactacttgtgtgaccttgagtaggctatgaattttagtatactcaactttaaaacagatggtggtgataatagcaactctgtcattaagataaacctcaagtttcttawttgacaaaatttaataggttcttctttgtgtaaaagaatttaagggctatgtaccagcactgttctaggctatagagactcagcagtgagtccctgatatcctggcattcatggagtcaaatacaattaattaagatattatataatttcacaggtggtgacaactgctgca

SEQ ID NO: 419592 - DNA, 545 bp, Homo sapiens
tttaattcatatagggcagtgcgataaattgtgatttgttaaggatatatcctatatatttatataagtagaataaaatcttgaaagatcaagacctaggtgttaatctatgcacttttctgtattttttaattgtttccaataaattcgttataattaawatcctgttaaaatccctttaaaaggtatataattaataaatcctcacttctccattgctaccttaggtattatatagtatataaataaaaaagaaatggcttatattatctattttatattgaaaatctctctatttggacttttgaatgaaaagtttgaatattcattgtgataaaataatttaaattattttcatgacaaagtgagaacaaggaattaatgtaaaaagacaaaatgaaattttagtgtaacacctctaacatctaatagttttttggtcaactgtttatttttctttgaaggatatgtaaaatcttatccttaaaatattgaaggactagtaaataatataataacaagtagtcccaacttttgaaagacag

SEQ ID NO: 419593 - DNA, 556 bp, Homo sapiens
ctgtctttgttaaacaatctcacaagctctgtagagagtggttagatagtgaattcactggagatccttatacttttattaagactcacctcttatttactatcaaggaaggtaacgattggggccacttgaatatgaaggctgtatgttgcactacttctgagtccagaagagccattaaactaggagcagtttaggttaaattgactgtcacaacaaagtcaatgtcacaacaaagagacagataggggaaaggagaactaaggtttattgagcagctactttgcaacactcactcttctaatatatttcccctactagttctgcaattccccaagtacttgtggtcctgagttaaggcattaaaaatcacagttaaatgcaaatgttatcaaagcaccttattgcatccagcccagcttagttaaatrgcaccaatatccacccagttgctgaagccaaaatcttagagttatccttgattctctccatccattcatataatttattattaagatgcatcaaatccaccttaaaacatcccaaatctgccttc

SEQ ID NO: 419594 - DNA, 461 bp, Homo sapiens
ttccttccacacttgccccctcttaattcattctccacacttcagttagggtgaactttttacaacttaataaaatcatatccctctggtgctcaaaatcctctagtgttttcccatttagaataaatcccaaactccttaccctagcttataaagccttctatgatctggacctgcctattcttcaaaaggcttctattacttgccccttcaaccaccatactctactgtggactatgagctgttcttcaaatattccaagctcattcatgtggtagggtactctgtacaagttgtttcccctccctagattttctttctccctgtcttcacatggctggtcccttgttgttcagattttacttttactgttagctcttcagagaagactccttcagcctccccactaatgtggctgagtcaytcacatcattgtctgttcctcctgctagaaggggctt

SEQ ID NO: 419595 - DNA, 626 bp, Homo sapiens
gacagctctcactgcatctgtaaataggctgctgtctgtttttctttctttttgtggttgtaaagaatcattcatgccagcgtaatgagcttcagcagctgttaaatgaaattatatattctgttcaactagggccttctaatgctgccattgtctcctggccatcctggtgtcttctctagtrctgagatacttctaaatcacaatggcctgagttgttgttagtccaggagattctgaggtttggatcagactgggcctgcagagtgagaagctattttggcaaagatagccataaagggatgttatttttctatatcacagctgccctcgtcagcaaggactatgaggaatgctagaggtaaactattcacaattttctaaaaaggttttttaaaacaaaattattatttatcaagttatatacagcatgatgttttgtcttccaagtagagaacttaaccaaattcatagacagttaaggctgagggtgttaaatgagacttggcacttctcttccttcgtgatgtttcttcgttccacacctgtcattcttggagctttgtggtcagctcttgtagtataagtttgaagatttttaaatctcaatctattattgctctaaa

SEQ ID NO: 419596 - DNA, 614 bp, Homo sapiens
gatccgtcatttacagaaaatgccttcattatgaagaagccctcctgaaaaaaattggaaaaaaaaccaatacttccaatattataattmaaacttctttggtttaaggataaagaaactcccccagcactccaccaccaccgtacacgcacactcatttattagatttgatatacatatgcttaagtattcatttcctcttttctaaatttggggccattttaggaaggaaaactgttttgttgatatcaagataatgcactggtgtcctataaaaagtcatgccaaaggaagacagaattctttaggagagtattacaaatttacaactttatagttacaatctgtgtatactgtcattttaagaaaagtgatgttgcggcttttcttaggattcccaacaggttgctagacattttcttactcctaagtattgggtgacctcaaacagactgaacatttatagggaatacaatcagcggtaaacaaattttttattaaatcatgcatcctaattcctttattatgttagtcccatgatgtttaatgtccacctcctttgggtcaactcaactatagattctattatctctgaactattaacagaatcctat

SEQ ID NO: 419597 - DNA, 531 bp, Homo sapiens
acaaattaaattaaaataagcaggacatggtggagtgcatctgtagtcccagctactagggagactgaggcaggagaatcgcttgagcccaggagtttgaggttgccgtgagctatgatcatgccactgctctatagcctgggcaacacaatgagaacctgactcaaacaacaacaacaacaacaacaacaacaacaacaacaaaaaggaaataaaagaaaaaaataaataaatgtaataaaatttcccagtcaagtacatctatttttcttcttgcttctytggaaaaggtttagagatattatacctggtgaattagaatcctatttctctgtgaaggaaatatcagcagtatccttcatattgctctctctacacgttctggttgtgtttaactcttcatactcaagagtttatgtgaggctcagaatgttagttatatatatttcatctcatttcagaaagtattttacagagcttcaataaaatgcatacatacaaatatataagctaataatgcatatatgaata

SEQ ID NO: 419598 - DNA, 523 bp, Homo sapiens
tttactttgctgtcttttttagttttttgaattgaatacactggatattttgaaattctttttcatattgttttgttttaatacatgcacttatgtctatgaatgtacattggctttattacacacattttttatatagtacataaaaatttcattctaaaaattttgtaatttccatttctatttcctctttgattcaaggattatttaggagttttagtttctaatatatattttactatatttttattcataatttataattgttatcaaagaacgtgttttgtataatataatttctttaaagtttattgaaacctactttgtgaacaatattgttcctgtgtacygaaattttctttttctattttctgggttatatgtagataatatacatatatcatcaatgttgtttatattgtatgttttatatatttgctgtttttattttttagatatttactaatttgttatgtacttaatccctcagtttctagtaaaagcatgttaaacccctatacta

SEQ ID NO: 419599 - DNA, 561 bp, Homo sapiens
atcattgtacattggcttatttagtctctcagaaacccaaaccgatgaaggctccatctcaacacacactttcctaagaaaggcaaataaaagagaatatgccaaacactcactggctcttcaagcttccatctagaagtgacacacggcacttccacctccattgactacaagtagttacttggccactaaattcaagtattgtagttacctgaatacctaaattcaaatgggcaaggaaatgcaatgctatcatgtgcccaggtagaaaaggatatttgtgtatagtcctattgaatacctttattcccctctgttgggttgaaaaccatacaatatattcttatgcttttaatggttgttcttaaatatgctttaaacctatctacttaactacacagttggcctccatatctgtgggttccgcatctgtggattcaacsaagcatgaattgaaaatacttgagaaaaagacatctgtactgaacatgtgcagagtttttcttgtcgttattctccaaaacaatagagtaaaacaagtatttacatagcacttatatt

SEQ ID NO: 419600 - DNA, 460 bp, Homo sapiens
gagtcaataaacgaaagagaaaaaatacttagtatgatagatagtgataagggcaatgaagaaatttgaagcagaggatgaagaaagaagtgcagaataatgggggtggggtgctatgttgaaattttaaataccgtgtgggggacctttactaagatgacatttgaggtaggacccaaagaggtaagccatgaggatatcagggaaaagagcttggagatggaaagaccagcatcgtagcyctccacagcagaagaatgttctcatgttcgaggaaagtaaggggttcagtatggccaaaatgccctaagctagaggaaaagcagaaagaaatggggtcacattgagatacaggggttagagcacaaattgtgcagtgccccttagcatttgatttttactgaaagatgggaacccagaaaagggatgtgggtaaaagaatggcctgctatttgaccaa

SEQ ID NO: 419601 - DNA, 543 bp, Homo sapiens
gctctccacagcagaagaatgttctcatgttcgaggaaagtaaggggttcagtatggccaaaatgccctaagctagaggaaaagcagaaagaaatggggtcacattgagatacaggggttagagcacaaattgtgcagtgccccttagcatttgatttttactgaaagatgggaacccagaaaagggatgtgggtaaaagaatggcctgctatttgaccaacttttcttttcatctctcgaagagcctagcaaagtactgagcacataaaggctgctgaatatattgtgactggttaattgcaaagggagcaacacctttcttcactgctttccacaactttttaccttaatcacaattagatgcaggtttatttctacctaaaaatatacttactgcagagatatggacactaagaaagttcagtttayacatagtcaaggtgtgagccaaaacccatttctttactgatgagacctggatctctcattaaaatatcacaggtataatagaaactagcacacttacatacagtgaaggatac

SEQ ID NO: 419602 - DNA, 579 bp, Homo sapiens
actgtaaattcttatttctaattttatttgtttacttttttctcttgattaaatctgctaggacttttgtactacggtttgttcgtgtcctttttgttgttgttgttgtttttgttttwgggacagagtctcactctgtgcccaggctggagtgctaatattttgtatttttagtagagacaaggtttcatcatgttggtctcaaactcccggcctcaagtgatctgcccacctcagcctcccaaagtgtcaggattacggtgtgaaccacagcacctggcctgttcttgttctttaggaatttagtactgtagtttattcgtcaactttactatttttctattttctcatgcattgatttatatatttatttttgatattttcttcctcttgtttagattctttcattgttctgtcttaacttcttgaatagcagttgagttgaatttttttaaaattctcttttagttagaacaaaaaccattttaggccacatacagtatttgcctttgaacatattccataaggtttgataaataatggtcctattttcattattttaaaacaagtttgtaattt

SEQ ID NO: 419603 - DNA, 528 bp, Homo sapiens
cattctatattctataaatcatgcgcttgtatgttcactgcagcactattcacaataccaaagacatggagttaatccaaatgtccatcactgatagactggataaagaaaatgtggtacatatacaccatggattgctaggcagccataaaaaggaacgaggtcatgtcctttgcaggggcatggatggaggtggaagctgttatccttagcaaactaacacaggaacagaaaaccaaacactgcatgttcttacttataaataggcactgaacaataagaacaatggacacagggtggggaacaacacacattggtgcctgtgtggtgggaggggggacaggagagcatcaagaagaatagctaagggatgttgggcttaatacctaggtgatgggctgatctgtgcagcaaaccaccatggcacacatttacctrtgtaacgaacctgcacatcctgcacatgtaccctggaacttaaaagttgaagaaaagaaatattacagagcttgtgacgacttacagtcg

SEQ ID NO: 419604 - DNA, 612 bp, Homo sapiens
tgtgtgtgtgtgtgtgtgtgtgtgtgtgtgtgtgtgtktcagaacaaatgttttaattcaggatttaggtgactgctccttttagaaaaagaaggtgccagtagaaactgaaatacaaggaactcagctagtggtcaggaaggagcttagctggaggtggcgactgtttcgtcagaagttagtatctggttgtcattgtcatagagagatctctggtttcttcttcaaaagtcttaacacagtcttattttaacactcctctgacatttatccctagcaccttgttctccatagaaagggtttcaaatgattcaatattttctaaaccttaactggatttaattctccccttggtgactgaaaagatagcaacctatgcactatgcaactgttaaccttcccccactcaacaaaatctcttcccttagtttttgaggaatgaacttgagctgcttcctaaaattatcactcagtactaggaactgagacattgagaatactgagcaagaattttctaccaaggtaaggaccaaacaaactcaaaaaacattccaggatgaaaggaagtgagttctctatttgtccctaagtcatcctctgctcatggagcta

SEQ ID NO: 419605 - DNA, 537 bp, Homo sapiens
tagtgaagctgccctctctgaggctacagtggcaatggctccatcagtccttctctggctcagactcaacattcttcacttttggtctcctttcttggttcccatggcactgccttttcttggatcacttcacctgctctctcaacagattcctttcacttccttctcttcttttccccatttcttagagacaaaaccccaaatacagttattggttcttttcccttcaatattatccacttcatagtttctatgattatgctgtaagccctgaacttagtttcagttctgaatacacaacaatcttctaaaatcccccttcatgttaagttcaaaagtctgaacagaaattaacttcctttccctttccctcttcttcctatgtttacaatatcctctakgatctctcagtcttattggccagaaaacatggtcagaatcatcttcaagtttttctcctctctcagtccctacatttaattacacatccaatctactattctattttaataattttgaatttctattcccagtccc

SEQ ID NO: 419606 - DNA, 632 bp, Homo sapiens
aagcatgcccatctctttattgtttgtggctgataacatactacaacagcaaagttgagtagttgcaatagagactgtatggcctgcaaatcctaaattatttgctttctggccctttactgaaaaatgttactgaccctggtgtagactgctgtgtgatctcgattcattctgtgtaatgtggctgatttatttttagcttgagtaaccagatctgtaactttattttagttttggtttctaagaattggaatttcatcctcacctcaataacaggcaatatcacatcgttccacttaacaattcttttatcctcttttgttttacatttaacattaatatattcatttcttcagaatattgcccctgtgtatcacctgtgtggcactcttttgtgacatttgtatcttgtacactgtcactatcatagtcttaaatttctttatgtgattaatatacatgtccaaataytatatagcactgggcacttttcacaggatcatccacaaaacttggggtgagtgtgaaggatcatattgtattagagtctttacaaagtttcatgttacaggattgtcttaattattttaagcaaaagtatgtgttttactactcgggcaaaatacattaga

SEQ ID NO: 419607 - DNA, 644 bp, Homo sapiens
agcactccagcctgagtgacagaaccacacaagaccccatctcaaataaacaaaaactgggaggattaagatggcaggtaggagggagaactgctgcagcttctgcttggttggacagaacagcatgtggagactcacattgtgaacttttgccccaagaactaccacaggaaaataccaggaaagccaagagaatccacagaccttttgaaggaactggatcascgctgcaggctccctaaaatgccaaaaaagtgtgagtctgcttgctttctcaacagggaagctcgtgatttagggtgagttctcagccctggtcataagctgcctggaaatagacttggtgctgttgtggagggcacggtgggagtgagactggcctttaggactctgggctgcgtgggagcagagtgaggcctatgacttccggctttcccccacttccctggtggcgtatatgactcatcagaggcagccataatcccctgggaatataactccattggactgggaaccacaacctcctcccccacagcagccatagcaagccccaccaaaggagagactgagctaagacactcctgtccctcccccaacctggtggtcttactctacccaccctggtagctgaagacaaaggttat

SEQ ID NO: 419608 - DNA, 280 bp, Homo sapiens
caccagttctcctcaaactattccaaaaaattgaagcagaggaacttctccctgattctttctatgaggcaagcattaccctgataccaaaaggagataaggacagaaccaaaaggaaaactgcagrccaatattcccaatgaacacagaggcaaaatttctcagcgaaatactagcaaaccaagtccaacagtacattaaaaagataatacaccatgattaagtgggatttatcccagggatacaagaatggctcaacatatgcaaatcaataaaatat

SEQ ID NO: 419609 - DNA, 498 bp, Homo sapiens
cttggttcttccatcttccctttatcatccttcccatgtgtccccatgaacttggtaaaaacccaagggaatacaggttgcaaacccaagagagggytgaggtttatgaggtgctgtggtctccacaggttcacattgctagtctgaaaactccacatttctgtccttctgtcagactcactcacttctgataagaaaacctcttagccttacttgattacagtaatagtaaaagtttatggtccctcatgtacagtcttaaatccaaaacgctcccagtcttttttgtaattttgtgtcaaactaatttagtggtacaacctgacctaacaggatgctatttacagtcttcatgtacctcgcttagtgggaatattcatgtttggtggcaaaaataattcatgtgtttttgactatagagtgcctccaaagaccctgctgtggataataagcaatttgtagaagatacatcgtaactacttttctgaagttggaaga

SEQ ID NO: 419610 - DNA, 605 bp, Homo sapiens
ctaattttgacccttgtttttaaataaatggttctcatgctattttccctctttatcaaaactattgattctcaatcagagacctcaccctaatcagaggcagtatcagaatcttggagtgagtgtggytgtcaggggaggcaaggaaaaaaagaaaggagtaattaggaaacttctatgtgatttctgagctgttcccccatgtttaactctgcactgcccagcctccccatcatgtgtgtttacatatacgtgtaaaaggggcccctggaaagcttaagaacaagactttgcttttctgttgagaaagggagggagagaaatcatgaagacttcaaattaaacataaaccacagtcctgatgatttctatgcaatatctaccctaaaaacattttcctggtgatggttcatgggtaaaacgtcagatttgacaaagcagctctgtcatagtgccatggaattacctcatctgatgacagtgctaaggactgagagagccctggtgttttaggttctgctcctaagccgctgaggtctgctgaactggtactgctgggactgaagtcatcattgaaggtaaaattctgtaaaaataaatgaagc

SEQ ID NO: 419611 - DNA, 621 bp, Homo sapiens
tgtttgattttatttttctattcttaattttaacacacaaagtggatcattctcactcccgaaccacacaaagttaaactactttcgagatgcatatagcctcagatttacctttattttcctgagattgttgtcctcattctgagagcattctacccttttccaatgtacagtataaaggaaagccacactaacaaagataattaatttgggaattctctctcctcatctcccgcccattatgctcctttaatgctcctttaattccaagaagaaggtacaatttctcaccaaggtatatgtcagaaaagagaaaaaagaaaagtaaacagcagtggacaacccatgaagtggagaagtggtccttgcatgattttatagtattttatttttagtgtgtttcttccttagtctatgatattgagattatttccaaattttataaagaaatttaagcatcattagatgcataagtaactgaaggtggcatagtatgwtggaaaaacatctacacaggaggagcaagccccaggttgacattaactgcctgctgcataaccctgggcaaatcaattaaattctatgaaggtaaagttcttcatcaataaagtatggtattat

SEQ ID NO: 419612 - DNA, 603 bp, Homo sapiens
taacactttttaaaaattctagataaatggcaaccaatgatgaagccattttcagagtttatccagcaattttgagtataagaaaatatacttctagaccaggcawcaggaagctttctttacctttcaggggccacagagtaaaatattttaggtttgtgagatacacagtctctgtcacaacgactcaacactgctactgtagcatgaaaatagatagtatgtaagtaaaaaagtgtgactgtactcccataagacttcatttacaaaagcaggtggagactacattcggttgattatccctcttctagaagatctgcactggttacgtggagaggtatattagcaattcatccaagaacattattaagtatcaattatatgcctgtgttactttgatcttcgtctttttttcctatatgactacgttagtgtttactgaaactctgggctgctattctacaaaatcgctctatatttttctatatgactatgtagtgtttttttctttatgactgtgttagtgtttgttgaaactctgggctgccccactcccctgaagaactcccttgagtagtaaacttatagagagctgaagagata

SEQ ID NO: 419613 - DNA, 615 bp, Homo sapiens
  misc_feature (1)...(615): n = A,T,C or G
gaagacatacctgagactgggcattttacaaaagaaagagatttagtcaacttacagttccatgtggctgggggaggcctcacaatcatggtggaaggcaaggaggagcaagtcacatcttacatcttacatggatgacagcaggcaaagagagagtgcttatgtagggaaactcccatttttaaaaccrtcttatctcgtgagacccattcactatcacaagaacagcacaggaaagacctgtccccataattcaatcacttcccaccaggttcctcccatgacatgtgggaattgtgggcgtaacaattgaagatgagatttgggtggggacacagccaaaccatatcaatacctcaacataataaaggccacatatgacaaactcacagctaacattgtattgagtggggaaaagctgaaagccttttctctaagagctggaacaagacaagaatgcgcactttcaccattcctattcaacatagtactggaagtcctagccagagtaatcaggcaagagaaagagatanaaggcatctgaatatagacagagagtgtcaaacggtcctcttttcagatgatgtgatcttatagctagaaaaatttgaagac

SEQ ID NO: 419614 - DNA, 441 bp, Homo sapiens
aatgatacaaatacaaagcaattcagaagcttatatcctagaatggtaactttagaaaagcctagattgaccttttatctttatttaaatgcatcatagagtagcatttgacagagtatcacttactacaaagttgacaggarattgagggtagcagttaatgtataaaatgcatataaattgaaaacagcagccaagctcaaggtaaaaggtaaattagaattcagattaatttaagccataaattctttaaacttattcaagaatgttgttgtcagatcttttagtttaacagtttttctaataggaataaagttcattttctctgaaagacaagtgctactcaaactacaattcggggagaaagaaaaatgattttagaaattatctgctagccaaagattagaaactactgctgctatttccagaggtgaatgaaag

SEQ ID NO: 419615 - DNA, 613 bp, Homo sapiens
aaaaacagcagaaaatagaagaaagggagggaggaaaagaaaaaaaagagaagaaagaaaataaatataaggtcaaaatcattttattatcaattataccaaactagaacaaatatctccaattgcatataacttattccagaagacagaaaaacaaaagtagtacaactttgataccaggaatgcagtaaaactttgacagtgtgagatgtatgaagtaataaaacataactttggtaccaaaagctaacaatgatgagaaagaaaacttataggtccatcccattcataaaaacaatgcaaaaaggtcctaaacaaaatattagcaaaccatatgaagcaacatataaaagagataatatatcatagctaggttgggtttagccaggaatgcaagtatggtttaacattggaaaatctgtcactttttatatttgacaytgtactggaaggcaagtaaaagaaattaaagaaataaattgtaaagaaatgaaactgttattcacatatgatgagattgtctatttaaaaaatctcaaaaagtacctatagataagttattagaaataatataaagttatagcaactttgctgaatacataattaatgtaaa

SEQ ID NO: 419616 - DNA, 510 bp, Homo sapiens
atcttcatgggagtcaggcatgttctctctgatgaggggatgttagagcaaaaacytaagtgaaataagagaacgaataatgtggatatctagggaaagagcattccaggttgaggggagaaagtgtgcaaaggccctggggcagaacttcctggacatattcacttaatagtgaggttgtgctgggagtgtgcaaaggccccggggcagaacttccgggacatattcacttaatagtgaggttgtgctgggagtgtgcaaaggccccggggcagaacttcctggacatattcacttaattgtgaggttgtgctgggagcagagtgaaggcaagagagagtgggagagtgagagggctgaaaccacagggagccagaatcagtcttgttagggcttaagatgaagatccaagctttgctcactggggtatttgaaccaaggagtaacatgagctgaggctacagcagtaatccagcaatgtggagagaaaggactggaccaagaggatcc

SEQ ID NO: 419617 - DNA, 513 bp, Homo sapiens
attatgtttttataattgtggacttacttgactaatattttaagatattaatgtccatgttcataataaagattggcctgtaattttaatttcccttttttgtaattaattgtcaggttttagtatcaaggttatattcacctggtgaaagacttgagagttatttcttctttttttattctccaaaagttagtgtaaaatttagcattttttcttccttaagtgtttggaataattcacttatgaagctacctgggactaaagatttctttaaggggrattttaaagtatagattacatttatttaaagaatatagaaatattacaattaaatgtttctgcttgtgtatgctttgataaatttagcaattcattcttttcatttaaatttgcagatttagtggaataaagtagttcataatatccttttgttacatatttaggatctgcggtaatatcctctttatttctcacatttagaatttgttttctttctcattttctttctgtcag

SEQ ID NO: 419618 - DNA, 419 bp, Homo sapiens
tatgtctaaaagaatcagcttaaggcactggttcactgatacataactcartatctcctcaatctttatgttataattcagtagatagaactcaaataagcaagtaagaaattaaggcactgagggcgaacagctctagggagtaaaatatgaagcacacaaataagagatacagcaagtttcagattttaaggtttgaaaggtttgaagaaaggattgcttctcagatatgttccaaagaggagttgataatttcatagtatttcatagctatttattgattttgcttaagtccaaaatgtggtacagataatattttatttattattatctacatttcctggttttttttccttctactcagtctcccactattcagatattttggggcctatgtacttaaaatcctggctcattct

SEQ ID NO: 419619 - DNA, 419 bp, Homo sapiens
tatgtctaaaagaatcagcttaaggcactggttcactgatacataactcagtatctcctcaatctttatgttataattcagtagatagaacycaaataagcaagtaagaaattaaggcactgagggcgaacagctctagggagtaaaatatgaagcacacaaataagagatacagcaagtttcagattttaaggtttgaaaggtttgaagaaaggattgcttctcagatatgttccaaagaggagttgataatttcatagtatttcatagctatttattgattttgcttaagtccaaaatgtggtacagataatattttatttattattatctacatttcctggttttttttccttctactcagtctcccactattcagatattttggggcctatgtacttaaaatcctggctcattct

SEQ ID NO: 419620 - DNA, 581 bp, Homo sapiens
cctctggtaaggtagaacactactaacttggttatatgactggagcactgaaaatgatttacagatgtcaacatttatatacttttccattgtggttgagttaggactgattttatatcagagaagttagtctcttctcccctgtaggccatcgaactccaaacggtcatgcaaccagaaccacagacgatggctcccttttactggggacacttagctaggcctctgggggagatctgactgccatcttcccaaaatagtgccccctgtcagcaggaagcagttaagatccgtctttgcccctattctaatggcagttagaattacctctttggagaaggaacgatagactaaatactaaaaagtattacagcttttgtctttcttttaaaaaaatatttcatttaagtgcttattttccttcaaaccaattaattagagctcttttctttataaacataacacacataacacatatatgattaygtagacagacagaagaaaatctagtagttgtaagatttttcatttgccaatctaattggattattggcctctgggtggagccctttaagagcaag

SEQ ID NO: 419621 - DNA, 658 bp, Homo sapiens
  misc_feature (1)...(658): n = A,T,C or G
nnnngactctagaggatccccggccatctttccacatggctgtacaccactcattcatcagctcacctgtcattcatctctatgtgtgtgtatgtgcatgcatgcatgagttgcacacacaaaagataacagcattgagttcaatctcattttcatctgagaatgggttcaaactcacacactaaaattgcattcatttcccatttctgcataacaaattactatacatatagcagcttaaaacaacacctatttattatctcagagggctggaagtcacaagttcatcatgacgtgctggatttgctgctcaggctcttayaagaccaaaatcaaggaattgacagagctatattcctctctgaaggctctggggaagaatggagctcattcaggttgttggcagaattcaactccttgcagttgtatgactgaggtccaggtttccttgacatttggccctgtctatatttaaaccagcaacatttgttgaatcctgctcgtgcataacatgtctccgacttttcccttctgttgagccttttcagcttccttttgtgtcctcaacgtgggagaaggctctgttttaagggttcacatgattacatcagactcacctagacaatccagaataatctccctattttaacatcaattt

SEQ ID NO: 419622 - DNA, 545 bp, Homo sapiens
gtgcaggcagcctagaaagtcttgttgttcaatttgtgtatcttctgctaacattattacaatgaaacttggcaattaagtcacggagtcaatggctggcagaaagtatgtactcaaatgattaagttctgaatcaatggatgaatgaataaatgtctctgtcaggatgatagaaatgcatgcaacagacaaaatcccaagggggtagcaacacaaaaagaatattactaattcacagattattttaaaagacctaagggataacttagaataaagtgcaagttgccagcttatgtttatgctacaaagcccattatcaagtctaaccaatgatctggaacccacagtagttacaaacttcataaaagttttatataaaggccaaaatttagtcaactaatcagatctgtgcaaacatytaagaataaaagtaatattacatattactaaacatgtattttcttctttaatgacatattaatacatttaatactctatcagttgtacgtgagaggcatacttagtatacaagacaattggcttaa

SEQ ID NO: 419623 - DNA, 448 bp, Homo sapiens
ttttctaatcttttcttcatgctttatggcattaacttgatcttcaatctctgtgctgtgtttttcagctccatcatgttgttcatgtttttctctaagatggttattccagtaagcaattccctgacctttttttgaggttcttagcttcctggctttgggttaaaacattatcctttatctcagaagagtttgttgttacccaccttctgaagcctacttmtgtcaattcctcaaactcattctctattcagttttgttttcttgctggtgaggaattgtgatcttttggaggagaaggggcattctcgtttttggaattttctgcctttttgcacttgttgttgttgttgttttatctttgtgcattgatattcctttggtctttcacgttggtgagttttgaataggtttttttttttttttttggaaatctttttagtagatg

SEQ ID NO: 419624 - DNA, 570 bp, Homo sapiens
cattggcagtctcctttcaccctccgctgttgaaaatattgcctcttttctaactgttttctttcacagaggatttaagtgtcacatgggactgagaggatatctaaggtagctgaagatttctggttaagactgcactatggtgttatgtgaagtcccaaaagtaactccagtttctgacaacccatcaaagtggtgccattaaaactccagacttttctgttgcattttttttttgtcattgtgtggctagtgtgtctcctatttcttctttgtaygcaatattgtgacctggagatataatcttactgggaaaagtaagtggatgtcatagtaattagaaatgtaattcaaacacttgcaaaacaagaagaatccaaaattgtagtttaaaaatttttatttggtaagagtctttttgttccctgacgatagatattcatgcactgtatggaatggcaaacatttaaataaaatttctctttttggatgcttatttgtctttaaaaagctcagcactgccatatatatctaaacagtttctttttgagacacatgattttttctgca

SEQ ID NO: 419625 - DNA, 527 bp, Homo sapiens
agcagttagcatctttttatcaaaaaacaaaaaaawatataaattttataaaattcctaaggaaaatgcattttaacttaactgtatgaatttttaatatcatctggcttatgagatacattctataatttgatttgaatggcagtattattcttttccttatttttacatttattctttattgtctgcagaaaaaaaatgatataatgaaatacttaagttgtgtccatctttgaagttgagaacagttggtctctcagagatgattagtacctctagcaggctcaacatcacataattcaatctcctttgaacctgaattgagtgccaatagtgctatttattctgcatttgagatgacagttgatggctaatattttctgtggggaaaaacatagccttaagaaacaaacttagcatgcttaacagtgaattgtggtacagcaacaatagagacccaacttatttttaaaattccagcaaccaaaacaaataaaaaatatgatgttataatgtatatattataa

SEQ ID NO: 419626 - DNA, 571 bp, Homo sapiens
cccttaaagatatgtcagatagaggagaggtgagggatggtgaattaaattctatagcaattatcaccctacagaagagtcaatttgaataactattcacgtgtggaaatatattcataagarcagaaaaaaaaacacaggagctatcacagtgcctggttgtagcacaataagaagaagatatggatttaagagggtagaaagaacagttttacattattcgtatcacccctacccctacccaggcaggacatcatggagagaattattatccatttaggagaaagagaggaaagtgagaacaggactttgcctaggacctcaacactgggccagccacagtaaaacccagtgccaggcagatcctcatgatcctgcattccaggccagtattcatggactgagactatggaccttccctggcaccaggttagcccacaaagccctaggtttcaggcttatatagtgaacttgatctccagcctgcaccatcactagaccaatatcaatgaccctgggctccagaaagccctcaacatcaggaagtcatcagcagtcttcagcagtccta

SEQ ID NO: 419627 - DNA, 571 bp, Homo sapiens
cccttaaagatatgtcagatagaggagaggtgagggatggtgaattaaattctatagcaattatcaccctacagaagagtcaatttgaataactattcacgtgtggaaatatattcataagagcagaaaaaaaamcacaggagctatcacagtgcctggttgtagcacaataagaagaagatatggatttaagagggtagaaagaacagttttacattattcgtatcacccctacccctacccaggcaggacatcatggagagaattattatccatttaggagaaagagaggaaagtgagaacaggactttgcctaggacctcaacactgggccagccacagtaaaacccagtgccaggcagatcctcatgatcctgcattccaggccagtattcatggactgagactatggaccttccctggcaccaggttagcccacaaagccctaggtttcaggcttatatagtgaacttgatctccagcctgcaccatcactagaccaatatcaatgaccctgggctccagaaagccctcaacatcaggaagtcatcagcagtcttcagcagtccta

SEQ ID NO: 419628 - DNA, 601 bp, Homo sapiens
cacgatcttggctcactgcaacctccacctccagggttcaagctattcttctgcctcagcctcctgaatagctgggattacaggcgcccaccaccacgcccagctaatttgggtacttttagtagagactgggtttcgccatgttgacmaggctggtcttgaactcctgacctcaggtgaatcacctgcctcagcctcccaaagtgctgggattactggtgtgagccaccacacctggctgttggtgataatttttatatcaactccaggaagttaaatagtattatattttacacatattattcaattataatagataatgcattttctaaatttttttaaattatcagattaagaatacacagagtgtaaatattattttatttttcaacatctttatatagaaacatactaaatctactcaaaaagtctaagggacagtataataaatcacatacactccttatctagattccccaattgtcaccattttgccacattgttttatctctctttcatttttttcactgaatcttaggaaactggtctgcacatacaaaaaaacttcaccttcagatacttcattgtgtttcctaaaaat

SEQ ID NO: 419629 - DNA, 601 bp, Homo sapiens
cacgatcttggctcactgcaacctccacctccagggttcaagctattcttctgcctcagcctcctgaatagctgggattacaggcgcccaccaccacgcccagctaatttgggtacttttagtagagactgggtttcgccatgttgacaaggctggtcttgaactcctgacctcaggtgaatcacctgcctcagcctcccaaagtgctgggattactggtgtgagccaccacacctggctgttggtgataatttttatatcaactccaggaagttaaatagtattatattttacacatattattcaattataatagataatgcattttctaaatttttttaaattatcagattaagaatacacagagtgtaaatattattttatttttcaacatctttatatagaaacatactaaatctactcaaaaagtctaagggacartataataaatcacatacactccttatctagattccccaattgtcaccattttgccacattgttttatctctctttcatttttttcactgaatcttaggaaactggtctgcacatacaaaaaaacttcaccttcagatacttcattgtgtttcctaaaaat

SEQ ID NO: 419630 - DNA, 525 bp, Homo sapiens
ttcacaatttgtgagccatgcggtccaagactgtcataataatcccagagtctggtcccaacacccttgcacatagcctgcctytgggtatggttctcttctattctggtccacagtggttttcttcctttcttaactcaagttaagtattgatgcgtccgtttttattctataatgtctatgtgttttgagcaaggcgaaggtttcagcatatgcccaagattccactttgaaatggaagtcttcaacagagaagactgattatattgttcctggctaacagggggtctccttggttttcagggaaataacttagtcaccattttattttattctgtaacaatgccttagttgactgccaccaaaccacagtctgatatatttacagcctgcttttggcaaagctgatatgattgaaagtttcttttttttagccccacaacctctgtttctgtggtaagataccaaatggggctaaagtaatgttctaggagctcttctgggcagtcagcaccccttccattg

SEQ ID NO: 419631 - DNA, 469 bp, Homo sapiens
tttatgtgattgtggtcctggctaagcaagtctgaaatctgtagaggaggatgtcaggaagggcaggatagagctatcaggcatgggctgaagctgatttttgcaggtggaatttcttcttcagagaagcctcagttctgatctgaagacattccaattggttgaatcaggtccacatcttattttttcttytacttaatgtcatttacttaaagttaactggttatgggctttaatcacatgtacaaaattcttcacaacaaaacttcgattggtgtttaattgaataaatgactactgtagattagccaggctgacacatagaactgaccatcacaatctaacttttatcaacttggcacccataaatgtctgtttaaaccttatttaatctccaaataaagacaacaatgaagtcatacttctacttaatataggacaactattttgcattccaccaaaaacttgc

SEQ ID NO: 419632 - DNA, 469 bp, Homo sapiens
tttatgtgattgtggtcctggctaagcaagtctgaaatctgtagaggaggatgtcaggaagggcaggatagagctatcaggcatgggctgaagctgatttttgcaggtggaatttcttcttcagagaagcctcagttctgatctgaagacattccaattggttgaatcaggtccacatcttattttttcttttacttaatgtcatttacttaaagttaactggttatgggctttaatcacatgtacaaaattcttcacaacaaaacttcgattrgtgtttaattgaataaatgactactgtagattagccaggctgacacatagaactgaccatcacaatctaacttttatcaacttggcacccataaatgtctgtttaaaccttatttaatctccaaataaagacaacaatgaagtcatacttctacttaatataggacaactattttgcattccaccaaaaacttgc

SEQ ID NO: 419633 - DNA, 576 bp, Homo sapiens
aagaacatatctttttgtttttgggtcttctttagtttctttcaagaagtcttatagtttttagcatacagatctttaacttccttggttaaatttatttcccaaatattttattctttagatgcttttgaaaataaatttgtttttctaatttccttttctgatactttgttattagtatatagaaatactactgaatcttgcttgttgatttcgtgtcttgcaactttactgaatttatttgttcttccttttttttttgacagtcttgctctgttgcccaggctagagtgcagtggcctgatcttgactcactgcaagctctgcctcctgggttcatgccattctcctgcctcagcctctcaagtagctgggactataggcacatgccaccacacccagcctggctattttttttttttttttttttgkatttttagtagagacgaggtttcaccatgttagccaggatggtctcaatctcctgaccttgtcatccacccgccttggcctcccaaagtgctgggattacaggcgtgagccaccgtgcctggcctatttgttctaatagttatt

SEQ ID NO: 419634 - DNA, 566 bp, Homo sapiens
gctattgtttccaaggtacctactaaaagatgagcttcaagcaatcaaaaggtgactgaaagaacaatataaatagatggatgggtaagtattttatatattaattatagagttattaaacaattattaatattgtattattaaatatgatagtttactttttaattataatctttttattgtgataattgaatattgttcataatatttctgttctgtgaaaactcatattttccttgtgtctagtacatgatccattttcatgaaagttccatgagtgcttggaagcaggtacattctgtaktatcagagcatagtgttctatatatattcaaaacatatactttatgtcttttaaagattttacatcccaaattagttttgttcacttgcctgtctcatgtgagaatgaagtgttgtcttctgttatcagcatgttcttaattattattgcatcttccctagtttttgtttaatatagatatttatttattatttgtttgccaaatgataggctcaacagctatctgcattttagaaggtggcttttaacattataaagtatg

SEQ ID NO: 419635 - DNA, 344 bp, Homo sapiens
tgctcctacgtttgcaatggggtccatgattcatatgttgttaccaggtgcttyggtgagtgtggattctgcttggtctttagacagacaggagtgtctcattaatcttggtcagtggctctggcactgggcaagggttcacctcatgatctgcaattaggttcacagatgatggggtctattaccaagtctgtgggcaagtgtagcttccaataggtccctggaaatctcccactgggtcaatgggtggattactgggcacgtgagactactcctgtgctacagatgcttgaggctaaaactaagtcatatggccacttcaggatccacagtcatattgaggc

SEQ ID NO: 419636 - DNA, 539 bp, Homo sapiens
gcctgtaaatagattatttttgaatttgaaggtctatgccagaagaagccattagttctcaatcctgaacaaatcatgctggatcatgaatagtggtctgttgataaattggtctggtttttgtattttagtgtctaaaaactaatgaaacaacattatcaagtttgtaattaaacatctctttattcaagcacatggtaaagaagtcaccttggttttcrgtcaagaacatggatctgaattaattcaattattcattcatcatcaaatattcattaaatgccaagtcaatgctgcagtcactatgctgtacatgagggttccttccaaaggcatctaggattgcctttaagaacctcttagtttgctataaacatgtcttttattccaggaaattgtattctcaataatctgccagaaattttgtatgtgcatgtgtatatatgcttcctgatgaggtcttgtctgtgtgtgtctcaagacaacaaagattaaattaataattgatgttaagtctctggtgaacttacataatagaa

SEQ ID NO: 419637 - DNA, 539 bp, Homo sapiens
gcctgtaaatagattatttttgaatttgaaggtctatgccagaagaagccattagttctcaatcctgaacaaatcatgctggatcatgaatagtggtctgttgataaattggtctggtttttgtattttagtgtctaaaaactaatgaaacaacattatcaagtttgtaattaaacatctctttattcaagcacatggtaaagaagtcaccttggttttcagtcaagaacatggatctgaattaattcaattattcattcatcatcaaatattcattaaatgccaagtcaatgctgcagtcactatgctgtacatgagggttccttccaaaggcatctaggattgcctttaagaacctcttagtttgctataaacatgtcttttattccaggaaattgtattctcaataatctgccagmaattttgtatgtgcatgtgtatatatgcttcctgatgaggtcttgtctgtgtgtgtctcaagacaacaaagattaaattaataattgatgttaagtctctggtgaacttacataatagaa

SEQ ID NO: 419638 - DNA, 591 bp, Homo sapiens
tgctcctacgtttgcaatggggtccatgattcatatgttgttaccaggtgcttcggtgagtgtggattctgcttggtctttagacagacaggagtgtctcattaatcttggtcagtggctctggcactgggcaagggttcacctcatgatctgcaattaggttcacagatgatggggtctattaccaagtctgtgggcaagtgtagcttccaataggtccctggaaatctcccactgggtcaatgggtggattactgggcacgtgagactactcctgtgctacagatgcttgaggctaaaactaagtcatatggccacttcaggatccacagtcatattgaggctggtagcctacctttgatagcacaaacaggcatgtctcccactaagttgctgggcaggcaggactgmcccttgaccatgtctgagaggggctggacctcagtaacaggttcattttaggatctgtagctagaccaaagtcagtttgcctgtcttcctgggaaaaggtaggcatgtgtttcaccagtccctgggtggccaagactgttcctggactgcagctatcagagcctgagccaggttacaggc

SEQ ID NO: 419639 - DNA, 600 bp, Homo sapiens
  misc_feature (1)...(600): n = A,T,C or G
gtatatgtccagaaatttatcagttttttctaagttttacaatgtgttggtgtatatttgctcataatactttctaatgatgctctgtatttctgtgacattagtcattatgcctccttttttgtttctgattttactaatttgggtcttctctcttcttagtctagctaaagctttgttaatattacttttttttagaaaaccaactttatwttattggctttttaaaattatattttagtttcaattttatttatttttgccctgatatttattattttttttccttgnattaatttggtttttgtttgttcttgactttctagtttattgagccacatcattaggttgcttatttaaaatatttctacttttttgatataggatttattgctatcaacttaccttttgtactgatttttatgttttctctgtatttttgtatgatctatttcatttgtttcaagaaattttttgacgttcttcttaatttctttatgagctatttattgctcaggaccatgttgtttaatttccatgtgtttgcatagtgttcacagcttttcttgttattgatttatagttttattctattagtca

SEQ ID NO: 419640 - DNA, 600 bp, Homo sapiens
  misc_feature (1)...(600): n = A,T,C or G
gtatatgtccagaaatttatcagttttttctaagttttacaatgtgttggtgtatatttgctcataatactttctaatgatgctctgtatttctgtgacattagtcattatgcctccttttttgtttctgattttactaatttgggtcttctctcttcttagtctagctaaagctttgttaatattacttttttttagaaaaccaactttattttattggctttttaaaattatattttagtttcaattttatttatttttgccctgatatttattattttttttccttgnattaatttggtttttgtttgttcttgactttctagtttattgagccacatcattaggttgcttatttaaaatatttctacttttttgatataggatttattgctatcaacttaccttttgtactgatttttatgttttctctgtatttttgtatgatctatttcatttgtttcaagaaattttttgacgttcttcttaatttctttatgagctatttattgctcaggaccaygttgtttaatttccatgtgtttgcatagtgttcacagcttttcttgttattgatttatagttttattctattagtca

SEQ ID NO: 419641 - DNA, 586 bp, Homo sapiens
atctaataagtactcaatattaccctaattaaatctgtgtctcctcctagttagtcacaaaatgatgtcatattcaaaagtaatgttaaaagtaattaatcctgtaaagtactttaaaactttacttaacatctctggaagaggcactatagaggcaaatttatttcrtgataatatttgtctcctgaatcatcatggtaactccaaatatcttcaatttctctctctgtttgtatctatctatctatctatctatctatctatctatgtatctaatatttatctggttcttccatgttaagattagctcttcagttaatggaataaatttattctttttaggattattttaaaacatctcaatattccaaacattaaaaacactatctaaaaagggctttcagataaatacaaaaacatccttattaattttgtagcaggtgacatttaaatacttataaatgtccattttaaaataaaatgaatggatgattgattgaaccatattctacatgtgagttgatgtattatagtggacaagcatgtatttcaagccagtctgtcatgacctcagactccttctgtg

SEQ ID NO: 419642 - DNA, 628 bp, Homo sapiens
aaataacaggcttggtatttctagaaagaaataataaacaacaacacctagttcaatgtggtaaggggaagatattttttaaatgataggacatatctgagactcgatagttaaaaaatgaaaataaaaatacatgatgtggtaaaactggctttccagtttgaaaaaagaaagaaatagaacattctattttctcacatctttctccaaaataatttccaggtagataaaaaaatcacaagaaaaaacagcttatggataaacattagtatatattggaggaaggtcttccttaccatgagataccatgtcaaatccaaaagaaaaatattgttgaatttaactcccagaagtgatttaaaattaataaataaataattaaaataataataataggcaaagctaaaagtaaaaaaataaatctgtatatttgcattaatatgatagaggattagctccaataaaaatggtttcaataatagatggactggacagtaaaaaaaaaaaaaaaaaagatactaacaggcagtttcaaataattagaaatgcaaatgkttaaaaatcacatgaaatgatagaaatgcaacttcagacttgaggatgctgtttttcacttatcatattagta

SEQ ID NO: 419643 - DNA, 620 bp, Homo sapiens
ccatggttcggtggatggcagagaagtctgctgaggctttgtttgctgctggtgtattggggaacgctgttcacaggggttgcaaggctggcagcactctgccgcaaggcctcctgtgcagatgccaggggcagtcacccacaaagaaagtccaggtgacgttggcccctggctgctgctgtagcctggcatggcagaaaaagagcccacaacagcagcctgcccagaagaagacactgctgccaggaagagaaaagtcatttctcctccagcatcccttgggcactcttctgacaaagcttgacagctggccagctggcaaaggagaaatattttcagggtcccgctgcactgctccagtgcataaaatgaagggcaaaattgggctgaggtgcagtcaattgatcagcagcacaactgttcagttgggttctgaaaaacagttctggttatctgttgtattagtcagsgttctctagagggacagaagtcataggatagatgtatacataaaggggagtttattaaggagtattaactcacatgatcacaaggtcccacaataggctgtctgcaagctgaggagcaaggaagccaatctgagtcccaaagctgaagaa

SEQ ID NO: 419644 - DNA, 479 bp, Homo sapiens
tatacttaaagttttgatttttatagtttttaagaagtaagccttctagaactttgtggggataaaatttaatgatyggcaaaagaggtcacttctttttttcaaaagctatgccaatgatttcattttctcatcttatattctatgtaatctctagtcaaatgataaattataactgtgatagttttaaaatatatttttgtgggaaacttgagttttattggttcctgttcttgttttctatttgtataatcacataatttttattgatagtctgattttggatcatatttgcatgctaggataaaatcctgcttggtattattgcattataattttcctatttggctagatttaatttgattttttttttttggtgagaaagtctcgctttgttgcccaggctggagtgcagtggtgcaatcttggctcactgcaacctccgccacctgggttcaagcagttgtcctgcctcagat

SEQ ID NO: 419645 - DNA, 490 bp, Homo sapiens
agaaacaatcttttctatgaggcagtggtatagactaaatgctaactgtatcaagtgagcatgcaacctggcgtgtctataaaaaactgggtgttacctgatttgctgagccmtaatttgaatatatacagcagccatctattttcaagttctataactagatggctcagatttctttgacacttctgttgcattccctcttttttttttttaatcaatccacacttaaggccccatgggagttcctatgactaagaaggaaaaaagtcagtactggtttgtagatgtctctatacagtatattagtacccaccagaagtgaatggctgtagcattataatccctcttgagaggattggtaatgaagggcattagtaatagaaatttatctcaatgggcaaaacttcaagcagttcatttgattgatcactttgcatcagaaggtagacaaaagaatgtatctatattgatttatggggatttgttaaca

SEQ ID NO: 419646 - DNA, 615 bp, Homo sapiens
agggtttttaaggaaaatttggtgggtgggggacagtgagtctagagtgccgattggtggggtcagagataaaatcatacagagttgaagctatcctcttgcactgggtggggggcccacagatcagatgagccagtttatygatctgggtggtgctagctgatccaagtgcaggggctgcaaaacaagcactgatcttgacagaggcaggaggcagacaaatgcctaggtagatagggaagggtccctagtgaatctctgatccatccacaagtgtttacactggatgtttttgtgcagataagggaatacctgcacagggtcttgcctggcatgcccacagtgaactagaggcccacgtgcactggggggaatggggtagagccaccaggaattcatgctttgtgcaggggaggagcctggtctcttcagcttatgtgtgggagccctggtattcagtctgtgaggtgggagcttgctggcgggaccccctctttttgcctaatgaattctgccctcatcacccttcaacgtgttcacgtgcctaatttttcctggtcatgagacaagaacttggatttagctgaactaagcttagagcaaaaaatcctgcat

SEQ ID NO: 419647 - DNA, 615 bp, Homo sapiens
agggtttttaaggaaaatttggtgggtgggggacagtgagtctagagtgccgattggtggggtcagagataaaatcatacagagttgaagctatcctcttgcactgggtggggggcccacagatcagatgagccagtttatcgatctgggtggtgctagctgatccaagtgcaggggctgcaaaacaagcactgatcttgacagaggcaggaggcagacaaatgcctaggtagatagggaagggtccctagtgaatctctgatccatccacaagtgtttacactggatgtttttgtgcagataagggaatacctgcacagggtcttgcctggcatgcccacagtgaactagaggcccacrtgcactggggggaatggggtagagccaccaggaattcatgctttgtgcaggggaggagcctggtctcttcagcttatgtgtgggagccctggtattcagtctgtgaggtgggagcttgctggcgggaccccctctttttgcctaatgaattctgccctcatcacccttcaacgtgttcacgtgcctaatttttcctggtcatgagacaagaacttggatttagctgaactaagcttagagcaaaaaatcctgcat

SEQ ID NO: 419648 - DNA, 615 bp, Homo sapiens
agggtttttaaggaaaatttggtgggtgggggacagtgagtctagagtgccgattggtggggtcagagataaaatcatacagagttgaagctatcctcttgcactgggtggggggcccacagatcagatgagccagtttatcgatctgggtggtgctagctgatccaagtgcaggggctgcaaaacaagcactgatcttgacagaggcaggaggcagacaaatgcctaggtagatagggaagggtccctagtgaatctctgatccatccacaagtgtttacactggatgtttttgtgcagataagggaatacctgcacagggtcttgcctggcatgcccacagtgaactagaggcccacgtgcactggggggaatggggtagagccaccaggaattcatgctttrtgcaggggaggagcctggtctcttcagcttatgtgtgggagccctggtattcagtctgtgaggtgggagcttgctggcgggaccccctctttttgcctaatgaattctgccctcatcacccttcaacgtgttcacgtgcctaatttttcctggtcatgagacaagaacttggatttagctgaactaagcttagagcaaaaaatcctgcat

SEQ ID NO: 419649 - DNA, 577 bp, Homo sapiens
acctggtcagtaatgagataagaagcttgtaccacaatgcatatcaatctattgtttccttcatccagaaagccatgctaaaagacaaaacaaaacaaaacagtatatggaaatgaggcagtttaaaccagagtatgtgtaatgaggtaattgatttgcctctgaagcaagccccttatctcgcaagacattggtaacaaactgttcacagagcaatactatgcactttttgaatagcactgatttgggatggttgcaatttttcttacatattactcataactcagaaaatatctttaatgtgctttcaggctcatgagcaaaagagtttctctgcacttgttcttagaggtagaattgctgggaattgggctatgtacatattcagctttcccacatatcagctttaaattgctctccagagtgattataccagcttaccctctgaccagcattgctgtgggtatcaattttccctaaaycctcaccaatagctagaaatgtcaggcttttttttttctgattgaattggaatagtatgctttctctttgcaagtttttgtttttgttttttgct

SEQ ID NO: 419650 - DNA, 438 bp, Homo sapiens
gctattcgtttttcatctgtttacctaattttctttgttactcttcttaactagtagggaaagaaacttctgtaatcttccttcaacagtgcggttatcctctgaagttacttcagtaccattttaacacacaatagaaatgaaaacagtgaaactatattagctctaatgaaaaacaaactttgaagtcaatgtttttccctgattggaagctctcatttattatatcagagataccattcaagccagtgcatttaattacaaaatttgtgaatggcacttgtttccagaagcagaattctgatgtacatacttgccarctgttagaaaacttactgctgtgcaaatgattttaaacatattacattgaaatgtgtttagaaaaggagagagaattccctaaagacctaatgccagtctgtacttcaataatcccat

SEQ ID NO: 419651 - DNA, 418 bp, Homo sapiens
gaacatgtccgattgataaatattgtttaaccacacttgtaatcagaaaaatgtaaatttaagtaccaattgatcttttttgaatgtaagatttgtgaaaaaaaaagtgtgctaatacgaagtgtcagtaaagggtacaagaaattagaattttgaaacaatgtagtggaagtatgaattggaaagccattttagatgacaatgtacagatatcgatatttgatttcaattgtttgacatactctgtagaggaacacacacatgcatgtgtatccaagagaacaaacacggacatttacagcaacattgtttgatgatatagtaaatgttttacatttgaaagtgtttgttttgactgactcacagaatttaatwgttccaaggagcataaaggtgactccagacttcaggtagtgaa

SEQ ID NO: 419652 - DNA, 571 bp, Homo sapiens
gtatattagttgactaattttaccatagaatttgattaacagcataaaactctattcaaaaaaagtcagtctttatggtttgcaactcattcatcatatctgcctgcttacaaaacaaattctaaaatttggaatactacttcaataataatgacatttcctgatatttgaaagtaacttggatcaatcatagacctccataatagctatctactggttttctccaaaagtaacagtaacccagataaagttcctccttaaagcaattcccaattaccctgccccatattattactttaatacttgaagtcatagagcgattttgactcttgacagtcatttctagttctttcaatttcatgataaattctttaaggataagacccatgcttcatcattcctctgccattttaaataaagtrtattctatgtagtcagggaattatttttttaatcaattagtgattggttgattggtgcaaaccagggattataagctagtatacccaggttaaattgttctacagttatttggcacctactgtgattctcaagcttatctacacatgaa

SEQ ID NO: 419653 - DNA, 572 bp, Homo sapiens
gtaattaaatttatgcctttgaatcctgaaatgcaaacatgttttaaatgtgtttaaagtaaaataaagagaagtgattcctagaagtagaaagcttggcatagcaaaggaagaaagggcggtttgattttttccccatttgcagtttgttgaatacctcgcttgcctgcaattcgtcctcttttgtcttaaatatcaaaggctctgcaggcatgttaacattttaataatttcaaaaggcacaaaagccaaaggaagggagtgaaaagacagactgtagtgaagtggcgcgtccgccgctgaaagaatatttcttacacggctgcctagtgctgcaggaagcgggattcaccactctggtgccattcaccaacccacaaaggcacacacagtratgtggagtcaaggcctaattaaaatccttgaacagaacgtaggtctggagaatggcatacattcaggaactgcagtttaaaaagggaaagagcgagagcgcgggaaggagactggagagaagaaagaagcaaggaaggaaggaaggaaaggtggaaagaccagagaaaagagagaga

SEQ ID NO: 419654 - DNA, 380 bp, Homo sapiens
catgctgtgaaagtttttctgttagcccagctatttgctgtgggttttggaaatgattcctttgtccagcgttctctgtaattctgtctttgtcctcttgtaaaatttactctgtggccacaaatgaaaatggagttgaagaacacgtccttgcagtcttatactgctggcatagactttgggaaacaaaggttaatttagaggttccgtaccacaggcttttgcaggccagaccatggtgagcaatgtttccytttcaccactttgcttcctgtcagcaacatgtgaagaaaccaaagtgaaggaatcttctctggttatagattttgtaacttcaaactttcatttatgtactagttcctaggctcagaatattcccc

SEQ ID NO: 419655 - DNA, 548 bp, Homo sapiens
agtctcttggaatacctctgtatctaatagacaagattttaattatttttattttcatttttgattagtaaattagcttgatgattaaacctaaccatttttaaaataacrtatcaattgctaagactgtgctctgccctcttttgtcaaatccactttatctgattgtgataatcctattttgtagccattaagaacaggcttaaaaaatgaagcctttaaaaactgacaaattattttttagatcaatttctttgtttttagtaggagttgtatttgaattcaatagtaaaagtatatggagataaacgaaacataagaattaaaataatttttaaggatttcagagatctcactttctcttcctttcaacatagttttttccaagattacataatataagtacaagtcttcatataaaagtttgcatcaagcaaagactattggcttttcaaaagctggaatcattgaatctatggattgcaagcagtcctgactatggaaattatgtgttaaatacaactattacctctttaaatgtgcatttg

SEQ ID NO: 419656 - DNA, 577 bp, Homo sapiens
gtttaaattcagtagttaatttttgtacttaaattatctaattaacaatagtctgaacagccagattttagaactttattctttcaaaaattgcatgctccatttagagtgtatcgttgtttcttatgtattcacagattcttctatttgtgtgtattttataatgcatcaattctgttctatggatgccttctttcctactcttaaatattctcaccttattctggacatgcatttttgtgtgttttatgagaaagacagaggtactaaaacacttatgtttacacacacacacactcctcattaaaaagttaaaacaaatgttaatgtcccctccggtgaataccattgagtaacacaaaaatggaaaaatacatatttgcatgttcagagcaggagtgatgtttaatttcacagccccarattattagcaattgtcaaaagaatatgaaagttggctctttaaatcaagcctgtatcttcccctcaaaggaatcagatgcatacatacagtctttatttcacccagatgaagaaacaggaacataactcagtagttctgtaagaaatatgagtg

SEQ ID NO: 419657 - DNA, 635 bp, Homo sapiens
ttgctgtacattaatggtatactttaatttgtcagcattgtatacttttcaatacagatcctgtatatatgagggtttcatattttggagctattttaaatggtartattttttaaatttcagtttccaattgttcattgtgaaaattggaaatatggtttatttttatgtgttgaccttctatgcagtgattttgctaaatttatttattctacctttttgggatacatttcttgggatctcctatatagataataatgtaatttgcaagtagaaataatttttatttggtctttttccaatctgtatgccttttatttattttccaaattattgcattggctaggatttctagtatgatgttaaattaaagtgggtggtgtatatccttaccttgaccccaagattcagaggaaggcatttattctttcactcttaagtatgatattatctgtagtcatttccagaatcctgtcataggcagaattatagcacccccgcaagatattccaccataatcctcagaacctgtgaatatgatgtgctatcatgtacataaatatgttatatttaatatggcaaaacagattttacagaggcaacaggttactaactcaattgactttaaaatgttt

SEQ ID NO: 419658 - DNA, 576 bp, Homo sapiens
gcgtgaacccgggaggcggagcttgcgagcgagaatgtgccactgcactccagcctgggcaacagtgcgaggctccgtctcaaaaaaaagagtcaagagaaagtgagttgcccaaggtgccatggctatatagtgacagaggaggactaaccatgatgacatctacattcacgtgtgtcacttcatagctgacaaatttcccatgtgggcatgacttcctttgatttttacaaaaattctttgttcttggaacatacgaggcaggcatctacctgagaaatttaactctagctgtttcatcattctagatcgttcttctcacagatgtcttcttgactaatcgtctcactgctttcaagtatttgggctaatctcaacttctccttgacacttagcctgatgacytacttaatgttcaatctgccaagtacctgccctcaacactcctaacccctctttccctggttgaatttttatagtttaaggatatttttacctaatgtttaccttatttagtaagcttatttttatgttgtctgtttacctttctagttaagctctgagagggcagggttt

SEQ ID NO: 419659 - DNA, 670 bp, Homo sapiens
catgataaaaatagattaaaaacatgtcagcccccttaattttcagtgaatcataaacactagtagtttccccaccaatgccaaccttggatgctgagagctttgaaaataattaaaagttagatgaattcaggtttaagagactctcacctgagaacaaaatggttctagctttaaactattctttaaaagtataataaaataaatgtcacccataaaagaatgtgttttttgttttgttttgttttgttggtgaagcttcttggacatcaaacaagctttttgaagcatcctgaataattgagcgtagattaataaaaatatgtgaattgaactgcccttaaaatgcataggcttaagaaaggaaaaaagctgagcaaaatagatgtgagatccayctaaaatcaaaatgttttctgaaagctccctatggaaagtgtgtgttgctctgcttcatctactccctcacgtttgcactcctagcaaatgtttatgtaggacctttgattaaccaggctgttttctaggacctagggaccgcagcaaaggagacatgggatttataatcctgcaggaggacggagcctaaataagtaattaactgcagttgtaattaattacaaaagagacacatagggtgtaaggagaacatatgaaaatacataacaat

SEQ ID NO: 419660 - DNA, 399 bp, Homo sapiens
tctcatatgtgtttgtggacctgtgtgaggatgtaaaatggtccctggtgaaccagaagtcccatttcctcatcaaacttattagtagttgtattgaccagcatgaaaatagattctgcatatgaaatcaaaaraatgagaaaatatgaagaacatctcatagggaataaatttcaagagaatagtgattttgtaagaataagagctaatacttattaagtgtcattaactgattaagcactgtggtaagtactttctgtgtattaactcatttaattgtcataacaatcctaattattatcattctcattttatagatgaagaagctgagatgcagagaggggaagaaatgttctgtttaactgctcgcaatgggtagagttggtaattgaacccgga

SEQ ID NO: 419661 - DNA, 582 bp, Homo sapiens
ttaactcatttaattgtcataacaatcctaattattatcattctcattttatagatgaagaagctgagatgcagagaggggaagaaatgttctgtttaactgctcgcaatgggtagagttggtaattgaacccggacagtctggctccagagtttgctctaattgcttctctgattctcaaacttgagagtgtatcagaatccctaggagsgttcattagaaaacagatttctgggtcccaatttccgagatcctcatttagtatgtctggggagaggaccaaattttccatttctagggaagtccccaggtaattccgatgctgcggtccaaggaccacactttgggagccactgcattacactatactgcctgttaggaattgcacttgatcaagcctgattgtagacaattttaggttctataaaattttgctctatgattcaaatgtttactttggtcaaagcaaataatagatcaacttgcagaaattgtaggttacaattaagctgaccattagaaaaggcacatcagcacaaatccactcattaaataatcatttaattgccaatcatgggtttt

SEQ ID NO: 419662 - DNA, 582 bp, Homo sapiens
ttaactcatttaattgtcataacaatcctaattattatcattctcattttatagatgaagaagctgagatgcagagaggggaagaaatgttctgtttaactgctcgcaatgggtagagttggtaattgaacccggacagtctggctccagagtttgctctaattgcttctctgattctcaaacttgagagtgtatcagaatccctaggagggttcattagaawacagatttctgggtcccaatttccgagatcctcatttagtatgtctggggagaggaccaaattttccatttctagggaagtccccaggtaattccgatgctgcggtccaaggaccacactttgggagccactgcattacactatactgcctgttaggaattgcacttgatcaagcctgattgtagacaattttaggttctataaaattttgctctatgattcaaatgtttactttggtcaaagcaaataatagatcaacttgcagaaattgtaggttacaattaagctgaccattagaaaaggcacatcagcacaaatccactcattaaataatcatttaattgccaatcatgggtttt

SEQ ID NO: 419663 - DNA, 582 bp, Homo sapiens
ttaactcatttaattgtcataacaatcctaattattatcattctcattttatagatgaagaagctgagatgcagagaggggaagaaatgttctgtttaactgctcgcaatgggtagagttggtaattgaacccggacagtctggctccagagtttgctctaattgcttctctgattctcaaacttgagagtgtatcagaatccctaggagggttcattagaaaacagatttctgggtcccaatttccgagatcctcatttagtatgtctggggagaggaccaaattttccatttctagggaagtccccaggtaattccgatgctgcggtccaaggaccacactttgggagccactgcattacactatactgcctgttaggaattgcacttgatcaagcctgattgtagacaattttaggttctataaaattttgctctatgattcaaatgtwtactttggtcaaagcaaataatagatcaacttgcagaaattgtaggttacaattaagctgaccattagaaaaggcacatcagcacaaatccactcattaaataatcatttaattgccaatcatgggtttt

SEQ ID NO: 419664 - DNA, 587 bp, Homo sapiens
ttaagtgagcttgagataattcaggttactttttgatatattttctgrttgccaagagctatttactcagaactgacaggtcaggggctcctggatcctttgcaaacataagtatatatttgaatcatcatgggttcctagcctgggccactgacaaaacagtcttcatagggcagagaacaatagagttgcatgttgtattcttgtctcaagtaccattgtagcattttgcatctactgaaataaaatatccaaaggactaagccaatactttactattaaatttcacagtgccctagacatatatttagttacggatcagaccaacttagcaaagtgtaattggttatccacaagtctggttctgatgtgaggcactggcactccacattcttgaaatacaacatagaattgcctgttgaacttttcaaagatcatgggtgattagaaaaaccgtcctctactgacatgtggagaaagtgacaatgcaggaaagcatcagctcttgattagaaaggcatgatcctccctttccttctcattttcatactttcacaccatcttcccatgtaacacagcttcaaaac

SEQ ID NO: 419665 - DNA, 608 bp, Homo sapiens
gggtttgcttatcctattgcctaatgcatgcaatacttctaccaggactaccatttgtagattcacagaatgccttwtccaccataatggtatttcacacggcattccgtccaaccaagacactcattttacagctaaagaagtgtggcagtgggctcatgctcatggaattcactggtcttaccatgttccccatcatcctgaagcagctggattgatagaatagtggaatggccttttgaagtcacaattacaatgccaattaggtgacaatactttgcagggctgtggcaaagttctccagaaggtcatgtatgctctgaatcagcatcgaatatatggtactgtttctctcataaccaggatttacaggtccaggaaccaagggatggaagtgaaagtggcaccactcaccatcacccctagtgatccactagcaaatttttttgcttctgttcccgcaacattacattctgctggcctagaggtcttagttccagagggaggaacactgccactgggagacacaacaatgattccattaaactggaagttaagattgcgaactggatactttggtctcctcctacgtttaagtcaacaggcta

SEQ ID NO: 419666 - DNA, 570 bp, Homo sapiens
tctctttcttccctctttaaatttttacagccaaaaagcttaactctgcttctctaaacaaacaagcaaacaagtcctttccctaaggagaattcctgtgtctcctgcagtcagtttacccattacagtgtgtaattaaatctgcatattatcaatattaccagcttataaaacagttttgcatagaggttaaaaacccattaaatggctttgggcctgtctagaactcctccctcatcagctgtgctgaccactaaagagctgagtctcctcttcaaccttcaagttcctcatctatgaaagataagccatagaagaatcaatttcatgggttattgtgaagcttatgtgaggtgtttatttaaaaatatttaccaaagtgcttggctcatattaggcctcaaattaattatttttattaatagtatttttgccagtttggtgcttaagcttaatagaaacattactgtttttataataattataatgctkaatagtgacaagtatacatataggaatacataagtgtactttaaaaatcaatgttttttctttatgagatcaaaaagc

SEQ ID NO: 419667 - DNA, 496 bp, Homo sapiens
tgtcctcttgcgctgagtcagttcctgggttgggtgccacaagatcagatgagccagtttatccatctgggtggtgccagctgatccatcaagttcagggtctgcacaatatctcaagcactgatcttaggagcaatttagggagggtcagaatcctgtagcctccagctgcatgattcctaaatcatamtttctcatcttgaggctaatttgttagtcctacaaaggcattctagtccccaggcagggaggtttgttttgggaaagggctgctatcatctttgttttaaactataaactaagtttctcccaaagttagttcagcctacactcaggaatgaacaaggacagcttggaggttagaagtaagatggagttagttggttaggtcagatacatttcactgtctcagttataattttgcaatggcagtttcacccacaccctagtctctctttttttttaacttcagaaatttattctcaatttcatctca

SEQ ID NO: 419668 - DNA, 532 bp, Homo sapiens
tattagttatcctaacaaatgtaaaacaataacatttttaattttctcaggttagattataaaaatctgtccatatgctcttcgtaagagacacacctaaaaccagggaaataataatcaaaatgaactggtatgaaaatattagtatcagacaaattagtctttaagtcatatgcaatttagggggaaagaaggtcattaaattacacaaaaagaacaattaggaaggtataatattactaaaactacatgaacttagaaagatagtctcaacatacataagaaaaaaactattattaagaatttgaaacatacaatcatactgrgagattttaacttaccactttcagaaaccaaagtgagcagaaaaaaatttttttaaagtttacatatttgaatgactaatttatcattaaagaagatactggtaagatcaacaaaaattctggaaatatcatacatttcttgacaaggaatcatatagctcaatcgtttgtcagaaaaaagaatcaattgcagtacattttatgta

SEQ ID NO: 419669 - DNA, 616 bp, Homo sapiens
ttgagtttaaagtaatgacaagacataaagtagaaatgtccagcaatttttcaggagttttaagaataaatttttaaacagaatcaccaagagagttaatgagctgttgtttggattttaaggccttttattaactggccctactttactactacaagcttaaatccaggacagcaataataaatcaacagtaaaaattctgaaatacatgattggcaagttacaaactgatttattacatattatctcattcacactatgaagaagaaaaaactgttacatgatctattttaccaatgaagaaatcgaggttcaatgaagtcattgagtactttgccttagggcctagaattcaggtctccaactctctgtagagaattttgagtgaagtttgtattaactccagccaagtgtatgcaaataaaataagataytttctaaataatatctagatgtgagtatattttaaatctgaacctctgtaaataattatttttatccttagattagttttctatttcagcaatttcatcattgatttctctctttcctatttcaaaatataaatttaaatgttacataatttcttattctgttagctaatttggttattctg

SEQ ID NO: 419670 - DNA, 228 bp, Homo sapiens
tgattctcttgttgcaagctaatgtacctagtgaccttaaatggaaactaatgctcatttactattctgaaaatcctagaccctaaggatttatgctgaatttgttctaaagctactctgtctgtgctctataaatgaaataacaaagcttagaattggatgacaacacgtgtttgyaacatgttttagtgaacatttgaagccccctgttgagaccaactgcaaagg

SEQ ID NO: 419671 - DNA, 450 bp, Homo sapiens
gaaatgtaagcaagaacatgaacaaataaataactatgtaaggaagtcatccacacagtaattattcacacattaagaagtattataaagaaaataatatggaggatgccatagagaataaagaayggctgtggcaaataatagatcagtcctcagagaagcctcatttgaactgaaacctgaatgatgggaaggagctaaccagagaagggaaaagagagtttccggcacagagcatggcatctgcagtctctgaagcagaaatgagtttagagtgcttaatttaggaaaaaagagacaaccaatatgactggtgaatatcagtacagacagaattgtgagagccaaggccagagaggtaggcaaggaccaggtcacatggggtcttgagggtcatagcaaaaggtctggattttattcatagtgaatgattattggagggtttccatc

SEQ ID NO: 419672 - DNA, 600 bp, Homo sapiens
ttaaggagcatttgtgggtcattctctgtagatactatccaacaaatgatctgacacttgctttatggcctagcatgtggcctattttggtgaaaattctacatgcccatatattttgtagtggttgcacataatgttctatacaaatgttaattagttcagttttattaatattattcagatgttctataaacttccataattgtccacttgttctaaaaattactgagagatatgtcttcaactattattaggaatttgtctacatsttttttgtctattttcccaatttgccttcatagactttgaagttaggatgttaattgcatatacatttagaatacttgggactccatgaatgaattgacccatttgccactttgaaatgtcttctgttatctttcataattctctttgacttaaagtttacttgatccaatattaacatagggcaatataggttttgccatgcttttactttggaattataatacatgtatattatatttgggttttattttatactgcgtgacaattttttaaactgaaacttttattaaaactttatgttgtaatttgtacagttaggtttaaatatgt

SEQ ID NO: 419673 - DNA, 510 bp, Homo sapiens
atacaaacatgctaaatcctatcttttaaaaagaaggagggaaggaaggaaagaagaaaggaagaaaagaaaaggaggggaggaaagaagagataggatggagaagggaaggaaggaaaacaattttctttctagtctacttccctttgggctgtctctttcatctcaaaatttattgaaataatgatacatatttaccttctccacatcctctactctaatctcaatctaatccaaccatactatctttctagcctacttccctttggactgtctctttcatctcaaaatttattgaaataatggtatatatttaccttctccacatccttctactstaatctcgatctaatccaaacatactatcattctcacagcatcactaaaactgctcttgttaaagtaaccacattttaaaatccaatggtccagtctctattcttatctaatttaaacccttatcagtacttgataagtagtctctctacctttctgaaaatattttctttt

SEQ ID NO: 419674 - DNA, 493 bp, Homo sapiens
taacgattcagagccaataacaaatcatctagcaaaccaggagaagaatcgggagtaatactaggtctttgaatctgatctcagccatggactgacagcaaaccatttaagaggcagcatcaactcactgcatcctctgagggatagaatctctagaagctgctctctggtgcactacactctaggtagtctgtcttaattctattctaacatcaagagtctatccaaacaaggagggctctgaggaaacctgatcaagactgaacaaggattagaaacgtctctacccattattgaattaaactactgtgtcagagtataatgcaaccctgacaggaatgtcgagtctgggtttgcccacgcttacctatacaatagagtatagagcaaggcrtggctaaaatacaagcacagcaaggggtataaatcctttcaatttttcaaacccaataccatgatttccatcagttttttctaccacatagtgagcaac

SEQ ID NO: 419675 - DNA, 464 bp, Homo sapiens
gaaaaccgtctgtgtttattcttaagttcaataaagaatagacagccatgtagaaatgtgactgagtaaaagagtatgagctaacactagcagactgaggggaaaaccctgtaggctttgtctgttcagattcttcatggcctctstgtgtggcatttttttcccaaggtataaggcaggacacctatcacatgaaggtcttcaaaacaaggaagaaggtcgtaggatgacctttctaggttttatgacttgaattggggaagaataattctggtgtctatgacttgatttggggggagacaagaggacagtagaaggtgagaaaagccttacttctgagacccttccaatcttcttcagttcaaaatagcacacaaacacaacatattttggggtgttgcgttctgaaccctgataccacagtaccataaactagaaacaagtaataaaacttaaagtaatgg

SEQ ID NO: 419676 - DNA, 568 bp, Homo sapiens
ataatatttttatttctaaagatagaaataaaaaaataaatatgcagctctagaagttagaaaaaggggcaacttagccaaaaaaaagtaaaggaaaataaaaagtaaagagaaaaatcaatgaattagtagaaacataatttaattattaaatatattcgattccttattctagtaaaatagatgttattgaaaatatattttaaatgcttgatgtattaagttttctcaaaaaaaacatacaccaattggaaaataatgttaaaagttattttaaaattgctaatgcttttatttttattaaatccattaaaatataaatcatataaatattagtttgaagagttatgaggaaattatttgtcattgtttttgtaatttttttccttgcstttttttctttgcacttttactttcagcaaaataacctcattttactgtggtttctttcaaatttttaagaaactgatttttacattgctctgtcacacataagatgcacttgcttttattacagtagcaaatctttcatctcaaggcatcaaaaatttgttaaaaaaaggaaaac

SEQ ID NO: 419677 - DNA, 562 bp, Homo sapiens
tttagtacttaaagtagaaataagagcatccataatttttcttttttttaaaaaagaccctcactggaatgtggagaatgatgggggttgaggggtcagaatggaacaggtagaccagttatgggattttttttattgtctacagaagatggtagcttagacaaagatggtagacattgaaataacaggtgaataaagaaaaattttagtagttaaaaattgcaatgacttggtggtatatcggttaggaatattagataccatcttgatrtgtttacagttgttcaggacatatataatgaatcagttgagcactcaataataagcatttattttgagtgcctactattatgtcaatatatccttccttttagggaaagctcaaaattatttatgtgttagaagtaaagatcagattctagacattgtttatctcaattgtttttgacacactaagaaaaacaagccagtgttgatgaatttctattgtatcctagggattttgtaacaaagaatccattcagaagctacactaggctcatccaaaagagatgacagaatt

SEQ ID NO: 419678 - DNA, 639 bp, Homo sapiens
tggccagcattattcaaataccagagaggagattgcttttaagatattataaacatgagctttcttatttctttttctcaattctgagaaggatagctaagataaattttagtcttgcaatacaataattttattctagctatcattattgattgtagtagctgtgaaagtctgcttagagagatacagtttctattagtcaaactattacctgctacatgaagaaatctattcttttcgttccgttttattccactgttaccaaattgaatatatytgagaaagaaaatgaggtaaagtaaatgaacatcgcatgtgctctgggagaacgtgttatgaatctcaattctatcacttataagctatcctatcctgaaagtcatattaaatttctccagacttcaatatactatctacctcacaatgttgctcacatgaaaatataagtataaaaatatatttgtaatatgaactatacaagtaccgactaggctctggcacttgataggtgcttattaaatataaactgatttctaccaatgctaaaccaaatgtgcacctagagtaacatccactggcataaatttctttttctttgccctagtagtaacaatatcttactatcaatcacactaattc

SEQ ID NO: 419679 - DNA, 639 bp, Homo sapiens
tggccagcattattcaaataccagagaggagattgcttttaagatattataaacatgagctttcttatttctttttctcaattctgagaaggatagctaagataaattttagtcttgcaatacaataattttattctagctatcattattgattgtagtagctgtgaaagtctgcttagagagatacagtttctattagtcaaactattacctgctacatgaagaaatctattcttttcgttccgttttattccactgttaccaaattgaatatatttgagaaagaaaatgaggtaaagtaaatgaacatcgcatgtgctctgggagaacgtgttatgaatctcaattctatcacttataagctatcctatcctgaaagtcatattaaatttctccagacttcaatatactatctacctcacaatgttgctcacatgaaaatataagtataaaaatatatttgtaatatgaactatasaagtaccgactaggctctggcacttgataggtgcttattaaatataaactgatttctaccaatgctaaaccaaatgtgcacctagagtaacatccactggcataaatttctttttctttgccctagtagtaacaatatcttactatcaatcacactaattc

SEQ ID NO: 419680 - DNA, 642 bp, Homo sapiens
tctgcttttgcataggtctagaatgaaatcctccacttcctgaaatcctaattttttagagcccaggacagaagtaaatttttcattataccttctacagttatgtcaaacagaaatattattatccacttaggggtctcacagccaagctcctgaattttcttgttactgtaggtacacatgcacgtatctcatctctcctataagattttacattctaagggcaggcaaagtgttttattcttttctttgtcctcctcagtaccttgcccagtgccttgaaagtagcagatgctcattaaagatttatgtcattaggttgatgtcactttttaaagctaaatttttaaacttttatataaagttattctatttgagatcraaaatgccttcagaagaatagcaccatttatggattaaaattaagattatcacaattcctaaagtacaacatattaatggaagatattaacatgataatttatgttttctcattaaatatgtgttaaatatgcattattatatgcattattatagactctgctaaaaacgacaggcaagatctttattcgttgggagctaattctagtcagagaaaccagcaaatgttttagccacatcttacattattttgtagacatt

SEQ ID NO: 419681 - DNA, 560 bp, Homo sapiens
gagtttggccctcatggtggaattcatgtatttataagaggaggagagcccagagcacctcctcttcctcccagctatgggagcacagagtaaaaaagtggcctgggaagaggactctcaccaggaactgaatctgctataatcttaatcatggacttcgcaacatctgcaactgtgaaaaataaatgtttgttgtttaagctacctggtctatggtatttcattatagcagtctgagcagactaagacaacaatgtttctcaaatcccaagaataatcagaagtttacttactatgcagattccaaaacttcaatctatatgacattcgtttcaattagcctgggatgcatgtgtcccagcattcttcattttaagtaaacttcaaagtgattctaatgcaggctctctgggcaataatttcacagamtatttgcagcagaggtaaatagatgatttttgttgttgttgttcaatacatgggggagtataaaggaaagggagaggttaactattcttcgtttttcaattttcttaccctttcctacttcaaatgttcca

SEQ ID NO: 419682 - DNA, 560 bp, Homo sapiens
gagtttggccctcatggtggaattcatgtatttataagaggaggagagcccagagcacctcctcttcctcccagctatgggagcacagagtaaaaaagtggcctgggaagaggactctcaccaggaactgaatctgctataatcttaatcatggacttcgcaacatctgcaactgtgaaaaataaatgtttgttgtttaagctacctggtctatggtatttcattatagcagtctgagcagactaagacaacaatgtttctcaaatcccaagaataatcagaagtttacttactatgcagattccaaaacttcaatctatatgacattcgtttcaattagcctgggatgcatgtgtcccagcattcttcattttaagtaaacttcaaagtgattctaatgcaggctctctgggcaataatttcacagaatatttrcagcagaggtaaatagatgatttttgttgttgttgttcaatacatgggggagtataaaggaaagggagaggttaactattcttcgtttttcaattttcttaccctttcctacttcaaatgttcca

SEQ ID NO: 419683 - DNA, 587 bp, Homo sapiens
agacttaaaaattagacttattaaaaattaatttttgtgaataacaaacttgtggactaattgatcttttgtattttttggttttaatttcctttagttcagctcggattttagttatttcttgtcttctgctagcattcaggttggtttgctcttgcttctttagtwcctgtagttgtgatattatcttattcatttgagatctttctaacttttcgatatgggtgtgtagtgctctaaaattccctcttaatactgccttagctgtgtcccagagattctggtatgttgtatctttgttctcactaatttcgaagaactaattggtttctgccttaatttcattacttacccaaaaataattcaagagtagtttgtttaattttcatgtaattttatgattttgagtgattttcttagctttgatttctatttttatttagctgtcatctgagagtgtgtttggtacaattttgggttttttttgaatattctgaggattgctttatgtccaaccatgtggttaattttagataatgtactatgttcagataagaagaatgtatattccgttgttttggggtgga

SEQ ID NO: 419684 - DNA, 530 bp, Homo sapiens
gcctgcggtcccagacaaagaacaacatgaaacagtgctccagcaaaccctcaatcaacaagtagcaggagtgttgttttaagacaagagatttgtttattgccacagcagaatttagtcagttctgacagatacacctagttaatctcacctctaatacataattacattatcacaatttacatttcaaactttatatgttctacagcakccatctgtggtgataatcaagcagggtatcggcaatattgttgaaattcactcattcaacaaacatgtttcagatactgcactaagttccaggcaaagaatattgaataagtggacatgatacctttcctcctagtttactatgaggttgattagatcatgaagacaggaagatatttctcagtaatgatattactacttaaagttaaaactaaccatgaagaggttaccattatctggttaagtccttagtagagatgagtttatttaataatacttttcttttcactttatatgttatcttttatttttttctttcc

SEQ ID NO: 419685 - DNA, 582 bp, Homo sapiens
tttatttaataatacttttcttttcactttatatgttatcttttatttttttctttccaactttttattttaggtttgggggtacacatgcaggtttgttacatgcgtaaattatgtgatcacatttttaatacattacaaagctactaaaagttaagccctgtggaaaagatatgctcagcagaattctgaggcagggggaggtttggctataaaaaacaatctaaatatagagtgcccacaaacacagagtggtttgtagttgggatggatgcagtcaaaaggtatcatccagtgaacagggagcaagagaggtaggggggaatattggaacacatactggattaaaaatcaattcacttgattgaakttctggcttgactaactttgccatatgaccttaaagccatttattaagtcacttaatttcttttagctttaaattcctcatctagaaaatacatagagtatgatttttctctttttgagacagggtcttactttgtcaccaggcagtggtgcagtggtgtgatctcggctcacggcaaccttcacttcccaggctcaattgatcctcccacc

SEQ ID NO: 419686 - DNA, 557 bp, Homo sapiens
tatgtactttaagtccccagaatagatcagtcaatcctattctttaaaaaattatacagaggaatttacagtcacagggcagatgaagcaagtaaaggctgaagcaagaggtatggccagatgactagaaggtttaggtagccatataatttaatgcccaaacctgacactttgagaaataaaatgaagactatgaatacattcagacaacagatgtaaaccagaactgttctgcataaattggatgcctgattaccctatgtgaccaaaataacagttcattcctgactggtagtagaaggcaacaatgaaattgrtctctgaagaaaaacagaggtttgcttcaaagagaacagtgcatttctgactggtagtagaaaccaacaaagaaattgatctctgaagcaaaatggaggtttgcttcaaagagaatgctagtgagagtaaactatggatcagcatggggacatggaagccattttatttgtaattaatgatgacagtacttccattttcaacgtttattctggatgaaagatgggacactttacaggcca

SEQ ID NO: 419687 - DNA, 601 bp, Homo sapiens
cagcttgccactctgtgccttttaattggggcatttagcccatttacattcaaggttagtattgatgtgtgtaattttgatcctgtcatcttgttattagctctttattatgcagactggtgtggttgttttatagtgtcactcatctgtgtactcaagtatgtgttgcaggggctggtagtggtctttcctttccatagttagcactccttttagcacctcttgtaaggcaggtcttgtagcaaccaattctctcagcatttgcttgcctaaaaggatcttatttctactttgcttatgaagcttagtttggctgaataagaaattcttggttggaattcttttctttaaaaatgctgaatataggcccccaatctcttctgacttttagggtttctgctgaaaggcctgttgttagcctgatggggttccctttgtaggtgacctgtctctttcctctagctccctttaacattttttctttcatttcaaccttggagaacctgatgactacatgtcttggggatggtcttcttgtrtagtatcttacaggaattctctgaatttcctgaattttaatattggcttctctagaaaggtt

SEQ ID NO: 419688 - DNA, 543 bp, Homo sapiens
tcacacttgttattatcactatccttgctctgggataagaaaaacttgacytgcatccatgtaaatttgataattttgagagatcttaatgaatgtctattctacaaagatctctggttaatgagtcattaagaggtaacccacactaggcttcacagcatgctcgtcttaaacttcgtgaattttccacagtccagaggctggtaatattcctcagatatttccagcacattgagaacagaaccatctgtcagtgagattgccattaaccaagctcatgaaactgatatataatagtctgaattccattttattgacttgcaataaaaaataacgatcttagagacaggaatacctaaatctgcataactagccaactacttattttagatggatctaaacaggaagccaattcataatcaaaaaataatttgaaaagcatgaaattacaactgagagttaaaattaagggaattcattaaaaggcagttttccaacactctctgaaagccctttggtttctgttaaagcattcaatatggg

SEQ ID NO: 419689 - DNA, 554 bp, Homo sapiens
ttagatggatctaaacaggaagccaattcataatcaaaaaataatttgaaaagcatgaaattacaactgagagttaaaattaagggaattcattaaaaggcagttttccaacactctctgaaagccctttggtttctgttaaagcattcaatatgggagattttatttctgatttttaattgmgaggtgaaatgagagcctacaatcttactttcaaattctcggaagaagcctcacatcagtccccagctactaaccatgactttcattttttcactgtaatttgcactgtattttaattaataaccctacacctgtcttggaatgtgttttctaccttctttagcatgagcaaaaattgccccacactattattactgaagtcagacagttatcttagttatgtcccaatatctttacacagaaaacaattaaggaagccagaaagagaaatactatgccatatcaggatcctattcctgatgttttacagagaatacaagtcatttatataaaaatgcaatgtgaatggggtcagttacttaaaagaaatt

SEQ ID NO: 419690 - DNA, 599 bp, Homo sapiens
aaaataaactttactgtacttgagaagttattcaaaacaataaatttaggggtctcaacatrgaatcctaatattacaggtaaaaatctaaattattttttagaaagtatgacaaattcctactggcagagatatcaataataaaaaagttgagaaatctcttctgatagttttaaagattaaggcatttaagtttggtttcattatacaatgttgctaaaactgtttctcccttattttcaacatatatttcctttgttttaaactaaattgaagtaattcattgtgaatcatccataatttgcccacctattagattttattaaatctaatttattcaaagggtaaaagatatccaggtgtaactactcaaacttatttattgaccttcaagtttcagacccaaaaggaatactcttatgggaaacaaaaattcatacatctataaatatttcataatttctaagagtggcttttttgagggtatataggctaaagctgaggcaagggttggcttccctgaatttgcaagtatcattcattttatgtaaaactgatacaatctcatatttcagaatttcccatgcatatgattgtca

SEQ ID NO: 419691 - DNA, 599 bp, Homo sapiens
aaaataaactttactgtacttgagaagttattcaaaacaataaatttaggggtctcaacatagaatcctaatattacaggtaaaaatctaaattattttttagaaagtatgacaaattcctactggcagagatatcaataataaaaaagttgagaaatctcttctgatagttttaaagattaaggcatttaagtttggtttcattatacaatgttgctaaaactgtttctcccttattttcaacatatatttcctttgttttaaactaaattgaagtaattcattgtgaatcatccataatttgcccacctattagattttattaaatctaatttattcaaagggtaaaagatatccaggtgtaactactcaaacttatttattgaccttcaagtttcagacccaaaaggaatactcttatgggaaacaaaaattcatacatctataaatatttcrtaatttctaagagtggcttttttgagggtatataggctaaagctgaggcaagggttggcttccctgaatttgcaagtatcattcattttatgtaaaactgatacaatctcatatttcagaatttcccatgcatatgattgtca

SEQ ID NO: 419692 - DNA, 494 bp, Homo sapiens
gcttataggacataaatgttgcctgatcaatctcatctctcccctttggaaaaacttgtctttgaaccattaatttttatatcatgtttaaagatcacaaagcaagattatgctgatgaagtttattaaaaaatttggaaggcaattttataatagcaagtaaacacaaaagtgtcaaagcaccagaaatacagcaccagacttttagcccatctgcagataatctgtctaggatgataaaacttgtcctttgtttatacaaatccatagactatttgaatagaaattttataatatacactacatttctaattctaaggataaatgaaaattactaagagacacaatttataatgaattcattgaaatattagaccatttcaattctgactttcctatagtttggaawattcctttagccctgaaggtcaaggcacagtttagtgctaaaaatacctgttagagtttaaagtagggtgagtagagcccatcct

SEQ ID NO: 419693 - DNA, 476 bp, Homo sapiens
cctgttagagtttaaagtagggtgagtagagcccatcctttttcacaatttgttatctccataaacaaagctatattgagaatttcctctgcaatttgtatggtatgataaaagatgctaaattcagcagagaccagggtctcagctttacaatctaaaagaacagagagratagacacacaatagaccacatatgtcaaatggcaactacagataataagcattcagaataggggaggtcacttccagttggtgttagtcaaagcaggctttatgaaaggctttgtggtgggcagtatgctgatgtgcaagtggtaaaacagaggacactacaaatcaaggagatgacactaatggaaatgtagagtcaaaggagtgcaaggctcacatggaagcatatggatccgggagctaagagccaagtgcacagttgttgaatgagggagagaggagaggttactctagtatgccaggca

SEQ ID NO: 419694 - DNA, 627 bp, Homo sapiens
gacactacaaatcaaggagatgacactaatggaaatgtagagtcaaaggagtgcaaggctcacatggaagcatayggatccgggagctaagagccaagtgcacagttgttgaatgagggagagaggagaggttactctagtatgccaggcacatgatcttgaactaggaacactgaccatagattggcattgacaaaagtgggttgatttttttttaagttgactttaattagcaaaaaaatagcaatgttaaaataaacatttcataattcacaatttcatcatattaacaaagcaagtatttttattactttgtatttccttacagggatttgtccatatggctgaatattttttcctagaagttgtcatacaattttgcacttagatatttttcagtgaacgttataacatctgtcatatctctgctgctttttaaaattttctttgaggaaatatacttccctagaatactcaattagaccgatagctcgagtagctaaagacagaagtaatttcttgatgagtttttatatacacacctgtttggaaggtccttgagcatatctacactttccacgatcttgaattttccagaccaaccgctgataacattttttcctatag

SEQ ID NO: 419695 - DNA, 604 bp, Homo sapiens
ccaatggaaaagaatagaaaacccagaaataagaccacacacctacaactatctgatcttcaacaaacttgacaaaaacaagcaatggggaaaggattccctactcaataaatgatgctgggataactggctagccatgtgcagaagactgaaaatggacctctttcttactccatatacaaaaattaactcaagatggattaaagacttacttaaatgtaaaagccaaaactataaaagctctggaaaacatcttagacaataccattctggccataggcacaggcaaagatttcatgatgaggacaccaaaaacaattgcatcaaaagcaaaatttgacaaatgggacctaattaaagagcttctgtgcagcaaaactgtcatcagattaaacagacaacctacagaatgggagaaawttttttgtaaactatgtatctaacaaaggtctaatattcagcatccataaagaactttaacgaatttacaagaaaaaaaagtcctattaaaaagtgggcaaaggacatgataaaactcttttcaaaggaagacatgcatgtagccaacaagcatatgaaagaaagcccaacatcactgatcatt

SEQ ID NO: 419696 - DNA, 504 bp, Homo sapiens
aacatttaaataaaaaataataacaaaaatatgtttatagaatatttagaagtaaaatatctgacaactgaaaaatatattgtcataaatttcttaaatttttatgacataataggattttttaatatagactgtgaaaaattataaatgcatatttgttatctaaagaaacaccactggaaaacagaaagaggaatgactaaaatgagataaaatgtgtacttacaaaaattaaatataaacattaaagcataaaaggtttgaaakctaaaggattttttaaaaaagattcattatgtaaacagtaagcataaaaaacctggtacagctataataatacctagcaaaaaacttgaggataaatagtattacctagaaattagaaaacatatttaattggatgataataaatgcacaacaaattaaaattagtgaaatgcatctaactcaattcttaaaggaaatgtatagttttaaatgtaacattagatgagtagaaaggta

SEQ ID NO: 419697 - DNA, 545 bp, Homo sapiens
ctctttgttttggacaatttctcctatttggaatgggtgtatttaccaaatgcctgttacctccattgtatctaggaagtaactaacttgtttttgattttaccggttcttaggcagaagacacttgctttgtctcagatgagactttggactgggacttttgagttaattctggaatgagttaaggctttggtggaatgtcggaagggtgtgattgtgtcttgaattgtgaggacatgagatttgagagrggccggggacagaatgatatggtttggctgtgtccccatccaaatcttatcttgaattgtagttcccataatccctatgtgtcatgggagggaccaggtggagaaaattgaatcatggggagagtttctctcatcctgttctatagtagtgagttagttctcaaaagattgggcggttttatgagggcttccccctttgatgggcagtcattattttatctccttctgccacgtgaaggacgtgtttgtttccccttctgccatgattgtaaatttcctgaggcctccccagcc

SEQ ID NO: 419698 - DNA, 497 bp, Homo sapiens
tctgcttcactcctccacagcatttatactaccttgaaaaggcttcacatagacagagagccagtccccttccacatacattctgaattaaaacaccaataaaaaaatgtttcccagcctcaacttatagataatttatttctgaataaaattgaaaattttaaaatcccaatgaattttgctgtgacagattttttatctgaagtagccaagaccttccttagaaagtattattatcttaatagtagaaaatgaagaaagcaatggattaaagacttaaatgttagacctaaaaccataaaaacactagaagaaaacytaggcaatacattcaggacataggtatgggcaaagacttcatgactaaaacaccaaaagcaatggcaacaaaagccaaaactgacaaatgggatctaattaaactaaagagcttctgcacagcaaaagaagctaacatcagagtgaacaggcaacctacagaatgggagaaaattttt

SEQ ID NO: 419699 - DNA, 497 bp, Homo sapiens
tctgcttcactcctccacagcatttatactaccttgaaaaggcttcacatagacagagagccagtccccttccacatacattctgaattaaaacaccaataaaaaaatgtttcccagcctcaacttatagataatttatttctgaataaaattgaaaattttaaaatcccaatgaattttgctgtgacagattttttatctgaagtagccaagaccttccttagaaagtattattatcttaatagtagaaaatgaagaaagcaatggattaaagacttaaatgttagacctaaaaccataaaaacactagaagaaaacctaggcaatacattcaggacataggtatgggcaaagacttcatgactaaaacaccaaaagcaatggcaacaaaagccaaaaytgacaaatgggatctaattaaactaaagagcttctgcacagcaaaagaagctaacatcagagtgaacaggcaacctacagaatgggagaaaattttt

SEQ ID NO: 419700 - DNA, 593 bp, Homo sapiens
ctctgcgtgggatctgttgtgtccaacttcagggtaawgtgtgagtgagaaatattaccagagacaacagtgaatggttttgagactgagaggtggacatctttctatgaaatgcttgcaatcgaaagccaggccgatccttcagcagtcatcaatacaaagagctacacagaatggatagaaggagggggaaaaaaaggagagacttgaaatacagtgggggaggaggcaggaaaacagggttgtatccttattgaagaaattttctagatcttggaacctagcaagaaatatatcttgtagttgacccatggcttttccgtggccaagagaattgctgttttggctattattgattctgcttagagaatacccttcacataagtcacaatgtactaagtttctcctcaactttctttactctcctacctatagtatcccattcctttccttgggctcattttctgtgtgcattttcacttctcaattcacccaatatgatcctacccattctttgagatttatctcctctgtgaagccttttaaatttccacaataaatagcttctatttattcattacattgtaaaatca

SEQ ID NO: 419701 - DNA, 593 bp, Homo sapiens
ctctgcgtgggatctgttgtgtccaacttcagggtaaagtgtgagtgagaaatattaccasagacaacagtgaatggttttgagactgagaggtggacatctttctatgaaatgcttgcaatcgaaagccaggccgatccttcagcagtcatcaatacaaagagctacacagaatggatagaaggagggggaaaaaaaggagagacttgaaatacagtgggggaggaggcaggaaaacagggttgtatccttattgaagaaattttctagatcttggaacctagcaagaaatatatcttgtagttgacccatggcttttccgtggccaagagaattgctgttttggctattattgattctgcttagagaatacccttcacataagtcacaatgtactaagtttctcctcaactttctttactctcctacctatagtatcccattcctttccttgggctcattttctgtgtgcattttcacttctcaattcacccaatatgatcctacccattctttgagatttatctcctctgtgaagccttttaaatttccacaataaatagcttctatttattcattacattgtaaaatca

SEQ ID NO: 419702 - DNA, 588 bp, Homo sapiens
taggcagtttcttaatagctttattttcttttaacacatacctataagtcaaagcattctttctctagaagagcctgctttttaagaaactataagaaatagacatcttttaccktccatattcccaataggataggaatctgagaacaagggagaaaagatgggagatagggtcaagagagccagaatagtagagcagttaagacaatgggcttgggcaacagatagttttgggttggaatcttggtcttagttgtctcatctgtacaatgggtttaagagaggttccctcatagcacagagttgggaaagcacaagagacaatgtgggtaagacatctaacccagtgtttgacacgtagcaggagctaccactgctaccaccgctaccaccaccaccaccaccaccaccactattactacagaagaaccaaaagcagaaaatactcttcacctttataaaacagatgagctatcaacagcatagaaggtactgatggtatattagtatgctattgctgctttaacagattaccacaaatttagtggtgtaagaaattattatatgaagctattctcttgcagttct

SEQ ID NO: 419703 - DNA, 568 bp, Homo sapiens
  misc_feature (1)...(568): n = A,T,C or G
nnnctgtgtgatattataatggtcaatacacattattacacatttatccaaattcttagaatgtacaataacaagaacaaacccaactacaggctttggaagacaatgaagtgtcagcatagtctcatcaattgcaataaatgtcccactctgaggggttgttgataatgsaagaggctatgcatgtggaggggctgagtatatacggataatccgtttgctttccattctgttttgctgtgattctaaaaccacttttttaagtctatttttaaaaaatgaaagatattccattctttctttgaaatttagtaagattttatttccttggattttgtctctagacttaccagaagaagtaacatactttagaaagggtaagctgtcctatttaaagcctattgtaagctctttatagagaagataactgagttaaataatttaaataaacatatacaatattagctccttggaagaagaattagtatctttaattaaatcataaacatttgtaaaaatatgacatatgcatttcaagttatcattcacaaacataaagcttaactcg

SEQ ID NO: 419704 - DNA, 570 bp, Homo sapiens
cttatgtgcctttgatgtctattttatttattcaacaaatcctatatactatttttttaaataaaggcagtttcaggtaactcttagttactgtgcaaaaattaaaaaactatgatrtgtgtgtgtatgtgtgtgtgtttgaggtgttatcaaaacaggaacttcataacatttttctgcttattttgaaaaggtgagctttaggatgggttcctcattgtaagtgtattatattattattatatatatgtatatatatattcacataaaagtttgaagtttgcatgaattgacaattggagaaatttaaactcaatttttccatgtcaagtttttattggaaattaacaaatctaaaataaaggtttaatagtaacaaaccacatgcattaacatttgtccctaaactaaagcctatgcaacaaaattcatcagaatgtgaatttctaattgacagtaacagttgcattacttagaaatgaattattcaccttatgaaaaccatcaaccttccagatatattttcttcttgttcttcctccactccatctataaatgcaacagtagatg

SEQ ID NO: 419705 - DNA, 584 bp, Homo sapiens
ctagaaccatgtttttcaaggatgtagtgctgtgtagtggaaagtgcccttgtttaggagagaaaaatcagtttgtgattcattgtccactgtatactagcagtgtaatatttaaaaagtcagtgattttattaagtagcagattcttattctttaaaatactttcctatagcacaatataaatgtaaaatggcattgttaatcttttttctttttttctctcttttttttttttttttttttgagacagagtctcgctctggtgcccaggctggagtgcagtggcgtgatctcggctcactgcaacctccacctcccaagttcacgacattctcctgcctcagccttcctactagctgggrctactactactacgcctgctactatgccaggctttttttttttttttttctgtacttttagtagagacagggtttcaccgtctcgatctcctgacctcgtgatccgtccgcctcggcctcccaaagtgctgggattacaggtgtgagccaaagagcccaaccggcattgttactcttatgttacatttaaacatttttataagtataatgatttgcatttat

SEQ ID NO: 419706 - DNA, 594 bp, Homo sapiens
ttgcctaatcacatttaagtcttttttctcaactaccccttagctgctgaaattcatcaactgaaattctgctccacctaaccaagattttaactttgtgaatacttattttatttagaaattgcaagccatctgattatgcataacctttcttgctatgatgtgttaagtcttaacatttggctctaattagccttacacagcccacaaattccaggtgaagctcattattttccctgcccaaactagccttttcaacgttttataagattcaaagatttgatctctaattttcacatttacccaaaattattttgttcaatgaagggtccttcttgtatgtagaatgtcagagagacatcactyccactgaggatatcacctggttctgtttccacaagctgtgctttacaaggcatcaaaagcaactgtgtgtgtcccatttcctctgggcaccaaaactatcctaatgaattaatctattgtaaaccattgtttgaaaaactcttatgcctgtgtcttactcagcctgaaccctttccttggaataacctttcgtacccctataatctggtttttggaccattgagtaca

SEQ ID NO: 419707 - DNA, 593 bp, Homo sapiens
cattttttcaaacaaatacaggtagcaataattcatttccaggagatatacactaaaagaaacgttaaaggaggctagtaaaagatggcaatatcaatttacacaaagaagaacattgaaaaagaattttttaaaagagtaagtataaaacacatttcttctccttttaatttttttaaaaagataattgtttaaaggcataagttctaaaaatgcattttctataaaatacgtatgaatataatgaaygccaataatagcacaagagataaaatagaggaagtaaaaatatattgttatgatgttcttatactacatgagaattatataatattttgaaacagactatgataagttaaagacatatatgataaaagacccaaaataaagaagtataataagcaatattgataagatcccatcataaaaaatagataattaatacaaacaaggcagagaaaaaaataattatttaaaaaacattaaaaacatctagcaaaatggtggatttaaatgcaaatctataattatattgaatgcaaatggtctaaaattgccagttaaaagacatagttatcacattggatttaaaa

SEQ ID NO: 419708 - DNA, 541 bp, Homo sapiens
gctatatttagtttgctttaataaatgcaatacatatcttaaaataacttggggttaattagaagctgtgagtttttgtttttgtttttgttttttgaatcaatgtctcactgtttcccaagctggcgtgcagtgacatgatcatggcgcactacarccttgactgtctggactcaagtgatcctcttgcctcagcctctcaaagtgctgggattgcagctgtgagccaccatgcttggcaactatttattttttgaagtccactgacttaatgattcacgagatgggcaggctcccaatcaaagcctcccaattaaaatctaatttaaaaccatttcctaatatttgaaccttggcttctgtatagtttctggttattgacgtttctaattgcttctcattcactttgtatgttttacatcagaatttctcattcaaacactttccttttctttttatgtggagaactgcctctgtagttcactcagtctttctacttagtactggacagattgtgatttaaagtggcttagaacctgcc

SEQ ID NO: 419709 - DNA, 558 bp, Homo sapiens
caataactacagaaaacttctacaaccagtaagtgatttttacaagattgagatgcaaagagagtatccaaaagttaaatgtgtttaagtatgctagcaacaaatagttgccaaataaaatgaaaaccaaagttaacaaaagcatccaaaattttaaaacttactagaaaattcaataatgtttacatattagttctcccttatctacagattcagggcagttccagtcaaattatccaaatgatcagtgaaatgatttaaactttcatatcaaaatgaaagaatttaagccttcagtttgttctacataactcaaagtcaatgatctccagaattgatattcaaagagagaaaattttaaatgcacaataaaaagggcagacagagaacagcttaactgatgcctcattatcttttatctaaaatgaaggtaagttgtacaattatcaaattatttttatacacatggcctttgccctagcgcagaagaatcaaagattaatagaacactrtccctatcaacaaggaactcacagtctggtggaagagttgctaata

SEQ ID NO: 419710 - DNA, 623 bp, Homo sapiens
tgtgtcctcatagcagaacaaaggatgcagcctctcatcatcatttagaaatagcaaaggcataacccagacccaagcagtgattgctaatgtcaaggcttgaacccaagtgtacaaatcaggatttcagtgtgcacatcccactgaccactacctcctccaacaggcaggcttgaggagcttggggcagaggcaaggcacaggtggaggaagagcragtgggaaatgaatcatcattaatcactgtaatcaggaagctaccccaagcaggttaatcaccgcatgcagggagggctcagagcaagtttatggtttacagtgagcaggctgacacagctgattgatgtcaaatatgtcatgatgtatattgtaaagcagggagatttaatggtgtaactctatggcaggcttagaaatgagctgctgcagagtgagtcgtgatggatgggctcatttacatgtaaaattgcaatggcattgacagcattggtatgtgaggggaagataagaggcacatagcaagattcactcttgtcctagtgttggaatattaaaatacagctgcggcagcatctggaatttgcaatggcctctaaagataaaattgtttttcacctttcaga

SEQ ID NO: 419711 - DNA, 623 bp, Homo sapiens
tgtgtcctcatagcagaacaaaggatgcagcctctcatcatcatttagaaatagcaaaggcataacccagacccaagcagtgattgctaatgtcaaggcttgaacccaagtgtacaaatcaggatttcagtgtgcacatcccactgaccactacctcctccaacaggcaggcttgaggagcttggggcagaggcaaggcacaggtggaggaagagcgagtgggaaatgaatcatcattaatcactgtaatcaggaagctaccccaagcaggttaatcaccgcatgcagggagggctcagagcaagtttatggtttacagtgagcaggctgacacagctgattgatgtcaaatatgtcatgatgtatattgtaaagcagggagatttaatggtgtaactctatggcaggcttagaaatgagctgctgcagagtgagkcgtgatggatgggctcatttacatgtaaaattgcaatggcattgacagcattggtatgtgaggggaagataagaggcacatagcaagattcactcttgtcctagtgttggaatattaaaatacagctgcggcagcatctggaatttgcaatggcctctaaagataaaattgtttttcacctttcaga

SEQ ID NO: 419712 - DNA, 412 bp, Homo sapiens
gccttgatgacttccacgaggaagagccccctgagctgagtgaagggtgactggggtcagcgtgggaagtagaggagggatggggattacagctgaaggagcaggagcggcagaggcctggggactgaaagagcgtgtcccactcagaaatctgtgattcagtagagttaagccagggccacaaagcaggaagaaagtggcaagagatgcccaacagccattaggcaggagccacactagaatgggcgaattcaaatttgtttccccactactgtcaaattcctattcaaatacgaccagagaaacgtatggatcatacaaaaccggttaccccaacttgcaccacatgagcgagcagcaccttgagmgaacctcagtggagtcagaggttagaggagctcctttacagagc

SEQ ID NO: 419713 - DNA, 644 bp, Homo sapiens
tatgggaaactaagaaaggctcacttcacttctttacccacggaaagttcataaataaaattttaaaactgttgtcttaaggaaaaagaaatgtaagtataggcaccctagtgctatggtttgaacatatgtgtcactctcaactgtatgtattgaaacataatcaccaaaataatggtattaagcagtggggctttggggatgygattagttcacgagggctccaaaagagccttcagaaaggtgcttggcccttttttgccccaccatcccttacaccatgtgaggacacagccttggcccctccggaggacacagcaacaaggcaccaccttggaagcagagaccaggtcctcaccagacactgacctgctggcaccttgaccttggacttcccagcttccagaactatgagaaatgaatttcttttatttataagatactcagtctatgatattttgttctaacatcagggacagattaaaatgcctatcctttatttatgtcagtacatcagttctacaaacatattgtggatgatgtcgcagccataaatgtctcttctctttgtctgtctaaaaaatgtctactcatcagttaagtctcacctcagataatgccttcctctctatcatatttccacc

SEQ ID NO: 419714 - DNA, 644 bp, Homo sapiens
tatgggaaactaagaaaggctcacttcacttctttacccacggaaagttcataaataaaattttaaaactgttgtcttaaggaaaaagaaatgtaagtataggcaccctagtgctatggtttgaacatatgtgtcactctcaactgtatgtattgaaacataatcaccaaaataatggtattaagcagtggggctttggggatgtgattagttcacgagggctccaaaagagccttcagaaaggtgcttggcccttttttgccycaccatcccttacaccatgtgaggacacagccttggcccctccggaggacacagcaacaaggcaccaccttggaagcagagaccaggtcctcaccagacactgacctgctggcaccttgaccttggacttcccagcttccagaactatgagaaatgaatttcttttatttataagatactcagtctatgatattttgttctaacatcagggacagattaaaatgcctatcctttatttatgtcagtacatcagttctacaaacatattgtggatgatgtcgcagccataaatgtctcttctctttgtctgtctaaaaaatgtctactcatcagttaagtctcacctcagataatgccttcctctctatcatatttccacc

SEQ ID NO: 419715 - DNA, 644 bp, Homo sapiens
tatgggaaactaagaaaggctcacttcacttctttacccacggaaagttcataaataaaattttaaaactgttgtcttaaggaaaaagaaatgtaagtataggcaccctagtgctatggtttgaacatatgtgtcactctcaactgtatgtattgaaacataatcaccaaaataatggtattaagcagtggggctttggggatgtgattagttcacgagggctccaaaagagccttcagaaaggtgcttggcccttttttgccccaccatcccttacaccatgtgaggacacagcctyggcccctccggaggacacagcaacaaggcaccaccttggaagcagagaccaggtcctcaccagacactgacctgctggcaccttgaccttggacttcccagcttccagaactatgagaaatgaatttcttttatttataagatactcagtctatgatattttgttctaacatcagggacagattaaaatgcctatcctttatttatgtcagtacatcagttctacaaacatattgtggatgatgtcgcagccataaatgtctcttctctttgtctgtctaaaaaatgtctactcatcagttaagtctcacctcagataatgccttcctctctatcatatttccacc

SEQ ID NO: 419716 - DNA, 644 bp, Homo sapiens
tatgggaaactaagaaaggctcacttcacttctttacccacggaaagttcataaataaaattttaaaactgttgtcttaaggaaaaagaaatgtaagtataggcaccctagtgctatggtttgaacatatgtgtcactctcaactgtatgtattgaaacataatcaccaaaataatggtattaagcagtggggctttggggatgtgattagttcacgagggctccaaaagagccttcagaaaggtgcttggcccttttttgccccaccatcccttacaccatgtgaggacacagccttggcccctccggaggacacagcaacaaggcaccaccttggaagcagagaccaggtcctcaccagacactgacctgctggcaccttgaccttggacttcccagcttccagaactatgagaaatgaatttcttttatttataagatactcagtctatgatattttgttctaacatcagggacagattaaaatgcctatcctttatttatgtcagtacatcagttctacaaacatattgtggatgatgtcgcagccataaatgtctcttctctttgtctgtctaaaaaatgtctactyatcagttaagtctcacctcagataatgccttcctctctatcatatttccacc

SEQ ID NO: 419717 - DNA, 497 bp, Homo sapiens
aaatgccttatgcatctgtcctcccgtggcctcgcttcccccagaaggacatggtagcagaggtggcaaggatggggagtctaaagcctgactacaaagcagattcagttgttccacctatctatctaacaaatatttactgggcatttactatgtgccatgtactatggttggtgctgattttaaggtttcctgacttttaaaaggagacgcaataaactttctttattccttcacctcaaacaatttaagacctattgatttgtatccataaaacagtatgtggccattgtccatttctactaaggtgtgaatatcagctattatatagacagaacatctgcaactctattgattcagagatatcgttctgggtcatttaagatgtctgcaacctccttccctgtagatggataayaaccctctgtactggcacctgccttgggttatttaggtgctttcaggaagcagatggtaacgccagtgaacttctaact

SEQ ID NO: 419718 - DNA, 547 bp, Homo sapiens
gacccacaacagagtcctcagcctctctggtccacaaatggataagatcagtgcaacagagacgtccagggtcctggtgaaggactcacaaagctgcactcactaaaggctgrtgacacactaccattccagtgggatgacttaccagggaggggggcattcttttccagctgtggctgggatcaacatttctggaagctgagctattgatctgtggctgggtgagtaaagatccaggtctcacatctgagcgattcagccccatgcactggggtctggggccgtgcagtgttctctaaggaactgacttggaggcctaggggaccctagcagaaggggagtgctttggctggccctttgctccattgccatggccttggtcctcacaattatgctgcaaggaagtaagtgggtttcagggctggcttattggatcttgccatcccacctctgtgccctacctgggattccttcatttaaaagcttctttttcccttaaagaggaggaccccaattctgggcagaatctacaaagcctgtggatcct

SEQ ID NO: 419719 - DNA, 620 bp, Homo sapiens
aatgctcttcacacacatctcaacgtatcggtcatgtcacagatgacactcactctctgatattagaaaaaccagtccaattcaactgatatttatggatttcttattaggctccaggcacaatgctaagcagtgcaaggattacaagatgagctatacagtctctgcttttaagttcaccaatttacctgtgaagagaaaacaccttaaccaacacccaattgttaataacggtaataataatgccctgggggatataaagaaactgctgggagctcacagtgaatggagtcatgatgctggattacaggatgagcaacgttaaaggcctttcatgggaaaagcgttttaggctattctttggaagaaacgacagggcagtcaagctaagaagagaaggaacaktccagtccaaggaaaagtacagagcacaaaggccctgcctcccccatggctgtgactgaaaggagttatagtagtaattatggaataaagactgagaatatgaatttgtccaggtcatcaagggccaggaataccacgcttgggaatccagactttatttgatagggaatgggagcttttaaaggttatttgaagtcaggcactatatttttttg

SEQ ID NO: 419720 - DNA, 532 bp, Homo sapiens
aagatgttaacacagaaggcaagtctcaccagagctggcacccaccactgtcttcagtgcctagaaaagtctttggcacctgttaggcattaaatattttttattgcttktattgtatcttctttgtattttctccctttatacctttcagacatgatcatatatgaagttatttgcataacgactacgactggagtcttcagatagtttgtgttgatatgggaaagattattaatgatatcatgattttctctaaaagtgactatcactttcaatgtgttggcagaaggtttgggaaacaaaatgtttaagtgaaggtgaacattttggagacgtccttccttgaatttgatttacaagatcagtgagctaaggttcagcggtaatgattcacaagcctggggctctgtcttggctggacaggtgactcactgggtcaccagagctccatgctttctctaggactcactttacttatctttgaaatgggatttattatctgacccctagaaatgctatgttcatgaattga

SEQ ID NO: 419721 - DNA, 593 bp, Homo sapiens
aatatatatatagacaagggcgctttaaaaactgttaagttctatccaaatgataagctaattttaaaatataatttaggctgctctgttgtaaggtatttgttgtaatgagatttctcctttactaattgtgaactaatttgctcatagagtgaataaagtatttataacatgttagaattaaagttgtcataaatacccataaaataaagtttttctctacaatagtaactagctcagaaaacattaagctcacaaagtgtatcctattggatgtattttgaacagaaatttatgtatcgttcygaccacatattttagatttcacctgttcacgttttccttagctatattgtgtgatttttgtattgaagaattgtggtgcagtggaaaggtgagctttgtagtcacataggcctgagttttacagtgcactctgacatttcctagctttgtccttgtgattaattcactttctattgctatcaatatctaacaattggcagacacttgatatgctccaggaaatgtgctacatgcttcacatacactacctcatgtaacccccagcatacaccatgaagtagatacta

SEQ ID NO: 419722 - DNA, 573 bp, Homo sapiens
ttattatataagggatatttttaaagttgtgagatacataaaccacgtgtttctctcccaatttttatgagtacatcccycccaccccccaccccatgcaatcctagtgtgagtctacctggaagcatgcagtgccaggctcttctctaatgctaccattcttagcatgagtttgataactgctctccatggcatgctttctaattctgcgttcttgtttcagaaaaatggcataacaaagccccaaaccccaaaattttaccctcattttttcaaaaatgacttccaaaagtattgttagtaatacagcaagttccctctagtttccttgcaaattgacatactgagatattacagttgctatgaagtttctggtgactttaaaaacttttacattacattagtgtaatgacagggtttatctacagcttatgactgtgaatgcttcagcatacatttccataaatagaaacactgtagattttacattaatcataaagggaattgataattgcctatgggagtttttagctatgagcaaaaatgtttgacccaattatgcttgcatggtga

SEQ ID NO: 419723 - DNA, 570 bp, Homo sapiens
aatactgcatgatcttactgcatgtggaatcttaaaaagttgaacttgtaaagagtagaatagtagttttgagggactcaggggtggggtgatggggtaaggggagatgctggccaaagtattcaaagttttagttcaacaggaagaatatttcatgtacacagaagaattatgttttagtgatctattacatagcatggtgactatagttaataataatgtatatttygaagttattaaaaagtaaaatttaaaagttatcatcacaaagaaatgataagtagtgaggttaaaatatgttaattagcttgattcaatcatctcacaatgtgtacatatatcacaacatcacattgtacctcataaatgtatataattattatgtcagttaaaaataaagtaatataaaaaagattactcttgctgcatgctatgtgttttggtatgttatgttttcatgtttgtttgttttaagattttaaaaaattttcccttttatttcttccttgacacattaattgttcagaaatgggttgtttaatttctacatatttgtaaattttcccattt

SEQ ID NO: 419724 - DNA, 505 bp, Homo sapiens
catccaaaaaacaaaacaaaaacaaacaaaaaaaamctcacagagtacacaagtcccactcatgaaccgtgtctctaaagaaacttagacacttggttgtgaggcacagaaacagcagaaaattcaaaaggagaaatcagagtgtcaccacatcaggagtggcttcaggccaagaagggacctgatctaggctctgaggagctgtaggatttggacaggcagaaaggagaaggaaaaacatcccactgaagtccctgctcaactaactcacaatggttcttgtgacatttccacagatgagtctcctggctgctggtctgtgatggtattactacttttactgtccagtgatataaaaagcaggtttcacattgcccagtagctttgcagtcactgttatctatctagttctttaagtttaaacattctgttacttatacccaacaaactgagtggattaaaacggtatcttgaacgggaataattattattatcactattcatt

SEQ ID NO: 419725 - DNA, 526 bp, Homo sapiens
aaagtgtggaccttctgtgaaaggtttttgaatcttttgagggggaaaaaacatgacattaatgagaccaagatatttaatgaaattaaggaaccgttcatttttagatgttataayagtgatgtatgtatggttaaaaaggcaagacagagtaatggctgagggtccaggctttgaaatcgttttctgattggaagtatctcttctgagactgggtaacaaaaatttgggtaagtttccaggtaagtttggctttatgtcctctctctaaaatgggaaataataatagttgttgcttcattaagttgttggaggtttataagctacagcatgaagaagtgcttagtatagtgcctggttcacagtgagcactcattccatgtatattactattaagatgtttaggaactttttaaaaccttgctattgattccactcagctcagttactctaatatctgaactaggttactcctcttgcaacttccatatactgcacactcattaagtgttcaaaacttaaggtt

SEQ ID NO: 419726 - DNA, 561 bp, Homo sapiens
ggatttcaccaaggctttgaagaagtgataagccctatatagaaaatttctgaatgtttatgaggcttacagaatctagaaaacaaatcagacaagatatgcagtaaacggtcacttcgcagaatcaatagttctggaaactgcaacttcaagtgaaatgatgtataacgaaactaattttaccagcwggggatatatttttcttctggtcaatgaaatgatgctgaatgaaaggacatcattgaagacctggtatacacagggttcttcccacccctgccccttttctagcatgagcatgcacccacacacgcacacatacacacttatttcatggaccaaaggtccccaaacctcagtcattcaggtaccaccttttcaatttctgacatacttagataccactgtagtacacagaaatattatttaattaatatttatttaaatttttggctacaaagtagccaaaaatgtattactatcataaatagaaaaccagtaccccttgtcaaaattaattaaaacaactgcataactattacaatttttaaaatatttttc

SEQ ID NO: 419727 - DNA, 563 bp, Homo sapiens
gttattctcaatgccctggttctcacaagtgcctattcctactgtagtattctaatatgattccccaatgaaatcttgtagttgtcaaatattctaatatcaattgctgcaaaacaaaccacctgaaatgtaacagagtaaaacaatgactattttattacgtccttggattctgtaatcaggaatttggacacagcatggtagggatgtcttgtctctatgatatctggggcctaagctgaaaagacttgaaaggcaggagtttacttgaatggctgggggaagsaatcatctagagcttcgagcttccttgtttctaagtctggtacaggtctggtatgactttcaggctgggctcatctggaactcaaccagagcacttacatgtggcttctatatgtgacctgggctttatcacagctaagtggcttcagggtagttgaacttccctggtggctcaaggtaccaagagtgaatgtcccagtgagcaaggccatgtctgcatgacctttttttttttttttaaatgaacaagcctctgaaatcagtcacctctacagcac

SEQ ID NO: 419728 - DNA, 607 bp, Homo sapiens
ctctgaaatcagtcacctctacagcactccatagattgaaggagtctacccaaattcagggaggagggatatagaacccacttgtagatggaacaaatgttgaagaaattgcagctatgttttaaaatcagatggtatgagagctcatgaaattctgacccagccagttttgttttggcacaggcctatagtctaatctatggawgtaaactgccacattacttggatacctcattcttttctttctgaaattctgtaacttgatttctgtgcttcgatacaaacctaatgagatcaagcccttaactcctatgttatagctaatttgtattgaaatgattgattaacactcagtcatctttgaagaaagagtgagaggtgggcaaactctggcttttagatagtgtaggattaacatacaaaaatctcatccttgaaatgaccttggagttggaagggatctgcaccatgtgctgtattcacaaaatagaggatatcaatgctaagcagaaatgggagcatgaaggagagtttgtgagcagttgggagagacaaataagcaatttgatagagagaaaataaattaaaattaaagttgtgtatgtgt

SEQ ID NO: 419729 - DNA, 537 bp, Homo sapiens
tggaaacatttggaaatggagttttctttgtagaatatttgagtacaaatttattttctttaatgatacaaagctatttagtttttatctttgtattgtattatcattttggtagttgtattttcagggaatttgatgatgtaatcaaagttgtcaaatttattagcagaatgttagccatactattctctgtaagctcccatgaacatatttggcagtgtttcttcttttattcctgatacttgtgatatgtattttctctttyttcttgatcagtcttgctagaggtttattaattatattaatgttttcaaggaaacaacttttgactgttgttttcatttttattattttttcatactcttcattttaagctgctcattcttttagattcttaagttagaaacttcagttagaattatcttagttaatttttctaatataagcatttgaatgtataaattttccataaacgctatttgaactgcacctcactaattttgatatgttgtgttttcattatccttgagttcaaaa

SEQ ID NO: 419730 - DNA, 568 bp, Homo sapiens
cacacacacacatacacacacacttatcaccttttctttatccactcgttgatggatgggcatttgggttggtttcacattcttgtaattgcaagttgtgctgctgtaagcatgcgtgtgcaagtatccttttcatatagtgacttattttcctctgggtagatatctacctagtagtgggattgttggaccaaatggtagatctacttttagttatttaaggaatctccacactattttccgtaatggttttactagtttccattccctccaacggtgtaaaagtgttctcttttcaccacatccatgcaaacatctatttttttattwttttttgcttatgaccatgcttgcaggccgcagtgtggttttgatttgcatttccctgatcgttagtgatgttgagcatttttcatatgcttgttggccatttgtatatcttcttttaagaattgtctattcatgtccttagcccattttttgatgggattgcttgtttgtttcttgctgatttgtttgagttctttgtagcttctggatattggtcttttgtcggaggcatagattg

SEQ ID NO: 419731 - DNA, 536 bp, Homo sapiens
attaacttgtaaactaataatagtgaattttgtggtttataaactgtaaaaaactatttaaaataaaatggatacctttagataatttgtctagaaacacttggaatataaaaatgaagaagtatgtctaatccattggaagacacacaattggttcataaaagtgaatctcccgatttctttgccaaattcccagcttaataatttagtttatgatactacaatatttgacttaaattctgagataaaacaaatttgattcaaaatgggaaaataggaacaagacctgcttggtaaaatttttgtgttccatttaacaaaccatatatttaaactgatggtagtagctgaattaaagaacttcrgttaaacttttctccacccactataagtaatttctgatacattaattttatatatttaatcaccataaaataagatgactatctcatattcttttttttttattattatgatactttaacttttagggtacatgtgcacaatgtgcaggttagttacatatgtatacatgt

SEQ ID NO: 419732 - DNA, 573 bp, Homo sapiens
ctcaaaaatatatatgtacatacacagcctaaatgtcagcttttaattgttgacttttgacgataaagctcttaaaaaatatttttttatcaggttttaactgggcaaataacaagcattactgtgtcttggcttttcctgtctgaaatttacaccaagaaggaatttttgacgtggggcatgtttgtttattagaggtctatggtaatcattgtttaaagccatttgtctctaaaatttttcttttaataaactgggtcctttctttctgagtatacggatttatttagcttagaagagtaggctaaacaaacaaagcaacaaaaaagtttctatcacattctaaatataaaccaaaattttaagtcaaaggcatacctgaataaatgactaaaaaccagcacragtaagcatatataataccaaaacgattaagttcgttatggctttacccaaggtctctaaaaagggagcaaaaatttgcagtgcttgcaagatcctgacccctcccaaaaacagcttaaaaaaagggaaagttttgttcactacaagttgggtgaaacccacgtctgt

SEQ ID NO: 419733 - DNA, 620 bp, Homo sapiens
aaacataactcaaccaaagaaaaaaaattgataaaccattagccaggttaaagagagagagasagagagagagagaaactcaagtaaagtaagaaactgatgccagaaatacaaaagataacaagaggctcttatgaacaactatgtgccaataagttggataacctaggagaaatggatgaactcataaaaacacacaacctatgaatactgaacaagaaagaaatagaaaatccaaacatctgtaactagttaagacattgaatcagtaataaaagaaaataaattaaaaaatctcagcaaagaaaagccgagaacaagatggcttcactgaagaattctaccaaacattaaataaaatgaaaattcttcccaaattctttcaaaaactttaaaaggaggaaacacttccaaactcttttaggaagccagtattaccctgataccaaggctagacaaagacattacaagaaaagaatataccaggtcattatcacttgactaatatcaatccaaaaatcctcaacaaaatgctagcaaactgaatttaacaacatattaaaaggatcatacaccatggccaagggaaatttatctctgggatacaaggtgggttgaac

SEQ ID NO: 419734 - DNA, 620 bp, Homo sapiens
aaacataactcaaccaaagaaaaaaaattgataaaccattagccaggttaaagagagagagagagagagagagagaaactcaagtaaagtaagaaactgatgccagaaatacaaaagataacaagaggctcttatgaacaactatgtgccaataagttggataacctaggagaaatggatgaactcataaaaacacacaacctatgaatactgaacaagaaagaaatagaaaatccmaacatctgtaactagttaagacattgaatcagtaataaaagaaaataaattaaaaaatctcagcaaagaaaagccgagaacaagatggcttcactgaagaattctaccaaacattaaataaaatgaaaattcttcccaaattctttcaaaaactttaaaaggaggaaacacttccaaactcttttaggaagccagtattaccctgataccaaggctagacaaagacattacaagaaaagaatataccaggtcattatcacttgactaatatcaatccaaaaatcctcaacaaaatgctagcaaactgaatttaacaacatattaaaaggatcatacaccatggccaagggaaatttatctctgggatacaaggtgggttgaac

SEQ ID NO: 419735 - DNA, 537 bp, Homo sapiens
gttatagattttgcacaattgtaaatctaacacatagatacatgttacaagagaagtaaatgactttccttttgcctttaaatcttgataatggtcccaactctatatagcactgaaaattttgttctaggtatgaagcagtacctgcaatgtacctgagggataattttataaagaccccatgctctcatgatgtacataaatggcattctgcatcaatgattgaaagctacaataacttttttttactctcagcaaaatagcacagtgtgcagaaaaatayacaacatgaagtaaaaaaatgaccaaatcagcagaggtttgatactcagcctgtatgtgcctgtttcgtaatgacacaccctgtggcacagctacaaaagacattgaaaaaagaactctgcttcaaaaattataaatggtttagtttaatatatctaaaaacagtgtcctcagtaattatatatttcatttcactgataatatctttatcctagtaatttaataaccctatttattttttggtaaaaattatat

SEQ ID NO: 419736 - DNA, 588 bp, Homo sapiens
tatattttctactatgcagaaaatgtatcttcaatgtaataatattatacaaagtaatgatgacaataatattagcaactaatgtttattgggcacataattttgccaggaaataatatcttcctaatttcagaaatgataaaaatgaatctaaatggttaattacctagcccacaataaccaagaaactggtaagtgtagcggtaggattcagatgcacagtgtctatgaccttagccactactagatattatacacatttgttttattttcagttcttgytggtacatttttataactgatcttagaccagagagagataaaatgcaagggtgcaataggggaaacaaagacatcaaaggtcatacacaaaaagtttaaggaagatcataaaaggaagcttgaaaacataaacagaataagcagtagtacttctgctcaacatttaacaagcttcatatattctacagatctcattaaacaccatttctacttctgaattcattcactttcacttaaatgtataattaagaatggatacattatcaaaatcaagtttcattataagaaaagtattcattatgtaag

SEQ ID NO: 419737 - DNA, 568 bp, Homo sapiens
ctttcctgtgtcttttatttttcctctgagcatatcagttattgctttttaaaaagtttttcttttgctaactgtattgtgaatgtttcaatttcttctgagttattattcctgattttcccattttcctttgtcttacattaaaggaatttctcaaattccctgggatacttagcaatctatatgttaaagtgaggcttaaaaagtagagagtgaggtttgtgttactaagtagagtttacttgttcacaggtcttagaataattgggtagagcctgaatgttttcaacaagcttcaaatgtcaatatctagaaattaattctatayccctcattcccatatacacacctcttccttgaaataggaatctattatgctcctgcctagagagctaaatcttggatatagcatcctgggtaaagaaggagttgatggcttctctacttggtatctagatttttcatcaattatcttgttttcaggccctctattgtgtctgatatcctgaagtctagaatatttctgatttaattttaccaataggtaagtctcctgccttatatcagg

SEQ ID NO: 419738 - DNA, 591 bp, Homo sapiens
gcattctcagttctaccatattttaaagggagtgtaaattcacttttgaaagatttgacatctgaattagcacagaacataaactttctttatgaagttgrctttaacagaaattgcaaagcttaatttatacagtatcttcaattacatgaatattatgttctcaaatatttcatataatgctatttctaaagacttctctatttcctgctttttttgcccatggtcagctccttgaaatttcatagataggatattgataccatatgaaaacctattactgaatggaggaaatgatctagagaggacaccaccaagagcaaatggaaaaatactagtacaaagcattcaaacaggctggttttatttccctgtagcaccttctggtggcaaacacagtatattgctgaatactctagcactgaaaggaaggatatcgcaaatattattgagcacttgagatattatttaataaactgaatccccccaaagtggcctaaatatgttttttaatttttttgttcctccagttatatattcataatatgagcatatcaggcaagataatttgtaagtttccttctagaattg

SEQ ID NO: 419739 - DNA, 576 bp, Homo sapiens
cataatccctccataaatcaaatttaaaaaaaaaaacttttcaataacattattgtaagaattaattattatagttttgcaaaactgaaaagttgttaaggcatacagagatcttctccttggtttactttattcgcagtcacttctgtaaaatgtagggcttagtaaaggaaagaggactgaggaaatgtttggyatatcacaccatctcccagtaccattgtcacttctacatggagagagcatgtgctctctttctctatgtctctgtctctctgaatagagacactataaacatattttacagaaaattaataacatagtagaaaaacatttagtaaaaacccaaaaggcaaaaaaaacttgcaaaaattactatagctgataacacaaaagctacaatcatgcccctcaaaaaatcatattcagaatgataatctgtaaacattcacctgagcctaactttactgaggtttgtgccaagtatgtatgcatgaagaaaaagaaaaatcatttctaaaattggagagctgaacttcatgagtgagattttggctagaaaactgctatcctcat

SEQ ID NO: 419740 - DNA, 576 bp, Homo sapiens
cataatccctccataaatcaaatttaaaaaaaaaaacttttcaataacattattgtaagaattaattattatagttttgcaaaactgaaaagttgttaaggcatacagagatcttctccttggtttactttattcgcagtcacttctgtaaaatgtagggcttagtaaaggaaagaggactgaggaaatgtttggtataycacaccatctcccagtaccattgtcacttctacatggagagagcatgtgctctctttctctatgtctctgtctctctgaatagagacactataaacatattttacagaaaattaataacatagtagaaaaacatttagtaaaaacccaaaaggcaaaaaaaacttgcaaaaattactatagctgataacacaaaagctacaatcatgcccctcaaaaaatcatattcagaatgataatctgtaaacattcacctgagcctaactttactgaggtttgtgccaagtatgtatgcatgaagaaaaagaaaaatcatttctaaaattggagagctgaacttcatgagtgagattttggctagaaaactgctatcctcat

SEQ ID NO: 419741 - DNA, 602 bp, Homo sapiens
  misc_feature (1)...(602): n = A,T,C or G
gcattgaatgctaaagatgctgctcacttagtgcccttgcaactggtatcttcagtcttggtgggcactgaacccaactggctgggcttatggagaaggcaagtagaaaacagtckaggaacttaactgcaactgtgggaattgtgacagtaaaacgaaggagaaaaatagggcagtagatggaggataagggagaaataaacagttttagtttcaagactgaggacacttggctagacattaggaagctgggtttgagtttgtgtttaccacttttgaactgtgggaatgaagacaagtcatttaatctctaagaccacagtttcttcagctgcaacatgaagttgttcctcctcgctagcacagtttgggaagcactggtatagattagaataatttggatgtggccggtctaatggttggaggaaagtaggacgtggaaatggagatggggacaaagagtaggggagacctggccagataagtgcacaaaaaactgaattctaatttatttcccccctcttgaacagcaaagtaattagaataaaattttgttatttttnaactaccatgttaaagaataaagatcataatgagaaaag

SEQ ID NO: 419742 - DNA, 602 bp, Homo sapiens
  misc_feature (1)...(602): n = A,T,C or G
gcattgaatgctaaagatgctgctcacttagtgcccttgcaactggtatcttcagtcttggtgggcactgaacccaactggctgggcttatggagaaggcaagtagaaaacagtctaggaacttaactgcaactgtgggaattgtgacagtaaaacgaaggagaaaaatagggcagtagatggaggataagggagaaataaacagttttagtttcaagactgaggacacttggctagacattaggaagctgggtttgagtttgtgtttaccacttttgaactgtgggaatgaagacaagtcatttaatctctaagaccacagtttcttcagctgcaacatgaagttgttcctcctcgctagcacagtttgggaagcactggtatagattagaataatttgratgtggccggtctaatggttggaggaaagtaggacgtggaaatggagatggggacaaagagtaggggagacctggccagataagtgcacaaaaaactgaattctaatttatttcccccctcttgaacagcaaagtaattagaataaaattttgttatttttnaactaccatgttaaagaataaagatcataatgagaaaag

SEQ ID NO: 419743 - DNA, 478 bp, Homo sapiens
  misc_feature (1)...(478): n = A,T,C or G
ttttttttggtggtcacattgacactgaaggttgaagtcagtttcttttgacatactggatcagggagaataaaagcatggcaagcgcaccgccactaacccatggcaggcatcagtaactgtctggcactctgcctacatgcagagtttgcactccaggcagccattaacaatacatcaaaatcagtgctgaggaagatgaagctcatcgatgaatccttcaccagagactaacagtgataggaaatgtgttgattcgacacaaatataggacagttgcttctcaatcagaaaatatcctacctacatcctgatctggtaaaggtctcaagagacttccttttcagcagactatatgtcttctcayattctattntagccttttcttctgaaattttatctctggattgataataagaggataagaaattaaaagtggtttgggatgtgaggggaaaaagagttctaaacaaaatgc

SEQ ID NO: 419744 - DNA, 573 bp, Homo sapiens
ccttctggggagtggtgggtaaacagagagagagaacgctttttttaaggaaagaaaaagtagaaggataatagcacatatcataaaatcatatgcttaatttaaaaatgcatcaggtaatatgccagtgacatccaaattaatttgttcaaaaagctgatctctctgatgtcctattgttaagcttaattctataatcctcaaaaaagtgtttgaatctcaagaaatagcaagtactcagcctcaagcaggcaacatcgagtttgctaaaataatggaaaactcagataaagcagaccaggacacttgctcctctatgccctgcatcaccatctacagacagagccaggattcctgaatgaatccaaatcatttcaatacagacatgaggctgagaatacaaactacagataagtaattaaatgcacaagaatgaactgctgtgctttgtacatttaggaaayaaacgtgcattacttcatttgcagccagcactcaccagcttgctacccatgtcttgtcaattcctgattcagagttctggttggttctcaatttatttctcaaactacc

SEQ ID NO: 419745 - DNA, 560 bp, Homo sapiens
tgacaaaactattactacattattgatttttgcgtaaaagacaatccttctatatatttttaaatctgaaaagttatagacaaaaatgttaatagtgattgaatagaaagagatagttcaatttttttatctattggtactttctgatttttctgtaataaacatgtcttggctttgcaattaaagcaacacttcgaataacaaaaactaaaatactacttcaacatcctctcccaaaaaagaaacaaaacgagtagggcagacaagtagaactgtttaaaggtgccaataatayctctatttctttgttgctgccccaaagagaaactagagaaatgagagatgaccacctgtagataaaagaaatgagaagctaaggtaaagggaggcaataagaaagaaagattttaatcaagtccaaactgagcaatagcttatgaggcagtgctgaaaatgagtgatgacaggccaatctgcaagcatgagagataaaggaggataaaggagtctgcgtaactgagaatgatgccatttacacatagtgaaggtatgagtcaagg

SEQ ID NO: 419746 - DNA, 448 bp, Homo sapiens
caataatacctctatttctttgttgctgccccaaagagaaactagagaaatgagagatgaccacctgtagataaaagaaatgagaagctaaggtaaagggaggcaataagaaagaaagattttaatcaagtccaaactgagcaatagcttatgaggcagtgctgaaaatragtgatgacaggccaatctgcaagcatgagagataaaggaggataaaggagtctgcgtaactgagaatgatgccatttacacatagtgaaggtatgagtcaaggggttaaggaaggtacaacaggtctgatgttcctctcttgcggaagaaaagaacacctatttctaaaggtgatgccaatatattagttgctattttatttttgcttgctatttttgtaaaatgaccagtggataggaatgagaaactccaaaacaataagctacttagaacaaca

SEQ ID NO: 419747 - DNA, 572 bp, Homo sapiens
gcaggtttgttacatgggtatattgtatgatactgaggttyggggtatgattgatcccatctcccaggtaatgagcacagtacccattacttggtttttcaatccttgatcccctctttctgtcctccctctagtagtcactagtgtctattgttgccatctttatgtccagcaatacccagtgtttagctcccacttatttgtgagaatatctggtatttggttttctgttcctgcattaatttgcttgggataatggcctctagctgcatccatgttgctgcaagagacgtgattttattcttttttatagctacacaatattccatggtgcctatgtgccaaattttctttatccaatccatcgttgataggtacctagattgattccatgcctttgctattttttattttattttattttattttattattttttgagacagagtctggctccgtcacccgggctagagtgcaatggcacgattgcagctcaccgcaacctccgcctcccgagttcaagcgattctcctgcctcagactcccaagtagctgggattacaggcatatgc

SEQ ID NO: 419748 - DNA, 572 bp, Homo sapiens
gcaggtttgttacatgggtatattgtatgatactgaggttcggggtatgattgatcccatctcccaggtaatgagcacagtacccattacttggtttttcaatccttgatcccctctttctgtcctccctctagtagtcactagtgtctattgttgccatctttatgtccagcaatacccagtgtttagctcccacttatttgtgagaatatctggtatttggttttctgttcctgcattaatttgcttgggataatggcctctagctgcatccatgttgctgcaagagacrtgattttattcttttttatagctacacaatattccatggtgcctatgtgccaaattttctttatccaatccatcgttgataggtacctagattgattccatgcctttgctattttttattttattttattttattttattattttttgagacagagtctggctccgtcacccgggctagagtgcaatggcacgattgcagctcaccgcaacctccgcctcccgagttcaagcgattctcctgcctcagactcccaagtagctgggattacaggcatatgc

SEQ ID NO: 419749 - DNA, 572 bp, Homo sapiens
gcaggtttgttacatgggtatattgtatgatactgaggttcggggtatgattgatcccatctcccaggtaatgagcacagtacccattacttggtttttcaatccttgatcccctctttctgtcctccctctagtagtcactagtgtctattgttgccatctttatgtccagcaatacccagtgtttagctcccacttatttgtgagaatatctggtatttggttttctgttcctgcattaatttgcttgggataatggcctctagctgcatccatgttgctgcaagagacgtgattttattcttttttatagctacacaatattccatggtgcctatgtgccaaattttctttatccaatccatcgttgataggtacctagattgattccatgcctttgctattttttattttattttattttattttattattttttgagacagagtctggctccgtcacccgggctagagtgcaatggcacgattgcagctcaccgcaacctccgcctcccgrgttcaagcgattctcctgcctcagactcccaagtagctgggattacaggcatatgc

SEQ ID NO: 419750 - DNA, 496 bp, Homo sapiens
actatttattgagtagggagtcctttccccatgacttgtttttggtgactttgtcaaagattagatggctgtaggtgtgtggctttatttctgggttcactattctgttacattgatttatgtgtctgtttctgtaccagtactatgctgttttagttattgtagttttacagtatagtttgaagttgggtaatgagatgcctycagctttttttatttttgtttaggattgctttggctattcaggctcttttttggttccacatgaattttagaatagtttcttttatctgattctgtgaaaaatgatgttggtagtttgatgggaatagctttgaacctgtatatttatttgggcagtatggccattttaatgatattgattattttaatccatggacatggaatgtttttccatttgtttgtgccatctatgatccctctgagcagtactgtggttctttttgtagagatttttcacctccttagttagctg

SEQ ID NO: 419751 - DNA, 538 bp, Homo sapiens
ctgtggcttggccacttttaagaaaaattacctttttctgatttgcagattctcaagggctctgtcctaagccctttttttctctttatgttaaactctcctacccattcttrtggtttcatataacatttatgtaacaacttccaatgctgtaccacttccaatctagaccttgttcctaagcttaagattttatattgcatgctgcctaaatcactccacttggttgtttctcatattcaaagccaaattcccccctactcacctatctgcaccaaaattgtatcttctcccacctttcctgtcacaggtaacacaaaccagatacctgtcagtcatacttgatacttaatcctccttcaaatatttttcccaaaccattgtcatgaattcccagatcttttgctcactcttttgtcttctttccctctcagctgccatcatcctagtcaaaacgaccattacgtcttgtgggtttactaaagttgcctctgactggtatccccaattcttagattgtcctttccaatcttttctt

SEQ ID NO: 419752 - DNA, 538 bp, Homo sapiens
ctgtggcttggccacttttaagaaaaattacctttttctgatttgcagattctcaagggctctgtcctaagccctttttttctctttatgttaaactctcctacccattcttatggtttcatataacatttatgtaacaacttccaatgctgtaccacttccaatctagaccttgttcctaagcttaagattttatattgcatgctgcctaaatcactccacttggttgtttctcatattcaaagccaaattcccccctactcacctatctgcaccaaaattgtaycttctcccacctttcctgtcacaggtaacacaaaccagatacctgtcagtcatacttgatacttaatcctccttcaaatatttttcccaaaccattgtcatgaattcccagatcttttgctcactcttttgtcttctttccctctcagctgccatcatcctagtcaaaacgaccattacgtcttgtgggtttactaaagttgcctctgactggtatccccaattcttagattgtcctttccaatcttttctt

SEQ ID NO: 419753 - DNA, 570 bp, Homo sapiens
tttaaaacatttctcatttcagttaacacttagggcctcctattctgcaaggctcctaagttccaaagcatttcagctggtggcatctccccaggggccgttggttcttgggacccatggtrgttggcgaacacctccaatgtatttgcagaggcgttttagggcactttccttgaaatggaaaggcttgggtttggctggaggttatgggtttaaaggcccttggtgaaaatcaaaggagagcatgagagcagatgttcgtgaaggccattatgtgccctgctgaggcattttcaccatttcctaaagcctatgtggaaacatttatcaattaagtaggggactgattttgtggcattgtagagaacagtatggtgtttgtcttagcagagaggtgaaaatgttaaaagatttgaggcaattgaagtaacacagctagctagggtggaaactgacaggggcctccaagggatattgagagatatttagaatatggactcttgaggacttgctgaaaaggcggggtcctcctaggtttgcctcccaggtttctacctggttgactatcat

SEQ ID NO: 419754 - DNA, 581 bp, Homo sapiens
aatcaggggagaatgagaatgtaggtgaataacatcaagtggaaataaggaagaaaggcagagaggaagggagggaggaagaaaggaaaaggaagaaaagaaggggaaaaagaatgtgtacaaagtttttaataggaaagacctctgaaaattctcaaattcagacacagggaccttatctgtaaacctaagtaaaaatcacttgatgttccaggctttgtagcatgaaaaacatatgtttatacctatagtcttaaaatagacaasctttttgaagtttaccaatttttgctatgagaatccaaagtactgtcaaatttatcccatttcttcaagtgtttctattgtctccattcgtgggaaagaaaatataatataccagtttctaaaacctatgagtcttacttgatacataaagtgaaagaaattaaaattgtacaggctcctttttcgtatttatttatttattgagatagagtctcactctgtcgctcagactggagtgcagtggtgctatctcagctcactgcagcctccaccttctgggttcaagcgattctcctgcctcagcctcctgagga

SEQ ID NO: 419755 - DNA, 581 bp, Homo sapiens
aatcaggggagaatgagaatgtaggtgaataacatcaagtggaaataaggaagaaaggcagagaggaagggagggaggaagaaaggaaaaggaagaaaagaaggggaaaaagaatgtgtacaaagtttttaataggaaagacctctgaaaattctcaaattcagacacagggaccttatctgtaaacctaagtaaaaatcacttgatgttccaggctttgtagcatgaaaaacatatgtttatacctatagtcttaaaatagacaagctttttgaagtttaccaatttttgctatgagaatccaaagtactgtcaaatttatcccatttcttcaagtgtttctattgtctccattcgtgggaaagaaaatataatataccagtttctaaaacctatgagtcttacttgatacataaagtgaaagaaattaaaattgtacaggctcctttttcgtatttatttatttattgagataragtctcactctgtcgctcagactggagtgcagtggtgctatctcagctcactgcagcctccaccttctgggttcaagcgattctcctgcctcagcctcctgagga

SEQ ID NO: 419756 - DNA, 613 bp, Homo sapiens
aattccactcctaagtatatacccgagggaaataaaaatcgaaagcacaaaaacttcaacacaaatgttcatagcagcataatttaaaataaaaaagaacccaatatccatcaattaatgaatggataaataaaatgtgrtatattcacacaataacatattattcagcaatgaaaggtacttacttacacattacaatatggataaaccttgaaaactttatgctaggtaaaagaaagcagtcatcaaagaccacattttatattttctattcatatgaaatctccagaacagtcaaatctatagaaacagaaagtagactggtggcagcctagagctggggaagtgtggggggaaatgcggagtgagcgctaatgggtagggcatttctttttgaggtgatgaaatcgtaaaactctggtgatgtttgcacaatctatgactatactaaaaatcactaaattatacaattttaatgggttatttgtatggcatatgaattgtgatctcaataaagcttttatttttatttatttatttattgttttttaagatggagtctcactctatcaaccaggctggagtgcagtggcatggtctcagctcactgcaa

SEQ ID NO: 419757 - DNA, 594 bp, Homo sapiens
tcttgtgtttcagcgagcattagaaaacctctccttccttgacttttgttgatgtaatgttagtgcttatctcaaattttaaattgttccaacatcatagaggaatattattagtttagtaatattttactgacacatactatgttccagatggctcttattcatatggaaaagcttataagagaaatgctaactaaaactatgctcagcataatcctccttacctatcagacaaaatctaaggttagatgacaaaaatctaaaggtttgttgacatactctgctagaaagactctggggaagcaagcaytcatctattcttggtggtactgcaaaaggtacaatttctttgaagaagaatttggcagtatcttacaaaatagttatacgcatttaccctttgatctagcaatcctaattctagaaaatctcaaagatagaatggctaatatatagcagggtgtaagcacaaagaaaaactatctgtaacagtgagactgaaaataatcctaatgctcatacagataggcggctggatgaataaactactacacagttactcgatgataattattgtagctggagaaaggagta

SEQ ID NO: 419758 - DNA, 597 bp, Homo sapiens
atgtttcaactacaacctacacagggtccagacagagagggtcttcttacttcttgagtgaaaatcgatgagagagattgatgaattcattgtcttcatcaagggcctgccccacatgaagttctgtctatggcaggccctggagatagagctcgtagcttactccaccttgcattcatgtccttgtaaacaacctgaatggcgagacagatgtcagatatcaaatcatcccatagataaatgcataattactattgtggtaaagctgtgaatgacttactggtgctgctgcaagatctkctagaaaagagcacctgtctgggcaaggtgcggtcagtggagagcaggtgtcagaggaggtaatgtgagctgtcatctggagggtccaggacgatagctggtggggcacagttggggagtggcagggtagaagagtctcaggtagagaaaatgtcatgtgcacagacatttggggtgatggtgggtaagaggagttgggataaggcctgtgcagctggaacatcttgatctcctttgtgggtttttcctcattcctctgttctctaaattttggagggcccctgggctcatccttgg

SEQ ID NO: 419759 - DNA, 574 bp, Homo sapiens
tttgcaacattaaaacctgatcacatagcagttatttttcaaatgctgatgttccaggtactctgcttagcacttcacatacttacctaccttaattttcagagccaccccatgagagaggcactgaagtcccagaaggataattaaatcttcaaagtcacatggctgattggtgccaaggctgggactcaaataaaaattgaaggtctgtgctcmtaatcacgccccaggctccttcccagggaaccagggacctgtgcttctcaactctcaggacacatacaaatccctggttgaagtggggagggtggcagtgggggcaggggagcatgttatgttaaaatgcagattctgattcagtgagtctggggtggagtctgaaaatgtacatttctaacaagcccctgggtgatgctgatgctggtggtgcttagaccacagtttgagcagcaaagatcaagaaagtatgcaactgtggggaaacaggaagaagttaggttctcaaaaatatggcaaaaacctcaattacgtttgcaccatccttatatataagaaaatctgaactctgtgaagt

SEQ ID NO: 419760 - DNA, 567 bp, Homo sapiens
tgttaacacacgcacacataccctcgaacctaaaataaaagttttaaaacagaaaggataggtactcaatacagaatggttaatatgatggctctgtccctcccccaccccagcctgccttcaaaatgtgctgcctgcagagaatccaggcatatcccactgcctcgggggtttttgtattttttacaaaaagttataattaaatatacagtaaatcttcttaaacaaaagaaagaaagaaaagaaatggtgaatcatttgatttgactgtatgcaggattcataagcaagtggcggaaaatatgtaagtaggaccagatggtggaggatctggggagtttgagccctcccaygtatgtaaaatggagtcactgaaagatatgtctcaagatcccagtttctgtgaagtgtaagatggtgtagttttaaatatatgcccacaaattctttgacatgtattttgcatgtgggaggaagacaaataatttgtggccagaaaacagattttggtggttttgaagatacattcacaaattcttccatactcctctcctcaagagatggaac

SEQ ID NO: 419761 - DNA, 562 bp, Homo sapiens
cctcaccaaacaaactaaataaggcaccagggaccaatcccagagagacagagatatgtgacctttcagtcagagaattcaaagtagctgttttgaggaagctcaatgaaatccaagataaaacagagaggaaactcagaatcctatgagataaatgtaacaaagagattgaaataatttaaaaagaatgaggcagaaattctggagctgaaaaattcaattgatataatgaagaatgaattagagtctctctcttttttttttttttttttttttttttgagaaagagtatcactctgtcgcccaggctggagtgcaatggcgcaatctcagctcactgcaagctccgcctcccgggttcacaccattctcctgcctcagcctcccgagtagctgggaccacaggtgcccaccaccatgcccagctaatttttgttttgtatttttggtagagatggggtttcatcatgttagccaggatggtctcgatctcctgacctcgtgatccgcccrccttggcctcccaaagtgctgggattacaggcgtaagcgactgtgcctg

SEQ ID NO: 419762 - DNA, 522 bp, Homo sapiens
  misc_feature (1)...(522): n = A,T,C or G
nnnnnnnnnnnnntaaagaggccattgcatgtgattggactgacctcttcctgtggtgactagaaagtgctaaaagaatattctttagtattttctctcatactaaggggttaatatggaatgtgtttgaaattgcaaattgaataattgtccaggttttttttttataccttgctaaattagttcctcttttaatctagtgatagatacagtgatgccagtgatgacagcttttcagagccaaggatagctgagttggaaataagctgaaatgaatacatgactgggaataatggggactgcctgtgagggtaagatggaatcttcgaggattgttcatttctctcatggacaagctgtcatcttggtatagaggcgggtattataggactygcctcacaggatcttgcccctttgagatactcccatttgactggcacagttagcaggacacgcatgacagcccatgacagagttagtgtttggggaaaatggaatgcaccttgggccaggaaaaaaaaa

SEQ ID NO: 419763 - DNA, 491 bp, Homo sapiens
cccactggcctctaccttgcttcaggccctaatcctttcttgtcatagctattatcatgacctcctaattggtctcttagcctctagtcttgttttcccttatccacctcctatgtggccaccagatttgtaaaacataaacaaacataaacccggccataaacactctttaaagccctgaaatggctccctgtcatctccagaataaaaacccagctctttatttgaacttataagttcctttttaacctagttcctgtatacttttccaaactattgcctattcatcctgagctattcatatttcygaaaacaagctaagccctttatcccatccttataatttcgaatgttattcccgctgcctggaatattctttctctccataggtgggttagctaactcttttacttaacagctttactgaaatatagtttacataccagcacatttattaggcttaactaactgctaacctttgagactccatt

SEQ ID NO: 419764 - DNA, 469 bp, Homo sapiens
gtggacttggttatcttgcaggagattaatggacttagagtctggtccaagcctatgagggtttctcgtaatggtttgcttccagcctttctgccctgactggatgtgatgagcattcacacagtgtcagccaatgtaatatttatttgcctcctccctgaatsttctaaatgaaaagccaacatcaaatgcaaaggaaaaggcgcaagaaaaggatttggctctgggttctccctctttctggatatggcactgggagtctaattactaacccacatcgagccctcggtcagaaggtcgcctcaagactcatgttaatcattattctcattttgcgaacagaaaagagaactagccatgggttcaaggctgaagagcatgtcagggtgtgatgaatagaatttccaactaaagaatcacaatccttctggccatggatgcagttagttacacttttgaaaaagcatgc

SEQ ID NO: 419765 - DNA, 569 bp, Homo sapiens
cagtgcatgatgagaaaaagtagggagtgggaaaaagaggaaaatgagaacaaacgtgttcatgaccctttccctacctctttgcctccctatttattatcagtctggtaggcatactgtttagtttgcctcatctggagagataacactttcgtctctataaagcagttagtatcacctaagccacggaaatgaacttccctatggaacaataaagatgaaataaggtagtgacaaaatcccacaggaaggactattaactaatattattaagtgatacttcctaagtgaaacatcccctccactgtaatatttcattattaatagtccttgggagtttcaagwaaagaaaaacctttttatttctctggcttggtctcctggtattcataatggaatctaggctatgctttatgatgccaaaaaccactggtcaatccagtcagtcttttaatagaacaacaatcagccacattatttagtgttacgtagacaaacagctatttgaatggaatattcacatgcaaatcagttattttgacatcatatgggcacagtccaagtaaata

SEQ ID NO: 419766 - DNA, 569 bp, Homo sapiens
cagtgcatgatgagaaaaagtagggagtgggaaaaagaggaaaatgagaacaaacgtgttcatgaccctttccctacctctttgcctccctatttattatcagtctggtaggcatactgtttagtttgcctcatctggagagataacactttcgtctctataaagcagttagtatcacctaagccacggaaatgaacttccctatggaacaataaagatgaaataaggtagtgacaaaatcccacaggaaggactattaactaatattattaagtgatacttcctaagtgaaacatcccctccactgtaatatttcattattaatagtccttgggagtttcaagaaaagaaaaacctttttatttctctggcttggtctcctggtattcataatggaatctaggctatgctttatgatgccaaaaaccactggtcaatccagtcagtcttttaatagaacaacaatcagccacattatttagtgttaygtagacaaacagctatttgaatggaatattcacatgcaaatcagttattttgacatcatatgggcacagtccaagtaaata

SEQ ID NO: 419767 - DNA, 464 bp, Homo sapiens
ttttgagtttggctatgtgacttgctttggccaatggaatgttagcaggccagaggcttaaaaggcagaacmaaagtttagaaagcacctgaaaatgacgctttccttcttgtgcctctgctgttgccatgagaggtgcaggactgggctcaccttctagtcccaggaggaggatgacagacatgtggaacggagctgaaccaccacggccaagccaggccagatcagctcactcccagctgagatcagcagagttactcagctgagtccatcctaaattagttaactttcatcaaacacacaaatctgtgacagtataatgacttgtttaaagctacgtcgtttgggggtgtcttttttggcagggtggtatttttgtggcaatagctaactgattcagatgcttaatgcatacttgttgaatgaatgaatgcacacatagtattgcatagccagctgtcctc

SEQ ID NO: 419768 - DNA, 464 bp, Homo sapiens
ttttgagtttggctatgtgacttgctttggccaatggaatgttagcaggccagaggcttaaaaggcagaaccaaagtttagaaagcacctgaaaatgacgctttccttcttgtgcctctgctgttgccatgagaggtgcaggactgggctcaccttctagtcccaggaggaggatgacagacatgtggaacggagctgaaccaccacggccaagccaggccagatcagctcactcccagctgagatcagcagagttactcagctgagtccatcctaaattagttaactttcatcaaacacacaaatctgtgacagtataatgacttgtttaaagctacgtcgtttgggrgtgtcttttttggcagggtggtatttttgtggcaatagctaactgattcagatgcttaatgcatacttgttgaatgaatgaatgcacacatagtattgcatagccagctgtcctc

SEQ ID NO: 419769 - DNA, 560 bp, Homo sapiens
aataataaatagtttcacctttagaagtctgaaacatactatttcaaastccactgttttggttatctattgctgcataagaaattaccactaaaattcattagcttaaaacagtaccctttaaaaaaatacatctcaaaattttgagggtcacaaattcaagcaggactcagctaggtgattcttctactccatgtggtgtcaactgaagtcatctggtgggattcagttggcaaataggctggtctggagggtctaagaagacttcactcacatatctgtcaccttggcagggatgctttaaagtctgtgttcagctagaactgtcaatcagggtgcctacatgcagtccttctagcatggtggtctcagggtagttggatttcatatgtcttcagtctttttatggacttcatacatattcaatctttataaaaagatttataggtctgttaagattttctatttcttcttaaggaagttgaggtcgtttttgaatttctgggaatttgtccattttatctaactaatttcattcatttgcatatgaatgttcatag

SEQ ID NO: 419770 - DNA, 585 bp, Homo sapiens
ctttcagagccactgctataaagtatcctagaaattagctaccaggactacttccaaaaatgcagtctctctctgtggaatctggccaataagatacaagcaggatgaaaaagttgtttgctcagcacttaattctgaatgatgctatartagctcttctacaaagggtattaaataaatctgaatatctgaagtttgcactgtaaggcaagcatgttgaacagagggccgtactctactgcctgtctcctggtgttggaattcaggagaaaaagggctgagtagaagaaaggacaccctgagatggaggaagagagatacacctcccccacaatacacacacaccatggatgtcgttgctaccatcacatatgggattgccaaagctttcgttcttccaaagccttcccatacagggtcatctgccatttgccttttccagaacttcctttaaagcaaatcagatggtacagcaggcacaaataggagctacatgctgcatttctgagacagggtcccagtactgtggttctgttaaagaacaagttactcaaaacccttgttaaagaatggtaaggcagagtt

SEQ ID NO: 419771 - DNA, 573 bp, Homo sapiens
gctgaattgtttactttaaaatggttaattttatgtgatgtgaactttacctccataaaaacatatgaaaagaccgtagaaagtgcctgtgaattgggccccactgacccagtctgccccttcctgactccatctgtgtggcctggagcaggtcagtcttttcccacatctstaaaacgatcgtgtctgcttatcacataatgtctacttcacggggctcttctaggggacaaatgaaatatttgacagaaggaaataaagctattcccccttatatggattcaatcttttaaaaggtcattcagtggcatgaaaatgactctccacctttgttttctcagcagagaggaaattaattgttaaggaatgccatggaacatttaggccaaaaagccaaggttcgaaaacaaataagctgcaaaaaatgtttccattcaaagatgctgggttctccccatacagggccattgctgtctgcaccagccccactgagtctctgtcatggctgcactgtcgtctgcagtatcccatgtgtgtggggctgcatgtcatgggtctcggcgtgaggagccc

SEQ ID NO: 419772 - DNA, 558 bp, Homo sapiens
gtttttaaatcaatgactatgcatttcrtttcaataatactaattggttcttttttaaattcccacctgcttttatttcatctttgcatgaatttttaaaaacaatttctgttttattttgggggcatcatttcttcatttatctttgaaataccctaaacatattcagtttaaagtttgtggagttttgttgttgttgttgttgttgtttgtttgtttttttgcagactatttaatcatttccatattggagtgagttgatcacctaattgtcatttttcaatttttttatgttgttattttttctgaatgagttttggaatttgggctttaagtttcttcttcaacggaaacatcccttgaaccctacaacattcatccctctaacaggtctcttgagctccctggtccaaaaccaagtccttacagtcttatagccatagcttgggattcctattgctgtgatgttcacatctatgtagtcatgaaaccagtgggcagcccagcacagacttggcttggggactgtgactgttcttgccttttaaatttcacttt

SEQ ID NO: 419773 - DNA, 558 bp, Homo sapiens
gtttttaaatcaatgactatgcatttcatttcaataatactaattggttcttttttaaattcccacctgcttttatttcatctttgcatgaatttttaaaaacaatttctgttttattttgggggcatcatttcttcatttatctttgaaataccctaaacatattcagtttaaagtttgtggagttttgttgttgttgttgttgttgtttgtttgtttktttgcagactatttaatcatttccatattggagtgagttgatcacctaattgtcatttttcaatttttttatgttgttattttttctgaatgagttttggaatttgggctttaagtttcttcttcaacggaaacatcccttgaaccctacaacattcatccctctaacaggtctcttgagctccctggtccaaaaccaagtccttacagtcttatagccatagcttgggattcctattgctgtgatgttcacatctatgtagtcatgaaaccagtgggcagcccagcacagacttggcttggggactgtgactgttcttgccttttaaatttcacttt

SEQ ID NO: 419774 - DNA, 558 bp, Homo sapiens
gtttttaaatcaatgactatgcatttcatttcaataatactaattggttcttttttaaattcccacctgcttttatttcatctttgcatgaatttttaaaaacaatttctgttttattttgggggcatcatttcttcatttatctttgaaataccctaaacatattcagtttaaagtttgtggagttttgttgttgttgttgttgttgtttgtttgtttttttgcagactatttaatcatttccatattggagtgagttgatcacctaattgtcatttttcaatttttttatgttgttattttttctgaatgagttttggaatttgggctttaagtttcttcttcaayggaaacatcccttgaaccctacaacattcatccctctaacaggtctcttgagctccctggtccaaaaccaagtccttacagtcttatagccatagcttgggattcctattgctgtgatgttcacatctatgtagtcatgaaaccagtgggcagcccagcacagacttggcttggggactgtgactgttcttgccttttaaatttcacttt

SEQ ID NO: 419775 - DNA, 572 bp, Homo sapiens
ctcgacaaataaaaacgacagcatactatgtacaggaagcattgttaaaacccaagaggataaaaatgctgatcttaaggggttagaataatgtgtactagtctscttcattcatagaacaaatatttattgaatgcctagtatatgacagacatttgttagatgctgggaatacagtggggacagaagagacaaggtccctgagtcggacaacagttggagaagatagacttgtaggaggccctagaggtgagcaagagtatggcactttggaggtatgaaaccaactcaacacagccagtgcagaaatagcaaagctcacgtcatccagccacactgctgtgtgcaattccctccacaaagagatccagcaatggaggatgcattagctccttagacaatgcaagtccgcctttggccattaaagtgttccctagacactctcaatgatttctaggtacctcccatttttcattccccttcagatcgttaggcattacacagctaaaaaggaatttttaagagctgataaaattttccttccaaagatctcatgtcaagcatctctaaat

SEQ ID NO: 419776 - DNA, 572 bp, Homo sapiens
ctcgacaaataaaaacgacagcatactatgtacaggaagcattgttaaaacccaagaggataaaaatgctgatcttaaggggttagaataatgtgtactagtctccttcattcatagaacaaatatttattgaatgcctagtatatgacagacatttgttagatgctgggaatacagtggggacagaagagacaaggtccctgagtcggacaacagttggagaagatagacttgtaggaggccctagaggtgagcaagagtatggcactttggaggtatgaaaccaactcaacayagccagtgcagaaatagcaaagctcacgtcatccagccacactgctgtgtgcaattccctccacaaagagatccagcaatggaggatgcattagctccttagacaatgcaagtccgcctttggccattaaagtgttccctagacactctcaatgatttctaggtacctcccatttttcattccccttcagatcgttaggcattacacagctaaaaaggaatttttaagagctgataaaattttccttccaaagatctcatgtcaagcatctctaaat

SEQ ID NO: 419777 - DNA, 572 bp, Homo sapiens
ctcgacaaataaaaacgacagcatactatgtacaggaagcattgttaaaacccaagaggataaaaatgctgatcttaaggggttagaataatgtgtactagtctccttcattcatagaacaaatatttattgaatgcctagtatatgacagacatttgttagatgctgggaatacagtggggacagaagagacaaggtccctgagtcggacaacagttggagaagatagacttgtaggaggccctagaggtgagcaagagtatggcactttggaggtatgaaaccaactcaacacagccagtgcagaaatagcaaagctcacgtcatccagccayactgctgtgtgcaattccctccacaaagagatccagcaatggaggatgcattagctccttagacaatgcaagtccgcctttggccattaaagtgttccctagacactctcaatgatttctaggtacctcccatttttcattccccttcagatcgttaggcattacacagctaaaaaggaatttttaagagctgataaaattttccttccaaagatctcatgtcaagcatctctaaat

SEQ ID NO: 419778 - DNA, 565 bp, Homo sapiens
ccacactgctgtgtgcaattccctccacaaagagatccagcaatggaggatgcattagctccttagacaatgcaagtccgcctttggccattaaagtgttccctagacactctcaatgatttctaggtacctcccatttttcattccccttcagatcgttaggcattacacagctaaaaaggaatttttaagagctgataaaattttccttccaaagatctcatgtcaagcatctctaaattgtttggaatccagytgaataaattatagtatacatgacgatctttttcctcccaccctctcatgaactctgaaaaaatatgtcttactcctaaactacttagcacttttgaaatgccaactaattcttcctggttgtccaaaatgagtacagaatggcaattcccctaggaaattttctcctctgggagatgaagctattagcaaagcaagtcaaggtcctgttagacattctgctgttatccaaatgagacttccggcagatgtctggagagttgaaatccccatcactactctgtcttttctctgcactgatttcacaatc

SEQ ID NO: 419779 - DNA, 563 bp, Homo sapiens
atcccagacctattgaatcaaaatctccttaataacaagatctcctaggagattcatatgcacatcaaattcacagagtgctactctkgagtgcctgatctctccagttgatctaaaccttcttctcacctctagatgccatacaatctttggatgggcttcagctgacctctgcaaactcacctaaggtaatcaatctgtgtccaaatttaacattacaatgtaaggagacaatcgactcatctggcctgtaaatgcttgactctgtgtgcactatgtcctctctaaatggcaggcatgaatgtaccactttcttaactttgagcatatttgggctccagtatgtaaaactccaggaggaggtatatcacatgcattactacctgtttttaaatggttaagtggtatttttcaattgtctcattgttttttaatatttattataaaattaaactttattctaagttatatcagttgatgtgaatatcaattgatgaatatgtctgcagtcagaaaaacaaagcaaaacaaaacaattttgttaaattctgattagatactgt

SEQ ID NO: 419780 - DNA, 633 bp, Homo sapiens
cacattcattttcacatatatttatataaatcttagaagaaagacaagcaacagtctgcattaaataacttgcttgaggcttcatgttctcccttcagaggagaaggaccaaacttgaagttattcagaaggaatctcaggttgaaataaagaatgaatttctaagaattagaaaatgtacagcaatgaagtttatcatattcttctccattatactattggaatatattatgatgaccttcaacaattacacccaactaaatctgagatcatagagcaattcaccttctgagagtcaaagttatgctttccaaagttctgaagcaacaagcccagaagagaattgcaagcccaattccagtcaagcttaggagtcaagttcyctctcatcaagatggcagactctcagtctcccactggcatgactgtaagataaccccagaaagccaatctacggattctgagagatggtatccctgccatgttatgttattattaaaataaggcaaaatcaggacagtaggaaataggtcatttcctgccatagatgaatggaaaatagatccatatagaagaaagtttggttgatatttgcaatgaaggcattttgaagggtggaaaacgggaaattat

SEQ ID NO: 419781 - DNA, 583 bp, Homo sapiens
cactaactgggtattctataattccattcagttctgaggctacctacctgggaatggtgtcagatctcacaggttgggggcctagtcccacaagattgccctcacttcaggggctaatctcaagttgtaggttgtcagctatacttctgactgaccagctgcaaactggggttcccctgactccctctttaggtctgattattttgctagagtggctgtaattgtctgaagggttcgtcttgcctgctgcacagataaaaccaattcactgagacagcattattgcagtaaagaaagagtttaattactgcaaggmcagccaagtggaaggataggagtttactattactcaaatcagcctccctgctaagtcaggctagggtttttatggataatttggtgggcaggagattaaggaatgggtgttgctgactggttggagatgaaatcattggagtgtggaaaacggtcttcatgtactgagtctgccataggatgggagccacagaacccgttgcattatgagtcatgagtctgaatggggtcagtggattaccagaatgcacaagtctaaaaaacatct

SEQ ID NO: 419782 - DNA, 570 bp, Homo sapiens
gtcctgaacacattgatgattttaaagcartgagactagatgagagtgtagacagagaaaagatggcaacacaggacagagcttcaggggactcacagaggacccgtcgaggagggcccaggaggcggagtaagagctgcagggcaggtagaaggaaagcagtgcatccatagctgtgacagagaaagggacaagattgtggctcatgatttcagtgtgattaccttcagtggaacaatgaagaaaatatttttgattttctaagatattattgttctttgatttcatggttaaaatgtagagctaacatactctatcttggccatgctttaaggtctgtcttcttgatatgtagtttttatcatatctaattcaaagacctattacttcttaggtcttattgtgtaaagtccagacatcttagtctttaaggctggccatcaaaaaatccaaaccatcttccagtctcatcctgtattagctctctctagatggcccaccacttgcaacattagcctttactgcttctcagttctctgtatattctttatgctctgctactcatggacc

SEQ ID NO: 419783 - DNA, 570 bp, Homo sapiens
gtcctgaacacattgatgattttaaagcagtgagactagatgagagtgtagacagagaaaagatggcaacacaggacagagcttcaggggactcacagaggacccgtcgaggagggcccaggaggcggagtaagagctgcagggcaggtagaaggaaagcagtgcatccatagctgtgacagagaaagggacaagattgtggctcatgatttcagtgtgattaccttcagtggaacaatgaagaaaatatttttgattttctaagatattaytgttctttgatttcatggttaaaatgtagagctaacatactctatcttggccatgctttaaggtctgtcttcttgatatgtagtttttatcatatctaattcaaagacctattacttcttaggtcttattgtgtaaagtccagacatcttagtctttaaggctggccatcaaaaaatccaaaccatcttccagtctcatcctgtattagctctctctagatggcccaccacttgcaacattagcctttactgcttctcagttctctgtatattctttatgctctgctactcatggacc

SEQ ID NO: 419784 - DNA, 570 bp, Homo sapiens
gtcctgaacacattgatgattttaaagcagtgagactagatgagagtgtagacagagaaaagatggcaacacaggacagagcttcaggggactcacagaggacccgtcgaggagggcccaggaggcggagtaagagctgcagggcaggtagaaggaaagcagtgcatccatagctgtgacagagaaagggacaagattgtggctcatgatttcagtgtgattaccttcagtggaacaatgaagaaaatatttttgattttctaagatattattgttctttgatttcatggttaaaatgtagagctaacatactctatcttggccatgctttaaggtctgtcttcttgatatgtagtttttatcatatctaattcaaagacctattacttcttaggtcttaytgtgtaaagtccagacatcttagtctttaaggctggccatcaaaaaatccaaaccatcttccagtctcatcctgtattagctctctctagatggcccaccacttgcaacattagcctttactgcttctcagttctctgtatattctttatgctctgctactcatggacc

SEQ ID NO: 419785 - DNA, 558 bp, Homo sapiens
ggagggttatttgacaataaacagcaaaatgcaattttgcaaggtccttgatctaacagttccacttttaagaatttatcagaagacaaatgttgacaagaacaaaactttagctgtagtatcgtttgtttccacattatttagaacactgggaatttataatattttacatgctaaaaatagtacagtagttaaataatttttgtccattaaaaaacagaatagaataccattattgaaactgatgtgctgagaaacataaatatgacrgacttaataaaagaagaatggaaaaatattgatattgttaaacttggtcattggatacagttgggttcattatatcgttttctctaatttttgaatgctcaaagtttttcatagcaaaagtgtgttttgttaaccaatgaggtaagataatatgcactgacatagaaaaagtttctcaatatagttagtgtaaaaagcaggctaatgaaacttaaatgtgatataatgtgagattttggagtgaaaaagcagtatatgtctttgtgtcctacacaaagggaaaaaaaa

SEQ ID NO: 419786 - DNA, 499 bp, Homo sapiens
tgtgtcaacttaactattacgctcaaaatgccactggttagctgtcatatgatcagcaaatatttagtctataaggtgggtaaggtatttcactttatgctgattgacatataaaagggtgggactcaaaagacgaattctccatgccaagtggtccctggtgaaagtgggactggcgggttcccttgaccccttcacaagacttgtgacagaggtgtgactcacttagttggccgctaccaygctcaaaccacttgcaggatgggacgcacacaggcgagtgggtgccagggccagggtaagtgcttttgggttccagagccatggcagcatctaggggtgtgctacaattaatgctcttttagcagttgccgtccatggatgactatgtgttatctagctcagtagagagtcagggtgacagccttttacactctgccctcttggtacctgggttcttgtccagcatccaggaagaatcaggtcacagggacttgaa

SEQ ID NO: 419787 - DNA, 534 bp, Homo sapiens
tatctgtcaaattaatgagcctactattttattaactttgtgttgggccaaaacaagcttttgaacattatcaaattgtacactttttcacataatgaccaatttttagaaaattctgccatatgttttttttatgctcagtcatatctgatttgccatatatggtggctgagtttcatttctccacttactggacccaccctttgagttccttatagttacttaatatttattgagtgtttggtatccagtggctttgcgcactagtccttctgtttaaaatattacccctgcaatgtaagagtctatcattcacattaaatgcaatcctccatcagatacataaaagtttgaaaatctggattgccaggtgctgaattaatgataccctgtactggtacttgttggtttgggataggcaccctctcagccctgaacaaaasgccccgtgagtagcactgactgcaaaatattctgactcgaacttaggccgcctaatagccatcatgagaaatttacatgatcctatagcac

SEQ ID NO: 419788 - DNA, 563 bp, Homo sapiens
tctatttttagtagagatagggtttcaccatgttggccagtctggtctcgaactcctgacctcaggtgatctacccaccttggcctcctaaagtgctgggatcacaggcatgagccaccgcgcccggcctgaagcacttttaagagtgcttactcaggactcagatggcaggtttttacaactttacgaatccatttccttcatctttcattctgacacattgatgtagatgtagatccaatggctgaagctacagtagccatattatgactgtaaagcaaatttaaggaaaaaggccatattccaaaaagaaaccaaagagttagaaggatcaaggagctaccatatgtctatgaagtgcctgtatttgatttgattgattgattkattttgctgtaagacaagccagtgtaatttcagaacttttagtagcatacacacacaatttcttaactaacacacaaaatttctaagctaagcattgctcatatttccagtaggagaatacactgctatacagctttgaaggtaagtcaacatgaaatggcaaaagtctaaaaatg

SEQ ID NO: 419789 - DNA, 563 bp, Homo sapiens
tctatttttagtagagatagggtttcaccatgttggccagtctggtctcgaactcctgacctcaggtgatctacccaccttggcctcctaaagtgctgggatcacaggcatgagccaccgcgcccggcctgaagcacttttaagagtgcttactcaggactcagatggcaggtttttacaactttacgaatccatttccttcatctttcattctgacacattgatgtagatgtagatccaatggctgaagctacagtagccatattatgactgtaaagcaaatttaaggaaaaaggccatattccaaaaagaaaccaaagagttagaaggatcaaggagctaccatatgtctatgaagtgcctgtatttgatttgattgattgattgattttgctgtaagacaagccagtgtaatttcagaacttttagtagcatacayacacaatttcttaactaacacacaaaatttctaagctaagcattgctcatatttccagtaggagaatacactgctatacagctttgaaggtaagtcaacatgaaatggcaaaagtctaaaaatg

SEQ ID NO: 419790 - DNA, 616 bp, Homo sapiens
aaataacctacaatagggtcttatgccaaattaggcagcactttagagaagcagggaataaaggctcaaagtgagagggagctgggaagggagcattctcctccttgtcagaataattggttcattaaatggaaggaaagaaggggaagagataaaatgggaggagagttcccactattaaatatgtattgcacaaggtctctctcaacttgctttgcagcatcacagctaatgtacacagaccctaataagcaacaaagtgaatagggagctggactcccaattgttcagttctgttttttccartgataaagaggagggtgcactggtttccctaatcccagggatcaggtcccgaagctaagcaaaaggaagaaaggactgattaaagccacagcagtcaagacctttgtgcagttgtgatatgtgggtgtatacagacacatgcccaaataaagagcatgcatgtggtcagtggagtgctgcgagaaagcctctgggttgaatagtgccattataaacataagtcattattagtaaccagcataaataggttggcctgtcatggggttaagatctgtgatctgctgggacttgctactcttcagagcaaggg

SEQ ID NO: 419791 - DNA, 583 bp, Homo sapiens
tagccactttcttggtccccccakttcagaaggcagtagctatctcctgccattactatctttgggttgcctcagtggcccttttgtgatgatttggttaacacctgcacagtcaattcttcatacttaatttcttctgtagaaatacacacctagggtagtttctgcttgcttcactggagctggattaacacagggctagagtgtgctgatagtataaatcccatgactatgacccattaaagattcatactatatatatactgtatatgctgatttggaaattcaaggcagaatctgggaaattactgaggagaagggtcacacaaccctgagttcagatgaaggtagtttttattattaagatttactatatatttctcaatatatgtttgattatatatttgatatatatctcaatttactgtatatttatatatcttaagggtgttcctaaaagataatattgtactataatttagtaaataatacttacatattcttgaaatacatcaagttttatgcaaaaacatgtaatgtgtctataggtctctgtaattgagttttaaagagagggtaaaaa

SEQ ID NO: 419792 - DNA, 538 bp, Homo sapiens
  misc_feature (1)...(538): n = A,T,C or G
aagaaaactcctattgggaggccgaggcaggcggatcacaaggtcaggagatcgagaccatcctggctaacacagtgaaaccccatgtctagtaaaaatacaaaaaaaaaaaaaattagccggkcgtggtggtgagtgcctgtagtcccagctactcaggaggctgaggcaggagaatggtgtgaacccgggaggcagagcttgcagtgagctgagattgtgccactgcactccagcctgggcaacagagtgagactccatctcaaaaaaaaaaaaaaaaaatttcctagctgatcttttcaaaggagttgattgttcccaactaataaataattttattctttttgctggtttagctctttctgtatgcagatgtgtattttttttttattttccataagttattggggaacaggtggtggttggttacaagagtaagttctttaatgctgatttgtgagactgtggtggcacctatcacctgagcagtatacactgtacttaacttgcagtcttttatcccnnnnnnnnnnnnnnn

SEQ ID NO: 419793 - DNA, 548 bp, Homo sapiens
tcagtgaaatggcactttctggcagaatcctggctatacattataaatattgtaataataactacttcaaagaattgcagtgaacattaatgtatataaagtttttagtttttagtataaagcctgttgcttagtaagtgctcaataaaaattatctgctcttgtttctgacagaaccctggctccayattctaagtattataataactatttcaaggaattgtagtaagcattaacatatacaaagtgcttagtataaagcctgatacttagtaagtgcttgatattgtttgcctgtgtccccacccaaatctcatcctgaattgtagtttccataatccccatgtgtcatgggaaggacccagtgggaggcaatttaatcatggggacagttacctccatgctgttctcctaatagtgagttctcatgagatcggatggtgttataaggggctttttctcttttgcttggcacttcttcttgctgctgccatgtgaagaaggacatgtttgcttccccttccaccatgattgtgagtttcctgagg

SEQ ID NO: 419794 - DNA, 650 bp, Homo sapiens
aggatttatctaaaaacttcaaagatacattaattactgtttaatttaaaataagttacaacattaacagatttaagtagcaaaatcaatatgttcatctcaatagatgaatgaaaaaacaagataaaattcaataaccatgattaaatctcctgaaaattcaggaatcaaagagaattaatctaaactagataatgattgcctattaaaaccacaaattgttgtcaaaactttagaaacatttctcttaaagaaaaagaagaggcaaagatgcctgctgccactacctctatttgacattacacgtgaggttttagccagaacacataatacagggaagagaattaagacatgtaagtatttggaaatagaaacaaaattatttcttatttccagatgatgatttcctacatagaaaatccaagagaaaattatactacaaagctatagtgaccaaaacagcatgctactggcataaaaatagacacataaaccratagaaaagaatagagaacccagaaacaaatccatacatctatagtgaacacattttgacaaaggcatacactggggaaaggacaatctcttcaataaatgctgctgggaaaactgtatatccatatgtagaagaataaaattagacctttatc

SEQ ID NO: 419795 - DNA, 586 bp, Homo sapiens
taagcatatgaaacaatgcacaatatgactaatgatcagggaaatgcaaatcaaaaccacaatgcgataccaccttactcctgcaagaatggccataatcaaaaaaatcaaaaaacagtagatgttggcatggatgtagtgatcagggaatacttctgcactgctggtgggactagtacagccactatgggaaacagtgtggagattccttaaagaactagaagtagtactagcatttcattcagcaattgcactrctgggtatctacccagaggaaaagaagtcattatacaaaaaagatatttgcaaacgcatgttcataacaacaaaattcacagttgcaaaatcatggaaccaacccaaatgcccaccaatcgacaattgaataaagacactgtggtatatatgtatatatataatgatggaatatatatatacatatatacatatgtaaatatatatgatggaatatacatatataaatacatatacatatatatgatggaatatatatacacatatatatacacacacatatatatgatggaatactactcagccataaaaaagggatgaattaacagca

SEQ ID NO: 419796 - DNA, 539 bp, Homo sapiens
ttaacaagcaatgattcaataaagaaattaaaagagacattaaactatatcttgagacaaataaaaatgaaaactcaacatatcaaaatttatgggaatgtagcaaaagcagttctgagagaagtttatagtaataaaattctacattaaaaaataagaaaaatctcaaataaacacttaatattacacctcaaggaactagaaaaggaaggaaatrataaagataaaaatataaataagtgaaacacagactagaaaaaataataaatcaatgaaactgagttggttttttgaaaagataaataaaaatggacaaatcttcaggtagactaagaaaaaaagggagaagactcaaataaaattataaatgaaagaaaagacattaccactgataccacagaaatgcagaggatcacaaaagactgttattggcaggaggaagatggcagataggagacaggactaacgtgtagctccaacttggatggacagaacagcgtgtggagactcaccttgtgagccttcactccaataaccac

SEQ ID NO: 419797 - DNA, 573 bp, Homo sapiens
agagggacagagacagtccttgggctagcgaagaagtaggaaagagtacagaattgggaattaagagacctggatgctgtttccagatctgctattaactttctacatgacctcagataaatcatttctcctctctatgcctcaggttcctcatctaaaaaatgatggggttggattagcatttgatgatgcctcagactcaagtaaatattattgtcatccttatagctaacactgcatactgtcccaaaataaaaatarcaactatcattagctgagggcttgctatgtcccaggaactgttttaaatactttacatacatctaatcctcacaataagcctatgaagagtgtattgttattattgtcctcactatgcagattaggagtcagagctagaaagaggttaagtaagtgatagatctgtgatttgaacctcgcctttgtgtatccagaactagttctttccccctacattcttcatggcttcttaaagatgagcaccactcttatagcaatggtgcttaagcctgtagctccatggagactagagcattaacctcgctttgccat

SEQ ID NO: 419798 - DNA, 539 bp, Homo sapiens
gcactcctctccctttctgccaattcctattgaaaatagagtgccacctcttagctttcaatgtagaagtttatcactcaccaaagatcactcacttttttttttttttttttggagacggagtcttgctctgttgcccaggctggagtgcagtggcatgatctcagctcactgcaaccttgtctcctgagytcaagcaattctcctgcctcagcctcccgagtagctgggactacaggcatttgccatcacacccaactaatttttgtatttttagtagacacggggtttcaccatgttggccaggctggtcttgtactcccgacttcatatgatccacccaccttggcccctcaaagtgctgggattacaggcatgagccactacgcctcacccattcactttatgtagtacatttataacgtacatttatacagtacatttacaattgccatcaagaaaaattttgctgcccaaagcaacctacagattcaacactattcctatgaaacaaccaatgttatttttcacagaattaa

SEQ ID NO: 419799 - DNA, 562 bp, Homo sapiens
attactagctgtgagagttattaaattcatacctaataataagacactccttttaagaaataaaatatttaatgcaagaacttaaaaacatttatcaataattattttttcctccaagaagcacccaagttctcaattgaataacctgcagcttccaactctaggtttaggaaaaattttatttgagtcttgatgactggggaaggagtaattgaaaagtgttcaacttcacacattcascagaataaaaaaaaaattaaaaactgaaaatactgttagcaaggatgcaaaactatagaactatcacagatttctaacaggagtgtaagttggtaaatatattagcttttactgtctctcatgagtctgttcatgagattgactaggttcagctggaccgttcttttggtcccaatttggctctctcttgtggctgtggtagtgtctcagatatagccaggactggaatatcaatatggttcacccatatggctggtaattggtcctagctaatggttgagaaataggctcagctgggatgctggtatggctaagattcatt

SEQ ID NO: 419800 - DNA, 509 bp, Homo sapiens
tcaggagttttggcttctgtagtacccattcttgcatctttgaggcaaaaagaaaacccatggaactgaccaccatgtcattctctgggtcccaaggtccctagttagtctgctgcttccctccacctttaggagtcttattatgttcrttgttgtgtataaagtccaagagttttagttttaccctgcaagagaattagggaaacatacatgtgctccatcttcctagaagcaggctcctgaatatttgagaagttaagactgaaaacaaaaacaaaaacaaatttttggaagattctgaatgcagtgtaaatgagattgtgaaggtactcatggggacaaaaatctagtgtttaaataaaacactagatatacctttaagcttccttgataccaaagcaaaaataacataatgacttatattattgcttttgtttcataaaaggaagcaaatctgttgactagaaagtttttcctggatctacattttaggagagattgttatgtgt

SEQ ID NO: 419801 - DNA, 622 bp, Homo sapiens
ttttaggtcttaatatttaacttaaccactcagtcagtactgaaacagttgttatggaggcctgtattagtgagacctggcctgccacagtattaccagtgatttttatcttattctttatcctacatattttctcttttttcaagcattttttctgtactattataagtttaatagcagatgtaaagtttaaaataattaatgcaaagaagtgaatcatttctccacggaatgtttatgttgaaataaattctaggaattagtgggtcatattttttwaaaaaaatacatgattacagcaaaatgtacaatggagatgtacaaaatgctggatttgctggtgtccttctcaatcacttgataaaccgggacattgttaaagaaagtcttgactggataccaaacatatatgacctaatatgcttttaaaaaaacaggacaccagcgtttgtctttccactgacacatttgaagacatgtctaaacttaattttgattagagaaaagagtgtgacacatctagattataaatacagttcccagtagatatttgatttcatctaatcaaagatgttatttttaattgctgtggaacaagatgatcttctgcaaatgaggcatt

SEQ ID NO: 419802 - DNA, 598 bp, Homo sapiens
gtaaatacaaatatccaggtgataggaaatgatcttatagtggccaactgagagcaaattgctaaggccatggatgaggaataatgcaactgcttcctgcttaaagtgaaccagattggctctgcctcagtctctttggatgcacaaaatggcctagtccaacgaatggggcacygtaggttttgcttattctggggaaactcaaaatacttttactactgacctgatggtagagtgttgccctaaacagaataatatttttgcatcttaataatctgaatctgcatcttagaattgagaaggatctggatggaagattcagaaacctccttgccaagtaaactccaggcaggagagtcactgagccacttcagttctagtcagctggctagacctctgctgctattattcacaaccaatccaaaacatcaggtcagtattttctgtgaatctctggtcactttctcctcttccttcacgtccctgtggcattctcagttttattagaaatgctacaatggaacccaagcttagccatctggaatctttttggaatatctagttttgtagtcacatgactagtgtgaaattcaatatt

SEQ ID NO: 419803 - DNA, 453 bp, Homo sapiens
ctaaaggtttgtaaactcaccagtcagcactctgtaaaaatgcaccaatcagcactgtgtctagctaaaggtttgtaaatgcaccaatcagcactctgtaaaaayggaccaatcagcactctgtaaaatggaccaattagcaggatgtgggcggggccaaataagggaataaaagctggccacccagccagcagcagcaacctgctcaggtcccattctgcgccgtggaaactttcttcttttgttcttcacaataaaccttgctgctcctcactctttgggtcctcaccacctttatgagctgtaacattcactgcgaaggtctgtgacttcactcctgaagtcaactgagaccacgaacccaccggaaggaagaaactccggacacatctgaacatctgaaggaacaaactctggacacaccatctttaagaactgtaacactcactgcaa

SEQ ID NO: 419804 - DNA, 514 bp, Homo sapiens
gactttttaattttttgatagaattcagttcctttattgcaaactgggttgataatatatgtactgatagcctgagaataaacatttgtaatacaactataaatactagcaagtacttaacgtagacaagtggcatctgaaaacatccttctgtctgttcaagctcactgagkcctaaagaagcttttactatcatttctagcttttgaagcttattattattaacaataactttaaaaaacaaaattctgtacgagaataatataatttctagtattttctgcataaatatgctaataattaagacagcctttgtttatgcacagtagatatttgatttagtaacatgttcacattttgctttaggcacaagcctagtagtccattgttcccatggtgttttttgactggtcaagtgcattgcaatagtcaaatcaatttatacatgtaggtgcagtgttgaataatttatattccacaacatcctctctctctttctttcctctctgccacc

SEQ ID NO: 419805 - DNA, 514 bp, Homo sapiens
gactttttaattttttgatagaattcagttcctttattgcaaactgggttgataatatatgtactgatagcctgagaataaacatttgtaatacaactataaatactagcaagtacttaacgtagacaagtggcatctgaaaacatccttctgtctgttcaagctcactgagtcctaaagaagcttttactatcatttctagcttttgaagcttattattattaacaataactttaaaaaacaaaattctgtacgagaataatataatttctagtattttctgcataaatatgctaataattaaracagcctttgtttatgcacagtagatatttgatttagtaacatgttcacattttgctttaggcacaagcctagtagtccattgttcccatggtgttttttgactggtcaagtgcattgcaatagtcaaatcaatttatacatgtaggtgcagtgttgaataatttatattccacaacatcctctctctctttctttcctctctgccacc

SEQ ID NO: 419806 - DNA, 564 bp, Homo sapiens
gtgggtgaaaacttcaatgcagtataatatcaaataacatctttaaacatactgttttagggaaaagaacatatactagatagaaatggcattcttatttatccctgtaggacactaaatatgtagaaatgagtagtatttaacttcaaaaatttgttgttaacataaataagtagakgttgattattttagaaaatcattttgaaggaaaaagatattatgaaatttataaacagaacttaacactttttaaattgagattttatttgatcacattcttggctgtctttgatcatgagcctacattttaattgggaaagcaaagacttgaaaatatattaggagcaaactcttgggatagccttggatttattttatattataacatctaaagcattagctgaaaaagtaaatatgccactagaccttttaacttttatgcaatttaatccgtttatctccaccttgtttctagttctcttggtattcctcctggcaacccatggactagcactatgtttgctgctcaatgaatgtttgcagtgttgtcatgtacacagaaga

SEQ ID NO: 419807 - DNA, 630 bp, Homo sapiens
tttaacttcaaaaatttgttgttaacataaataagtagaggttgattattttagaaaatcattttgaaggaaaaagatattatgaaatttataaacagaacttaacactttttaaattgagattttatttgatcacattcttggctgtctttgatcatgagcctacattttaattgggaaagcaaagacttgaaaatatattaggagcaaactcttgggatagccttggatttattttatattataacatctaaagcattagctgaaaaagtaaatatgccactagaccttttaacttttatgcaatttaatccgtttatctccaccttgtttctagttctcttggtattcctcctggcaacccatggactagcactatgtttgctgctcaatgaatgtttgcagtgttgtcatgtacacagaagacttgatcactctcctttgtgtcttttargactgccctttataaagcctaacctagaacttgtactgttttataagacattattgatttgttcatgttttcttgaggattaggctgtatctaattctctttggaggcatagtggcaagcccaggaagcagcacatatttgttgacaaattaatatttgtgccatgcaacccccgg

SEQ ID NO: 419808 - DNA, 557 bp, Homo sapiens
cctgatttgtctaaaatattaagttacccgaatgatacagccaattagtgggagctatttccagaaagaaacaaaagggtcgcaaattccgttcttctgaatctcttctaattattaacaataaacattagtgcattctattattagtatgaaaataataactaaatgttatttttcyaatatgcattttaattttttgatcttttgaatcttttttggaaactgttaatttgctatgctatattactacacttacactgctccctaaatttaaaaatgtaaaaagaaaataaaaatagctaaaaataatgggtctcatggaaacacataagagtagaatcttttgaaatctttttataaaatgtgagatgcaaaatataaatcttgtttgggcttctttggctatccaaggtcagaagcaatgttggcactcttccaagctgcccacccctagcctttgagccctttgggtatccagtagatcaggacttatgactcctaatgagtaatgcagtggtagtcaagctgttgcagataggatgggaatagcaaaaacc

SEQ ID NO: 419809 - DNA, 557 bp, Homo sapiens
cctgatttgtctaaaatattaagttacccgaatgatacagccaattagtgggagctatttccagaaagaaacaaaagggtcgcaaattccgttcttctgaatctcttctaattattaacaataaacattagtgcattctattattagtatgaaaataataactaaatgttatttttccaatatgcattttaattttttgatcttttgaatcttttttggaaactgttaatttgctatgctatattactacacttacactgctccytaaatttaaaaatgtaaaaagaaaataaaaatagctaaaaataatgggtctcatggaaacacataagagtagaatcttttgaaatctttttataaaatgtgagatgcaaaatataaatcttgtttgggcttctttggctatccaaggtcagaagcaatgttggcactcttccaagctgcccacccctagcctttgagccctttgggtatccagtagatcaggacttatgactcctaatgagtaatgcagtggtagtcaagctgttgcagataggatgggaatagcaaaaacc

SEQ ID NO: 419810 - DNA, 539 bp, Homo sapiens
tacaggcgcccaccaccatgtttggctaatgtttgtattttttgtggagacagagatttgctatgttgctcargctggtcttgaactcctgagctcaagtgacttgctcgcttcagtctcccaaagttctgggattacatgcatgagccacggtgcctggcccctaccattacattcttaataacataataaatatttattagttttatcacaacctgacatttaaataagagccatgaagtcttataatgcatatattgtaccactacagtagcatgctatagagaagatattcaaatatgattctttcttttaaaaattcagttaactgttttgtaggctaggaagactatctttgctaaaattattctattttagcataaaacatgcaacaacttggacagtcaattttaagaaaattatcatggaaaaagtaactacattggagacaaatcttaatatagagcagagaattttaacctttgggagaagttacacctctttgggaagctgaaaaaaaaatatagatctgaagtgca

SEQ ID NO: 419811 - DNA, 346 bp, Homo sapiens
ctgtataaccactgtaactgtttttccctgtggaattggacagatatttgattggattagtttacttttgttgatattatgtgggttcagattgcttctgatcactagaaataatgagcttaagcacacgtctrctttcactgattattaagaatagaagtgaaatctgatcacaaaagaacctaaattttttgccactatatcaaaactgtgtacatgtgtattcgctggagttttaacaaacacttggagaaggtgcctctcaagcacttgaatctgaagagtggattgcaaagttataaataagtgttctatcttaatcacaggaaaaataaagacacattct

SEQ ID NO: 419812 - DNA, 556 bp, Homo sapiens
actcctcctcctgggttcacgacattctcccgcccccgcctcagcctcccgagtagctgggactacaggggaccacaaccacacccrgctaatttttttttgtatttttagtagagacagggtttcaccatgttagctaggatggtctctatctcctgaccttgtgatccacccgccttggcctcccaaagtgctgggattacaggcatgagccaccacgcccagcccggacttatgatatttttgacttgcaataggtttatcaggacataacctaactgtaagttgagaagcttctgtaatggtatttgcctcattgagattattgaggcaattaaaaaaggcagtgcatgaacagggacttgcacatagtagataattaaaaaaatagttattctaaattgctctatcacagtaaatacacatagtgacaatgactttcacaaagactgaaatctataatttatttaatctgacttcccattcaagagaaattcagctgatcaaataggaatgtcaatgaataacagtttgtgtacataatcatgcacaggga

SEQ ID NO: 419813 - DNA, 556 bp, Homo sapiens
actcctcctcctgggttcacgacattctcccgcccccgcctcagcctcccgagtagctgggactacaggggaccacaaccacacccggctaatttttttttgtatttttagtagagacagggtttcaccatgttagctaggatggtctctatctcctgaccttgtgatccacccgccttggcctcccaaagtgctgggattacaggcatgagccaccacgcccagcccggacttatgatatttttgacttgcaataggtttatcaggacataacctaactgtaagytgagaagcttctgtaatggtatttgcctcattgagattattgaggcaattaaaaaaggcagtgcatgaacagggacttgcacatagtagataattaaaaaaatagttattctaaattgctctatcacagtaaatacacatagtgacaatgactttcacaaagactgaaatctataatttatttaatctgacttcccattcaagagaaattcagctgatcaaataggaatgtcaatgaataacagtttgtgtacataatcatgcacaggga

SEQ ID NO: 419814 - DNA, 444 bp, Homo sapiens
tgctgaacagactggaaaatcaacaactctacttgaatctgtaagagagtggggagtgcagggcacatcacctcccccaagactggagagagaggcaaccgcatacagagagtcacagcttactggaggggagaatcatgatcaggaatcrcagcagaaggctgggtccagtggttcacctctaaaattctaaattccttcagaattcctttagaagtttagacgtgaaccactttggaagtcaacttgagctcaggagttcaaggctgcagtgagctatgatcacaacactgcacttcagcctgggtgacagggtgataatttgcctcaaaaaaaaaaaaaaagaggaagaaacaaagaaagaaaagaaaacaagcaaagaaattggtgcaagaaccaatgcagagtaggaaaatatgaagtgtgattgatgaatagaggctt

SEQ ID NO: 419815 - DNA, 603 bp, Homo sapiens
tcagaaaacatctccaagaaaaaaccatgaaacttaaccctacatacccaattttacaccaataattgtcagggggaatgggattactgggtttgtttactaatctggatttacgtgaatcacatgggtactagtggacacaccaatgaagtcatcatctgtatgtcattaggaaggaaagaggaagggaccataatgggacaatctattatgcctgctagaggaaccaaaaagagttttagaaactaagcatatttaattaaaccaatgtagacatggaagaagtcaaaaatgggaaacagcatgaattgtcccttgtacaattttttcaacagtacaatcatatcaggtattaaattatcaagtgagcaatattgtccataatcctcataagtatttattttaatagtatgaaatatgagcatgatagaawagaaaaatatacttgtcacaggagcaaattgtcacaaaagaattttaaattccgcagcaggtttttacatgtgaaatttctttgtatatttgtgtcagaaacatctaattctagaatgagggtaataataaggaattagtactctatttatctacttatccatattactg

SEQ ID NO: 419816 - DNA, 615 bp, Homo sapiens
taataccccacgaacacaagtgatccaaagcaaaaacagacaaatgggatcacatcaagttaaaaaacttctgcactggaaaagaaataaccaacaaagtgaagagamagcccaaagcatgggagaaaatatttgcaaactatccatctgaaaagggattagtaaccagaatacataacaagttcaaacagatatacaggaaaaatctaataatttgatttaaaaatgggcaaaaaatctgaatagacattttgcaaaagaaggcatacaaatgacaaacaggtatacgaaaaagttcccaacatcactcatcatcagagaaatgcaaaccaaaactacaaaaagatatctcaccccagttaaaatggcttttatccaaaagacaggcaacaagcaacaaatgctagagaggatgcagagaaaaggaaccctcatacactgttagtaggaatgtaaattggtagtcactatggagaaaagtttggaagttcctcaaaactaaaaatagagctaccaaaggacctagcaatctcactcctaggtatatacccaaaagaaaggaaatcagcatgtaaaagggatatctgcactcccacatttatcacagcactgttc

SEQ ID NO: 419817 - DNA, 615 bp, Homo sapiens
taataccccacgaacacaagtgatccaaagcaaaaacagacaaatgggatcacatcaagttaaaaaacttctgcactggaaaagaaataaccaacaaagtgaagagacagcccaaagcatgggagaaaatatttgcaaactatccatctgaaaagggattagtarccagaatacataacaagttcaaacagatatacaggaaaaatctaataatttgatttaaaaatgggcaaaaaatctgaatagacattttgcaaaagaaggcatacaaatgacaaacaggtatacgaaaaagttcccaacatcactcatcatcagagaaatgcaaaccaaaactacaaaaagatatctcaccccagttaaaatggcttttatccaaaagacaggcaacaagcaacaaatgctagagaggatgcagagaaaaggaaccctcatacactgttagtaggaatgtaaattggtagtcactatggagaaaagtttggaagttcctcaaaactaaaaatagagctaccaaaggacctagcaatctcactcctaggtatatacccaaaagaaaggaaatcagcatgtaaaagggatatctgcactcccacatttatcacagcactgttc

SEQ ID NO: 419818 - DNA, 539 bp, Homo sapiens
caaaacaattttaattaatgattcaatttcgttttacatgtagaaatttttaggctttctatttcttccttttcttggtttattatgttttaagggatttttctattccatctaaattattccatttctatgcagaaatttggtgcataatatactaaaattttatttttaatatctatcttaagtgatgttagtattcctgatactggtattttgtatcaaattatattaatgtttctattcattactatgtttaaagtactctgttactgtcttaattttgcttattataactttccagttmtaaaatttttatttgattttttaaacagatttcaattttctagtataattcacctctttttcctcttttttgttcatttattaattaaactatgttaaagtctatgtctgataactccaatatctatatcacttgtgggtttatttttattttatttgttttttatcttatttatttatttttttaagtggtattcctggtgtattcattttctaggactactgtaaaaatatac

SEQ ID NO: 419819 - DNA, 539 bp, Homo sapiens
caaaacaattttaattaatgattcaatttcgttttacatgtagaaatttttaggctttctatttcttccttttcttggtttattatgttttaagggatttttctattccatctaaattattccatttctatgcagaaatttggtgcataatatactaaaattttatttttaatatctatcttaagtgatgttagtattcctgatactggtattttgtatcaaattatattaatgtttctattcattactatgtttaaagtactctgttactgtcttaattttgcttattataactttccagttataaaatttttatttgattttttaarcagatttcaattttctagtataattcacctctttttcctcttttttgttcatttattaattaaactatgttaaagtctatgtctgataactccaatatctatatcacttgtgggtttatttttattttatttgttttttatcttatttatttatttttttaagtggtattcctggtgtattcattttctaggactactgtaaaaatatac

SEQ ID NO: 419820 - DNA, 574 bp, Homo sapiens
ctcatatgattcctcaacagagggcttgcctgctaggaaaaggaatccagagtcacatattacagtttccaaaatgcctaggatacaactgaaaataatccttcacaacaagagycagaatattaccagttgaaaaaggcaataaaaaatggtaatgtcaaaatgaactgaatgttgaaattatctgacaatatgtatcataaagatgcttcaaaaagtaattttgaattttccttaaatatgaaaaacaaattaaaatctcattagaaaatataaatgattaaaaaatgaatgaaaattctagaactaaaatatacaatgacagaaattaaaacccactggacatgctccacagttgagtgcagctaaaaaagaagagactgcatggactcgagatgaaaacaataaaacttatccaatctaaataacatagagaaataaactttttaaaaaatgagactcaggactgagacctctgggatgacaatacatgtgctaataatcttattacctgatcttagagaaaagggaaagagagagtggggctgttgcagtgtgtctagacataacagct

SEQ ID NO: 419821 - DNA, 562 bp, Homo sapiens
tttttctgtgtgtagatgtatgtttatcacagcagtagtgacacctgtcatggtgaatcttaaagatgggtgttgagagtgaaggatggatatgatgttgagagtagggaagaaaactccagcaagagggtagagtatatgcaatggtcttgagacagggtggtctataatcaatctgggaactgcagttaatttgatttgaatgaatcaaagcattaattggaggcaacaattgtcaagaaatggagttaattrtcttgcatttcataaaacagctataactgttaatacaagtaatgccattgaaagaataaataaaggctattgttacatgccataaattggattctaatcagtagagtgcatctttggacttcacaccagtagagagtctgaggggtgtcaaaaagtgtggaaaacaaaacagattcctttttttctatctttcttcatcaaatgaatacacccttttagtggggtagtaaatggggattgagaaggtctgtgtgggaaaatggtctcatcgtttgctggttgtctcctggaaactcaccctgaatat

SEQ ID NO: 419822 - DNA, 490 bp, Homo sapiens
actgttcatgtacatgcatgcacatgttcatgattttaaccccgaaaactcttcagaagatgtacagtcccataagtttctggtaaatcattcccttagaagaatttctgcttagaagtacagttgcatgacaaactcatctgttttaagctcagtcaatgtactgactctcttaatagtcgtttttctcacactttgcaaagaaatgcccaagtcctgtgggcatttcctgctaactctataagccatctcttggggcaaatgcaaaagagagaccaaagtcatccctaagtaacacaaagattttcttccatagtcagggtcacacacccctcagcattccatcaactcacatcttgtccttgttcagcaaggcccctccatatgggtggctgtrgagtgttattcctgtgaaagacaaattgaaaagtgagccttcagcctgctcctgcatggtgaatcgcagctcatctacaggctacgcagattc

SEQ ID NO: 419823 - DNA, 552 bp, Homo sapiens
tacatcttcccaaatactttaaatcatttctagatgacttataatacctaatgcaatgtaaatgctatataaacggtggttatgctgtattttttagggaatactaacaacaggaaaagtctgtacatgttcagtaccggcagaatcatccctttttttctgaatattttgtggcacagttagttgaatccatggatatgaacccatgggtgtagggggtccctgactgtctctctagtactggggtagcagtttgctttctgacctcaaatctctgagggatctaagaagagttgataatttttagtttttaaggtattttcctgttgtgaaaatgaaagtgacaacttgcaagctctttaaatgttgtaccaaaagccacaactcagtacctttttcagtagagtttttgtttcattttttcatgttccacatctctgacccacaggaaaagctayaaattttaaatgtatctctccatcctctacattgtataccattctcttactcatcatgtcaatggcttctaatctacacagtagaacaatttct

SEQ ID NO: 419824 - DNA, 573 bp, Homo sapiens
taggtaacaattgtattgtgatagaatcttgagacaatgatgttggtaaaaggtccaaggctcctaagtaaaaggggcatagtttcaacaccagaattgagtagaagaatctcactgaagtctttacgacattacttcacaagttttcagaaatgacgtttcaaaatgtacatgttgagtacatttraataatttttctttgtttgattgttattatcatttatattccggcttttctttccaggaattggcccacagcaatgtatgaatgtacaaaattagttttctcatttagtgttctcattatggctacatctgttatggtttccagactctgtttatttgtcattggtaaaaatgcacatctgtgcttttgtccaatatccattatgatagcaagatacttaagatgtctccaattcaagtactcactttcgggttcattactcctataaaatgtatatctttagaagtattaatgcccagatgtctgtaagcatctaccaaaaggaaaaacttgtcttatcatcaatatatgtggaaagtttacgttgttttaattaattcattatg

SEQ ID NO: 419825 - DNA, 507 bp, Homo sapiens
  misc_feature (1)...(507): n = A,T,C or G
agcaatcatttctgcagcagacaccagctgaatgttctctagttcagttctattctgaccctatctgcctgcgacataatcagatcccacaagytgagggctcagtcccaagaccgctccctttcagatgccagtcacaagcctcaggttgtcttacctgagcttctgaccttttgagatcggccagggatcctatgaccctcttcttgggtttgattaatttgctagaatggctcacagaactcagggaaacacttatttgcatttaccagtttattacaaagactattacaaaagatagaaatgaaaagatgtataagggaaagcatgtgggaaggggtatggagcttccatccctctctgggaaccaccctccaggaactatcaaggttcaggtatccagaaactccctgaacacagttttgggggattttacagagcttttacagaggcatggttgaataaatcgttggtcatttgtgatcaacttaaccttcagcgtcnnnn

SEQ ID NO: 419826 - DNA, 415 bp, Homo sapiens
tgtattgtaattgtagtcttttccttatcactatacagtaatttacatattatacctattaatgctttgtcttatttgatccttgttttcagcctttcaattttaatgtttcgacttacagaagaaatttaaatttctatgtttaaatatatctgtattttctactgtaaattttayattaatttaatgtctaaaagaaatgtccttattgaataaacaatgtgtttatttgccttatttctaattttctttgagggatagaaaataccaatctcaggaaaattttgcaacttcttttccttttatcactaatgtaaaatgtgtatactaccttttttatattttgattttctcttatcgattaagcaatccaattagaaagacattattttattacaaagtcaatataatgcac

SEQ ID NO: 419827 - DNA, 619 bp, Homo sapiens
tataccttaagaaactggaaaaagaaaagcaaactaaacctaaagcaagaagacaggaaataataaagttggagtggacattgataaaatcaagaatataaaaacaatagagataaatgaaactaaagttgattgtggaagtttggaatgccatatggaatatggctatgaaaaaaaatcaacaaatgtgataaatatttagcataattgaccaagaaaaaaagagagatgattcaaattactggtatcagaaatgaaagagaaagcattactgctgaccttacaaaaacaagccatccttgatggttttactggtaaaccaaatgttttaagaaataataccaatttttcacaaacgtgtttaaaaaatrgaagtggaggaacactttccacctcactctttgaggccagtgttaccacaataccaaaaccaaagacatcacacacacgcaatctcaaaagaaaggaacattacagaccaatgtctcttaagaatatgaacacaaaaatcctcaacacaatactagaaaattaaatccaataatattgaaaaaaattatacatcatgatcaagtgagatttattctagaaatgcagtttgtttatcattcaaaagtca

SEQ ID NO: 419828 - DNA, 572 bp, Homo sapiens
aatttttcacaaacgtgtttaaaaaatagaagtggaggaacactttccacctcactctttgaggccagtgttaccacaataccaaaaccaaagacatcacacacacgcaatctcaaaagaaaggaacattacagaccaatgtctcttaagaatatgaacacaaaaatcctcaacacaatactagaaaattaaatccaataatattgaaaaaaattatacatcatgatcaagtgagatttattctagaaatgcagtttgtttatcattcaaaagtcattaatttttttgtttacccagaagtcattcaggagcaagttgtttaatttccatgtaattgtgtggttttgagaaatcttggtattgatttttattttatttacatctctctgtcatctatctatctatctatctatctatctatctatctatstatctatctatgtatctatctatctatgtatctatctacctatctatgaaagagaagtgtctcactcactctgtcacccagagtggagtgcagcagtgcaatcttggctcactgcaatttctgtctccaggttaaggtgatt

SEQ ID NO: 419829 - DNA, 382 bp, Homo sapiens
ctccagctaaaaagcttagagctggtgactgcctacttccagagaagacattgactcctgctatttctccaaaacctactgttctcccaattgtgagctgctttttcagaatactcctggccgaagaaaggaaaagagagaatctaagtgactctgactcctcagctataatgtggttgaaaatgactctttctcttttgaagtatgttactgagattttttgatagccttcttatgttatcttacttattagttctggttaatgsattgtgggcagagacctacgtgttaactctcagtctgagaagctcattgcctgtgtgaggcattctaggactctcttctgacttgaaacattctatggtggaaatccaggtagctt

SEQ ID NO: 419830 - DNA, 620 bp, Homo sapiens
tggacacacaaaacacacgttttgtttttttttctctttcttcagtaataataacaataataatacttatcgtgtacttacatatgtcaggaaaatttataaatgcaatttttctctctccctctctctgtgtctttctctcttgcattctstctctctctctctctcacacacacacacacacacacacacacacacacacacaatctccagtcaaataactgttcaggtcacctatgtagtaaatggctggctgaaaatacaacacaaggctttccacctccatgcttcaagtatttaactactatgtaataccacatacctcttctgggacattatcatttcttcctacacctataaaagtttactcaaccaattggcctagtaatatgagttttaggattttagaaactcctattcttagcttaacaaacacaaatttaggatttaagaatcctaaattctctgtcttattttcttagctgttgcatcaacagacctccagaattaccaactaatgcagaaaaatcaattgtctttggagcaaaagatgttgggtccactaagaaaacaaaatcagaaatgctttgtctaattatttatcacgggacttagttgac

SEQ ID NO: 419831 - DNA, 589 bp, Homo sapiens
aattcttataatattcagtattattctacctgatgctttcatttctctaggtcagatttctctaaaatttttgaatcaataatcatgaaatttttcctaccaactattattgaactcgttttcaaaaaccttgagatgagttaaactctaccagacacatatgaagcaatctatccataccatgacctgtgctgtttagcaacattttattttttttcaatctaagtggaattcttagaagccctagaatatgagtgactttgtgaatttctatccaggagcatcataggacttctttccatttattgttgtaggtccttaaataaaatgttttgtttaatctacttaaaaaatattttattagaaatattttactttctttaaatagattctatattttaaaaactcctcctctctctctctccgcatatatatttcagcatatggcatatgaaaacacagtttttttwaaaaaaatctcatatccactctgcttatgagattatctcaattttagtagtttcttatttgatctcttttttgatgacattatgatatttaatgatattataaacatgtcctggaactg

SEQ ID NO: 419832 - DNA, 578 bp, Homo sapiens
tggaaatacatttgtggcccattgtagaatttcaattatcattttgctcaaaatataacataatgtttaagatcataagctttagcaaatggttgatctggtttaaattccaaaaccactattccttagatgaggacagctgtagctactgcactgtaagccacatgagaacaagcgccacatctgtattctttaccattgattaccaaggactagcataatatttatatagttgaagttcaacaaaaaaattattgaataaacgaatttaactctctaaaccaaaatgagataaataatacccacttcataagactgttgaaagaataggattagataataggggtaaagggctttataaggtgcctgacagtaagaactaaataaatagaaactatctgcattatagttatccagctcatcataattatktctttgaatattcagcattgttagacaaacctgagaaaataattctttgaaaattattatgagaatgctctacactcatcctatattaagtaaatgtatggtatctaaattattgatatatttttcttctttcatttctgaacatc

SEQ ID NO: 419833 - DNA, 605 bp, Homo sapiens
acaatttctttttcccctaatttcaaaagaatccaaataaaagtttcatataaacagataccctaccaaaacagcatgcccttttaaattttatgaatattatggtaagtacaagtgcaactgcagcttcatctctatgacatagaaatcaagttgaytggaagttgttgctgtcactgctctttgttcactagcaatgaatagagcataccaatatgttccgtcttatatacacctatattttgaattataaaatattaaagaagaaggggacctcagcccagcatcttattttataggtgccttagattgggttctctagaaacaaaaacaaacaaacaaacaaacaaaaacttagatgagaaattgcagcaggggccgtatgaaggaagtgctctcagggaaaattggtaaggaaatgggggagacagaaccaagacgaagccaagaaaggatgtgctctcaggcaaaattccaaacctcaacttgatcatgaaggggaggtctggggagtaaatgacacctcggactctatttcacctagaacaaggaggctgaaactttacttttctgcatggggtagtctttggctaagggccacatca

SEQ ID NO: 419834 - DNA, 599 bp, Homo sapiens
ggtgatttaaggtatctggtgaaagaaatttttaatcagcaaagcattcaagaggtgacttgggtgctgttaaaggctttcagttttttgtttttatttttgtttttgtttttttgagatagagtcccactctgtctccctggctggagtgcaatggtgaaatctcggcttactgcagcctccacctcccgggttcaagtgattctcctgtctcagcctcccaagtagctgagattacaggcacacgctgccaggcccagctaattttttttatttttatttttagttgagaaggggtttcaccgtgttgccaggctggtcttgaactcctgagctcaggcaatccacccgcctcagcctcccaaagtgctgggattacaggcgtgagctactgcacccggccaggctttcagttttaaaagggagtcagagcataaatgttcaaaaaatttgcagcctgaaaatgtgataaaaaagaaaatcccattttctgaggagaaattcaagcattcaagygatctgcagatatttgcataagtaatgaggagaatgttaatccccaagaaaatggagaaaatgtctccagggcatgtcagaga

SEQ ID NO: 419835 - DNA, 580 bp, Homo sapiens
agtttgacagtctccatgaatgcatattcaagatattagcctcttttatgagttgctactttgagataattatattttattgtatcaaaactttgaatgttccccaaggtggaaataagcaaaacaaacaaacaaaaatgagttatttggaagatgcaacaccagttctaaagccaataggttaacaactaagtttgaaatccacttacktcagtccaaggaaatgcatctatcttaaatctggtgtctttttttttatatatatacagcagctctattcgagctccatcctctggatattgtcccattttattccattaaatagcaataccaaagaaaatccctcttccactagaagaaagggagtcagttaaagattgttaagaatttctactcttttgaaaagcactttcaaggaagttgaataagaagtgacaaaataagaccattataataaaagaaaaactgataacagagagcttagaaaagtggtaagagccgaaaaggagttactctattgagctgtgcaacagaaatattttgcttcactctctataatatttgcagaacctcccctaaa

SEQ ID NO: 419836 - DNA, 550 bp, Homo sapiens
gccaagtgacccatctttcatggacccagttccctgttctgtaaaatgggaataaaagaacatgtgagataatataggtcaaaaattattgaaaaagcctaagttcctgtgtatggatcatctatttctacttcaattgctgccctatttaggagtcaaaattatttaacccaagtactttttttgtccatcaaatcaaggaggtagagaagactttctgtttgttagaatgtaattccaaattttaaaaaaaatctataaaattttgtctatgttctttactgtatataaaagttctacattacatgttaagttgaatacagtattataacagttgagtattaactggtctgtgttccaactaggggtggagaaaccatatattaatagtgaaatcagtatttcttaattccctccggcaatcagttgtcactttcctcaggctaacaggcaaarggccatttgcagagctgccaaacctacatcccccatgctgcaatctgagcctatttccttttattttatccaccatggaaaagaacaacagctg

SEQ ID NO: 419837 - DNA, 523 bp, Homo sapiens
attcactccttggaactggctactcagagtatttgtgtgtgtgtgtgtgagtgtgtgtgcatgtgtatgtgtgtgtgtgtgtgtagtcttctctggacttgttttctaaatgcttttcctcaagattactttgaggataaagccaagcaatatattgtttctaaatacattgtttcttggagaaagaaaacacacctagtagccattctccctgttccccagttcactttccttttttttgaatcttacagtttttatcgttcctttatttttaacctccttgtgtcattttccttcatctatctctttgaagtaccatatagccattttagggttttttgtttgttttgttttattattattatattttattattatactttaagttctgagatacatgtgcagaacgtacagatttgttacataggtatacacgtgccatgrtgatttgctgcacccatcaacctgtcatctaggtttaaataaaacatactcttggctacctggaaggaaagggctcgtt

SEQ ID NO: 419838 - DNA, 581 bp, Homo sapiens
ataattaaactcttacacacatatagcagagtatcattatgactaccagaaagaaatatttcttaaacaatgctcaataaatataaaccataaaggtacaaatatatctagaataaacttttaaaactttagaaaaaatcataagcattgtagaaataaaagctactgacttacaaagatatttatacacatatgcaataaaatatttttmatcagaatatacaaagaactcctaaaacttaaaaaggcaaagtagcataattgtaaagtgtgaaaagatttgaacaatcaatttacatgggaagaaacaaaatggtaaatatgcatattaaaagattctccatctcactgttaatcaatgaaatgtaaattaaaactatgatacacaatttctcacctatcagattggaaaaaaaatcaattcaataatgtcagttactggtaagggtacagggaaataagcatatttgcacattacttatgaacaacatgagattgtaagttgtaatgattgtgtgatagtagtaatatttgtgactactggtagttataatttgcagtagttgtacttgcaactttgt

SEQ ID NO: 419839 - DNA, 578 bp, Homo sapiens
tgctgagcagagatcccatggtctcacttgcatgttaaaaataactactccggccacagtgtttagggtagactacagggaagggcagaagcaggaagataaagtagaaggcctgtgcaggagacatgataatacctcacaccagagaggtgggaggagaggggtgatrcactttatgaagtttactttgtgggccctggaaaacgatacttggatcctgactgaaataaaatctcaaatttaaggtaaaataactggtgatatattttggaacagaaggcttggggaaatatttttatttttgcccttctttcaagttttctcttctcacatcagtatctattttttttttcagcttgaaaaatcattactaatttggagaaaagatgcagagtcatccataaacttttaatagatgtccttgcattcacagagcactgcccctgttcccctgaaggtaacagcaggatgcataatgcataatacactccatgccttagataaatacacataaaactttagcagttaagaggatggggctattaaagaaaacaatgtgagtgtaaaacagttttgca

SEQ ID NO: 419840 - DNA, 578 bp, Homo sapiens
tgctgagcagagatcccatggtctcacttgcatgttaaaaataactactccggccacagtgtttagggtagactacagggaagggcagaagcaggaagataaagtagaaggcctgtgcaggagacatgataatacctcacaccagagaggtgggaggagaggggtgatacactttatgaagtttactttgtgggccctggraaacgatacttggatcctgactgaaataaaatctcaaatttaaggtaaaataactggtgatatattttggaacagaaggcttggggaaatatttttatttttgcccttctttcaagttttctcttctcacatcagtatctattttttttttcagcttgaaaaatcattactaatttggagaaaagatgcagagtcatccataaacttttaatagatgtccttgcattcacagagcactgcccctgttcccctgaaggtaacagcaggatgcataatgcataatacactccatgccttagataaatacacataaaactttagcagttaagaggatggggctattaaagaaaacaatgtgagtgtaaaacagttttgca

SEQ ID NO: 419841 - DNA, 559 bp, Homo sapiens
  misc_feature (1)...(559): n = A,T,C or G
cccagtagctctgtaaacttggtagattctttctccaaggtaatccaggcttattttactttcaaacattttgcagaaatctgtatttcttggacaccaactactatcagcaaaggctatttcttcaactgatattttttgagcacctactttgtgccaaatattgttgtaggaactgaaggtatagcaataggcaaaatagacaaggacttgtagtcctgtggtttaatggagtgggtaaatgagaatcaattaaatgaatacctatacatgtcagatgttattcaattctgcgaaagagagagataaaacaggagagaaggacagtctgtctgtggagaatgtttaaattgggtggttggagaaagttccccaaagtagaggtttttagaacaaacctatgatggttgtragagagtgaaccaggctaccttctggggtgaagagcataatgatatggaacaaaggatataaatgaatcagtcctggtagtcttctaccagagagnncatagagtgagagggatgtgattccttgccaggaatacacacaactgctc

SEQ ID NO: 419842 - DNA, 551 bp, Homo sapiens
tttttgttgatattcttttaacaagtatggttaaattacaaaatacgtaagaaatagtttatctctctctctctctctctctcgttggaaatacagagcaaataatactttttggcactagctggtccatcgttcccagatattttactgagtattttctacgggtaaggctattctcctacataaacaagacaactgtcaatatcagaatattatctttgatatgttaccattatctaattagcccagtctrtttgggtgtttcctgttgccccaataatgtctaatccaattcagaatttcctgttacatttagttgtaatgtctctccaatctcttttaatcgggaatagttccttaaatttcatgagtttgacactttctcagactacaggatagttttttttagaatatttgtctgatgttgccttatgattagtttcagagctgcatctttgtcagaaacatcacaaaaatgatgctgtattcctctcattacatcctatccaatgacatactctttccaattctctcattattgatgatgttta

SEQ ID NO: 419843 - DNA, 564 bp, Homo sapiens
atattgagctttatatgtgtgggggggatttgcatacttttttaaaaaattacaaaaagatacttttacraaacagtatataacaaagaaaataaatagcaatcacttaaaatttgtcttaatgagaaaattaatacttgctaagcaatcttttacctttgggaagctccacacacattttatttttgctttcattgattaaaacatttttgaacttcgtgtttaggatatatttttaggcagtggggcattttgttgttgttgctgttgttgttgttgttgtttcgagacggagttttgctcttgttgtccaggctgaagtgcaatgttgcaatctcagcttaccacaacctccgcctcccgggttcaagcaattctcctgcctcagcctcctgagtagctgtgattacaggcatgcgccaccatgcccggctgattttgtatttttagtagagatggggtttctccacgctggtcaggctggtctcacacttccgacttcaggtgatctgccccccttggcctctcaaagtgctggaattataggcgtgacactgtgcccgg

SEQ ID NO: 419844 - DNA, 564 bp, Homo sapiens
atattgagctttatatgtgtgggggggatttgcatacttttttaaaaaattacaaaaagatacttttacgaaacagtatataacaaagaaaataaatagcaatcacttaaaatttgtcttaatgagaaaattaatacttgctaagcaatcttttacctttgggaagctccacacacattttatttttgctttcattgattaaaacatttttgaacttcgtgtttaggatatatttttaggcagtggggcattttgttgttgttgctgttgttgttgttgttgtttcgagacggagttttgctcttgttgyccaggctgaagtgcaatgttgcaatctcagcttaccacaacctccgcctcccgggttcaagcaattctcctgcctcagcctcctgagtagctgtgattacaggcatgcgccaccatgcccggctgattttgtatttttagtagagatggggtttctccacgctggtcaggctggtctcacacttccgacttcaggtgatctgccccccttggcctctcaaagtgctggaattataggcgtgacactgtgcccgg

SEQ ID NO: 419845 - DNA, 555 bp, Homo sapiens
tcttcattatttctaactgaatatatgctactcacaagcaatcattttcttatactcattcacaattaagtgcttaacaataaaaataatatgacagaccattaatacagtgagaaactaatgtgtccagggtaatgtgtggtcatgattgcatgggggactctgagaatatccagaaaagatatatagtagctgaaggggactgaaaakgtcttttatcccttggaggtcactacctttaggagtcaatgtattcaattatcagctgctgtttgaaacagggccatatacttactgtctatcagacatgttttcatggaacaaatgtattacagtttcataaaatggttcataagttcagcaacctacaatgcactggctattttttcacattggtttaaaataacaaccttataaaatgtcaatctgatcattttcattttctgatcaaaattcataatacttcaatgtcattatagcttttaagatgaagcttgaactatataagatatatgggtttttattatccaacacctgtccacctctctatgctca

SEQ ID NO: 419846 - DNA, 555 bp, Homo sapiens
tcttcattatttctaactgaatatatgctactcacaagcaatcattttcttatactcattcacaattaagtgcttaacaataaaaataatatgacagaccattaatacagtgagaaactaatgtgtccagggtaatgtgtggtcatgattgcatgggggactctgagaatatccagaaaagatatatagtagctgaaggggactgaaaatgtcttttatcccttggaggtcactacctttaggagtcaatgtattcaattatcagctgctgtttgaaacagggccatatacttactgtctatcagacatgttttcatggaacaaatgtattacagtttcataaaatggttcrtaagttcagcaacctacaatgcactggctattttttcacattggtttaaaataacaaccttataaaatgtcaatctgatcattttcattttctgatcaaaattcataatacttcaatgtcattatagcttttaagatgaagcttgaactatataagatatatgggtttttattatccaacacctgtccacctctctatgctca

SEQ ID NO: 419847 - DNA, 590 bp, Homo sapiens
tgctcctctccgtcttttcctgagctttccctttcacgatggattctaaggggtgatgttaactgtggatatttctcttggttctttaatccagatgtttgatacttttgccggtcttgattcttaagttttgtgttaygcatgtaatatttagttcttagcatttttctgttgtgaagagtaagtggatccatgaatttgcagtgcctaaaacagttcacacactgagtcttggataagtattagatttttatctttagtaccaataatctttattatagattcactactccttcatttgtgctcattttcttaaatggccctcaccttaaactctttaaactttagtgcatacccaggcctgttgtgaagattctctaattatgtattagcagatgagaataatttgtgtgttcattactagaggtattagtattgaaaaacattccatgtcaggactgcttaagtcttaatattatagattcatccactccatctattctaaagactggtcttgtttcatgcataaaaggatttgactgcttggaccagtaaattcagttacagtatatagacaaacttataaagtt

SEQ ID NO: 419848 - DNA, 619 bp, Homo sapiens
tttacaaatgcaatcctctcccttgccccttcatctgttatccccatttacatgtcacttttctccagagcacttgttaaacaactgctatattgtacagatttataaatatattgttttgttccttttattcttgaataaactacataaggacagaggtttgtttttctgttttagttactgctatatctccagttgctagaatattgyctggtaatagcaggggtttgataaacatttacttgaagaatatgaataaatgaaaaaatgtgcttggcagcatattttggacatggtaattacaccataaacagtaagctattattacaaagattttttttccaagaaatctacattatttataatatctatgaattatataaaatatccaaggattatatataatatataggatatgttctatattgtattcaaatctacatttgagttccactaatagagtttgacaaacttttaaatttcaatgaacatgtttcctcatctataaaatagaactatgaacaccatataggttatatctttcacaagtcttgtatgaaatgacaagttaagaaataaaaatgttgattactgtgtttggtctaaatcaataggatgt

SEQ ID NO: 419849 - DNA, 619 bp, Homo sapiens
tttacaaatgcaatcctctcccttgccccttcatctgttatccccatttacatgtcacttttctccagagcacttgttaaacaactgctatattgtacagatttataaatatattgttttgttccttttattcttgaataaactacataaggacagaggtttgtttttctgttttagttactgctatatctccagttgctagaatattgtctggtaatagcaggggtttgataaacatttacttgaagaatatgaataaatgaaaaaatgtgcttggcagcatattttggacrtggtaattacaccataaacagtaagctattattacaaagattttttttccaagaaatctacattatttataatatctatgaattatataaaatatccaaggattatatataatatataggatatgttctatattgtattcaaatctacatttgagttccactaatagagtttgacaaacttttaaatttcaatgaacatgtttcctcatctataaaatagaactatgaacaccatataggttatatctttcacaagtcttgtatgaaatgacaagttaagaaataaaaatgttgattactgtgtttggtctaaatcaataggatgt

SEQ ID NO: 419850 - DNA, 619 bp, Homo sapiens
tttacaaatgcaatcctctcccttgccccttcatctgttatccccatttacatgtcacttttctccagagcacttgttaaacaactgctatattgtacagatttataaatatattgttttgttccttttattcttgaataaactacataaggacagaggtttgtttttctgttttagttactgctatatctccagttgctagaatattgtctggtaatagcaggggtttgataaacatttacttgaagaatatgaataaatgaaaaaatgtgcttggcagcatattttggacatggtaattacaccataaacagtaagctattattacaaagattttttttccaagaaatctacattatttataatatctatgaattatataaaatatccaargattatatataatatataggatatgttctatattgtattcaaatctacatttgagttccactaatagagtttgacaaacttttaaatttcaatgaacatgtttcctcatctataaaatagaactatgaacaccatataggttatatctttcacaagtcttgtatgaaatgacaagttaagaaataaaaatgttgattactgtgtttggtctaaatcaataggatgt

SEQ ID NO: 419851 - DNA, 634 bp, Homo sapiens
ttgtctggtaatagcaggggtttgataaacatttacttgaagaatatgaataaatgaaaaaatgtgcttggcagcatattttggacatggtaattacaccataaacagtaagctattattacaaagattttttttccaagaaatctacattatttataatatctatgaattatataaaatatccaaggattatatataatatataggatatgttctatattgtattcaaatctacatttgagttccactaatagagtttgacaaacttttaaatttcaatgaacatgtttcctcatctataaaatagaactatgaacaccatataggttatatctttcacaagtcttgtatgaaatgacaagttaagaaataaaaatgttgattactgtgtttggtctaaatcaataggatgtgtttctccctgcttcctactcatcaccacttcacgctctttggcaattattttttgaatgtctgtcatgtgccaatcactctgattgccatttgatgtcaaagtgtgtgacacagtccttactctgaaagtatttacagatcaktgagtagacaaacacccaagcaaaaagaaaagaagaagttttcaaaataatagagaaaggaaaataatggaagtata

SEQ ID NO: 419852 - DNA, 551 bp, Homo sapiens
tctttgtcagcagtgtaagaaaatacctgaaaatataaattcagctaataaaaaaaatgtatgttttaaaatgtcacaatagagcagatctatccagggaagctttcgtatcagataaacttgtgttttcaaacgattgctggtatgttatcttgagaaagctaattcatctctttgagtctttttcctcaactgcaaaatagggacaaagtcatctgttttatgatgttttggtgaggcctcagtttaacaaaacaaayctttaaatacccattatttgctggcactgtagttctttcatgatacttgcattataaagctctcaataggttaagtaaaataaagtttacaaactgcatggagctcagtgaaggcagtccctgttcctactattgtatgaccagttctccaattctacaatgtcattttttcatatagaagtttaaatctttcttctgataacataagtacatcgtgtaagttttattaaatactgtcagtgagcttctgaaggttgtagaagtatcttctctagagatcttattaaaggt

SEQ ID NO: 419853 - DNA, 551 bp, Homo sapiens
tctttgtcagcagtgtaagaaaatacctgaaaatataaattcagctaataaaaaaaatgtatgttttaaaatgtcacaatagagcagatctatccagggaagctttcgtatcagataaacttgtgttttcaaacgattgctggtatgttatcttgagaaagctaattcatctctttgagtctttttcctcaactgcaaaatagggacaaagtcatctgttttatgatgttttggtgaggcctcagtttaacaaaacaaacctttaaatacccattatttgctggcactgtagttctttcatgatacttgcattataaagctcwcaataggttaagtaaaataaagtttacaaactgcatggagctcagtgaaggcagtccctgttcctactattgtatgaccagttctccaattctacaatgtcattttttcatatagaagtttaaatctttcttctgataacataagtacatcgtgtaagttttattaaatactgtcagtgagcttctgaaggttgtagaagtatcttctctagagatcttattaaaggt

SEQ ID NO: 419854 - DNA, 551 bp, Homo sapiens
tctttgtcagcagtgtaagaaaatacctgaaaatataaattcagctaataaaaaaaatgtatgttttaaaatgtcacaatagagcagatctatccagggaagctttcgtatcagataaacttgtgttttcaaacgattgctggtatgttatcttgagaaagctaattcatctctttgagtctttttcctcaactgcaaaatagggacaaagtcatctgttttatgatgttttggtgaggcctcagtttaacaaaacaaacctttaaatacccattatttgctggcactgtagttctttcatgatacttgcattataaagctctcaataggttaartaaaataaagtttacaaactgcatggagctcagtgaaggcagtccctgttcctactattgtatgaccagttctccaattctacaatgtcattttttcatatagaagtttaaatctttcttctgataacataagtacatcgtgtaagttttattaaatactgtcagtgagcttctgaaggttgtagaagtatcttctctagagatcttattaaaggt

SEQ ID NO: 419855 - DNA, 616 bp, Homo sapiens
tgttttaaaatttaaaataaaatattttaaaacccataagcataccacatagtgataattattaacattttagtgcttagcatttcagcttttgttgtatgaatatttaaatgtacattttgttataaatatggaattataattgttaaatatttttgagcaatgtattttacatttttccataggccatatacagtaaatattaattgcccaagtcaaaataaaaatataaacacaaatctaaatttaacattcttttgggaagaaagaattgcaattttatgcatacataaagaccaggtggctttatgtctgaagaacaagagaaaattgcggggtattataaaaaagaatgttgtyggtggttggagagaaagctcatttatattagtaaagctttggggaactggcaagcttaactggtgggtgatggcagcaagcaaaattagttcctagacttgcagcaagttatctcagtagttatagataaaactggtctcaggttataacaggcagtttcagcagccagacttgcagagaatttcttttctagagcaatgctgtgtgccctgagtaccttgtccccctggcctctagactctgatttagttgagta

SEQ ID NO: 419856 - DNA, 381 bp, Homo sapiens
agcaatgaccaggtttaggatcagctagtttgaataatttccgtaggcataaggayagttcctagttgtctggtaccagggcctgggaaatttaggtctggtggataatggcctggaatttgagagccctatagagaagggtagttaaggtgtgggctctgtcatggttctttgcatttgaaaggcaggctccctcatgagttgtctactatatctaggaattgactaacaagggtctgcagggccttatacctcaaattatcagaacatagaaaatagaaaaacatggttaatgcaaattggttttaaatatgatatttctaaatcctgagcagaggtgcataatgcactttggagaaaagaaattagaccaaagacaat

SEQ ID NO: 419857 - DNA, 486 bp, Homo sapiens
attctacatgaatactcatttcatatcttgcatgaggtactttatcatttacactaaattattctacttaggaaacttcatcactggcacatctttttgtaaataactacctttcctcaattttatatgtccaatatattctactttaggtcagtttttcccaaacctcygccattaatttacttacctttttattacctttgccatattctaatccatatttatttgtttctttaaattgattttcaatcttcttatacttctaactgagccttaaactataaaactatatgttgatgcatatttttcaaatgtacattaaataaatactttgctgttagcacataaattgataaccatgtactacctatagttattatgtcttccactagactagataccataggtatctgtttaggaaaagcttttggttgtcttatatgatctatataaatatagatatttgataatacctgtttttattaa

SEQ ID NO: 419858 - DNA, 639 bp, Homo sapiens
tatcttctaattgcttttgtacctcytgcttgcaatatagttttggggacgtacatttccaaggtcaaaccagttgctgcatctacacattaaagacatagaatcattaaaataatctctaagatctcttttagctcttaactttctaggagagtcaaaaattctttgtagcactcttggatgacttatttggggcaatatgtattctaagctgcattactgctatattttgtaattaaaatattttgtattactggtgagtattaacctttaattttcatatttcatgtgagttgtcttctctttattagagttagatgtttgtcctggtgtcccagttctattcccactttctcattcaactacatgcacagtgtaagaagtggggtgctgctgacatttaaggcgtgtaaaaaggcatgcaaattatttagctagctgagtttagtcactagcaggtagtaatcatgagccattgtgcatagtggatgacaacggcgaaaatacctgacttgtatctttcctatgacattaggcaagcttatcaaatattctgatcctccatgttgtcacctgaaacaaagcttcattactgaaggatatgggtcaagggatgactggtcattcactgggatagtc

SEQ ID NO: 419859 - DNA, 566 bp, Homo sapiens
ctgttgaaccatttggtgagcttgaatccttttgtgaggttattcttgatctcagggaccatcggtcttttgytctacatgtttcaggattattatgaactttccagctactaagaggtcaagaaagaatagcagtggcaagtatgaatcactcattaatcaacaatatctttaggagtgaagcacttatttatctaaggtctttttcaaagccttatttaggagatatacaaaagctgctcctaagaatttctgtccttgttgtctcaattccccatatagtggatcctaaggcatttctaattagggataaagttgtaaagcatgtggagtttgttttttagcaacagccacatattctgagtttcttatatttttgaccctatttttagccacacagtgcttggaggagtcctaaggtgtcctccagtgggcatagatcccatcaacaattaccagttaactcttctaaaagctcaaaattaatctttccttctctctccctccatctagaattcaaaatatacctttctcaaattctattcgcactaattcttacctgagca

SEQ ID NO: 419860 - DNA, 574 bp, Homo sapiens
tattatgaactttccagctactaagaggtcaagaaagaatagcagtggcaagtatgaatcactcattaatcaacaatatctttaggagtgaagcacttatttatctaaggtctttttcaaagccttatttaggagatatacaaaagctgctcctaagaatttcygtccttgttgtctcaattccccatatagtggatcctaaggcatttctaattagggataaagttgtaaagcatgtggagtttgttttttagcaacagccacatattctgagtttcttatatttttgaccctatttttagccacacagtgcttggaggagtcctaaggtgtcctccagtgggcatagatcccatcaacaattaccagttaactcttctaaaagctcaaaattaatctttccttctctctccctccatctagaattcaaaatatacctttctcaaattctattcgcactaattcttacctgagcaattcatgattaatagtgatggcataatgagatgctctagaaataagagaatttagattttctggttgtgggggtggtagtattgcaagattgtatcat

SEQ ID NO: 419861 - DNA, 567 bp, Homo sapiens
acaatgcatgaggtgatggatgcctcaattactcttgtttgtgacatacattatatgactatactaaagcatcacacgtaccccatcaaagtatacaattattatgtatccacaataattaaaatttaaaaaaagaaaaaaggttaaaagaaaaatctaaatacctataattagggggacacatgattaatataagtaaaaagtacaagtacaaatgatataactcagttccgagattgtagtaccccagtagcagtagtagcaagatctatgccattccaaggcctcacctcatttaccttaacataytctagtgtatttgagggccttaatctggaggaacccgatctagttcctttaatgtggaagtggtggagaattctggtaacagagcttaagatggctttgaataatcatttcacattgagaacagaagcaaagttttctgtttgggatgaccatgaaaacaggtggtattttcctctcctgtgaggagggcctcatcattttttaggcataggtttaggttcagggataaggatgttcctgttcaaactggccccggct

SEQ ID NO: 419862 - DNA, 591 bp, Homo sapiens
agtctctgggtttctaagaatagatacgttttttcctaagcaggtcacaatcaattgttggatataaatgattttcatacaactaattcccaagcatacccttcaatttaaaccagagcaayacagctacccaccctcaaagacaaaaggaaaaatatatttgtgctctatttataaattgccaatattttaaaaagagaatgaaaaactttgaccttatgctagaacttgccgtttttattataaaaagttccacaatttcatctgtgcattactatgattcatcccaaaattgttttaaagggtaagtattcccaataaaattaagattcaatttggaaacaatatatctatttcataaagtaaggtggacttctgtgacaagatcatcctatagatgaattgagacttgactgaagtaaggaaatgtttcttcaccagctttattcagagaaagtggcttaagtcatcgacttaggattccattgtctgcattctttcctgttagatactcagtaaatataattagattgattaactgactaaacaagtcttacttactgcatgagaagaactatctctgtaaaagga

SEQ ID NO: 419863 - DNA, 326 bp, Homo sapiens
cgtaatattaccttcattgttcgtagagtaaaatgtaaagggttktaacttcagaggaactgtgcacaggcagggaggtgggtgaagttgacctaatgcagagatggggagccacagctcagggtcaggtttgtcatctcttaattctgtttatgccattgacttgttattggatggtgcacaggtaattgatttatctggctaagttttcttattactaaaatgaagttaacatctgcatcatacagttataggaacagggcctgggaagaggaaactctcggtaaatgttggctattgtaattattaccttagtatgacatcct

SEQ ID NO: 419864 - DNA, 547 bp, Homo sapiens
cagtattattctttttttgcaaattaggattatgaggtttgcaaaggttaaagaagttctacaaagtcactccgtttgcaagtgggagagccagtgtttgaactatggtctgtcaggctccaagtcccatgttctttccacacaattagcatttcacttcttggtgatacttttcaaactctagagtttattcagatttcattaggttttccatcatgttcccctacgaatccaatccatgctccttttttccaagatcccatccaacaatatatttttagtcatcatatgccctcagcctactctgatagatgttcagacttttatctttttgatgatggttttgagaaatacttatcaggcactttatagaatatctctcagtttgaatttttctaatgtttatctcatggctggattaggggtctagggttgggggtggaagaccwcaaaggtacagtgtcattcccatcacttcaagggtgcacggtatcactatgactcacattatagaatcttgattacatactcaaggtagtatttgcca

SEQ ID NO: 419865 - DNA, 595 bp, Homo sapiens
agatgtccaggcagaggtatgctgcaggagtggagccctcatggagaccctcttgctagggcagtgtggaatggaaatgtggggtgcaagccccacacagagtcccccctggacattgtctagtggatctgtgagaagagggccactgtcctccagaccccagaatggtagctccaccaacagcttgcactgtgtacctggaaaagccacagacaatcagccccaacccaggaaagctgacaggagagggactatcccctgcaaagccacaggaatggagctacccaaggccgtgggagcccatctcttgtatcagtgtgacctggatgtgagacatggagtcgaagaagatcactctgtaaccttaaggtttaatgactgccctgttggattttgggcttgcattgggcctgtagcttctttgtttgggccaatttctcccatttggaatgggtrtatttacccagtgcctgtacccccattgtatctaggaggtaactaacttgcttttgattttacaggctcataggcagaaaggacttgccttgtcttagatgagactgtggactgtggattgtggatgcttttcttttct

SEQ ID NO: 419866 - DNA, 387 bp, Homo sapiens
ttacttttaaatatccctgttgatctgattataacagtctacctcccaggacaactgtattcattaaatgaagtaatactcattaaagctgtttataaataaactgtatggcaatattactttttattataattacccttaaaataagctcttttgtcagtaactaatattttaattaacaagatcgaatttacttcaagtaccccaattttcttttgcttgcaaatcacagtgaaaacaatagtgtatttacctgaagaatatagctaagtgaaatgtcttytcatgtgaaatccatgtatttccaatttgtacaagcaatgaagtggaaaagaaatgagagctgacataataaatagtggaaaaatgacaagcaggggttccatt

SEQ ID NO: 419867 - DNA, 403 bp, Homo sapiens
ccaagtcacaacatcaattctatactgcacaagagtgaagaaggaagaaagccgggaaaggaagaaggctgggagtaaagacagtacttcatgttataactggtgaactgtctcagttgacaagtctgaaggaggcactcacaaaaggctttgaggagttgtagcaaattttgaacacaactttagcctcacttcttgagtccaaaaatggcactcagaagyatgaaatcttaaataaaataaagcaaaacataaacaaaaccacagagctctgagtatctttgttattgttcacactctgtaagaatctttagtccttaaaacagtactcctgccacacctgttaagtggctattacaaggccaagggaagacttgtgcccaatatgggaaaacgtttgttg

SEQ ID NO: 419868 - DNA, 600 bp, Homo sapiens
tattttaatctgtagaaatactttaggaaaagattttaaagagaggaattgagcctttcatagcatctaaaagaggcagtatggtgtattgaaaacattccagcccctgaagtcaagcataggagggttcaaatcctagccttacagctttcattttgagtggcattaagtatcctctctactacctctgtcaacagaataaagataataatactgggttatagtgatgactgaagacataaaacatctagcccaatgcctggcaagaatagtagcmtaccagtagttacacttattatatctaccatttattgatttcctatgccaacagttattctaggtgctttagatgaattacgtagaaattagaacaactttcatgacttggattttattatcgcagggttaataaggaaactgacacacagaaagtttatgtgcttggcctataggtcacacagctagttaactattgaagttaggataaattacgtgctagtccaacactaaggctcactttttcttataactagaaggagaaatagatgattttattatattttaatcattcaaaatgtttttattaaataactaagagca

SEQ ID NO: 419869 - DNA, 600 bp, Homo sapiens
tattttaatctgtagaaatactttaggaaaagattttaaagagaggaattgagcctttcatagcatctaaaagaggcagtatggtgtattgaaaacattccagcccctgaagtcaagcataggagggttcaaatcctagccttacagctttcattttgagtggcattaagtatcctctctactacctctgtcaacagaataaagataataatactgggttatagtgatgactgaagacataaaacatctagcccaatgcctggcaagaatagtagcctaccagtagttacacttattatatctaccatttattgatttcctatgccaacagttattctaggtgctttagatgaattacrtagaaattagaacaactttcatgacttggattttattatcgcagggttaataaggaaactgacacacagaaagtttatgtgcttggcctataggtcacacagctagttaactattgaagttaggataaattacgtgctagtccaacactaaggctcactttttcttataactagaaggagaaatagatgattttattatattttaatcattcaaaatgtttttattaaataactaagagca

SEQ ID NO: 419870 - DNA, 542 bp, Homo sapiens
tgacactcaatgttaaccatcacaggagttaatggatgtttgttgaatgcacaaatgaataaactagacactactattctcactctgaactaacgttctatttttgataaaaatttcttctggttttttcttttgtccttgaatcccatagactttaggttaccaaaatcctaccttgctgttagcaacacttagaactgacatctgtttttgaactgcacagtctaatggctagattcctgatacttccaytggactcctctaatatggtcctacttctgctttccatccagcattgccatgcttggcaaacatgtgcaagaacattgagttacttaacactggacccaatttatattgcctgtgggcctgaatggcacttatttatcagtgtccagagatttaggttattaagtctgtttactggcttggacatcatcccagcatctgattctggatatgtccatctccccccttcctggcttctctctctgcacctgtgtcaacctcagggtttgatttacatccatttctagggcctt

SEQ ID NO: 419871 - DNA, 542 bp, Homo sapiens
tgacactcaatgttaaccatcacaggagttaatggatgtttgttgaatgcacaaatgaataaactagacactactattctcactctgaactaacgttctatttttgataaaaatttcttctggttttttcttttgtccttgaatcccatagactttaggttaccaaaatcctaccttgctgttagcaacacttagaactgacatctgtttttgaactgcacagtctaatggctagattcctgatacttccactggactcctctaatatggtcctacttctgctttccatccagcattgccatgcttggcaaacatgtgcaagaacattgagttacttaacactggacccaatttatattgcctgtgggcctgaatggcacttatttatcagtgtccagagatttaggttattaagtctgtttactggcttggacatcatcccagcatctgattctggatatgtccatctccycccttcctggcttctctctctgcacctgtgtcaacctcagggtttgatttacatccatttctagggcctt

SEQ ID NO: 419872 - DNA, 602 bp, Homo sapiens
gttaattatttcaaaatcatgagttggatattgtattttatgttgggtttgtattctaattttaacatgaatcattaagaacatttggattggcagcctttgagacatttaattgattctcccaataaataatttcttgagatgatagatttgggttttcttttttccttaagaacttttatggatctggtgttctcattccattagttatttcagttaaagtaaaacctgtcttacagttttctgtgttttaaaatagacatgatatcaagcagattctacacagcacgagcagacctgcccaaaccaagccttgacatgtcccagatgtgatttcctgtctccagtaatagagatgatacaattctttgaatcagctggtcttctgggataagaagatcagttcaagctttgcagagcagctccctagcaactttgtgatcaattatattctaagggaaatggattaaaaccaattgtcttaatggtcctagttaaaaatgagaggaggagtagttaatggaaagctcaatcaaaatttgcattrgtcataagattgggctatctaaggacaaggttatgagtttttgatattgctaatt

SEQ ID NO: 419873 - DNA, 566 bp, Homo sapiens
attccattctcagacccagcttcctccaacacccagagaatctaaccatgttgggttccagagcctatcttttcagttccatccgtaaagaaagtcaggcacacagtgcagggtgggggtgtccggagatccagtgccggaggggaactgggatttcagagcactcgctgcagccatccctttcccaagtctgcacrtcctcttgcccttctagtgctgtttccccttcctgtcacactgctgaggctctccgggagaagtggcaatgaagggagcctgggttgctgacaattactctcaggctgtgtccctgcaaatgcagagcactgggtaggctgcagggggagccctggtgctgacctggtgggtatctgccaggaccccaggtgacttatccaggtaaggtcaagcagctctacagagctttctttccaagcactggttgagacaattataattatgtattcaattataaaaatagaatgctgaagagaaaccagcataggaggtaaagaaagggttgccatgaaaggtctaaatgctggagagtgcggagacaataaaat

SEQ ID NO: 419874 - DNA, 535 bp, Homo sapiens
tgcagataagggagttttcccttaggccctctgtgcgtcctggcccagcctttctggttcaaagggcacagggccatactacctatgaggctgagcatttcatttgcttcaattaaattttccattaacttggtctctggccagtatggattttctctctaaggttgtctctgcagttcagatcactcagccctgagaatcaaccttatgactcccctctggtccatttaagtacatttctattttttctcccctaatgagatgcacagcaaccgaccataattttaatgcctgacacctgaacttcttacatcctctcagatgtttctggtttgcctaagactttgttctaagcctaggggttgatttcctcctttggaaattttgaccaaaggcatttttgaccaaagtcatctgtttgggataatgaatggcctttctgtgctctcgggaggagagcaggttccataccaccctccatatgatctcrcagctttgccaaacctccacgccaagcttatgagaattcccgaga

SEQ ID NO: 419875 - DNA, 603 bp, Homo sapiens
tgtttaacgatgccaatctggggacccaacaaccagcaaatgcaatgccattgagcgagacagctgaaatgcttcctatcacaaatacataatgtatcaccaggaagacaaaaagatcacaaaggagataaacaaatgcgtattccattcaaccctataacagcagtcctcaaaaagattaaatttaccttcctgggatgggtccaactctaaacaacagaatgaacatttcctttagtccatttagagtatttatatttgggtggctgactgccagagtagtacttataagctcagtggcctgatggattcactcctttcctgtgaaataaatgtgtggcaacctacaccgctcaactgctccaaagacactgcctcagcacatatatcacttgctcctgatataagaaagccgaaaggcacgacttgtggttcttataactctttccatcttgtatttccccagaaagagagaaagctattcatgttggcaactgagcctttatttttatayaaacgtcaaagtcaaggccaaagtatgccatgaggttacccacatgggcacgatatacaggttcttctgggcttaagaaaaaactcagg

SEQ ID NO: 419876 - DNA, 579 bp, Homo sapiens
ctcttacttgatgtctgcttagttgtgttgtggaactaaaaccacatattttagaatatgatttttgccattttctaaaaaaaagtttgcatgacagaagaaatgaggtgtgtgaccacagacagaagctgggcaactagcatacttcactttttaacacattagtttgatgggtttcccttatatacaagtacaacccaaagtccttccctgcaacttttcttaaactcttatagtcacaaataatgaaacttcaaatattcattagaaagcaggaagaaaaacagtgacacaaaaagagagccaaatatatacttgaaaaacaaaaagttacagtaaataaggtaaatacatatctgaaaaaagattcagataatacattttaaaaaaagaggagtcacagtattgggttagaagaacaaagggaaatttgacaytgagacagtagatattaaggattttttttgctaaaagctgttagttgcatgttaacctttagaacaaatctgttgatagaggagagtgtgtgctaatttttccacttattgctaatagacagattttgaactctgcaagggc

SEQ ID NO: 419877 - DNA, 581 bp, Homo sapiens
gcatttgtactgtaactcgggtctctgttcgcttattgtagtaatctcccctttgcacagatgaagacatttagacatggaggacagttttttcgtaagattcttctgcttggcaaggacaaaacagaaccagctccagactctggaacttcctgccatgatcactttctaaaaatccaaacttatttcctccccactctgttggatttcataccttccataccaataaatatcagaaaagtgaagcccaagcttggttcttcattttcatcrattccagagtcttttcctgtgtcaccaacaagggggctgccctgaaccagccagagccagaaggacaaatgaggatgccttcaataccgccccctcctcaaatgttatcagcagagagggacttgtactgccaccatctggcctttgtgggtgtcccagacacagcaagtatgtggtgagagggaaggaaacagcacaaattgtctactttaccattctcttaaaataagcttcgtgtgagcaagcttttcagagcagcaggactagggctgcgaaaaatagagtgtggtgcagctgcacccttcaga

SEQ ID NO: 419878 - DNA, 581 bp, Homo sapiens
gcatttgtactgtaactcgggtctctgttcgcttattgtagtaatctcccctttgcacagatgaagacatttagacatggaggacagttttttcgtaagattcttctgcttggcaaggacaaaacagaaccagctccagactctggaacttcctgccatgatcactttctaaaaatccaaacttatttcctccccactctgttggatttcataccttccataccaataaatatcagaaaagtgaagcccaagcttggttcttcattttcatcgattccagagtcttttcctstgtcaccaacaagggggctgccctgaaccagccagagccagaaggacaaatgaggatgccttcaataccgccccctcctcaaatgttatcagcagagagggacttgtactgccaccatctggcctttgtgggtgtcccagacacagcaagtatgtggtgagagggaaggaaacagcacaaattgtctactttaccattctcttaaaataagcttcgtgtgagcaagcttttcagagcagcaggactagggctgcgaaaaatagagtgtggtgcagctgcacccttcaga

SEQ ID NO: 419879 - DNA, 581 bp, Homo sapiens
gcatttgtactgtaactcgggtctctgttcgcttattgtagtaatctcccctttgcacagatgaagacatttagacatggaggacagttttttcgtaagattcttctgcttggcaaggacaaaacagaaccagctccagactctggaacttcctgccatgatcactttctaaaaatccaaacttatttcctccccactctgttggatttcataccttccataccaataaatatcagaaaagtgaagcccaagcttggttcttcattttcatcgattccagagtcttttcctgtgtcaccaacaagggggctgccctgaaccagccagagccagaaggacaaatgaggatgccttcaataccgccccctcctcaaatgttatcagcagagagggacttgtactgccaccatctggcctttgtgggtgtcccagacacagcaagtatgtggtgagagggaaggaaacagcacaaattgtctactttaccattctcttaaaataagcttcgtgygagcaagcttttcagagcagcaggactagggctgcgaaaaatagagtgtggtgcagctgcacccttcaga

SEQ ID NO: 419880 - DNA, 546 bp, Homo sapiens
cggtgatccaggaagtcagtgagacaatctctctatatgcagagccctttcatgwtaattagaatggtatggacaaaccaatgaaaacaagagggaaagtgagaaagatcacccatgattctgtttcactgtttgctttctcctgtcatggttaagagaaatgtgcaattcgatcctcaatcagtgggtggaggataacagggtagattcacttgtgtgcacttgtacagttgtagctgcgagtccagaagtcctctagagcatgtgtactggcactgagttggtgagacagttgtggagtatcccattctgatgagtacagaaaaaaaaagaaaaagaaaagaagagaaaaaattaagaaaaaaatcaaaaaaggaagaaaactaaaaaaaaaaaaaatcaaatcaccttgtgattcagtgtatctgtttactaactcaaataaagcaattgttccctctggaggggtccaggtgcccccgccccacaaggccgcggagcctcagcaggaggggtggcgagttgcgggtgggcagggccaggacg

SEQ ID NO: 419881 - DNA, 485 bp, Homo sapiens
agggatggggtaaatttaagaacaagaattagatcccatgtastaggtaactaaagatatttcggggtgcagtttccaaatactatagaaaatagttttaaatatcagactgtcaagaaaatggaaaggaaacaaggggagaagaagaaagagaaataagaaggagaaaacctgattaaatagtaaacgctttttactaaaaacataatttgctgacacagaacttaggcctgcttttgcggaagctgcctgacccatcgctcctgcagcctcccacaggcgcgcactgtggtggacatggggcggggctctgggtattccctgtttgaggacctgacctcttacttctttggaaggagaggatgagattaccagagctttggatccatttttggatcaaatgaaaaccgcaggctaatccttaatgcgtccctctcctcttacagatgctggcctcaccctaggggcggggcatcagatgcctc

SEQ ID NO: 419882 - DNA, 556 bp, Homo sapiens
gagtttgtgctgcctctgtgttctcagtttactaatctcacctacagcgtgacacagctgtggctgttggtagtgatggctcaaaccagctatccycattcactggtgggcaggaagcaggtgggaccccttaaaagagaccccagcccagttagtataaagaaacctcaaggttctgtactatgatagtgatgaacacctcaactgatggaaagtgacactgtaaaatcagcacacatgggagggggtatgtagacgttggtgtccttttatttattgcctggtgagcttagaaaaggataatatcttaaagggggttctccgtcaaaataagccattgtagctgagagttatttaataagggaatagggaagggaggtctacttttcagtaagagagagccttgtttgcacatgatgtccctgtccttcttcccaccagaagggcagtcacgctggaggacagctggatttaacgtccaagtgtacatgctctgtgcaggagaatgatgtgatctaacaaaggctggggcatatgtccagtgaacaaaatgatg

SEQ ID NO: 419883 - DNA, 537 bp, Homo sapiens
gaaaccagcattggcatcaagttggaaaaagaatggcaaagggacttctaaccatctgactgtcatcaggatccatgtaactccctaggtttgacccccttccccatctgtgatcaccagttgcagagctgaacattatgcaggtcatcagtgaagctaatggtcactgatttgggaagtgatcgactygtttaaataatctagtctccaggtttctctctggtcactctgccaactgccttttagattgcttgatagccaggagctcctctgccagaaggtaagtaggagtgtccagcggaggtgaggttcaaagcagtcggcccacctgctcccaagagggctggtcaggcaaaaggtgaaggaagtgaagatggagaatgtatcctttgcttaaccttgagtttcctcctctgaagtttaggtttgcctgtgcattaatttaccccaccctccatgctcattcctatagataataaccataacagcactattatcagctaaacttcatatgtacagtggtagagatgactagat

SEQ ID NO: 419884 - DNA, 482 bp, Homo sapiens
caaccacactaaggagaatcgggtcctctcaacgcccagcctctgtcctcatggaggcacccaggcctccacacaggagctcctgccagcccctcggggatgtctgagccatcctcatgcactcaccttccccgtcaggtgyccacagtgcagggtaatcgagaaatcagtcagatgttgtgcctgaagcaccagtgcctggcctggctcccaggaggatgcggccttggtcttccttctctcatactttcagccagagttggaaaaccactttcccaggccctgagtttcctaaggccctgcccaggattttcctgcaagctctgattgcactctgctggtccagttaaaacccctagcggggagctagctaatgtcacaaaagctgctttttagagaggacaccgcccagctgcataatcaaacattagaagcccaaatgagaaatcacagcttggaatgaggtccagagccttgaccag

SEQ ID NO: 419885 - DNA, 556 bp, Homo sapiens
aacctgtacttggaaaaccttagactattttatctggacagaaacagctgaagaaacagaagcctagggcagtgaaataacagggctagcaactggagagctcactagagactcaaccagaacgtragctgatctcaatccactcgagggcagcttccatattaaccccccttctgtatcacctgggggaggcagaatggttttgttatctggtttgagatactgagaaaaatagaaatcctatgcgtttttaaaatacaatactaaagcaagctctccaactgctccaggtaaaactaaaaatgacaataaggaaatactgaatcacataccaaagcatgcaatttcatgtagtagaattttaaaatgtttagcttaatattaaaaataaagtaaattacctgacagccccctccaccctaaccatccacttgcacctcagaatttcattttataggccttcctggctttaaatgcaaaggtggcaaggatcaaaatgtctggttagatggatacttccaaggagttggaaatataaagcaatgaactgggcaag

SEQ ID NO: 419886 - DNA, 592 bp, Homo sapiens
gataaattttgttcttagaggaaggtgccaacttatatttttgkcaggataattccacacatatatctggacaaatttatagatgctataatcaaacttgaaaaagtacatggaataatagatttcaatcagatgtctgaaagcaataaacaaagattgaataactatttgtgaaatcattttaagctttacaaatcaaataactgaaattcatattaatatagaaatgtgttaatagttgtgttcccagaggctcaaattgactcaattaattgttatttattaaataaagaaataaatacattttaaagttaataacttctttattttatgagattctatacttggcttaatttccaccaaaaatcccagtagactatgtgtcatggtttgaatgttcatcccctccaaaactcatgttgaaatgtaactgccattgtaacaatattgggatgtgaggcctttaagaggtgattaggccacaaagattctacccttatggatgggtttgatgccttaaaaaaaaacttctggaagtgagttctctcttgctccccagtgtgttctcttgcgcttctgccttctgccatgt

SEQ ID NO: 419887 - DNA, 497 bp, Homo sapiens
aaccaggtcacacaaggttttgtgtttcatattaaggagtttgactttattctgaggataatgatgagctatgaccttgctcctcaggacaatgctagttgggtcccctgccctgactcttataacttgaaataaatgtccttctaacatatgtcagtccttgggtacttccatgacagcctagaacttctccaacacagcactcttttcaagctttatccactcttttaacaggtccaatacagagaccatcaatcttccaggtctaaccataaaagaatgagaaattatctctacmatttaaactaaaatgatttgccatttttcactattgcacaaataactaaattctgaagttattccacgtggttataactaagtggggtaccaacttttctgtgcactaactaagaattagttctttcagaatataaagaaagttaattgccatttacagatgaaactaagaaaaaatcaaatcgatggctgatcgggtt

SEQ ID NO: 419888 - DNA, 547 bp, Homo sapiens
  misc_feature (1)...(547): n = A,T,C or G
gtagataggataatgtggttccacttaacataaggacagaataatccctcctgatgagtcagacccgtgggagggaatttgtgttggatttgaaaanaaccctttggagtatttgccaagcagcatcttatactaaaaagatatataattatgtagagtgactaatttacttttgcagaccccttacwtgttacatgaaataaagtcttctgtttacctgtttgtctctaccactgggaccatgtcttacaggacagggactgtgtcatctgcattcttttgtctctgtagtgtaacacagtatgaacacccaataaaggtcttttgagtgttgaataaataggcagacaagtctttatgcagaaaaactaatagcatctgcatatttgagtattcccttgtgtgattccaggccatttgtgaaacttcaaataaaactgtcttgaaaatgcatgggcgtcacttcttctatccagaagtaatttttatctgttccctttgttacttatatctgtttattagtaattaaacttataaaagggccctt

SEQ ID NO: 419889 - DNA, 516 bp, Homo sapiens
gcagtcccagctgctcaagaggctgaggtgggaagatcacctgagcctggaggttgaggctgaggtgagccatgatcatgccactgcattccagcctgggcaacagagtgagaccccatctcaaaaattaaaaaaaaaaaattttttttttaaatctaaacacattatctaaaaatgatttggagtttcagacttaagarcaattatgagaaatgaatttgacatcaaaatcttagaattgctgaggaattttaattcatggagacaatggaatgtaccaggataggtatatgacttattctggaagatacagactatgtggttgctatgcctcactaaggggaaatatatctgaatggtgcatgtgaaggagccatcaataggttcaaaggcaaggctggaggaaacagagaagccagcgcttgcaggctattgcagaggaagagaggaactggtgggccaggacagggcatgagagctgaggggtcctgggagggtcctgagaggtgtggggga

SEQ ID NO: 419890 - DNA, 530 bp, Homo sapiens
gctttattgagcagtagaagagctcagagacctgctgtgggtagctcctttctgcagctaggatgttccaacgagtgttcagccttcagcagagaggaggaggctctgggttgggtggctcctctctgctggcagcccatgccatcctctctgcagctcttagcagagtagagaccctggagtgggaagcttctctctgctgctggtcattccatcatctgctcatctctagctgagcccaggacttttatgggccccagaggggatgaagtcacaccaattggtccatgggcagccatgggtgggcccagagaaagcaccacaagttcccactccattccgtgggactggcagcccagcccccagccttcaggccctccctgtcctaaaggtagggtctcactggggaccttcccccttccacccaggaatctgcctgyctcctgctgccattcatggtgcccaggttcagccccaactttgctccaagatgagagcaggcactgatagcagggagaatccaggcagag

SEQ ID NO: 419891 - DNA, 591 bp, Homo sapiens
cttcacaggcataccccccagaaacaatgtttcaccatctatctgggcacaatgaaccagtcaaattaacacataaaattaaccattacagcttcctacagttgcaaagcactttcatatgataggatactatatagtttgtaatttctatttaacaggcattaacgtagttaaaaattaactgtatattagacaaataaatgcttttgtcacaatttacttttcttcctctctgacatggttttcacatggaagtattcctctgcatctctttcaagtatgatgctaggaaattgtcaaaatttacatcttgctattctcaaacacgtaagtggaactcagagtccagctgaaacagcaataattaccatttgttttagaaattctcataaataaaaaagcattattaatcaaattagtggaatgagatatagctgaatcagatacactgatactaaattatagtgactactttctttttccctttttcataccgattttaaacaactttcaaagggttttattctcytccagactgaagtatataaagggtgagagacagttagtctggagatgggtggaaaaggaaga

SEQ ID NO: 419892 - DNA, 464 bp, Homo sapiens
aactgcccaattgcacaatataaagcaatgactttcttaggattatcagaatgtcactgtctccagcagatcgtgtgagtgtgtgcctgcattctcagagtcggctaggttgctaccacgcatagccaccgtatgaaagaaagggtygctaaaattggagcacttgctttttgtttgtttgtttaaggctcgatgggtcttttcaatattctgtcacaagatcaccagtgaatctctgcggaacaaaagatttccttcgcttctcgtctcagtgcaaggtactgaaaagatgctcagctgttgaaaggtcttgcgttatgaaactgaccgcttctggtcactctgctctctggcctcctcccctacctgcctcagtgacgaaggcaacgaattccctgtttcactctctttgtaaccccattctgccttcctttttccttttaaattccaagtaaaacgcagcc

SEQ ID NO: 419893 - DNA, 645 bp, Homo sapiens
acaaattcataaggatcatcagtacatgtcacattttaacaagtccatggtatctaaatgccaagggggagaaaaagataggagcatgggcccgggacagacaggccgtgacttctacaggtcctctcatcttttcagtctggggtcaagtctgaagtgccgtggcactgagccytgggagagccccatgacacagagccttgaccttggcctacatcactaagcctctttttgacttaaaaaatgctactgtctactgaactgactatcagaacaagaagcaggtgggtgttaaatgatatggtctgtttgctgcgaaaacctggctacaaaggccaaaggaggaagcgagatgcctccaagtttcaacagagtttggagagaaaagactgcaggggaacagagagtgaatggcttaaaaattaggctccccaaagaggaaggcttgatcaactttctattaaacgtagaaccttgtatgttccggcccgtttgggagacaccgtgtcctgatggtcctgcttgctatggctgccccagttccccaccctgctgtgggggaggcttccagaggacgggccaacctttacttacagccttcttgctttggccaatcctgtttacaagtgaagcgtgaccaatgag

SEQ ID NO: 419894 - DNA, 488 bp, Homo sapiens
cataaacgtcatctccacctccatgaaacttgtggtctagaagggaagagagacattaaatgaataagccaacaattgaatatcattgtgataagatgccatgaaggagataggcaggatggaaatttttcagtttcaaagatatcttatggtttctaccaatcatttctgtatacaggaaaatattagttggttcatgattataaaacatatttatgcccatttgacataaaaagagaaaaattaaaaaagatttagagaaaaaagtataaattactccagaaagccttgtgtcctttttaatctcctttacccatggaagtgttccttccttttttaagcgggagaaactggttctgtgactgaccctayaactgagattccacataagcaccagctgttaaattgtgacctacatcctgccccacaccttgataggctgaattagtatgttgatctttctgtcagcagccacacaggtctactaa

SEQ ID NO: 419895 - DNA, 274 bp, Homo sapiens
tgcagtttcaaatttatgttcatataaaagacttatctacagaagtataaagaaacctgctgagtagaaaatttcaaaataaacaacatacatttataatatcactgacatgtttagttttttattttttsttagaattaaaggcaccaaaaagtcatttgcattttaaatgatagtaaatgcatttcagatttagttgtcaatttaatgaagcctcaaatattgattttagcaaaacagtaaagtaggaaataaaaataaaaaggattattat

SEQ ID NO: 419896 - DNA, 609 bp, Homo sapiens
acttaatttccacactgcattatgtggttgtgttttgtgtttgtgcatccagagatggcaaatctcacaaattcagcacaactaaaggtttccattcttgaacaaagcaggagtcagccatgccaggtggctcctcttagtttcctgtcagtgcaccatatagcctctctgtcccagggaaggtggctttgagaagaacgtatgcaatgagtttamtttataagtgtaacttcagctttgaaggatgtatgtttgcatgttctcattttgtctttttcccttgttgattttgcacagtgtttattgaacatctcttatgtgtgagtggctggcagttggtgcaataaataacctttactgaaaattcatatgttttaggtcctgtgctaagtagcttgtgggcatggtttcattaactactcacaacaactctatgatttaagtagtgcaagtattattgtcataattttacatgtgaaggaactaaggctcggtgagtttaaataatgtgcccaaggacattcattactgtgattcaaacccagactcatctaactgggaagctcatctcttctcccacaaaacaggaagagttggagcagtaaagca

SEQ ID NO: 419897 - DNA, 609 bp, Homo sapiens
acttaatttccacactgcattatgtggttgtgttttgtgtttgtgcatccagagatggcaaatctcacaaattcagcacaactaaaggtttccattcttgaacaaagcaggagtcagccatgccaggtggctcctcttagtttcctgtcagtgcaccatatagcctctctgtcccagggaaggtggctttgagaagaacgtatgcaatgagtttaatttataagtgtaacttcagctttgaaggatgtatgtttgcatgttctcattttgtctttttcccttgttgattttgcacagtgtttattgaacatctcttatgtgtgagtggstggcagttggtgcaataaataacctttactgaaaattcatatgttttaggtcctgtgctaagtagcttgtgggcatggtttcattaactactcacaacaactctatgatttaagtagtgcaagtattattgtcataattttacatgtgaaggaactaaggctcggtgagtttaaataatgtgcccaaggacattcattactgtgattcaaacccagactcatctaactgggaagctcatctcttctcccacaaaacaggaagagttggagcagtaaagca

SEQ ID NO: 419898 - DNA, 560 bp, Homo sapiens
ttttatgtattggatagaagttttagcttaagaattctgaaaatttcacaaattggatctttcagacctagcgtctaccatctggggcatttctttggaaacatctgggtagtgattaaatattgtggttcccatataaatgtctagaatagtgtatacmcaaccttggaatagaattacaatcaatttcaaaggagaattaaactgacaattactaggaatgtttagagttatgaaattaaataactataaatcttgtaatttttttactttaatccagatgtggtagcaatatatgtttatgtaatgatatcccatcatcatgtgctctcagaaaatttttccctgaattgttgttggtttattttttttcttaaaactgtcaattttcatgtttgttgttgttgttgttatgtgtgtgggctttcttttttgtatgttgttagaaatttgattcaatgctttgggttgggaatagttgagggtttagaatttgtatcctgcttgaatccctaacttttcccatccttgcattattatcccaaatactgtcacttcag

SEQ ID NO: 419899 - DNA, 550 bp, Homo sapiens
ttttagctatgttgtatattattgtgatactgtctggagccaagttaggctgttaggttgtctatataagttttatagaaaattaaaatrtaagtagtttcaagtagggttataatgcttttaaatatttgggtttgatgacttaggctcagagccagaggtgggcagtggaatagagtatggggctgcagctctgaggaacagagtgatatgaaagcccattaggtaaaattaccttgtaataggctgaaagaggttttcatacccgaagtcatctggccagcccattaggcagccattttagatgaccgtttgagaaagtcagaggagcatgctctcagacagaggagactgttactgactgacagagacactaactccaaatggaaaccacatggggaaatgaagactgcccctgtagccagagcatttcagcctgttaattagtaaagatgtctttcattacagtatgactttttagtctttatattattaaacataccaaaagaggggcatgattattatttcctttaattattttttagattta

SEQ ID NO: 419900 - DNA, 542 bp, Homo sapiens
tctgaggaacagagtgatatgaaagcccattaggtaaaattaccttgtaataggctgaaagaggttttcatacccgaagtcatctggccagcccattaggcagccattttagatgaccgtttgagaaagtcagaggagcatgctctcagacagaggagactgttactgactgacagagacactaactccaaatggaaaccacatggggaaatgaasactgcccctgtagccagagcatttcagcctgttaattagtaaagatgtctttcattacagtatgactttttagtctttatattattaaacataccaaaagaggggcatgattattatttcctttaattattttttagatttacacatcagggaaacaaagtttaaggctaacaatggatatacatacctaggtgccgcctatacatgaacacacatgcttttgccaggtctattttttctaacttaaggtaggtgaatgagctcatagtagtagtagtagtagtagtagtagggttcaaatcttactccttccaaaacgtgcaata

SEQ ID NO: 419901 - DNA, 660 bp, Homo sapiens
atttgatttcatgttctttctttcagaaatgaagaattctctcctattcatctggttttggattctgtttcaaagtaagatccattcaacaattggtgccttaccttggagcttaagcaacacaaatctactcataatacactatagatttccatattgattctctgcttcatgcttttgttcactgaaagcatttttttcctctagggaatgacctcacaaaaattgtttcatctgtcttctgttttatctccttctcatgagttcraatttagcttgagcatcttaaatattcagatttctgtgttcctcattaaacttctagtttctccacatcatatttgtgtaattctagggcatatagcggtgcctgacacagagtatataccaggttaagtgtgtgtgtgtgtgtgtgtgtgtgtgtgtgtttaagttgtgatttcaatttcatgatccctttcttgaaggtaatattgggctaacattcagcttttctatattagtaaagtggattaatgacaaatcagaagtttttcaaaaatcaaagattttgaaaaaataattcccctgtaatgcaatttttaggtagtccaccttttgttatatatttacttttccatacaaatatttaatatacaatataaactactttggttgaaa

SEQ ID NO: 419902 - DNA, 549 bp, Homo sapiens
gggggaaagggagaacaaggtattagtcacaaggaaaaagaaaactggttatacaagagtccaggaaatctattaaaaggctaagggaatagaactgactctgaaacataagaatcttagagctccatgagattgttaatctatgaggttggccaatcaattgtgcacacatgtgttagcctctgtaaggtgtcacatagaagggacatgaaactatctgatggatcttgcaataaacagtgtcacttttttcagtattttctattcctaaaggaaaggctttttctgtatttctggtctaggatgaagctcaagattttcctgtatgggttaatgrgagataaacatacattcatttaaacattcagtatttagaatatttaatatttagtatttgctatgtcaaaacaccattctagtttctagcaacattgagatgaatatggagggggctgaaaaactaagggtttattttatcaaagagaagcaaatgaaaggaaataacatgttagagccatacaattctaaaagggctcattcatgttcata

SEQ ID NO: 419903 - DNA, 549 bp, Homo sapiens
gggggaaagggagaacaaggtattagtcacaaggaaaaagaaaactggttatacaagagtccaggaaatctattaaaaggctaagggaatagaactgactctgaaacataagaatcttagagctccatgagattgttaatctatgaggttggccaatcaattgtgcacacatgtgttagcctctgtaaggtgtcacatagaagggacatgaaactatctgatggatcttgcaataaacagtgtcacttttttcagtattttctattcctaaaggaaaggctttttctgtatttctggtctaggatgaagctcaagattttcctgtatgggttaatgagagataaacatacattcatttaaacattcagtatttagaatatttartatttagtatttgctatgtcaaaacaccattctagtttctagcaacattgagatgaatatggagggggctgaaaaactaagggtttattttatcaaagagaagcaaatgaaaggaaataacatgttagagccatacaattctaaaagggctcattcatgttcata

SEQ ID NO: 419904 - DNA, 594 bp, Homo sapiens
attacatcggggtctcagtgttaatctctgttgctgacaggtggacactcagcagcaaaataaccaaatcaacctttgtaaacagaagcttatgctgttawgcccttgaacagcctaaatctctccaaccctgaccactccattcatatgcttattgtgccaaccctggggtgggcaatgtctgaggctgactggtaacaatggtcaagttattattccgtccacacagtcgcatattgcctcttccctgctgggtactcttttgtgggtattaacacaaagattccacttcatgctcattcctagatttgtttttccacattcctgtgtttgattttctacatccctctagctcagatcttgtcccacaattctaaggtttctttttttaaagctcctggccagctggccaggccttttaccactttcatgagtttgtgtatactctaatctcaagccacttctctttctacacaagatgaaaatccatttcctcactccaccccttgagacgttttcctctaccactgtcgttcaaggccactcctaagtgaggctgctgttcagctgctggtcatttttggtttacattca

SEQ ID NO: 419905 - DNA, 515 bp, Homo sapiens
tcttgtatttttccccaggttaaataactttgatattattagcttttccctatcacacctcatgtattccacattaaccctttgattctgcctgyagctttccacttatgtagatacaacttctatttaagtctttgagatgattccttagatcctattccctactcaaacacagataactcagtttggcataaaaaataaaaatttggaattgcctaactacacatcagaaaaacaaaaagacaataacaaaaattctatacctgaatgccaattgcgaatctttgtctagcaaaataaattaaatagctgagtcctgaaaggcggccgcacaaaatactttggaaggtattttattactgaactcttaatatatgtgttcttgcattcatgtaagttcttcaaagatttattctctcaattaccaatcaaaataactaataaaaggagaaccagtggaccaggcaggattagagctgcctgggaagatagatgcactggccatagcatctcag

SEQ ID NO: 419906 - DNA, 515 bp, Homo sapiens
tcttgtatttttccccaggttaaataactttgatattattagcttttccctatcacacctcatgtattccacattaaccctttgattctgcctgcagctttccacttatgtagatacaacttctatttaagtctttgagatgattccttagatcctattccctactcaaacacagataactcagtttggcataaaaaataaaaatttggaattgcctaactacacatcagaaaaacaaaaagacaataacaaaaattctatacctgaatgccaattgcgaatctttgtctagcaaaataaattaaatagctgagtcctgaaaggcggccgcacaaaatactttggaaggtattttattactgaactcttaatatatgtgttcttgcattcatgtaagttcttcaaagatttattctctcaattaccmatcaaaataactaataaaaggagaaccagtggaccaggcaggattagagctgcctgggaagatagatgcactggccatagcatctcag

SEQ ID NO: 419907 - DNA, 381 bp, Homo sapiens
acaatgattctaaagaagaaaattccaggccagttttcttgcatcagtaacaaacaaagagggatgttataatagctaagagaggaatcatctgcaattaggatcttctggacaacagaatattacaaaggtatatgatattttaggaacaacatcagtaaaagtaactctgaactggcaatgaaataactgatggttckgttttactgtgttggcctaggctgaatatagaaaaaaatacatatgtatgttatatttccagaatctccattctttgtctcacagggatggattatatttggcaagctgtggcatcttggcaactgtcacctcacatacagatggagataggcatgggttggtgaagataaagtagagggg

SEQ ID NO: 419908 - DNA, 594 bp, Homo sapiens
actgatatggtggcttaaacaacagaaattaatgttatcatgcttctggaggttagaagttcaagaccaaagtgctggcagggttggtttcttttgtggcctctctccttggcttgcagatggctgccctcttgctgcctcctcacatggttatctctataaacacatgttcctgttgtctctatgtcctaatctcttcttaacaaaaacaccagacagactggatttgtgtctcccctaatggctwtgtcttaatttaagcacctctttaaagaccctgtctctaaatacagtcacattatgatacttgaggttagcaatttaacatacgaattttggaaggacacaagtcagccttaacacccacattaccatatactacaacatgctcctgtcaaatccagaaattagcttggtcttggttacttacacaggtggtcaaagctctgaggctgagttttgtttgtttctctttcagcctttcagcaataatggctccaggctgacatatctgggatattattccatgtatttgctatttctacccattatgctatctctacttctagttttattaaacaaatattaatagct

SEQ ID NO: 419909 - DNA, 594 bp, Homo sapiens
actgatatggtggcttaaacaacagaaattaatgttatcatgcttctggaggttagaagttcaagaccaaagtgctggcagggttggtttcttttgtggcctctctccttggcttgcagatggctgccctcttgctgcctcctcacatggttatctctataaacacatgttcctgttgtctctatgtcctaatctcttcttaacaaaaacaccagacagactggatttgtgtctcccctaatggctttgtcttaatttaagcacctctttaaagaccctgtctctaaatacagtcacattatgatacttgaggttagcaatttaacatacgaattttggaaggacacaagtcagccttaacacccacattaccatatactacaacatgctcctgtcaaatccagaaattagcttggtcttggttacttacacaggtggtcaaagctctgaggctgagttttgtttgtttctctttcagcctttcagcaataatggctccaggctgacatatctgggatattattccatgtatttgctatttmtacccattatgctatctctacttctagttttattaaacaaatattaatagct

SEQ ID NO: 419910 - DNA, 535 bp, Homo sapiens
tttattaaacaaatattaatagctacctctgtagtatatctctgtcctcaaatgtttttgtctgtttgatatttggtttagatcaggaatcacaaattaaatccctacagagaatgagtagacagcacaaatgatgaaattggcccagcataggctaacaggagtgttgagatatatggtgaaccagaaatgagaaagccctggcccttctaaagggagaagtgctgctgatctctacttgcttggagccatgtggaaattctggtagtactaggttttctggtttttacagtgaagttgggaatacagattttaattgaatacttataatttaaaatttttgaactatttcaaataaaatactgtgttggcccttagtctatattccctcataaatattgtgtcttgcatctactagagatgctgtttccragcccatggtcaatatagaaattctcattgagaataggaaatactagaatagggtgttcatttgtagaagatagagacatttctattttctaggattcacctt

SEQ ID NO: 419911 - DNA, 349 bp, Homo sapiens
gaaagtcttaaaaaataaaaaaacataatgaaataaacatcagttaacaattatatgacaataaaattggcaacctttaaaaaagacaaatgtgccctaagacccaggattacccagcttaaaattttaaatgctgtttggtagtatcttccatattcttggttttctctctttcccagaaggtctttcccatctgagaaaaagttaggaaaaaagtcaaggccattaataacattgaacccctggtctgaagcataaaattatctctgcccctttctgtttcagtatatctcaagaaagggctataattactattaatmgcctgaatcaaagaaattctaaaaattat

SEQ ID NO: 419912 - DNA, 594 bp, Homo sapiens
ttcatttaacaaatgaggtaactgagtacagggtaacttgcccaaggtcgcatagctactaaatggcagtaccatattttttatttcaggaaatttggcccttaaatctttgttcttagcttgctgtattgttcckctaatgttggctcacttgccattttgccaaagcttcattatgatgtggggttacaaacgtctgagtttattgaagggggaatttctgtttccaatattgttctggggtaaattacacaagaaggggcttaccatgatctttaagttgctcctgtggttaaggttttagggtagacataattattttccttaaaggtttaaacatctggttagagtagcaggagtattaaaatagtataacttggaaaaagaagcataaagccatctgattgcattgattaattcctcagggattttgatctcctctctgagtctgggcaattcacctaactctttaaaaaacaactttcatgagatatatagttataaactatatgcttaaagagtacaatgagttttgacaaaaaaaatggtgaaaccatcaacatctagatgatgaatacatgcatcatatcagta

SEQ ID NO: 419913 - DNA, 489 bp, Homo sapiens
ttaatttgcctttccctaatgactagtgatattgagcaccttttcatgtgcttatttatcagctctatgtcttttwttattattattatacttaagttttagggtacatgtgcacaacgtgcaggtttgttacgtatgtatacatgtgccatgttggtgtgctgcacccattaactcgtcatttagcattaggtatatctcctaatgctatccctcccacctcgccccaccccacaacacgtgatggttgacttttttgccgcctactatttatttacttttaacattgagatttgagagttgttctttatatattctgggtacaaatcctttatcagatgtatgccttgcacatgttttctttcagtctgcggtttgtcttttcatttctcttaatagtgacattcaaagaacagttctcaattttgatgaggtcaaatttataaacttatttgtcccactgaaaggtagattcagagttgtacttaa

SEQ ID NO: 419914 - DNA, 518 bp, Homo sapiens
agtggggagttacactccagtggctggagttggaaatgaagtattgacttgagccagtgagagaagccagaaatgaggccataatcctggaaagctgggtctgaatggcaacaccaaattgagcaggggtgaatgcagaagtcatttgctagcgcgtactgtaaagagtaggatcagaggatcatgccagcagcatggtaaaatattttgatggctttccacctttggctacatctggttctgacatctctttcacctagcttgccttaaaggtgacctcctttgtcaactgtctattcttataatacatggtctccattcacttgaacctgtttkgtgagttcatagatcattacaagtggcagaaaaactgagtgatcctgtagttcacccccccatttaacacataatgaataagatactttatgaaaaacaaacataatgagacacatatgacactgtgatgattccatgagcaaccaaccagatgtcaacaagctttgaggagattcttcaag

SEQ ID NO: 419915 - DNA, 594 bp, Homo sapiens
acactgtgatgattccatgagcaaccaaccagatgtcaacaagctttgaggagattcttcaagacctttctacatcatggattcatcctgtrtaatacctgccttccctttgtaatttcatagttcaaaggtcaaatgaaatgatgcttatgaaagctctttaaaaattatgaaggctgcagggaaataaaactcaagactcagacagtgatgcaggcttgtttaaaattatagactgggtaatcctaggaaacaatttagagaatttggggaaacttgtttacagttcatattaaaaaaggaatgaacaggaagtatctataagctagggaaaaagacacaataataacaacgagaaccaccatttgctcaatgtgtattgtgttcttggtgttctcattttattctcacaatgaccttatacatcattacctctgttttctgagtgaggcaactgacactttgagaggctaggaaaatcctccaaggccaagcaattaggaggagctaaggcaagatttggaacgtatcagtctcactgcaagcccatattgttaactgaccacatgaccttgcttctttaacaaaaacaaa

SEQ ID NO: 419916 - DNA, 612 bp, Homo sapiens
aggaaacaatttagagaatttggggaaacttgtttacagttcatattaaaaaaggaatgaacaggaagtatctataagctagggaaaaagacacaataataacaacgagaaccaccatttgctcaatgtgtattgtgttcttggtrttctcattttattctcacaatgaccttatacatcattacctctgttttctgagtgaggcaactgacactttgagaggctaggaaaatcctccaaggccaagcaattaggaggagctaaggcaagatttggaacgtatcagtctcactgcaagcccatattgttaactgaccacatgaccttgcttctttaacaaaaacaaaacttcttggaggtttgggtgctatatacatacatatatgtgtttatattacattatataattttatatatatatatattttttttttttttttgagacaaagtcttattctgtgagccaggctggagtgcagtggcacactctcagctcactgcaacttctgcctcccaggttcaagcaattctcctgcctcagcatccagagcagctgggattacaagcatgtgccaccatatgcggctaattttttttttctttttttaagta

SEQ ID NO: 419917 - DNA, 612 bp, Homo sapiens
aggaaacaatttagagaatttggggaaacttgtttacagttcatattaaaaaaggaatgaacaggaagtatctataagctagggaaaaagacacaataataacaacgagaaccaccatttgctcaatgtgtattgtgttcttggtgttctcattttattctcacaatgaccttatacatcattacctctgttttctgagtgaggcaactgacactttgagaggctaggaaaatcctccaaggccaagcaattaggaggagctaaggcaagatttggaacrtatcagtctcactgcaagcccatattgttaactgaccacatgaccttgcttctttaacaaaaacaaaacttcttggaggtttgggtgctatatacatacatatatgtgtttatattacattatataattttatatatatatatattttttttttttttttgagacaaagtcttattctgtgagccaggctggagtgcagtggcacactctcagctcactgcaacttctgcctcccaggttcaagcaattctcctgcctcagcatccagagcagctgggattacaagcatgtgccaccatatgcggctaattttttttttctttttttaagta

SEQ ID NO: 419918 - DNA, 503 bp, Homo sapiens
agtgatttcaatttgtctgacatatattgggtcactgacaataagcagtccaacctttaatttaaattgactatactctgcttagaagagaaaatcayctcaatctgtaattaaaatgtcataatttcttgacgcatgtgtacttctgagtgataggttacctgtagttcactcatcatgaccaatttaaacagaaatatactcctattattccatacgttatcaaaaataccatccaatacaccaaatttaattgattgttatctaaccataatgtgctgttacaaagagtattgttcatatgtcaatgtttctaaatcactctgcacatgttgtgaaagtgggagtaacatttcagatattttattcacatcaaattattatgatagtgaggcagaaatatgagaaacaatttatttcaatggagataaattgatcaatgtttagtatatattacatagaaaaactatttcctatgaaaaaatgatccagaggaatctgaa

SEQ ID NO: 419919 - DNA, 581 bp, Homo sapiens
accactctcaactagactactgattgaagttagatttcttttatttttagttgttcttattttctactaggtcaatgcagctaaaagttgctttaaaaatttttatctctgtgtggtttatatcactaactggatatacagataawtttttttctttgtttctggtttggttttaactttacatgttgctttctatttttatcagatttcattttaggtgttttaaaaacacttaagaatgaaaagctttataacaagttatatttttaaaggctttcatctttacttgcctcctctgtttcttcttcctctccatttttattgatttttggttcatctttttagtgtctttttgctttttgtaatattagatctattgttacataacttctgtctatttttttttctttgagatggagtctcgctctattggagtacaactgtgtgatcctggttcactggcaacctccgcctcctgggttcaagcaattctcctgcctcagcctcccgagtagctgggactgcaggcacttcccaccacgaccagctaatttttgtaattttagtagagacagagtttc

SEQ ID NO: 419920 - DNA, 597 bp, Homo sapiens
acagcaaatattaaatagtatttagtggtcaccatttcaataagctcattagaggtccctagtctaacttctatagagttatgaggctataatagaaacatttaccaraagtgctaagccatttttcacaatgatttggtgtccccaatactgaagagaatcgttttggaacacattttcacagatcaccttaattcaacctgaactaaattcgtttatgagagctgctgagctatacatctcaacttatctctgccttgaatttgcctacgatggatatcgttcaaactgcatggatcattgagcagagaagaacatttctgcccttccttgtccttcctaataatcagaaggaaattgcaacttgttatgtgtttccgtaacgaagattttagaaatggcctttgcatatagcctagaaaaaggcaatataaattggccttctcagtcctttgtgcttattgttgtatctgttgagagctgtgacatatgtgaccaacaggacagaatcaaactcggagaagctgtgaggtgtaactaactctctggacctaagacacacttgctgaatttagcccccaaaccagaaccgtggaa

SEQ ID NO: 419921 - DNA, 597 bp, Homo sapiens
acagcaaatattaaatagtatttagtggtcaccatttcaataagctcattagaggtccctagtctaacttctatagagttatgaggctataatagaaacatttaccagaagtgctaagccatttttcacaatgatttggtgtccccaatactgaagagaatcgttttggaacacattttcacagatcaccttaattcaacctgaactaaattcgtttatgagagctgctgagctatacatctcaacttatctctgccttgaatttgcctacgatggatatcgttcaaactgcatggatcattgagcagagaagaacatttctgcccttccttgtccttcctaataatcagaaggaaattgcaacttgttatgtgtttccrtaacgaagattttagaaatggcctttgcatatagcctagaaaaaggcaatataaattggccttctcagtcctttgtgcttattgttgtatctgttgagagctgtgacatatgtgaccaacaggacagaatcaaactcggagaagctgtgaggtgtaactaactctctggacctaagacacacttgctgaatttagcccccaaaccagaaccgtggaa

SEQ ID NO: 419922 - DNA, 428 bp, Homo sapiens
atattttagtatttggaccacaactactaactataagaccctgcttttcaarcctccggttcctcattattaatgttagaaaattagaagaatagtacctacttcttaggaatgtttgaaaattacttcatttacaacgcatataaagtgtctgaaacatggaagatgttcagtaaatactgagtcccttcatctatattcatgctaatttttcagtccagtgattctagttatgattagtattagacttggggtgagttaaaggaggaaacgatcaatttaaagccaatttgaaatattcatctccagggaaaagggaaacagtggagggctaatgagctaatatatgtggcagccccttggtgagatgtgcaaatgaaatcccctctaagcttatttcatagatcaacactgagtataagaattag

SEQ ID NO: 419923 - DNA, 622 bp, Homo sapiens
gatagaggaatcaggccaaacctaaaaaatttttcattcaacatatgtttattaatgacttattatcttctaggcactattccagtcacyaagaatatatctgtgaagaatgcaggtgaagtaccaccctctcagagataaaattctttcatctttcattattaatagaatttcattatagtcactaaaaatactttgcatgaattccacttatttaaatttgtttaggttttgtgtgtgtgtgtgtgtgtgtgtgtgtgtgtgtgtgtgtgcttcatgcatgttaaaaccttgttgttaggtaagtgcgtacctgtttaggattgttatgtgttctccaaactccttttgcttattgtttgcatggtatcttttttcatccggttgcttttaatctttgtaagtctttatgactaaactggctttcttgagcccagcacctagatctttttaaaaagttaatgtaactacttcgatcccttaagtggaatgatagacaatttccattgaatgtaattgttggtgtggctagacttaaatctaccattttattttactttttatttttatagatttgtgggtacatgtgcagatttcttacctgcatatattgtgtagtggt

SEQ ID NO: 419924 - DNA, 622 bp, Homo sapiens
gatagaggaatcaggccaaacctaaaaaatttttcattcaacatatgtttattaatgacttattatcttctaggcactattccagtcaccaagaatrtatctgtgaagaatgcaggtgaagtaccaccctctcagagataaaattctttcatctttcattattaatagaatttcattatagtcactaaaaatactttgcatgaattccacttatttaaatttgtttaggttttgtgtgtgtgtgtgtgtgtgtgtgtgtgtgtgtgtgtgtgcttcatgcatgttaaaaccttgttgttaggtaagtgcgtacctgtttaggattgttatgtgttctccaaactccttttgcttattgtttgcatggtatcttttttcatccggttgcttttaatctttgtaagtctttatgactaaactggctttcttgagcccagcacctagatctttttaaaaagttaatgtaactacttcgatcccttaagtggaatgatagacaatttccattgaatgtaattgttggtgtggctagacttaaatctaccattttattttactttttatttttatagatttgtgggtacatgtgcagatttcttacctgcatatattgtgtagtggt

SEQ ID NO: 419925 - DNA, 485 bp, Homo sapiens
ctttgcatgaattccacttatttaaatttgtttaggttttgtgtgtgtgtgtgtgtgtgtgtgtgtgtgtgtgtgtgtgcttcatgcatgttaaaaccttgttgttaggtaagtgcgtacctgtttargattgttatgtgttctccaaactccttttgcttattgtttgcatggtatcttttttcatccggttgcttttaatctttgtaagtctttatgactaaactggctttcttgagcccagcacctagatctttttaaaaagttaatgtaactacttcgatcccttaagtggaatgatagacaatttccattgaatgtaattgttggtgtggctagacttaaatctaccattttattttactttttatttttatagatttgtgggtacatgtgcagatttcttacctgcatatattgtgtagtggtgaagtctgggcttttagtgtacccacacccaaatagtgaacattgtacccaacagg

SEQ ID NO: 419926 - DNA, 622 bp, Homo sapiens
gatagaggaatcaggccaaacctaaaaaatttttcattcaacatatgtttattaatgacttattatcttctaggcactattccagtcaccaagaatatatctgtgaagaatgcaggtgaagtaccaccctctcagagataaaattctttcatctttcattattaatagaatttcattatagtcactaaaaatactttgcatgaattccacttatttaaatttgtttaggttttgtgtgtgtgtgtgtgtgtgtgtgtgtgtgtgtgtgtgtgcttcatgcatgttaaaaccttgttgttaggtaagtgcgtacctgtttaggattgttatgtgttctccaaactccttttgcttattgtttgcatggtatcttttttcatccggttgcttttaatctttgtaagtctttatgactaaactggctttcttgagcccagcacctagatctttttaaaaagttaatgtaactacttygatcccttaagtggaatgatagacaatttccattgaatgtaattgttggtgtggctagacttaaatctaccattttattttactttttatttttatagatttgtgggtacatgtgcagatttcttacctgcatatattgtgtagtggt

SEQ ID NO: 419927 - DNA, 591 bp, Homo sapiens
agacaatttccattgaatgtaattgttggtgtggctagacttaaatctaccattttattttactttttatttttatagatttgtgggtacatgtgcagatttcttacctgcatatattgtgtagtggtgaagtctgggcttttagtgtacccacacccaaatagtgaacattgtacccaacaggtaatttttaaccttcactccgctgacttgcccacatttgtagtctcctatgttgactattccactctatatatccgtttgtccacattgttcagcacccacttctatgtgagaacacatggtatactagtcctttctcacattgctataaataactacctgaaactggttaatttataaagaaaacwggtttaatcgactcacagttccataggctgtacaggaagcatcactggggaggactcaggaagcttccattcatggcagaaggcaaagaggaagcaagcatgtcttacatggctgcagaaggaggaagagagtgaagggggtggtgctacacacttttcaacaaccaggtcttgtgagaattcactatcacaagaacagcaaggggaaatccacccccgt

SEQ ID NO: 419928 - DNA, 591 bp, Homo sapiens
agacaatttccattgaatgtaattgttggtgtggctagacttaaatctaccattttattttactttttatttttatagatttgtgggtacatgtgcagatttcttacctgcatatattgtgtagtggtgaagtctgggcttttagtgtacccacacccaaatagtgaacattgtacccaacaggtaatttttaaccttcactccgctgacttgcccacatttgtagtctcctatgttgactattccactctatatatccgtttgtccacattgttcagcacccacttctatgtgagaacacatggtatactagtcctttctcacattgctataaataactacctgaaactggttaatttataaagaaaacaggtttaatsgactcacagttccataggctgtacaggaagcatcactggggaggactcaggaagcttccattcatggcagaaggcaaagaggaagcaagcatgtcttacatggctgcagaaggaggaagagagtgaagggggtggtgctacacacttttcaacaaccaggtcttgtgagaattcactatcacaagaacagcaaggggaaatccacccccgt

SEQ ID NO: 419929 - DNA, 475 bp, Homo sapiens
acactttgtctctgactcctttctcacactcctctcyctcttattttgttactattatgctgatggtggttataacattgaaattctgctctgacactataaatctactcttaatagttctccatcttagttttatatttaaatagaatcagtgctcgctataatttctccattgctaagttattaaggtgattttttcttaaaagactggattttgctgctcaatagtagaaagggtggtggcttaatagttatagtagttttgttttagaaaggtcttatggggatgattccagtatgcatgcttgtctttcttacttaaagaacaacctgactcagagtaaatatcctaagattaatttatctcattgataaatgtgttcacattgtttcaccatcttttggtataaatatgtggctttggttagagcctaaggccaaaatgatttttttccttgtctgtgacatgcttttt

SEQ ID NO: 419930 - DNA, 475 bp, Homo sapiens
acactttgtctctgactcctttctcacactcctctccctcttattttgttactattatgctgatggtggttataacattgaaattctgctctgacactatraatctactcttaatagttctccatcttagttttatatttaaatagaatcagtgctcgctataatttctccattgctaagttattaaggtgattttttcttaaaagactggattttgctgctcaatagtagaaagggtggtggcttaatagttatagtagttttgttttagaaaggtcttatggggatgattccagtatgcatgcttgtctttcttacttaaagaacaacctgactcagagtaaatatcctaagattaatttatctcattgataaatgtgttcacattgtttcaccatcttttggtataaatatgtggctttggttagagcctaaggccaaaatgatttttttccttgtctgtgacatgcttttt

SEQ ID NO: 419931 - DNA, 475 bp, Homo sapiens
acactttgtctctgactcctttctcacactcctctccctcttattttgttactattatgctgatggtggttataacattgaaattctgctctgacactataaatctactcttaatagttctccatcttagttttatatttaaatagaatcagtgctcgctataatttctccattgctaagttattaaggtgattttttcttaaaagactggattttgctgctcaatagtagaaagggtggtggcttaatagttatagtagttttgttttagaaaggtcttatggggatgattccagtatgcatgcttgtctttcttacttaaagaacaacctgactcagagtaaatatcctaagattaatttatctcattgataaatgtgttcacattgtttcaccatcttttggtataaatatgtkgctttggttagagcctaaggccaaaatgatttttttccttgtctgtgacatgcttttt

SEQ ID NO: 419932 - DNA, 621 bp, Homo sapiens
tcttttgtaagacttggatagttttcatatattattttgttaaacagatttcctatgcctttgcccatctcttctccttctggacctcccaaaattagaaaattttgttgctttatggtgttctatatgtcacttagcatttcctcattctttttttattctttctttctttcttttttttttttttttttgagatgaagtctcactgttgcccaagctggagtgcagtggtgtgatctcagctcactgcaacctccacctcccatkttcaagtgcttctcctgcctcagcctcccgtagctgggactacaggcacgtgccaccatgcccagctaatttttgtatttttagtagacacagggtttcactatgttggccaggcttgtcttgaactcctaacctcatgagccacccgccttgacctcctaaagtgctgggattacaggcatgagccactgtgcctggcctcttttttatttctttttaattttctgtctaactgggttatttcaaaagacctgtcttcaagttcagaaatgatttcttctttatgatgtagtctattgctgaagctctcaattatatttttattttattcattggattcctcaattccaggat

SEQ ID NO: 419933 - DNA, 589 bp, Homo sapiens
gtctacatgatcattttctttttaagctctttttccattaaagatgtgtcctaacattttacatggtttttctgccctctagtctattcagctacccattattaattatttgtaaacacaaacttacatatgctaagggaacttccatttaaaggcattcaatgttgaattcctttataatgtctgcatttaataaagtaaaaggagtgagaaaaaagatctgggaacagggcactggctatgtaaggagrgcaaggtgggggcagggagttgggggcttggaatttggtgtttgatgtttgaaaggagccatggctagggcacatgtcaatacattgtgtaaaccaaaaattaaattctaagctcccgactgactgatgatggacccccattctcagccaaggacattccaaagtaaacctgaaaaactagttcaggccacattgacaagggatggttcaacaggccacatcataccctcctgcctttggaatttaggcacaactgaccagcattaatattaaaacagagatcttaagaccgacaaaatagactctttgtaataataaggtatccaattccaacatga

SEQ ID NO: 419934 - DNA, 589 bp, Homo sapiens
gtctacatgatcattttctttttaagctctttttccattaaagatgtgtcctaacattttacatggtttttctgccctctagtctattcagctacccattattaattatttgtaaacacaaacttacatatgctaagggaacttccatttaaaggcattcaatgttgaattcctttataatgtctgcatttaataaagtaaaaggagtgagaaaaaagatctgggaacagggcactggctatgtaaggagggcaaggtgggggcagggagttgggggcttggaatttggtgtttgatgtttgaaaggagccatggctagggcacatgtcaatacattgtgtaaaccaaaaattaaattctaagctcccgactgactgatgatggacccccattctcagccaaggacattccaaagtaaacctgaaaaactagttcaggccacattgacaagggakggttcaacaggccacatcataccctcctgcctttggaatttaggcacaactgaccagcattaatattaaaacagagatcttaagaccgacaaaatagactctttgtaataataaggtatccaattccaacatga

SEQ ID NO: 419935 - DNA, 596 bp, Homo sapiens
actcccttaggggtgatattgttcccaatgtgtttactgtgtttaagagatagattggacgaatgatgtggtgtaagagaaattttatatctcataaaggatatgcagtagtcaggactgatgaactatttgaatggaaaacatcagagccaaagtccattgttttggagttatataaaaaaggacacttcttttaggagaaactactagatgctatattggcaatgtgaggtctggtcaggtttgaattcatctgttgtccatggatgtgtctttcccattacaaccacatgagattcattcattcattccgctaatacttattcatcagtttctacgttgtatgttaaagtggtatctatcacctgtccgtagaaaagtaaatacttgctgtaaaatcagaattatgtcatgcactaatcaaataatcctacttattaggctactgctggtatcttttcrtatgatccaggttaattattgcagagattgtttcagtagcctcatatatcaattataaattcctatacttggattctttccaagtataggaaagtttccttaaagagaattcattaaagagcaagaggtatgct

SEQ ID NO: 419936 - DNA, 467 bp, Homo sapiens
actcacagttcagcatggctggggaagcctgaggaaacttacaatagtggtggaaggtgaagggaaaacaaggcaccttcttcacgaaayggcaggaaagagaaacgcggaaagaagggagaagacccccttatataaccgtcagatcttagcgaactcattccctatcacaagaacaacatggggaaaaccacctctatgattcaattacctctacctgctcccaaccttgacaggtggggattatgaggattacaattcaagataagattctgggtggggacacagccaaaccataccagtaagccatctagtaataatagattaatcatgtgcatggaatacattgattaaaatgtatactattaatatttacagtagaagtattagatggcagaatgaccacttcaagaaatgtatctcacagtataaagctggtgaaaatctcccaggatgccagttaaaga

SEQ ID NO: 419937 - DNA, 536 bp, Homo sapiens
ttaaacacatgagtagaggtagctggaatgtagcgtgtagacacatgtatacacacacacacaaacacacagaaaaacataagaggcatayacaccatggtgaaaagttctaacatatgtgtaactagaatgacagaataagggcagtaaaagaatgggaagaccaatatttgaagaaataacagctgtttatttaccaaaacttgcaaaaagtttcaagccaccgaactaggaaccctaaatgaaataaatataatgaatgcttgagcaaagcatagtaaaactaccaaaaaaccaaagtataaggaaaaatcttaaaaaggccagaaaaaagacataatacttaaaaagaagtaataagtgtatcagctgactttctaaaaggaagtagcaagcaaataataagacgatattctcaaagtagctgatagaaaacagctgccaatctagaagtctatgccaagcaaacataccctataaaagtgaggatgacatcttcagagactataaaatcattagaattaatcaccagcaag

SEQ ID NO: 419938 - DNA, 257 bp, Homo sapiens
tccttggaaccatttataaagtcctgagccacatgagctctcaccactctctatacaatgacagatccatagactttcagtttcwttcagtgtttggggcaaattgcgacgcatctccctcccagcttatcaaaagacaccatgatacatctgactcctttgcctgaataattcctatacattcactaaacaccagtaagtttgttttcagtttgtatcagacatgtgctatatgtttgggatacacatttacatat

SEQ ID NO: 419939 - DNA, 617 bp, Homo sapiens
tatgtatttctaaaagatatggtctcagaagtggaattctatgctaattttattttctttttcatagtttttattttctctgttacctggtttatttttacaaatgagaacatgtttttaaacagacaaaacaataaaccttttccatatgtataacaattattaattttttaaagatggagaaaagaagacgcaaaaatggtccacatatcccacatacawataatctcactgatatttttaaaatcaaagtaacactttgaaaattcaaacaaaagaattatacaaataagaactaaaaatcttgtctcatttcccatctccagagataaccattgttgccaatacttcttgtatgtatatccagaaaataattctacacatatgccaccgtatatatgtgtgtttgtatattcactgttttttcaatataagatatagtttaatatatcttataagtcattacatatatgcacatagaaatgtactaggtatttctaaataaatgtatactttaccgttgtatccctagtggcggtcatttgggtcgtttctaggttatattctttatggacatttaggttgtcctggttttttgtttctacagactgtgctag

SEQ ID NO: 419940 - DNA, 617 bp, Homo sapiens
tatgtatttctaaaagatatggtctcagaagtggaattctatgctaattttattttctttttcatagtttttattttctctgttacctggtttatttttacaaatgagaacatgtttttaaacagacaaaacaataaaccttttccatatgtataacaattattaattttttaaagatggagaaaagaagacgcaaaaatggtccacatatcccacatacaaataatctcactgatatttttaaaatcaaagtaacactttgaaaattcaaacaaaagaattatacaaataagaactaaaaatcttgtctcatttcccatctccagagataaccattgttgccaatacttcttgtatgtatatccagaaaataattctacacatatgccaccgtatatatgtgtgtttgtatattcactgttttttcaatataagatatagtttaatatatcttataagtcattacatatatgcacatagaaatgtamtaggtatttctaaataaatgtatactttaccgttgtatccctagtggcggtcatttgggtcgtttctaggttatattctttatggacatttaggttgtcctggttttttgtttctacagactgtgctag

SEQ ID NO: 419941 - DNA, 419 bp, Homo sapiens
cactaacctcatttatgagggctgcactctcatcacctaatcaccttccaaaggccccacctstaataatactgtgacactgcgtagcaggttttaatataggaatttgaacaaggacgcaaacattcaatctatagaaaatatttattttatacttggagttatcatccaatactatgctgttcattatgttgctcagactgatccacatttggacactggaaattctttcagactggctcctgttccctttggcatgcccacttaagttatatttttgaacattttctggccatacaaggtactccaagtttatcctatataatacccttctcaatcatagaattagcatttccccagagagtcttggttcctcaaagaaaaatcttgttggagaatggttatttagcaatcaagat

SEQ ID NO: 419942 - DNA, 596 bp, Homo sapiens
tgccgcctggtgaaggcccatgtcctggttcatagaaggcagctgcctttttattgtgtcctcacatgctgaaaggggtgagagcattctctggagtcttttttaagaagggcactaacctcatttatgagggctgcactctcatcacctaatcaccttccaaaggccccacctctaataatactgtgacactgcgtagcaggttttaatataggaatttgaacaaggacgcaaacattcaatctatagaaaatatttattttatacttggagttatcatccaatactatgctgttcattatgttgctcagactgatccacatttggacactggaaattctttcagactggctcctgttccctttggcatgcccacttaagttatatttttgaacattttctggccayacaaggtactccaagtttatcctatataatacccttctcaatcatagaattagcatttccccagagagtcttggttcctcaaagaaaaatcttgttggagaatggttatttagcaatcaagatctggactatactgctttttagaaatactttgttttcccattttttatgttgtgttcttagattac

SEQ ID NO: 419943 - DNA, 596 bp, Homo sapiens
tgccgcctggtgaaggcccatgtcctggttcatagaaggcagctgcctttttattgtgtcctcacatgctgaaaggggtgagagcattctctggagtcttttttaagaagggcactaacctcatttatgagggctgcactctcatcacctaatcaccttccaaaggccccacctctaataatactgtgacactgcgtagcaggttttaatataggaatttgaacaaggacgcaaacattcaatctatagaaaatatttattttatacttggagttatcatccaatactatgctgttcattatgttgctcagactgatccacatttggacactggaaattctttcagactggctcctgttccctttggcatgcccacttaagttatatttttgaacattttctggccatacaaggtactccaagtttatcctatataatacccttctcaatcatagaattagcatttccccagagagtcttggttcstcaaagaaaaatcttgttggagaatggttatttagcaatcaagatctggactatactgctttttagaaatactttgttttcccattttttatgttgtgttcttagattac

SEQ ID NO: 419944 - DNA, 596 bp, Homo sapiens
gctgtctatttgcatggaatatctttttctacccctttaccttgaatgtatgttagtcctcatgttttaggtgagtctcctgaagacagcagaaacttggttggtgaattcttaatcaattctgccattctgtatcttttaagtgaagcatttaggtcatttacattcaatgttggtattgagatgtgaggtactattcaattcattgtgctatttgttgcctatacctcttttttaaattgtgttattgttatataggtcccgtgagattcatgctttaaggaggttctattttggtgtatttcaatgatttgtttcaaggtgtagtgctccttttagcagttcttgtagtgctggcttggtagtggccaattttctcagcatttgtttctctggaaaagactatatctttccttcatttatgatgcttagtttygctggatacaaaattcttggctgataattgttttccttaaggaggctaaaaataggaccccaatctcttccagcttgtagggtttctgctgagatatctgctattactttgatagattttccttcataacctacctgatacttttgactcacagctctta

SEQ ID NO: 419945 - DNA, 563 bp, Homo sapiens
ccagaaactctaaagaggttatttctgaagtggctgtggagttatgaaatcaagaaggtacccatattgcattttgtaatcatgccacaactgctgcttcatacttaggaatctagagaacagactatggaattccactgtgtctaagtcatgtagagaaccctaacagaaggagggtatgatgagattasgtggtcaatccacaatgtttccctcagtaggtatgaggaacaggattaaaaacatgtccattacaatcgtatttttccctccttatcctaggaagccaggtgattacttactgtgtactcaaacaagagaagagacatttgtttttctggataaatttattataggatacttgacaccaggggcaatgaatgacaagagtgaggcactgtactgaaaacagaggaatcaaatatagagaatgatgaaacttcacgctcctcttacaaagaaaaagcaggccatgcataagagggtttaaggggtaagaatctgaattatagctgctatggtctgaatgtgtccttcaaaatgtatgtgtccttcaaaatgta

SEQ ID NO: 419946 - DNA, 605 bp, Homo sapiens
ctgcccaatgggcaattacacatcatactccaaaagacacacaggatgttttgctaagaaaaatcaatgggaacagggattcccctgggaaactccctcaaactcatccctctcaggggacgggaaatctcccaactattttcctgatggcagctgtggttcactagaaatagatccccttcctgtttcttataaagaacattttctttcgattttttgaagtcttcatttgttacttttattctaagttctcttaaggacttcagaccagcttttgtacagattgctttgatgtcatcaccagagaggtcatctttagccatgatcaagtcaygcagggttacatcatcggccaccctcatcctgctagtgtgaatctgaatgatgtgcttctcattcttttcatcaggcaggaggacctcgatcttcctgtcaatgcagcctggtctgataaatgctggatccaaagtttctatttggtttgtggccatgatagctttcacatctcccctagaatcaaatccatccaactggttcaacagtttcaacattgttcactgaatttctctctcaccaccagaatttgagttatatctttttgaacc

SEQ ID NO: 419947 - DNA, 439 bp, Homo sapiens
tcttggcaagctgaagaacaccaaaatattgtcaggaaaccaccagcagtcaggggagagaacagattcttactcacagacctcagaaggaatcaaccctgctaacactttaattttggatttctggcccctagaactgtgaaacaaatttctattgtttgagccacccagccctagcaaactgatacagatttcaatrcagaaagaactatgctgacaactgataaccaaaaattgagtaggggctatatttctttcttatttttcaagtctatttctgtctcttgaatcctctgtaattaaccttcaatatcttctggtacattacttagcaaatagtgtatttgtcactgtaaaaagaaaagagaaagaaataaaactaacttccacaatggcacaatctttctatttccaaatatatacctatgcagattgattt

SEQ ID NO: 419948 - DNA, 532 bp, Homo sapiens
ctgacaaatacaaagaatcaaggatcaaaatcaaaggcaggttataagagtatcaagaaattcttaaaaaccaaaaagtgatttggaagcacaaaacttatacttaacgctactaaaggtcatgatgggccaagaacatcgtggcttcctaagttagaaaagaccatataccaaaattttaaattgaacatacttcttttttttcaatctccccctctcccagaaaaaaataggaactcattttttttcagggtggcrgggaggaaaggggaccatgggacatggttggaaacagagttatattagtagtgtttttgttgttatgataaactttgtgtttaaactcgattgagaactcattagctgccaagggggcataaggaattaactatctatgttatattgttcgcttgtgtagtactataggtgatacttgcctaatatgcatgtgctgtaaaaattgttaacagggaaatatcttgagatgatgactagctttgtttaatgtcttatgaaaatttcatgaacgatc

SEQ ID NO: 419949 - DNA, 557 bp, Homo sapiens
gtacacagtttatcaaagttattttaccatcactcctaatggaggattgtgtcttcagttctttttccttgctctatcactggattgtataacacacacaaataaggaggagttggttgcttactggcaggaatagaaacactgattatggcttcctcttargtctttttcaatctgtttgttttctgtaatcattttatacatgtctgccaacaaaccctccaataagaattaaatgaagttcttccacttatagaaattttaccttcctgggccactagatatttactatatttcttaaatattctcaagtaacatttaaaaaaattttttaagcatttttttttcacagaagccaatcactctcttgccaccttcaggcaaacccacttttgaacgcccatttttactttgcaaagcaatattttgacttccagatctagagtcttaacaatgccaaagcaaaccataactctcctgttacagaatgctgaacactggaaaataagttagtgacctcacctctagatacatgcttaatatcacacatttgtatt

SEQ ID NO: 419950 - DNA, 584 bp, Homo sapiens
cttttaaagataaaatttctcccaacacttttttgtggtaaagtttgcataatattcaccatcttaatctgaaacatttagtgcagacacaatattatgcgaccatcaccgctaaataggtccagaacattctcatcacccacaaaggagagtgaatatccgttaagcttgtgtttttggtctttatggattgacctgttatatatatttcacattacattacacgtgtgtgaccttttttttaaaccttctttcactawgcataatattttcagtgttcatccatactgtagcaggaatcagtatttcatttcttttcatggctgaatagcattacattgtatggatgtaccatattctgtttatctgttcctcaggtgatgaacctcttggttgtttccactttgctgccattgtgaaaagtgccgttataagcatttgtgtacacattttttatctgaacagctgttgtgatggtttattttcagtggcaacctgactgagttaaaagatatccagatagctggtaaaggactatttctcaatatgtctatgggggtgtttctggaagagattggcatttg

SEQ ID NO: 419951 - DNA, 587 bp, Homo sapiens
agtggctcacgcctgtgattccagcactttgggaggccaaagctggtagatcacttgcagccaggcattccaagactagcctggccaacacagtctctactaaaaatgcaaaagaactagccaggtgtggtggcaggcctctgtaatcccagctactcgggaggttgaggcaggaggattgcttgaacccaggaagtagagattgcagtgagccaagttcatgcactccagcctgggtgacacagcaagactctgtcccaaaacaaacaaacaaacaacaagcaaacaaacaccaaatattcarcaataaaaataatagcaactattcctacccatagcactcaactgtatatagattacctcattcaaacctcaaaacatccttatgggtctagaaaaattattatgaccatttaacaaggacaagctgaggcttagaatggaataatagtactaattatttgatgaatttttattaaagtatagtagcattggtattatgcctgcacagttagtgtatttgacaaaagtccccaatattttcatgtgttataagcttcaggagcagattttaaaaattatttttc

SEQ ID NO: 419952 - DNA, 587 bp, Homo sapiens
agtggctcacgcctgtgattccagcactttgggaggccaaagctggtagatcacttgcagccaggcattccaagactagcctggccaacacagtctctactaaaaatgcaaaagaactagccaggtgtggtggcaggcctctgtaatcccagctactcgggaggttgaggcaggaggattgcttgaacccaggaagtagagattgcagtgagccaagttcatgcactccagcctgggtgacacagcaagactctgtcccaaaacaaacaaacaaacaacaagcaaacaaacaccaaatattcagcaataaaaataatagcaactattcctacccatagcactcaactgtatatagattacctcattcaaacctcaaaacatccttatgggtctagaaaaattattatgaccatttaacaakgacaagctgaggcttagaatggaataatagtactaattatttgatgaatttttattaaagtatagtagcattggtattatgcctgcacagttagtgtatttgacaaaagtccccaatattttcatgtgttataagcttcaggagcagattttaaaaattatttttc

SEQ ID NO: 419953 - DNA, 589 bp, Homo sapiens
gtgaactaagtacttggactagaagattaaatagcacttggtgggttcctttgagaaactgataaccttgagagtagaactgacacaaacagatattttaataagatattttgagtcctaaattgtactgtaaagtataggaaagatgacctttcatagctatgtatttttacacaaattgcttaaatattggtgccttcattcccttgtctctaaaattgggatggtaatagtaacacctacttcatgggtttgttgttaggtttaaattagttaatacacataaagtactaagaagagtgcttggtatacaaaatcactctataaatgttatttattgattctcctcaaatcataatttatataaacagttagcaaggtgtcaggcacttaagaaaawctcagtaaacattagctagtgttatagtccattatggaaacacagaattgggcctctgtgttaataaccaaactcaagatcacgtgctttatttgaatgcactagacacatttttagtaaacgattatttggtttgttatgcagccattatattttaatatgcttttactatgagaatacaagacaaag

SEQ ID NO: 419954 - DNA, 594 bp, Homo sapiens
ggtaccaaaattgctacttcccccacctcctgctactacacacacccacacacaccaccacacatttcacagaaaggaacttyaagcttagataagtaatcagttctatagctaacattttatttcacaaatagcagacatgagaagatacttcatactgtttcatagctaagataatacgatgtgggcaacaaattagtttcatcacataaaggaacagaattaatatgtactctggggacacttctgaaagatacgcaatttttcattccatttattgtttcgacagcataagttagtgaatactgactatgtccaaagtggtattgagaagaactgtaagaaatatagttaataattgaattaggatttttaaaatcaatttcaacatttgtgaagtattttctttttcaaataaagaaaaatagaataatagattttttaatgtatgccacataattgacagtaaataaaatgtgttctttaaaaagtttgtgcattacaattgatggttaattttcagaaaagagggaagtgtatgaatattcaaggatcatatgtggtttcaggttctccatttgtcccagggtaagc

SEQ ID NO: 419955 - DNA, 594 bp, Homo sapiens
ggtaccaaaattgctacttcccccacctcctgctactacacacacccacacacaccaccacacatttcacagaaaggaactttaagcttagataagtaatcagttctatagctaacattttatttcacaaatagcagacatgagaagatacttcatactgtttcatagctaagataatacgatgtgggcaacaaattagtttcatcacataaaggaacagaattaatatgtactctggggacacttctgaaagatacgcaatttttcattccatttattgtttcgacagcataagttagtgaatactgactatgtccaaagtggtattgagaagaactgtaagaaatatagttaataattgaattaggatttttaaaatcaatttcaamatttgtgaagtattttctttttcaaataaagaaaaatagaataatagattttttaatgtatgccacataattgacagtaaataaaatgtgttctttaaaaagtttgtgcattacaattgatggttaattttcagaaaagagggaagtgtatgaatattcaaggatcatatgtggtttcaggttctccatttgtcccagggtaagc

SEQ ID NO: 419956 - DNA, 350 bp, Homo sapiens
agagtatgtacatttggcggaaaaatagcacagtgaatgggggttattaccttgaactcagttttgccatgtcatagcagagaacaaagctgaactgagctcagccagtgaccacacacagagggagcatttagaccatatctagccagaggagagtcatccattccattggtcagaacttgagtttcttggaaagtctcacaaccacaggtcaaagkgctctgggtcactaaacaaactgaaaaggcactctagcactcagggactgattcctaggcaactccttgtgctgggctgaaagccagaggactagggtggcatgtgacctagggagacactagctgaggtag

SEQ ID NO: 419957 - DNA, 577 bp, Homo sapiens
gtttagaaagaatcttaaatcacatagttttagaatgctagtatgcaagtatattaaactgtgatttctagcatgaaaattcccaaagaaacttatatgtctattttaggaatttttgtcatcagatttcataacacaaggagaaaaaattttgttgaaaatattttttgacagtgtgttttggatgggtaaggttgccagtacaatactgagcagaggtaaaattaaataatgtcrttatgctaaatgaagcaagttgatccatgaataagaatacataaatagattttcctctctatgcataagggggtaggaggaatgaattaaaactttcaggagatgggattggcttgggggcaacaccctgcataccagacattattttacaacgaaatctttatttatgctttacccttgaaaatgtaaaatcctcctgcacgttttgggtacagaatggcatgccagtcgagccctgcgacactgctaaaaacacattagtaaaacaagttcttgcttgttacgctgataaaataacaactttgagtgatgactaaatgtttcattttcctttcaaata

SEQ ID NO: 419958 - DNA, 593 bp, Homo sapiens
ctcgggaaacttctaagacagctgccagccccaggctctcagacttgcctctagtgaacccaactcagtaagtgctgataaatgaacttttctatttccatcacttaccaagcactgtggtagatgacaaaattgtgagctatggtccatkctgtcaaggatctgaagtcttgttggaggagaacccatgaagcagttttaagaattcttcaataataatataagaatatgtaataatgcaatatataagaatatgatagtgcacatatatcaagggcctactgaataattagcacttttttttttttctaattctcaaaatgactctggaagaaaaagactattgtttctgttttgctgatatggaaatcaggggtctaactcaagactgtaccatgatgtgccaaaacgaaaaagtagatttaatagagttatatgctagctgacatatcctactgcactgagttattctctgttaatggactttactcaaactgatttttgaactggagtatttggggccaaatggagataagaatgatgataaccgctcagtttccagaagcaaagccgacgtgagatatactcagtac

SEQ ID NO: 419959 - DNA, 567 bp, Homo sapiens
tggaagggcaatgattttctatttttaatccctgtattttctttcaacagagaactcctccagtgctctcaagtgttttacagaccactaattattaaatgtggaagctctggagcagagaacctttcaactgaaatgatgacaaacgatgctggctgaggagagtcagacctgaaaagttaggaatccctaaaatgacgtcaacctataattcctattacagagctctgatttctactgatcgttttaggaaccatatctactatgtgagaaaagctgctggtgggcctaatttagatgaaaagcagaaaggccttaaaaaagaaatgggaaaggaatatacagaagcaagaagatgattgaaaaaagatggcaattcatgtgggtacattggatagggtctggtttggggagtgtgctttggttatggctagggattttgcaggatmaagagagagactctataatagacctttttgatcagagaaaataaaaatctcattctctcccaattcctcttttctctttcttttgctctctcatttcttgaagtcaatgttgggagga

SEQ ID NO: 419960 - DNA, 557 bp, Homo sapiens
gtgtatctgtctctgttttagccatgcatcttttccaatgaaggctgttaaggccttccytttttttttttttttttttttttctgaaaaggaacagaattataaattgcagccattccatccaaaatcattagaagacccttacacatatctgccagcagtgacgcaattaaattgcattgagtaagctccttctaagttgaatcacacatatattttcttcgatgaaagtgaaattcatataacttaaaatcaaccattttaaagtaaacaattcagtggcacttattaaataaatttacatttaataaatgaattatctagttccaaaaggtttttaatcatccccaaaagaaacctcgtacccattaagcagttactcccagcccctcctctgctacacccccatgccacgcccagcccctggcgccattgtattttagaacagtgtttgttcacacattctttgttgtggtgaagtattgctatttcctttagaagaccccccagtcatgttgagttagaggttttctcaaggtctgaccacagttaagatc

SEQ ID NO: 419961 - DNA, 605 bp, Homo sapiens
tgtactgctcgcaactctgctcactgggtagattcccttttatcattgtcctccagggccatgccagagtggattgtagtgaaatagctgtctaatttagttcaatgttaatatattgtgatccaggtctaggttcttattcttcctgagttagctggttttagaatatcacccatgagactataggtttaaactgaaggagaagctttaggtggcctgagagtcagtcggcgtgtaatagttatttgtgtcttctggatttgctcaagccctatcccatcaaaaaatagactgctgttgtgcccacctgaacataagattccctagatctgattacactcaggttatgatgggcagttgcatttgtatggtcacttagtgtcaaatgatctggtactcagtctccaccatagctgcttttaaaattgcaaataattccctactgctgatggcatggccttgtgacagaaccactggtgtctgtataatacatgcaccaagatttgtcagagactccacacaacatccatrtatacctccagcactatcagtttgctgggtcaaatatctttaatggcagaacagcttgcactatagcctggtcc

SEQ ID NO: 419962 - DNA, 534 bp, Homo sapiens
gtctttcatctctatagcacagaatctcactaatttttaaaattaaacaattaaatggagtaaatataataagatgaattgaatgcatgtaagtataatgggactaggtccctaaaaccaactccataaatacagagtaggaggaatgtagtttagaagcactctacttgaataagatttaaggaacttagatttaattattagctcaacaggagcaaacatttgtattttaccactcaaaatatgaatgttcactaagtttgtattaagaaatgtaatggataaaggcgaaaagaggacctagattttccttccaactagtcagacaacatataaaacaatacttttgtgatcctgttttcagaaggttayaaataaactagaatgaggaggagaagacttaaaaccatctcatctgagcaatgggttcaggaactggagatgtttagaacaaagacagaatgatccaggaagatgacatttcttcgaaatacttgaagagccatcacgtagattagaagatagattagactt

SEQ ID NO: 419963 - DNA, 609 bp, Homo sapiens
gtgggcttttgtttttttcatttttgttttttctttgtttttaattttctatccacatcttaggccaagcaatcaactcttctgaatgaagtcttctctggttttcatgaatttgtctgtgtttatctcataactataaccaaaggtaaatcgccagagctttcccttgytggtctttccagtccacaccagcagattggcatgaactctcacacataggaagctctgctttttttaatgtcctcttcgccatgggttgggctgtttgaaggaaagggatttgcactgggttttgacaacgatacaatggaaggcataaggaagtcacattaagaaggaaaggtgtgattgagaatcaaaggtgtgtctacacagggcatcccaaggaatgtgagtaacccagcttctcgggagcaggagactttctttaagaaaacaatagaaaaaaacattagtcaattacggaaaaagcagtttgtagagaacactgaatagcagactgataaacttccttgaccatactccattagaggtacctggaaaaaagagcagccagtctagaaaaagttgatttgaagacaaggatgacataatccctttggaagacaa

SEQ ID NO: 419964 - DNA, 575 bp, Homo sapiens
ggtacctggaaaaaagagcagccagtctagaaaaagttgatttgaagacaaggatgacataatccctttggaagacaaaccagacagtggtttcagggctgcttcctaggctccctggtaacagggaaacatcatcatgctgtaataggtgctcaccatgatttatctcacttcatgtcaacccccactccctggagtaggcactattacccccattttccagatgagatgattgaggctgatagaggataaatgatttttattaaagtcccacttctgagaaaaggtagatctgagtctgaagsccaagtgcacatgacatttctttacagatgcacagttgaaacctcttgaaagtggtgcaacccactagaggtacacatggtagtcagagcacttaagtaatgtttcctaaaagaaaagaaagaatcttaatagataaataaaatgacagaagaattggcaggacttcaggactagttggatatgaaagaaagggagaatcaaagggactggggaaataagggtcttggaaacatgcactggaatgccacacaaataaacttgtacatatg

SEQ ID NO: 419965 - DNA, 601 bp, Homo sapiens
tggttttattaaaataaatgctcagatttcaaagagaatatttaacttggtatagaaataagactgtagcctgtaatcccagcactttgggaggccgaggcgggcggatcacgaggtcaggagatcgagaccatcctggctaacacggtgaaaccccgtctctactaaaaatacaaaaaattagccgggcatggtagcggacgcctgtagtcccagctactcgggaggctgaggcaggagaatggcgtgaacccgggaggcggagcttgcagtgagcygagatcgcgccactgcactccagcctgggcgacagagcgagactccgtctcaaaaaaaaaaaaaaaaaaaaagaaataagactgtagaaccagatatttattgggattctgtaggatgactgtcataagaaagggatgtgcaatatacaatcaagggaggattctcagagcaaatgacttttaggttgcaatgtgacaactatatttgctgtgggtttatctctaagcatataataaatccaaataaaaaaatgcaattcatcttaataaaatttgctttacaaacaaccattcaggtaagtattaattatcccacaaaatga

SEQ ID NO: 419966 - DNA, 547 bp, Homo sapiens
atataaaacaaacataagatgactctaaaagacagaaagaataaggaaggttggctaggaatctcagaacacaaggaaagacacagtgataagttcccagcatttttgttttgcctcatctattccagacttacagctgaagaagccatcaacctagaaatgcaacaagctcaaacaaaaataaaaacatcaaaaatccactctgtctcatcaaagcaccaggaaaggggcatcctagcaagacagaaaactttcagacaattactgctttactctagaaaaacactacaaaaataaacctagcaaattaagaacctagcaaataaattaaaaagtacccccccacctatggcagcaaagaccaagcaaggggcctagatttttcccctcactccctcacctggctgtatcaaggcaccccaatctttcaacaaacctagggcaaccactgacaatgctgtaaaagatctacactcaraaacatatacataaatcaaaatggcatactaaaatatgtgcaaatcacccacagggaaaagaaaaaagg

SEQ ID NO: 419967 - DNA, 578 bp, Homo sapiens
ccttttctgtatctattgcgatgatcatgtggcttttgtctttagttctgtttatgtgatacattatgtttattgatttgcatatgttgaaccagccttgcatcctgaggatgaagactacttgactgtagtggataacctttttgatgtgctgctggatttggtttgccagtatctggtatttggttgcacagctctgtgctgcagacccaaggccctggtggcatgggcttgcaagaagatctcctgctccatragttgcaaggatctgtgggagaagtgtggtttccccaggttgggtcataaaattactcacctcctcccttagctgggggtaggggttctcctggttctgtgctgctcgtagatgggctgtcaccccactctgcttttcctgactctccatgtgctgtgttgactgcctagtcagtcccaaagtgagaacctggatacctcagctgaagatgtagaatttactcatcattttttttcttctctgtgagcgcttcagactgcagctgcttccaatgggccatcttggcctaccaaagctattgcatttattattacaactaact

SEQ ID NO: 419968 - DNA, 451 bp, Homo sapiens
taaatttaccaaaaaatgattaaatgatgtccacaggaatctgttgtagaaggcaggaaatgtacataacacttttagaaatatttgctttttttattaactaagattttcattcattatccacacaatttttatccaactcactaattttattgtgaatggatagttgaattatattgtatgttcccaagtgatgtaaagatggaaaaaattatatacagtaatgtgctacataatgttttggttgacaacagactgcatatatgacagtggtcctgtaagtttttaaaactgtatttttactgtgcctttcctgtgttcagatacacaaatayttagtattgtgttaaattgcctacggtattcaggacagtagcatgctgtacaggtttgtagctgaggagctgatatcatttggctgtgtctccacccaaatctcatcttgaattgt

SEQ ID NO: 419969 - DNA, 567 bp, Homo sapiens
actgtgcctttcctgtgttcagatacacaaatatttagtattgtgttaaattgcctacggtattcaggacagtagcatgctgtacaggtttgtagctgaggagctgatatcatttggctgtgtctccacccaaatctcatcttgaattgtagttcacataatccccacctgtagtggagggacccagtgggaggtagtaatttaattatgggggctgttacctccttgctgttctggtgatagtgagttctcatgagatctgatggtgttgtaaggggctacctccttcactgggcactcaytcatcccctttcttctgccatgtgaagaaggatgtgtttgcttccccttctgccatgattataagtttcctgaggcctccccagccctgtggaaccatgagtcaattaaacctctttcctttataaattacccagtcttgggtatatctttatttgcagtgtgagaacagactaatacagtaaattggtaccaggagaggggtactgctgtaaagatacccaaatatgtggaagtgactttggaactggctaagaggcagagatt

SEQ ID NO: 419970 - DNA, 666 bp, Homo sapiens
ggaatttgcataagcaacaaggagccaaatgctaattgccaagacgatgaagaatatgtctctagggcatgtcagagaccttcagagcagcccctcccatcacaagcctggcctaggaggaaaaaatggtttccttggctggttccaggctgcccctgctgtgtgcagcctagggacttggtgccctgtgtctcagccactccagccgtgactaaaaggggcaaaggtacaactcaggccatggcttcagagggtgcaagccacaagcattggcagcttccacacggtgttggtcctgtgkgtgtgcagaagacaagaattaaggtttgggagcctctgcctagatttcagaggatgtatggaaacgcctggatgtccaggcagaggtgtgctgcagaggcagaagcctcatggagagcctctgctggggcagtgtagaagggaaatgtgagactggagcccccacacagagtctccactgaggcactgcctagtagagctgtgagaagagggccaccatcctccagacaccagaatggtagatccactgacagcttacaccatgcacctggaaaagccacagacgcttcacgccagctagtgaaagcagctgggagggaggctgtatcctgcaaagccacatgtgtggagctgcccaaggccgta

SEQ ID NO: 419971 - DNA, 575 bp, Homo sapiens
taattgggagagtgcatataagcatgaatgatgtgtgtttagaataaggaacagatagtagtaataataacaacagatgttatttaytgaaaactacaatgtgccaggtattatgttaagcaccatcatttaatcctgacactaaccttgcaacatagctactcttattatcatccttttgtagttgagaaaatcaaaacccagaaaaataaagtagctcatctatggtaacaaagccagaaaatgaaagggctaaatgtgattctaaatcttgcagtctgactctagagacttcagtggaatacaataatgtctaaagttagaaaaatattaatagaaatgtagtggtttaactttgctaagaggataaattcatatttaacaggtgcctattatgtgcttagtttaatactagacactatagagtattttaaaagtccccattctaatgaagtttacagtattatggcaataaaacatcttagacagatggaaatgtatactttacaataaaaaatcatgcggatatagctataggcatttctaagcagtgacattgtggaaaaggatttgac

SEQ ID NO: 419972 - DNA, 573 bp, Homo sapiens
cttccctaaattgcaaccttctccatctgatattatttagaacaatgtacaattagccacatttctgcatgaagaacttttcttcaaagcaaacatgataaactttggtagcatggtacccctacaaataatgcttgattgaggctgcttaatttagtaatttatttatcagcttaaatgatcccagtcatcttggcatatgtcaacatccatttgttttgtgagtatattggggtcaaaatcagcatctcattcatagaaatatttatctatacccacagatgcatctgagtctgcatttgatatttcttcatgctaatccacaaagaaaattttcttctytaattaaattgctcttatagtcttactggaagatatgttaatttgtattgttctgatgtaattacttttgtttattttagtctctgaccagattttaaactcttaagggtaaagaaaaagatttctatttcttttataatcttgtcctttccccttatcccagttaccaataaatgctttttaaattttgcaccctgccgaagtaggtgttaaataaatatttgttagatg

SEQ ID NO: 419973 - DNA, 556 bp, Homo sapiens
atttttcatctgtttttagactactttgtctattctgttgatcttttctctatttccagagccaataccatacttttcagttactcaaaatttctagaaaattttaatatttgatagagaaagtcttcttaccttgttcctcttcttcaaaataatctcatccctccttggtcctgacagggcttaatttgtcaagtagggtttacatttctgttggctctctttatttggaattgaaatgtttttctgtagtattatgtgtgcttatttggaattcattccttttttgtaaaaatctsaggtggatttaagaaaaaaagaccaatgaaatagaaatgagagagagagagagagaaagagatagagggagagaaaggaagattgaaggtaaaaacaaaacagagaaggaaagtatgctagccattaaatcataagattattagaattaagcataaaactttcttaaaacttttctaataaggatgaagaggtatgtctaataaatatttgagtccactgacagaagaaaacacgtaagttttatgatggaaaacat

SEQ ID NO: 419974 - DNA, 642 bp, Homo sapiens
cctcaccattgctttagcatctgtgttttttttggggaatgccctgctcttctggcacagccactacactaggaattactactcctggacctgagcatctcatatctgtggtctttggtagtttgagggtgagggtcagataaaaatgtttctcttgtttctcacaaattccacatttcatttctcatggccctggaccccaaagtggtcctgatcatgcttacagtctcacatgctcttcaatgagtttaatttaatttcttgccccattcttgtctgagctcaaaaacggaagatggaggcaaaagggggaatggggataaaartactattgtaccccgaaacaaatacttcccagtatctgcatccctccaatttctgtccttagcactcaaatttgtgtccaaaatttccttcttcctgagattgggtctctcttcccatctctatcctgcctctcttctaactcctttaacacctaggaggagcaactggtaatcaaattctcatttcaggatataaacagggtcacttgcatgactgggtagggttactctctattaaaagatatgcgaggttctttattttttattttcatttttcattcatgtcattttgagcatgtgcattgtttcttcttct

SEQ ID NO: 419975 - DNA, 449 bp, Homo sapiens
ttaaaatggatgaccacatcatcaggttattcccccaaatcaaagccactttcaaattataaaggtttgccatcctggaaaatgttcaaataaagtcacttggtcttaacaaaaaaattcaaaattgaaatttctgaactgttttaatcaatggctggatggttgaaatgaatatatagtctcattctgggtacatttgaattgcttagaatcttttttctcttcaatgagaataaataaccccctgtaattttgcctkcattcttcttatttttagtgttatctatgatacactgaggcaggaataggcaggaattttgttcagtcaaattctatagtggtatcacttccaagaggaaaaaagtaaaatcagttaggtgtaatagattgagctatttcgccttaacaatacctgaaacttttttaaccagacctttataaaagagtgg

SEQ ID NO: 419976 - DNA, 533 bp, Homo sapiens
gtgaaaataaattagcaagagggcaaatggagagatgatgtacaatacatcacctgattcccctccagcttttttaacaattctcccggcatcatccctgaattttggtgagtgctgagtagtaagataggttatcagcacttagaacttgggtttagagccagaagtcatcccaaggaaacttggctgagcagaagcctattcagagaattgaagacagaaggctactcaaacaaattataaaatattgagctgaagtagtggacacttgtgaaaagaacattcatagtccaccattataactttgaaagagcaatggtatccccaaaatagcaagttacccttgrattgaccttggcagagttaaaaaaaaaaaaaggctgcaattaaacattcactttgttgggacttcatataatggtttacttggtataaagtttcaagctttcatctatttaccataggtgtcttcatataattaataagtaatacacatgtacttctgtatctgtatgtttataagaagaaggaag

SEQ ID NO: 419977 - DNA, 546 bp, Homo sapiens
tttaggtggcagaactctccatagagaacacttgagcagggtggtgaatgacatacaaaattctgccaagaagagaggaaggattttcaggacagagggaaccttgcatgcaaatgcagtgaaggtgaaagtccaacgcaccccctggactgtccagttcatccrtgtggcctgagttcgaatttcttcttgtattccggaaatagttggttattaattcacctaagatccactcagtgtactcatttaaaaagcacattttctggttccctctaccagaaatcctgattccatagcggtttcattttaacaagcatctccatgattcaggaattcccagaatggcagtttggcagccaggagccatgttaaatttaggcatatacatgagacgatcaggcttgggttttacagcagtcactctggtcgtggtgcagaggacgatattgcgggtaccaagagtggaggcagggagaactctcaggcaggtcttataatcattcagacaataggtgatatgggctcatgggcagtgacagtagaaga

SEQ ID NO: 419978 - DNA, 546 bp, Homo sapiens
tttaggtggcagaactctccatagagaacacttgagcagggtggtgaatgacatacaaaattctgccaagaagagaggaaggattttcaggacagagggaaccttgcatgcaaatgcagtgaaggtgaaagtccaacgcaccccctggactgtccagttcatccgtgtggcctgagttcgaatttcttcttgtattccggaaatagttggttattaattcacctaagatccactcagtgtactcatttaaaaagcacattttctggttccctctaccagaaatcctgattccatagcggtttcattttaacaagcatctccatgattcaggaattcccagaatggcagtttggcagccaggagccaygttaaatttaggcatatacatgagacgatcaggcttgggttttacagcagtcactctggtcgtggtgcagaggacgatattgcgggtaccaagagtggaggcagggagaactctcaggcaggtcttataatcattcagacaataggtgatatgggctcatgggcagtgacagtagaaga

SEQ ID NO: 419979 - DNA, 546 bp, Homo sapiens
tttaggtggcagaactctccatagagaacacttgagcagggtggtgaatgacatacaaaattctgccaagaagagaggaaggattttcaggacagagggaaccttgcatgcaaatgcagtgaaggtgaaagtccaacgcaccccctggactgtccagttcatccgtgtggcctgagttcgaatttcttcttgtattccggaaatagttggttattaattcacctaagatccactcagtgtactcatttaaaaagcacattttctggttccctctaccagaaatcctgattccatagcggtttcattttaacaagcatctccatgattcaggaattcccagaatggcagtttggcagccaggagccatgttaaatttaggcatatacatgagacgatcaggcttgggttttasagcagtcactctggtcgtggtgcagaggacgatattgcgggtaccaagagtggaggcagggagaactctcaggcaggtcttataatcattcagacaataggtgatatgggctcatgggcagtgacagtagaaga

SEQ ID NO: 419980 - DNA, 561 bp, Homo sapiens
catgttttatcttcccctttgtttatttgattggggccatggctggttatcttttactggaaaccacaattatttgaacaagataaacaaacaagtctttttaaaaattaactatatcaatttctcagaggctattctattccagcaattcccctccctcctttcctttcttatttcatccactcctcccccaagtctgaatgttctactaatgtctttactctcacctgctttaaactttctagaaaaaactggacaggaggtagtgttyctgttagcagaaacaacaattgccttagagaacagcgataattcaggaccaaggacaggagcacaattgtggtggggctcaagattacacataagagtggtggtttgcatatcacagctgttccataaagctgaaatctacttgaaaatatgagtaaaagggctaattaacatgcatttccctcaaattagtgtgatcctaccaatgtgaatttcatattagctctctcaactaactcttattttccctttggtataggtgatagaaaaaaatgtcgatcctgaaacaat

SEQ ID NO: 419981 - DNA, 557 bp, Homo sapiens
ctacaatttaatattttgctttgtgtcatcaaagacagagataaggatgagaataaatgtgcaatgtgttcataccttcaaatactcaagtgcttacayatatagactcttcttttttcagttcagccctatttttggcaacctgacgtccagttgttttcaaagggagaatgcaagatataacacacaaaaggaaatcaagaatttacaagattattatagcttctataatagtaattaagacataaacacattatttgatgaatatgtattgaacttaactaacatttaagagtctgtgatattactgtctcctagtggcagggctattctagaaagagaattacataacacatatgatctttaactatacctcttccagttcgactcacaggaactaagtatggctgtggaggaggaggctgtggtgcttgtacagtgatgatatcacgatacaaccccatcaccaagaggataaggtaccgtgcagcaaagtccagatatggttgaatttttataattttgaactttgttatattccttcatttggtaaatat

SEQ ID NO: 419982 - DNA, 583 bp, Homo sapiens
ttgttcagtaatcaaggagttgttattagccgttgtcttgcttgaatagtcacagaaagaacagatgttacctggcatggacttggttttagcatacttatttaaatcctccaaaggaaaacatcctcaagttgctagcttggtgtagtcttgatccattctgcccccttggtcctccattgtccargttttcaggaatcccataatgctctctgttgcatgaaggctgccataccccaggctcaagtacaaaattattgggaaatacatctgtctttaagcaattcaccagagtcctcagaggcagtgattctcatgccccttcatcagaatcaccaggtttccaggccctatctcagatgcattgaagtagaatctcctgggcgtagggacttaaagagtgcattttgaacaaacaccctaggggattcttacgcacaggagagtctaggaacctggaagtgaagaaagaatgtacttaagctgtgacccattagaaaattttaaagaacgtatggggtcgattttcattatcattttgttttccatttatgaaatacctttattcagagaaactaaaaaa

SEQ ID NO: 419983 - DNA, 578 bp, Homo sapiens
gctgttttgtcagctttccaaaaagatattgtataaaagcattccaagaacctttatttgctatgacagcatctttctaaaaggtgtttattttttacatttttattttcycaagtctttgagactatttcttaccttgttgagaaattaaacacttgatcttcatacaatccaggttgttttcataaatataattttttaaatgaagattctgggtgttggtttgtagtcagcagctgtgagtatgcaaattaataaaactccctgcccctgtgtaaatcacccacaatttagattttgtagatgttccctccatcatttgtattacataaaaatgttaatgaacatttccaatacaaaactgataaataaataaacccatttacgtatctagtcatgtaaagaataatttattctcctaatactttgcaaatattagaatcatctaaatttactacttgtaattccatgtttccatggtgatagattcttcatctccaatgtctagtgaaaataaccattaagagattgaaaatgactagacactggaaacaagaatgcagagtgatggaaaaaga

SEQ ID NO: 419984 - DNA, 578 bp, Homo sapiens
gctgttttgtcagctttccaaaaagatattgtataaaagcattccaagaacctttatttgctatgacagcatctttctaaaaggtgtttattttttacatttttattttcccaagtctttgagactatttcttaccttgttgagaaattaaacacttgatcttcatacaatccaggttgttttcataaatataattttttaaatgaagattctgggtgttggtttgtagtcagcagctgtgagtatgcaaattaataaaactccctgcccctgtgtaaatcacccacaatttagattttgtagatgttccctccatcatttgtattacataaaaatgttaatgaacatttccaatacaaaactgataaataaataaacccatttacrtatctagtcatgtaaagaataatttattctcctaatactttgcaaatattagaatcatctaaatttactacttgtaattccatgtttccatggtgatagattcttcatctccaatgtctagtgaaaataaccattaagagattgaaaatgactagacactggaaacaagaatgcagagtgatggaaaaaga

SEQ ID NO: 419985 - DNA, 580 bp, Homo sapiens
tagtccgttctcacatggctatgaagaaatacatgagactgggtaatttattaagaattgaaatttaattgactcacagctctgcatggctggagaggcctcaggaagcttatgatcatggcagaagacacctcttcacagggcagcaggagagagaatgaatgcaaacaggggaaataccagacacttataaaaccatcggatctcatgagaactcactcactatcacaagaacagcatgggagaaacggcccccatgatccaattaccttcacctggtcccacctttgacacatggggattatggggattacagattaaggtgatatttggatggggaccagagccaaaccrtatcagcctagtaagtggagaagaaaggtttgaaatttgatatatctaatggcaaagcctatgttttggtcactatggtgctcttcttccttgggccattcacggaagcattcagataaaaacattgttatttattcatccacttgttaattcagtatttatggggtgctcagtgtgtgccagaaccacactggaccttggctttgtccattctcctagctctttc

SEQ ID NO: 419986 - DNA, 584 bp, Homo sapiens
ctcacaatatccttcacgggatatagaaagccacattggtatgggaaccaagatggaagagagagcaattcatggtcctgccagtaattagcgctaaaacaagcaatatccatggggtcccctctttagtatgccactgttaaacgcagcatttatttttaattttgaatgtcctgcttgattttcacagaaatcttatatattttgggataggattaaagaaaatttcagccacactamctgcaaaatggagagacacagagaaagagatagcagttgggaatgttgagttgaggaaggaagtgcatgctgggatcaatatttggctgtgaaaatctactgtggagcaatcaaaggtgtgcatgtatacgctttatagtgaagtgcattataatggaaatttttgtctgttgaatatttgccagaaatgtgggattttccactttttttccaaaataatttttgtttgcagcccaaaaagtgaaatttaaaataaaataatccgttgtgggtgaatttataatacttttagcatccttctttgatcttcccaaattttcaaaatgttctacaataaatacgta

SEQ ID NO: 419987 - DNA, 618 bp, Homo sapiens
ctgttttcgtttttagtttttagggtttaggttgctcttatttttctagttagctaaagaggaagcttgaattattgactggagactatttttctttttgtaaactataaacttccttttaagcactgttttaaatgcatgatatacatattttgatttttttgtttttaattcagctcaaaatattttgcaattttctctcactcatgggtgttagaagtgtgttgtttaatttccaaatatttggggattcatcagatctctgtctttcattgatttctgacttaattccgttgtagtcatagaacacactttatattatttcaatcctttaaatttattgaggcttgctttatagcctagcatagagatcagcaaatgatagcttgtggttatgcatcttaagtaattacaatttactttatcataataccaacttaattctgctctgttatatctrgcagtgtgcccctgaagtagaatttttattttagttattgtacttttatcatcagaatttccatttggatttttaaaataatttctatatctttactgaggtcctttattttttggactattgtcataataatttcccttaattatttactgttaatt

SEQ ID NO: 419988 - DNA, 603 bp, Homo sapiens
tactgaatatttgatgatattaaaattattaaatgattgctaatattaagtaataataattattaatttttataatggtctgtggtcatgtaagaaaatgtcctttatgttttgaaattcatattgaaatgtttagtggtaaaagaacatgacatctgagatttgttaaagaacagcagccaagaaagccagtgggggtaawaaaaaaacaagtatgatagtgtgaatatggttgaggttggatggtaattacgcagaggttcattatattctctactttcgtgtgtttttggaacatttcctaacaaaaaataacaagagaatgatttatctcacggtaaagtcaccaaatttcaaaaataaagactaaaacttttcagatattttagcatgtgaagcagtttacctgcaaaagacttttcctctgaaacacgaaatggcaggagatcatgaagaaatgtccacaaagttgaaggaaacctcatgtaacccccaaatactttacataatcaggaacagctctataggtaaggcaacagagaacacacttttaaatatacagtaattctgaaactgtaatagccttaaactcttatttgaaca

SEQ ID NO: 419989 - DNA, 603 bp, Homo sapiens
tactgaatatttgatgatattaaaattattaaatgattgctaatattaagtaataataattattaatttttataatggtctgtggtcatgtaagaaaatgtcctttatgttttgaaattcatattgaaatgtttagtggtaaaagaacatgacatctgagatttgttaaagaacagcagccaagaaagccagtgggggtaataaaaaaacaagtatgatagtgtgaatatggttgaggttggatggtaattacgcagaggttcattatattctctactttcgtgtgtttttggaacatttcctaacaaaaaataacaagagaatgatttatctcayggtaaagtcaccaaatttcaaaaataaagactaaaacttttcagatattttagcatgtgaagcagtttacctgcaaaagacttttcctctgaaacacgaaatggcaggagatcatgaagaaatgtccacaaagttgaaggaaacctcatgtaacccccaaatactttacataatcaggaacagctctataggtaaggcaacagagaacacacttttaaatatacagtaattctgaaactgtaatagccttaaactcttatttgaaca

SEQ ID NO: 419990 - DNA, 489 bp, Homo sapiens
agccccagtgtttcatttttatatgtaaggcacgaatatcagtmtaaattgacagagggcaatcttcaaatgtgttatgagagccagtgtcccctctccctagaccacttgcatcacacatcaatttgagcatattttaggtaagcaaattattattaaatctatattaaatactttttggaacaagggatggtataaacaaacctctatgtaaaattaattgttttgatgctataacggtgaaatatttgtgtgttttaaaatctccatataagaaaacatacatggagatactgttaagccaaatgcatgcacacatactgagcactgtctgagacatttgcattagttttctgatgtacaactttacaacacttcacatggtcgaaatgtactttgaaaaataaaagacccattgtaccagtaagggaaattgtaaacagctttttactgcacttctaatgctattaaaatatagaatgtgtggtc

SEQ ID NO: 419991 - DNA, 446 bp, Homo sapiens
atgtagaaaattcaccagaccaaaaacagtgttgccttaaagttctgaaggtatttcaaagctctccactgcattaaagcaaaaacagcgcaagaagtcaggacgtttctgaaccctagccaaaactctgtctaaaggggaatttgaggttggtgttattggaaaatcagtcattagctgcccatcactcagctgactaggagtaacaatgatgccaatattgattacagattgtgctatccaaaggacagatttcggttttaagaaactcaccaaaccattagcttttgtraatgaatactcctttacaagaatatccaaataggtaataaagtacaaaatatgtaacataagatgtgtctaaatctttagtattgaaacatgtaaagtgcaaaatatgtaatattaaatatctaaatatataattaatatgtaataaagtacaa

SEQ ID NO: 419992 - DNA, 615 bp, Homo sapiens
tattcggcatcttctttgtgcctgtctactttcacagtaataacattttcttagcaccctgatcatgtttacgcaatgtgttctatgtatgtagattaggcatgtgcacacacaaacacaatgccctctcttggaagcactgtcttgacctcatcatggttgctaataaataaacatgtcgctccacgcagggagttttgactggttttctaggctttgtttctcattttagggagataatcggcaactgacaacccaccatctcacactctgaagctcacacagtgaaacgaggtttccacacagccattcaagattggcactgctggatggaacagatgaagcatctgagttgctgtttctccctgcgtatttgtaaagaattgctgacttaatatcctcaagcacctagaatggctaacgtgttgtcaaggggaaaatcagacccattttaacaagtcagtaagacaccttcataaaagcatgtaaaaacaggtgagcygaagtcttcataaacaattggctctgttaagtgggtttaggggcttatcccatatccacttgctaacattaatttgcttagacaaattgtttaagggaaaaatgcatcataga

SEQ ID NO: 419993 - DNA, 544 bp, Homo sapiens
cttctttttgagttccaaaaataaggactgtgattaatttgagtacctttaaagctttaaagtggatataatgacatatactttgaatatatcaggtaataatccacaggatttttaacagtgaacactgattttcatcttttgagaatgtaaaatgcaaggctgtgtataatctacatagcgaattatatgccaactccattagaatctttgtatattagttcacatgggataattttgcaatttgaaggcaatattacataacttttaataattgaataataaaatattttcaacctaaatawtatgatatctgcaatcattatgtttcaaaattatataacttatccatagttgtaataataattctttcttttatagcatggaatatttatttcagtaggacattatggtataagggaaagataaaactttatttcttcaaaatagagagctatctcaatatcactcattgaatattatatccctactgcttttaaatgccagctttattacaaagtaaattattttatatgttttagta

SEQ ID NO: 419994 - DNA, 558 bp, Homo sapiens
gtgtgtgtatgtgtgcgtgtgtgtgttttaattgcaatatggtcagagaatgtatcacatggtttcaactttgagaattttattgagattgtctttgtagcttaayatatgatcagtttttataaaagttccatagatatttgaaaaaactatatactttctgtttattggctataaagttttatatatatatgagatttagtttttgaactgtattcaaattctctatgtcttcatttattttcattggtttaatctgtccatttttgagaaagctgtagtaaagtgtgccttctattttaattgtgaattatgctacacttttctgagaaagaagaaacactatatagacctaaactgtgttctatttaaccaatgtttctgagttgacatataactagtgaaatctggagaaatttatttacataggatcacagaagcatcctatgaggtttctgccattttctcttttggcatggaatgcaatcagttgcatcgacccactgacacccaagaactaagtttgttcttctttatttctcatcagttttcctaatc

SEQ ID NO: 419995 - DNA, 592 bp, Homo sapiens
taagcaccaggttacatgacttgacttaggtttagaaccatggaattttaaggggaaaaacaggcacagtatcagcatcattattattattatgataatttttagagacagagtctcattatgttgcccaggctggagtgcagtggctattcacaggagcaatcatagcgccctgcagccttgaactcctgggctcaagcagtcctcccacctcaacctcttgtgtagctgggactacagaaccactgagcttggcttggcacagcatctttaagcacmagaccaacacccagcatagggagatgttcagcccagggaatctgaaacctgcctctcttctcatgttcatttggggacagacactgagaggaatggtgggaaaaaatcatcacatcattttaactattgattttctttctccctattttttgtctttgttttgacaaaaacaaagatgtgtacttggatttgcataaactaaatgtacacgtgccctatactacctgtatgtaaataactctcctgtgtctccagtctggtctcccttctgagaccaggcccacatgttggaaatcccttttctaggctgatc

SEQ ID NO: 419996 - DNA, 585 bp, Homo sapiens
ctggaattttcatataactcccaagtttagggtagctgatattcacgatctcaaacttcttggatgcttctgcagctttagctgaccaagctcctgtcaccacatagttggcacaccttcctgctttcaggcactttgggtttaaggggacagcactgaactggccagacccaccttcttgcacaaaaatgaccttgtacagtagttgtttggaatggctaacaattcccacaccagattctctgtggtattaataattttagtgaaatyggatgacctgttgttcatttcaagaacactaatgccaattcctttgtggtctaataattattgttctatctctaacaacactgagctcagcaccttggtgggcccagggccgaagttgaccacctgccttcatggtgtgatggagggtagggaatcagctgggggggggacctattgtgtgggcagcatgcatccccccacctgcagtggcaggagcctgttgaccagtgtccattctctattaatatgtgactcatgtttttaaactctttggaaattatactttgacatcatactgctactaatgaattgttt

SEQ ID NO: 419997 - DNA, 578 bp, Homo sapiens
tggttgtagtgggataggctggattgatgatttttcacactaagctctgagtgttccaatgagttccttggaagtctctcaggatcaacaggggtgagtggaaggggctccccactccagtttcaatatgagatactctatttttgtccattttatataagttgatctctaatctgaatttcatttgaaaaaagtgttccactgcttaaaggtaagtttaaaaagagaacagaactagaatacttytaaaaaaattcagtagttagcttacattgcatacaaataaagtaggcatgggatattgatattgctgttaattcaaagcagtaacacatttaaaaattcatttattctacaaacatctattgagttatgattgctgctaaatatgttcagtttgagattctacccagtatgatgggatagtgtttttcacaaggtacatggctctttgcagatgtccaacactctataaactacatagctggaagggaacccgggaattatccagtctaccctcttcctttttagtcaaagaaactagagtagaaagaaattaagtaagttgaacaatgata

SEQ ID NO: 419998 - DNA, 589 bp, Homo sapiens
gtaaatcagatatatttatttttctatgtgtacaggtgttttattgttttaaaaaataaagggaatttttgaaaaaactttagttctagactttaaaataacagaacatacaaatgtgytctctttttaaagcatctttatggaggtataagtcacataccataaaattcatccatttaaaacatgcaattcaatgatattcaaagaattttacaactatcattgcaatctaattttagaatatttttatccaccccaaaaccttagcagccactccctattcccttctgccctcagcctctggaaacctctaatctactttctgtgtctatggatttgcctactctgtgtatttcatataaatggtgtcatagaatatgtcaattttgtgattggtttctttcacttaccatactgtatcaaggttatgagtacatttttgacatctgaatcaagttgaaaccagaagcaatcctgggcaaaatttgaaggacacagtagtaacatttggttttggtatcctctgacctcttcttctagatccagctctaccttatcccccaggcctttcctccccacgcagtttccc

SEQ ID NO: 419999 - DNA, 589 bp, Homo sapiens
gtaaatcagatatatttatttttctatgtgtacaggtgttttattgttttaaaaaataaagggaatttttgaaaaaactttagttctagactttaaaataacagaacatacaaatgtgctctctttttaaagcatctttatggaggtataagtcacataccataaaattcatccatttaaaacatgcaattcaatgatattcaaagaattttacaactatcattgcaatctaattttagaatatttttatccaccccaaaaccttagcagccactccctattcccttctgccctcagcctctggaaacctctaatctactttctgtstctatggatttgcctactctgtgtatttcatataaatggtgtcatagaatatgtcaattttgtgattggtttctttcacttaccatactgtatcaaggttatgagtacatttttgacatctgaatcaagttgaaaccagaagcaatcctgggcaaaatttgaaggacacagtagtaacatttggttttggtatcctctgacctcttcttctagatccagctctaccttatcccccaggcctttcctccccacgcagtttccc

SEQ ID NO: 420000 - DNA, 553 bp, Homo sapiens
acacccccctactgtggtagtcattagggtttttccaaagagtctcattcttttctccttctggatataagattgcacacctctgtctcctttgtaattagatgtggggatatgacttactttggccaatgaaatggaaacagaagggacatgtgtcactggtaggcagaggcttgaagagccccttcatgattcatcatactttcttctcccygcttaggtgattgtagaggcgtatattgatatggaatagctcggcctggatctccctgcctactcatgctggacatctagcttgagcaaacagtgaacttttcgttgtgttgaaccactgagactggggctgtttgttactgtagataacctgatccattccaaccactatatcatcatatgcagccatccataccacaagggacccccaccaacatacacaaccatctgtggcaatcttgctcaatgtagagtgcccttccttctctacgctatcccttggaggaccagttatatggtttacaccagcttggcagtaattgtcacacttgagttcatt

SEQ ID NO: 420001 - DNA, 533 bp, Homo sapiens
ctttgtgcatgctgttcctaactctggccatctgtctctgggatcagcagcaggcctgtcttcagctcagggctccggacaacccayagcctgtgtacaagtgagaatggatgtcccatcttccttgcagatgcagccatgagtcaaggtgttcattctggagaatggaacacagacaagactttagactccatttaccctcgtggcctgaccttgaggtacagggtccaacccgaggtacagagcccatcctgcacacctatacccagaagccttgctcgtttgcctgctacctttgaattctttcattgctaagcctaagagttgcagcgtacaatagtttggaacttggcacacagtttcccaaaaatgctttgaagatgaggaggaggagggggaaaagaagaatgataataaaaattgttataattattgttaatcgttagtaatattattaatcactattgcaattaggtttctagcatattctgtgaaaggccaatttaatgaataatattgatgaactctcatac

SEQ ID NO: 420002 - DNA, 619 bp, Homo sapiens
cacacacacacacacacacacacacacaccacccctcttctagaagtatgccatgctctagaattatctactyttctttccccagcaaacaaaattctatcttcttggtacagctggtttgtaagaagggaaacaatcgtgctgaacaaaaaccatattaagatgagaatgactgatgattacattgctctcctggaggttttttcttccttgtttttatgttttctttgttatttgtttgatttcaaggggatgcttaccaaaaagaaggaccattcctacctggatatttgctcccgaaaacagctccccagagctcttcctgcttcctataatttctttcctttcttcctttatgaacttctgattttctcaagcctcttaatttttttctataatgattcccttacaggagaagcagggaccctggtggtggggtgatcttagggagggagaaatggaattgaggttgtgctcattttttagttagggactacacatactaggtataaggcaggttctgaggccagctaggaggcctttgtgtttatcatacatccatacctgacagcagaacacactccaggggctcaaaatcctggccaaaaaggggtgtttt

SEQ ID NO: 420003 - DNA, 518 bp, Homo sapiens
tactagtttttcaatatgcttgttgatgccatcctaaattttttcaatagttgcatagttgtatttccacaactattaaggaatgaaatacatttacaggaaaaatatattttgacaaatagccaaagatacgaacaatccacacaagaggaggaggttcacataagagtagaaaacaggccgagcacagtggctcacgcctgtaattccagcactttgggaggccgaggcaagagtggatcacgaggtcaggagattgagaccatcctggctaacacagtgaaaccttgtctctattaaaaatacaaaaaatcagcggggtgttgtggcacatgcctgtagtcccaggtactcgggaggctgaggcaggagaatggcttgaacccaggaggcagaggttgcagtgagctgagattgatccactgcactccagcctgggtgacagagcgagactttgtctcaaaaaaaaaaaaaaaaaaaaaaaaaaaaaraaaaacaaaacacggaaaacataccaa

SEQ ID NO: 420004 - DNA, 530 bp, Homo sapiens
cgcagtgacacaatcgtggcgcactgcagcctcaacctcctgggctcaagcgatcctcccacctcagcctcctatgtagctgagactacaggcactcatcaccatgcccaggtaatttttctgttttttgtagagatgggttttgccatgttgcccaggctggtcttgaactcctgagatcaagagatctgcccactttggcttcccaaagtgatgggattacaagtgtgtgccaccatgcccagcagctatttttaatttgaataaatgttttaaaaattatgtatgaaaccataactccttccataagctaatrctttaagcttaagcaaattgtcatctctctagaggtttcattaacacttactcactgttgttgttgttgttttttttacttactcatttatgagtttaagaatatttactaccttagacatctgagatatattttgggataaggtatgaagtatttgatttaaagtaattttttttttcttgagatggagcctcgatctgtcacccaggctgga

SEQ ID NO: 420005 - DNA, 378 bp, Homo sapiens
tcctttcgttgttgccaagatgtggggtatttgaaagaacttgaagcagcattcattcattttaaagcagttaaatagctaagtcatggaaacatttgatttttttaaattgacattctctttgctctttggtctcttgggaatcaaatgcccctaagagatgcagctccatcattgctcataagactgtattttcttactaatgggatcagaagctgagaaaggaaaaasaaatacatcatttatttgttcaaggaagtacagatattgagacttaaactgaccatgtggattttacagcatttacctgaagcactcattcatttcctgttgaagagctactcttggcttcatggaatcacagattttgaagtatca

SEQ ID NO: 420006 - DNA, 541 bp, Homo sapiens
gcctggccaacatggtgaaaccattgtctctactatttttacaaaagttagtcggacgtacagacgggtgcctgtagtcccagctacttgggaggctgaggcaggagaatttgtttgaacccagaggtgaaagttgcagggagccgaggttgtgccactgcactccagcctgggagacagagcaagactctgtctccaaaacaaacaaacaaacaaaaaaaccctgtagcttgggatcagccttctcttctattgtttttctttaaaaaataaaaattaaaaatagatgtagatgctatgttgctgaggctggcctcaaactcctggcctcaggtgatcctccygccatgacctccaaaactgcagggattgtaggtgtgagcactgcacccagccttatgtttttttctacataaaaaacagcacaggattatcttccagagctaataaatatgttcaaataaccacaaccccattaaggaaaaatatcactgggcagcaaataatcaatccagaccaatatgatcacaattgctgtgaa

SEQ ID NO: 420007 - DNA, 613 bp, Homo sapiens
aaaaaaaaaaaaagtttacaaaacatatatagtcatgtgttgcttaatgatggggattcattctaagaaatgcattgttaggtgaatttattgttgtgtaaacctcatagagtgtacttacacaaacctagatggtatatcctactacacacctaggctatatggtatagcctcttgcttctatgctactaacctatacagcatgttactgtactgaatactgtaggcaattgtaacacaatggtaagtatttgtatatctaaacctatctaaacagagaaaaagtatggcaaatatgtaatattataatcttatgagactacccttatatatgcatgcagtccagctttgtctgaagtgtcattatgcagttcacaactgtacatagaaacatcactcaaattaataacaagaagacaaaccaattttaaaaagaagcaaaaggcagaatacayaattcatcaaagaagataaacaaatggtagataatttgtgtaaaactgttcaacatctatagtcaaaagggaaatgcaacctaagaaaactgtgggaaacttcgtatttcaactccaacatgtgaaaagcttggatgccatcattcctatactttcaa

SEQ ID NO: 420008 - DNA, 599 bp, Homo sapiens
ggacagctagaaagtggaggtgtcaagctctaaccctggagatggggcccaggagcctcggctcacaaccacctggggccatccctccaggaagggrcatccttaacctgatagccacctctgcagacgccctccctgctgccacagggagaaactgccttacagttcttgtactcattaggctttgagacccgtccttgacaggcatcggcatggcatgctatgaactgcctatgattgactgttttctcttaattgggtgggtagactaagctatagtggagtaatgaatcaaagcttctttgggggagaagagagttaattttaaaaaattaggttctgcatgtaattatgaatgcctggtaaaaatatgtgtctgtgtaaaagtgagtttagacccagacatgttccaagaatggctgaggctactgatgagataatataaaatacttagaatctgtatgtaagacagcaaaagcagaagtagaagccaaagaaggcaaagcaataaaggcaaaacccagcagtttctggaacgagactaaaaatacctaccttatttccaagcttcccagtagccaaggtgaaaagaggtgcaa

SEQ ID NO: 420009 - DNA, 599 bp, Homo sapiens
ggacagctagaaagtggaggtgtcaagctctaaccctggagatggggcccaggagcctcggctcacaaccacctggggccatccctccaggaaggggcatccttaacctgatagccacctctgcagacgccctccctgctgccacagggagaaactgccttacagttcttgtactcattaggctttgagacccgtccttgacaggcatcggcatggcatgctatgaactgcctatgattgactgttttctcttaattgggtgggtagactaagctatagtggagtaatgaatcaaagcttctttgggggagaagagagttaattttaaaaaattaggttctgcatgtaattatgaatgcctggtaaaaatatgtgtctgtgtaaaagtgagtttagacccagacatgttccaagaatggytgaggctactgatgagataatataaaatacttagaatctgtatgtaagacagcaaaagcagaagtagaagccaaagaaggcaaagcaataaaggcaaaacccagcagtttctggaacgagactaaaaatacctaccttatttccaagcttcccagtagccaaggtgaaaagaggtgcaa

SEQ ID NO: 420010 - DNA, 547 bp, Homo sapiens
aatagaaactattgacacagtgtaactaatttgggctggaagggaactcttggaataactgctcttcctttcagcattgctagggtaaagcactccaacttcatattctgtcaaaarcagtgttaatattaatagataaatactgaccaggcacacaatttaggggtatagtgatcccaaaacagtgcgtgaggaatttgttattaaaagatgcacacacgtcaagaatatcctctaatgaatatgcagtgtgttaattctgtaatatcattgttccaagaaacttggtacttcctgacgtctaaaagttgataagtttatttagcctattgttttgactttgctatactgtgagtgattttacagatccctaatttcagtgccacaccaatgccacaatctctaagcaggatgaagttgctgtattcttccaatcaattaaccaacaaaattaaatttcacactacagagctttggaatagctactgtttactgaaattaccattgcaaataatgaaactgaatgtttaaagaaccagcgtttagt

SEQ ID NO: 420011 - DNA, 547 bp, Homo sapiens
aatagaaactattgacacagtgtaactaatttgggctggaagggaactcttggaataactgctcttcctttcagcattgctagggtaaagcactccaacttcatattctgtcaaaagcagtgttaatattaatagataaatactgaccaggcacacaatttaggggtatagtgatcccaaaacagtgcgtgaggaatttgttattaaaagatgcacacacgtcaagaatatcctctaatgaatatgcagtgtgttaattctgtaatatcattgttccaagaaacttggtacttcctgaygtctaaaagttgataagtttatttagcctattgttttgactttgctatactgtgagtgattttacagatccctaatttcagtgccacaccaatgccacaatctctaagcaggatgaagttgctgtattcttccaatcaattaaccaacaaaattaaatttcacactacagagctttggaatagctactgtttactgaaattaccattgcaaataatgaaactgaatgtttaaagaaccagcgtttagt

SEQ ID NO: 420012 - DNA, 578 bp, Homo sapiens
aattatatttttggtctctttttacagttattgacttaaagtctattttgtctgatataattatagctactcttgttctcttttgatttctattagcataacgtatctttttccatcccttcactttaagtctatgtgtttccttaaagatgaagtgaccctcttgtagacagcatatagttgggtcttgtgggtatttttaaaaaaacccattcagccactgtatgtctttattagagaatttcatccatttatatccaaagtaattattgataggtaaggacttaactattgccattttgccatttactttccagttttttacatatattttgtttctttcttcctctctttttgtcttcctttgtggtttgatggttttctgtagtggtatgctttgaatactttctacttacgttttgtgtatctactgtagrtttttgctttgtggttgccataaggcttgcataaaacatcttgtacttaggctattttaagctgataataaattaactttgattgcatacaataactctatacttttatcagccaataggtgataacatacattttatgtt

SEQ ID NO: 420013 - DNA, 656 bp, Homo sapiens
catagtcacaataatggcataggtaacagtagttacggcttaaaatttctttcttttttttgacacaggtcttgctccaccagactggaatgcattatcatagttcactgcagcctcgactcctgtgctcaagtgatcttcccaccttagcctcccaagcatctaggactacaggcatgcrtgccaccacacctagctaattaaaaaaaaattttttttttgtagagatggaggtctcactatgttacctaggctggtcttgaactcctggcttcaagcactcctcccgccttggcctcccaaagtgttgagaacataggtgtgagccattacacctggcctgcttaaaattcttatcaaataattcaaacatctgtgtcatcttgatattggtatgtgtttgttagagtaggtggttaggcagacatgagcagggcaagagatgcacccccctcctccaaaacccgaagaaatgtcagatgaccatcaggtggtggtcaggtggctgtcagcaccagggaaaggcagtttcccaatagacagaaaatacctggagctggtgataagcaacttctggatacaatctcaggagttgggtgacggggctcatgcatgtgcactaagaggcaaaatggcatactttaactggtatatga

SEQ ID NO: 420014 - DNA, 590 bp, Homo sapiens
atgattcaactacaaaatgcacagaagctgtgaacatttttctgaagagcatatagagatggctataagcacaggagacagtgttcaacattattagccatcaggtaaatgcacacgaaaatcacaatgatctattactacacaagtgtcacaatggctaaaataaaaaatagtgatgacaccaaatgttggctaggatgtggagaaactggatccctcattcattgctggtgagaatgtaaaayggcacggccactcctggaaaacagtttgtcaatctcttaaaaaactaagcatgccaactaccatgcaacccagtagtcatacctgtgggcatttatctcggataaatgaaaattatgtttaaacaacaatgtgtacctgaatattcaaagacatttcactggtgaaatgaaaacagccgaggtgtccttcaacaggtgaatggttaaataaaatggggtatattcataccatgggatattgctcaggaacaaaaggaaacaaactggggatctgtgcaacttgttgaagttccaagaattatgtagagtgaaaaagccaatcccaaaaggttacatactgtatga

SEQ ID NO: 420015 - DNA, 590 bp, Homo sapiens
atgattcaactacaaaatgcacagaagctgtgaacatttttctgaagagcatatagagatggctataagcacaggagacagtgttcaacattattagccatcaggtaaatgcacacgaaaatcacaatgatctattactacacaagtgtcacaatggctaaaataaaaaatagtgatgacaccaaatgttggctaggatgtggagaaactggatccctcattcattgctggtgagaatgtaaaacggcacggccactcctggaaarcagtttgtcaatctcttaaaaaactaagcatgccaactaccatgcaacccagtagtcatacctgtgggcatttatctcggataaatgaaaattatgtttaaacaacaatgtgtacctgaatattcaaagacatttcactggtgaaatgaaaacagccgaggtgtccttcaacaggtgaatggttaaataaaatggggtatattcataccatgggatattgctcaggaacaaaaggaaacaaactggggatctgtgcaacttgttgaagttccaagaattatgtagagtgaaaaagccaatcccaaaaggttacatactgtatga

SEQ ID NO: 420016 - DNA, 552 bp, Homo sapiens
gacgttaagtaggagtttagatttttatctttttgcatgtggatattcaatttctccagtatcatttgttgcaaattcctttctccactgaattgctctgacaactttgttgaatgttagctgaccataactataaaggctcattattttattctgttctgtagattatctggaccctattgttctgtttcattggttggcacacttatccttatacaagcaccactgtactgatgatttagatttatagtaggttttgaaatcgggaagcatagtcctctttgttcttttttttttttttttcaaractgatttgctgttttggggaattaagttgttcattctacagaaaagcctcttggggttttatagggtttatgttaaatctatagatcaatttgggaagaattgccatcttaatgatattgtgccttttaatccatgaacatagagcatttcctcttttattttgatcttccttaatttctctcagaaatatttacagtcttatactttcttttacatttttatccctaagtatttaatgttttt

SEQ ID NO: 420017 - DNA, 552 bp, Homo sapiens
gacgttaagtaggagtttagatttttatctttttgcatgtggatattcaatttctccagtatcatttgttgcaaattcctttctccactgaattgctctgacaactttgttgaatgttagctgaccataactataaaggctcattattttattctgttctgtagattatctggaccctattgttctgtttcattggttggcacacttatccttatacaagcaccactgtactgatgatttagatttatagtaggttttgaaatcgggaagcatagtcctctttgttcttttttttttttttttcaagactgatttgctgttttggggaattaagttgttcattctacaraaaagcctcttggggttttatagggtttatgttaaatctatagatcaatttgggaagaattgccatcttaatgatattgtgccttttaatccatgaacatagagcatttcctcttttattttgatcttccttaatttctctcagaaatatttacagtcttatactttcttttacatttttatccctaagtatttaatgttttt

SEQ ID NO: 420018 - DNA, 666 bp, Homo sapiens
taggttttgaaatcgggaagcatagtcctctttgttcttttttttttttttttcaagactgatttgctgttttggggaattaagttgttcattctacagaaaagcctcttggggttttatagggtttatgttaaatctatagatcaatttgggaagaattgccatcttaatgatattgtgccttttaatccatgaacatagagcatttcctcttttattttgatcttccttaatttctctcaraaatatttacagtcttatactttcttttacatttttatccctaagtatttaatgtttttgatgattttgtgaatagaaatttaatttcatttatattctttattgctagtatataaaaatgcaattgaattttatatagcaatcttgtatcacgcaaccttgctgaacttgttcattaggtcttatagggatttctttgtggggtgtggattacttaggatttacacatatgggaccatgtcatctgtgcataaagacagtttttcttttttctttttcaatttggatgctttttattccttcttcttgccttaatgcactggctagaacttcctatacaatgttgaataaaagtggtgtgattggatgttgttgccatttcctgatgttagggagaaaacatttgctccttgatttgtaagc

SEQ ID NO: 420019 - DNA, 578 bp, Homo sapiens
  misc_feature (1)...(578): n = A,T,C or G
gcctgcacctgggcacacaaccaaacagcagtgaggagcctgccagctggtggtttggcctcgcagtgaggcagactgtgatcagggccacagccaggcaagctcaggggtcttgcggctatttcgtggccaagacatcagtgaaactttccttgacagcaacagctcagccaagtaggaatttgtcaagagattgttctgggtccagatgtgattgatgctgaagagttcagaaatgaaagtgcattaacccagtccaaggcagttgaagtcatggtttgaaatctattggggttaatagcaattatagaattagccatttgtttgccaatctactcaaatttctgttcaaatgcacccacagccaatgaaatacaagctcccaaataaacwctaaggtcccacattgtcgcaactacgaggttgtatataaggattggagaattcaaatgtagaaagtctgaggggcttggtgtgagatcccagggaaagagcttgggggatcttctttctccagtttagattcacaaggcccctgaggagggtcttctctgtgtcaccacannnnnnnnnnnnnn

SEQ ID NO: 420020 - DNA, 563 bp, Homo sapiens
cactggcagcaaccccccaatcattagctatggggccactatacatttacaagcaccctgaggacaggctatcccacccgcagccaccacctggagcagaaatgcgagctccccagctacctgcccatagctgctgacactgaaagcaaccctgccctcaccaggagtaggactgcagtgagccactcgccatccccatctgagcaccttaccagaggcctagggatcaccacacccctaccaccacagccggcaaccatatgcaccactggggrtcacgaagacaggcctgcccagcctggccccactcacctccccaatgcccaagcacaccatctaggtgcctcgggatcatctttccctgttaggcacttctgagcacttttcccagaagcctgaagacaggctcacacagcctacaactaacaccagagctggcacttacttgcgcatgccaccttcaggccagaagactgatctgcccagcccattataaccaccaccaccatcagtgcaaaccacttgggagccacagggttgtcccaccactgctattgccattg

SEQ ID NO: 420021 - DNA, 405 bp, Homo sapiens
acagaacagggagcctgaatatgtgccaacttgactgggataagggatgcccagatagccagagaaacattatttctgggtgtgtctatgagggtgtttctcaaagagattagcatttgaatcagtagactgaacaaagaagatccaccttcaccaatgcaggtgagcatcatccaaaccattgagggcccaaatagaacaaaaaggtgaagcaagggtgaattgtctcgctctttttgagttgagacattcatcttctcctgtcctcagacattggagctcctggttcttaggwtttcagacttggaatgaattacaccattatcccccctgggtctccagcttgcagagagtagatcatgggacttcttggcctccatactcatgtgggccaatctctcataa

SEQ ID NO: 420022 - DNA, 619 bp, Homo sapiens
ctgcccaaaacacaggctcacccaacacccacccttccctatttgtttcccctgtgtcttctccccagctggcacacagttcggctcacttatgatgtttaccgtctttctctaccccaggawgtaaactcaacggggcaaagatttttgtctgctttgtttactgatttatctttagcacccaatagaatgtctcacaatgctaagtactcaaaaatgtttgaagcaatgaatggaaaaaagaatgaataaatgtcttccaacttgctccctcttgcccaagggttgccccagaggccctcagggcgagtaaatcatctaagttcttatattcctgaaaatatttttattttgctgtcatatataaataaaaatttagccaggtgtggtggcgtacacctgtgctctcagcttctcgggaggctgaggcaggggaatcactcaagcccaggagtttaagaccagcctggacaacatagtgagactccatctggaaaataataataataataattttctgagttataaatgaaaatttatctgacataaaattataggttcaaagtacatttccatcaacatttgaagaaaacactccttcagctttgttcttgggaga

SEQ ID NO: 420023 - DNA, 619 bp, Homo sapiens
ctgcccaaaacacaggctcacccaacacccacccttccctatttgtttcccctgtgtcttctccccagctggcacacagttcggctcacttatgatgtttaccgtctttctctaccccaggaagtaaactcaacggggcaaagatttttgtytgctttgtttactgatttatctttagcacccaatagaatgtctcacaatgctaagtactcaaaaatgtttgaagcaatgaatggaaaaaagaatgaataaatgtcttccaacttgctccctcttgcccaagggttgccccagaggccctcagggcgagtaaatcatctaagttcttatattcctgaaaatatttttattttgctgtcatatataaataaaaatttagccaggtgtggtggcgtacacctgtgctctcagcttctcgggaggctgaggcaggggaatcactcaagcccaggagtttaagaccagcctggacaacatagtgagactccatctggaaaataataataataataattttctgagttataaatgaaaatttatctgacataaaattataggttcaaagtacatttccatcaacatttgaagaaaacactccttcagctttgttcttgggaga

SEQ ID NO: 420024 - DNA, 619 bp, Homo sapiens
ctgcccaaaacacaggctcacccaacacccacccttccctatttgtttcccctgtgtcttctccccagctggcacacagttcggctcacttatgatgtttaccgtctttctctaccccaggaagtaaactcaacggggcaaagatttttgtctgctttgtttactgatttatctttagcacccaatagaatgtctcacaatgctaagtactcaaaaatgtttgaagcaatgaatggaaaaaagaatgaataaatgtcttccaacttgctccctcttgcccaagggttgccccagaggccctcagggcgagtaaatcatctaagttsttatattcctgaaaatatttttattttgctgtcatatataaataaaaatttagccaggtgtggtggcgtacacctgtgctctcagcttctcgggaggctgaggcaggggaatcactcaagcccaggagtttaagaccagcctggacaacatagtgagactccatctggaaaataataataataataattttctgagttataaatgaaaatttatctgacataaaattataggttcaaagtacatttccatcaacatttgaagaaaacactccttcagctttgttcttgggaga

SEQ ID NO: 420025 - DNA, 471 bp, Homo sapiens
tttccgttcaagtctgaaggcaggaagaagctgacctttctgtttgaaggccatcaggcaggaagaattctcttgctctggacagaatccaccattttgttccattcaggcctccattcacataagggagggaatctgctgcctgcagtccaccagtgtcaaggtcaatcatatctaaaacacccaacctaatcatagaccaaatgtctgggcactcgatggcctgggcaagttgacacatacaagtcaccaccacagtccccatgggagatgtgtcctggatgtgtggaggccagagcaattcagtctggagggtgacgycctgagctgcacagtctccatattctctcttccaggagacactcctgaggagaggcttcaatcagccgcttcctagatgagtgacagaggcagtgagggtcccagacaccatgtcatgtcagtgatagggagcaggtatgggtctgtgtt

SEQ ID NO: 420026 - DNA, 559 bp, Homo sapiens
tactcgcggtcttcagagccgcccttggccacccattcaaggacggatgtcagaattcccagctccttctctcagagctgtccagcctcttccctacaccctggagctgtccagcctcttccccacgccctgcctgttgtcatctgtagcacacttcatccaagcttaggcgtttgatcttgatccccagggaagggacacaggggatttacctaaaattrcctaaaacacaaactcatgccttcattttctcacaggcattgtggcgagtcttcccagtgtggggtttctgaatggttaggggagagggagagagagagacagagagagacagagatctttacccagagagttgagaacatgtgggagggaagctctggactcaaggaatcagcttcagatcccagctgtgctaggtattgcccctaagatagagttaacattccctcaaatgcccaccctacattctgcaggaaaatggaagccttcgcaagactcttctaaatcctaggggatttacatctcccctggcctccaagttctcctggttctagctcca

SEQ ID NO: 420027 - DNA, 574 bp, Homo sapiens
tttttaagttgatgaatgatataaagaagggctaccagagcaaatgggatagatacaaaccagataaataaataagtacaacttttaccatgtaataaaaaataaaagacggccaatgagaagtgaaaaccttaaaagtatctagagaagaaaagkcatatctccctaaaagcaataatgaaatgacagctaattcctcagaagaaaagatgaaagcccagagataatggaatagcatttaaactattgatttttttccacattttgaagcttttctgaaagatattccccaaaagctagttagataataattagataatgattacatatagagaaagaagaaatgccttagatggattgagttcattagactaatcctcaaaaataaaaatgttctgagaaaataagccacagaataggcactacctaaacttaggcaaagaataggcaagaaatcactaaaaactggattcagtgacagcatataaagtgtcacaattccacatagaataagcacatattaacacactttttgaagatgtattgcttgtatattttggacgtgttatatgcc

SEQ ID NO: 420028 - DNA, 556 bp, Homo sapiens
atgaagtgagcacatgctattggaaaagtggcaatagtagacttccttaattcaggcttgccacaaaccttcagtttataaaaaaatgcacaatatctgaaatgcactaaggcaaagtgcaataaaatgatgtatgcctgcgtatgtctgtatcctatttctaataaacatatatacattagcaacacttttacagactctgtcttttaaacaatgtattaaaagataaagcttaacattgctgtcagcatgtgtgtcttcaaattagtaaatttggtgttatgttgaattacagtagatacccaactttagttttaattaagtcatctgtgataacatatgtagcaagtgatttgtttttcttcttaattctagagaattattttcaacacaacataactacaaagtctgggatattatgattgtattttttccactagctatgtatctaattatattttgtayacattttcaacaccttaccagtgttttcgacctagcacacacacttctcaatccagtatggtacttgcaatttctcacataactgaatgga

SEQ ID NO: 420029 - DNA, 534 bp, Homo sapiens
tagacatttcaatgcagctttcattgattttgcacttatctggggtactattacttttaactgtcttttgagttttcataatgtctttttggattatatattgttgttaatttggtgtctctgtaggaaatctataagcacggttttgtttctcactgccaccaaaaatcccaataccagtataaaattattgttgtcttagtccactcaggttgctataacaaaatactataaactgggccacttataaacaacagaaatttatttgtccagttttggaggctgsaagtcaaacatcaaagtactggcagattttgtatccgatgaaggcccattgcctgaataatagttggtgccttcttgctatgtcctcacataatggaagggtcaaataagctcccttgagccttttatgtaagataattaataccatctataagggctctacccttattatctaatcacctcaaaaaagtctcacttcttaatattaccttgagttagaatttctagatatgaatttggtagttacaa

SEQ ID NO: 420030 - DNA, 514 bp, Homo sapiens
tttctcaacagttttaacatgctcaccaatagtgtatccaagggtgcgttatttcctatctctttgtcagcatagatgtttcacaagtttaaattatttgaaagataggaaaaggcatctcatggttgttttaattttcacttatttgaattrctggagaggttaaatactataccatatgttgcaaatttatatttcctcgtttaaaattgaccctttataacctttgtccatttatctaatttgactcaactgtttttttctatggtttcatacaactttttatatagtaaatgtttttatttacaataaaatatttattgtgtctatttttgtataggctttatttttcccctgctgtatttatctgataatttatcttccaaagaaatttgaaatcattcttttccttgttgagtaaccattttcttttttctgagatcttatttattcaaagatttgatgtctgtctatatttcaatttatgttttgttccttaagggcttagtatgat

SEQ ID NO: 420031 - DNA, 514 bp, Homo sapiens
tttctcaacagttttaacatgctcaccaatagtgtatccaagggtgcgttatttcctatctctttgtcagcatagatgtttcacaagtttaaattatttgaaagataggaaaaggcatctcatggttgttttaattttcacttatttgaattactggagaggttaaatactataccatatgttgcaaatttatatttcctcgtttaaaattgaccctttataacctttgtccatttatctaatttgactcaactgtttttttctatggtttcatacaactttttatatagtaaatgtttttatttacaataaaatatttattgtgtctatttttgtataggctttatttttcccctgytgtatttatctgataatttatcttccaaagaaatttgaaatcattcttttccttgttgagtaaccattttcttttttctgagatcttatttattcaaagatttgatgtctgtctatatttcaatttatgttttgttccttaagggcttagtatgat

SEQ ID NO: 420032 - DNA, 514 bp, Homo sapiens
tttctcaacagttttaacatgctcaccaatagtgtatccaagggtgcgttatttcctatctctttgtcagcatagatgtttcacaagtttaaattatttgaaagataggaaaaggcatctcatggttgttttaattttcacttatttgaattactggagaggttaaatactataccatatgttgcaaatttatatttcctcgtttaaaattgaccctttataacctttgtccatttatctaatttgactcaactgtttttttctatggtttcatacaactttttatatagtaaatgtttttatttacaataaaatatttattgtgtctatttttgtataggctttatttttcccctgctgtatttatctgataatttatcwtccaaagaaatttgaaatcattcttttccttgttgagtaaccattttcttttttctgagatcttatttattcaaagatttgatgtctgtctatatttcaatttatgttttgttccttaagggcttagtatgat

SEQ ID NO: 420033 - DNA, 483 bp, Homo sapiens
atcttacactgaagcctggtctttctctcctggatagcatattttaacttttttttttttttttttttttttttttttttttttttttcagattcttctgtaatgttctcaccaatgcttttgaccccctttccggttcttcatacacggaaaatgcaacctttttagggcccattctactgtatgagccccaagctttccttacttcatttataacatatataacactattgatttttaacctatttcttcagtccattcccctctccggggattcagaaaacggccaggttttcttcggcctaccagcagaaccagtttcaagggcaagccacctgcttagaaacatggcgycccatgcatggaagagccctgtgcttaatttaatgttctgctgtcaccatcttaatacatttaataatccttgaataagaccttccattttcattttgtgctgggccttacaaagtatgtagccaggca

SEQ ID NO: 420034 - DNA, 571 bp, Homo sapiens
ggttcacttggtgctttttatatatctcagttacacaatttatcacttgagttgttgaggaaatgatcgttatttttattgtgctgttagcgttagcacacagtccagtatagtgcaggcaatggatgtttcttaaatattaaggtattactattagttataaagtcagcctatatttttattcaggcataccttattgtattgtacttcactttattgtgtttcacaaatattgcacttttttacaaattgaagatttgtagtacctgtgagttgagcaagtccactgacaccagttttttcaacgcaagtgctcccaacgtgtctctgtcacatttgggtaatacttgcaacattacaaactttttcattattattatataggttagtgtgatctgtgaatagtaatctttgattttactaagctaattgttttggartgtcaccaactgtgcccttataagacagcgaacttgataaatatgtgtgttctgactgctccactccctgttcccctacttctctccctctcgttgggcctccttattccctgagacacaacaatattgaa

SEQ ID NO: 420035 - DNA, 601 bp, Homo sapiens
tttttgttgtttgtggctctcattttgtttttaatatcagggctttccagaaaagcttctttgagacagtatctgacgttgtttctgaaggaacaattccctaaaggctttaaaatagaataaagattggaggaaaagtcaacaaactgccrcctccatcccacttacatttggtgaaaatatcctctacatcgcgtgtgcatagatacgcaaagaccgatgttatttaaatatctgtttataaaaacaaagtgtgtaatctaaatttctaagaattctagcatgtagtaattaatttattcaagaactcctgatttagaatattgtacactttgataaacatatgtacttttattctttaccatatagagaaaaaacagaacatttttattttcacatgtaatctaaatagatcgaaagaggttgttcagacaggataaagttctctccattcaacatattatttaaccttctcttcagaatattgctctatatatttagaagtatagaccccttttccaaacttgaaaaatgcctgacattggatgacaacctaggtttgagttctggctctgttgcttactcactgggtggtcatgga

SEQ ID NO: 420036 - DNA, 574 bp, Homo sapiens
cattttttcacttttctttctccttcctataaaactctataactcgtatcataatatctcacatacagtatgttctctgggaagatattcggtgcayaaaagaaaagagtattatgcccatctatttagccattagcaatgtgttcttctgtaacatatatatatctatgttatatatgtatgtgtgtatatatatgtatgtgtacatatatatatgtacacacacgagctggcagaaggagcatgtggtcaaagaggaagaaatactttcaggagtctctaaaaagggtcaagctgtggctttataataaattttatgtaatatattattagtcttctatagttagctttattttaaaaagtcttttgccatttttatttatttataatttctatctatatattttgccaccctttcgcaattaaagtatcattgtgatttaaattgaaattgcattaacaaattagttacttggaaaagtattcatatgctttttaaatgaaaatcctgtatttctctactggcacttttctattcatatataaacatggtcagttcattcatgtcttaaaa

SEQ ID NO: 420037 - DNA, 546 bp, Homo sapiens
caatggggtcttgcagtgggggagaaatattagactcaactcccagtcttttttcattctgctcctcagacagtgtagttttaattgtcccatcttcaggttcacagtatatttctcctatttattcaaatctggtattgaaactttcagtgaatttttaatttcagtcaatatattcttttcatcaccakaatttctatttggttcccttttttaacttttatctatttggttcccttttttaacttttatctatttatgctaggaaactagcatactcttagtttcctttatcttttcatctttttttttttaactcttggagcctctttaagagagttaatataaggtctttgcctagtaaatccaatgtctgttgtttctcaagtaaagtctctgttaattaattttgttcttattaataggccatgcattagtgtttctttatatccttcattttaaaagttagacattagaaatattataacatggccagttttatatgagattctttccctcttcagcgtttaactgaaggaaagcgag

SEQ ID NO: 420038 - DNA, 631 bp, Homo sapiens
cctgcattggggtgacctctgagcctgactctccaaacagggggagctcgtggagatgtagcccctgtcccagacgtgagcccaggcccagtaaggagctagagccccaaccccaggctccaagggggagtgtctctggctgcatgtccactgagcagcagaagctgggagtaggagcagctccactcccgggctgtcagcactgcagctacccatgttggggctatggacccaggtctccatgtgcttttggggactgggagcaggcaggtccccacccaccttgggctcagctgcacgtattcaagttggggctctggactygggcatctctgtgctcttgggggcccaggaagcacccttcactcgccttgcaggcttggaagtgcatgcttccacctccagcttctctttgctgtcagcacccactgcgatctcagagcaacctggggccaagcctgggtgctctcacagcccagtcaggggtgcacacgctcaaggcagtgctgacaatgccagccccctgctgcctcagctccccctggactttgggtgcccacaagtgtggtggcatggaggaggctgagggcggttcaacggcagctcagcactggcctacaggtgccccttg

SEQ ID NO: 420039 - DNA, 553 bp, Homo sapiens
gtggcatggaggaggctgagggcggttcaacggcagctcagcactggcctacaggtgccccttggtgtaagcagcctggttgccatggactgcaggcagaaagcagacaggctcctgagtggaagggataggtccctggtgaggtcccacctttaggtcagggagggcctgaagtctggagatcgggctgccagtccctcagactagagtgggaacttgcagtgccttttccaggcctgttcacggctactgacatgcacttcctcccttttgagaccgtaaaagccttgtgctcagctaaagctgaacagacatcaggatgaccagctgcagaggggagctacccaatcgagggcctcctctctgctgacagctgcagagacagtgggatgacctgcctgcagagagaagcctcccactccagggtctcctcttttctaggagctgaacacttgtttggacaccctggctgcagraaagagctacacactgagggtttcctctgagttattctattgctcaataaagctcttcttcattttgctcatcctcc

SEQ ID NO: 420040 - DNA, 553 bp, Homo sapiens
gtggcatggaggaggctgagggcggttcaacggcagctcagcactggcctacaggtgccccttggtgtaagcagcctggttgccatggactgcaggcagaaagcagacaggctcctgagtggaagggataggtccctggtgaggtcccacctttaggtcagggagggcctgaagtctggagatcgggctgccagtccctcagactagagtgggaacttgcagtgccttttccaggcctgttcacggctactgacatgcacttcctcccttttgagaccgtaaaagccttgtgctcagctaaagctgaacagacatcaggatgaccagctgcagaggggagctacccaatcgagggcctcctctctgctgacagctgcagagacagtgggatgacctgcctgcagagagaagcctcccactccagggtctcctcttttctaggagctgaacacttgtttggacaccctggctgcagaaargagctacacactgagggtttcctctgagttattctattgctcaataaagctcttcttcattttgctcatcctcc

SEQ ID NO: 420041 - DNA, 600 bp, Homo sapiens
ggttacctcctctgagtccaatatttatgaactgcaattctggtttatgttcattcagatgaccaagaaggtcagaggcttgggactcagaaatacttggacttagactccaactctaatgtctgaaagacgcgggcaatttgtacagcttgaaaaacctcatttcttctcctcacattcagaaaataataactacttaatgtatcaggtgtttgataactgtaaaacaaatattagttttcttcctatctgtttccactttccacactccctccttctcatatctatgaaacaaagcaaatggaactccattcatcacttgtctgatcaagtccagttaacccacaaaataccattttaatattgttctgcccagagttcccacccacaagaataatttttgcaacaatcygaacacttgaattatgatggctatggggatttttgtctcctttaatttcagtggaaactattcctctgcattcagatttacagagcaggttgtttcatgaagcagaataggcagaagtcagagtgaatatacttattaatacggtgaagcaagagagaatattcaatcaatatttgccgttgttaatg

SEQ ID NO: 420042 - DNA, 528 bp, Homo sapiens
gagtctggcatacttggcttgaggctttgttctacttaattcaatttcaattttttgactacaaagaaatgactgttaatcctcaaaaagtgtccattttttcctaaattaaatatttcatttttatggtatcatctgctaatccccacagtaattggtttaattaaaggaaaactatcctctttatttcagtatgacttatccaaaatattttgtgggtctcttcataattcttacatcactgaattactcttaatttatttccacaaaaatattccctcttatcttctattcctcaagatgtctattatgaacacgtggataccaaaattaaaaatataaggccatttacaagaggatctcttatagaataataacccagttagagaaaatatttctaaaaaattattaataattgttttataatatatttataatacttattttcatatttacytcatatattatataagactatagtactttgttataacattttattaatatcattacattttgtaacattta

SEQ ID NO: 420043 - DNA, 605 bp, Homo sapiens
tattagtcatgcaaatgctctcagtgtcagctttgacatctttaaaatggggggaatagtagggtttaacttatggaattattttgagggttaacacctattactatcatgtaaaatggtaaaacattttctgagtttcttgatgaagaaaaaagcatttaactttttctcatattwtttcttcctatcactaaaattgaaatagaatatttgccttttataaccaccactagagaatgtctaggaattcagtggtctagggcatattgtaaaattctccccaatggaagaaaaagatgaattctacctttaaaatgtccagtggttaattctggattctggaggcagcatatatcatggttatgtattttttcactgaatatttcaaaggttaactaaaaaagctgttgttttaaaatgtgagctagagcaacagaaggaaggttctccaggtgatcctgactaaaaatacttagtccatggactccggcggccctgatggagatgatctgtaatgaccgttacacactggatagaaggctcaagattcctctgtggtttttaagcaaggcaaatgcctcctaagtaaactattatgtgagata

SEQ ID NO: 420044 - DNA, 605 bp, Homo sapiens
tattagtcatgcaaatgctctcagtgtcagctttgacatctttaaaatggggggaatagtagggtttaacttatggaattattttgagggttaacacctattactatcatgtaaaatggtaaaacattttctgagtttcttgatgaagaaaaaagcatttaactttttctcatattatttcttcctatcactaaaattgaaatagaatatttgccttttataaccaccactagagaatgtctaggaattcagtggtctagggcatattgtaaaattctccccaatggaagaaaaagatgaattctacctttaaaatgtccagtggttaattctggattctggaggcagcatatatcatggttatgtattttttcactgaatatttcaaaggttaactaaaaaagctgttgttttaaaatgtgagctagagcaacagaaggaaggttctccaggtgatcctgactaaaaatacttagtccatggactccggcggccctgatgragatgatctgtaatgaccgttacacactggatagaaggctcaagattcctctgtggtttttaagcaaggcaaatgcctcctaagtaaactattatgtgagata

SEQ ID NO: 420045 - DNA, 555 bp, Homo sapiens
tatactaatactcgataagaccgactataaatcaaaaaaggttaagagatatgaaggacataatataggaataaaacattctatacagcaagaagatataacaactatacatattcatgaacttaatggcattccatcaatatatgtaaagcagaaacttatagaactgaaggaagaaatagttctacaataatagtaggagacttcaatatcccaccctcaataggttagcaaaaccagacaaatgataagtgaagaaacagtggatttcaataacataataaacaaactagatctaatagatatatccgccacactstatccaatgataacaatcatattcatttttctcaagggcacatagaacattttctatcatagaccatatgttaggtcacaaattaagcctcaactgatttaaaaagataaatataaaatgtatctgtgcctaccaaacaaggagaagtcagtaacggaagtaaaacagaagaattcaaaaaattgtgaatgttaagcaacacatttttaaacagtcaattaatagaagaaaaaaaa

SEQ ID NO: 420046 - DNA, 561 bp, Homo sapiens
ttgctaaggataatgacctccagctccattcatgttactgcaaaggacatgatcttgtttttttgatggctgtatagtattccatggtgtatcaacatattcaattcttgaagcctagttttattgctttcagtagttcccaaaaagggcagtcctttctgcctttcatcaacaaacatcctgctaagggtaaacaattgttcagcatatttcttgaagcttargtctttctgtactttagccaaaatgccccacattattttgactcaaccacagcttggaggaaagtgaacaacctgggtcactttcacttttcacagattccctggaatctgttcttgccttcaggataacatttcttagcaaaaattcaggaacatttatgctatgatttctgcctacccttccagcatcattttttgctgctccttaactatagacctatctcccaaatcttttaggtaaagttctctgaatgcatctggcaatccttgtatctattttctcatttagaatttctatttctcttctacctgcattatatttatctgattaatattc

SEQ ID NO: 420047 - DNA, 535 bp, Homo sapiens
taggtctttctgtactttagccaaaatgccccacattattttgactcaaccacagcttggaggaaagtgaacaacctgggtcactttcacttttcacagattccctggaatctgttcttgccttcaggataacatttcttagcaaaaattcaggaacatttatgctatgatttctgcctacccttccagcatcattttttgctgctccttaactatagacctatctcccaaatcttttaggtaaagttctctgaatgcatctggcaatccttrtatctattttctcatttagaatttctatttctcttctacctgcattatatttatctgattaatattcacctgaatttggaggtttaattctaaacttaatctccgacaaatctttttgatgccccttaacaatcattacataatttgccataaaactgaccataatatttgcaatttaccatagtacattgtaattatgtgtgcatttctctttctcttccatgaatgagtaaaagatttgaaggaagcaatgatataatcc

SEQ ID NO: 420048 - DNA, 551 bp, Homo sapiens
ttttttaagtctcgatttcatttagttttgctctgataactatwtttttttctttccttctactaattatgggtttggtttgttcttgctgttctagtttgttgaggtgcattattagcttgtttatttgagaactttttatttttttgacgtaggcttccttgtaatatatttgcaccttagcagtgcttttgctagatcctgtaggttgtagtttcattttaatttgtttcaatatttttaaaatttatcttcgtaatttctttattgatccaattgccattcaggagcatgttgtttaatttccatgtctttatacagtttcaaaagttcctcttgatattagtttttaactttattttattgttgtctaagaagatacttgatattatttttactttgttgagcgtgttgagttttgttctgtggcttaacatgtggcttattctagagaatgtttcatgtactgatgagacaaatgtgtatgttgtaactattggaagaaatagtctgtaaatgcctattaggtcaacttggtctgtaatgcagat

SEQ ID NO: 420049 - DNA, 512 bp, Homo sapiens
ttttttaagtctcgatttcatttagttttgctctgataactatttttttttctttccttctactaattatgggtttggtttgttcttgctgttctagtttgttgaggtgcattattagcttgtttatttgagaactttttatttttttgacrtaggcttccttgtaatatatttgcaccttagcagtgcttttgctagatcctgtaggttgtagtttcattttaatttgtttcaatatttttaaaatttatcttcgtaatttctttattgatccaattgccattcaggagcatgttgtttaatttccatgtctttatacagtttcaaaagttcctcttgatattagtttttaactttattttattgttgtctaagaagatacttgatattatttttactttgttgagcgtgttgagttttgttctgtggcttaacatgtggcttattctagagaatgtttcatgtactgatgagacaaatgtgtatgttgtaactattggaagaaatagtct

SEQ ID NO: 420050 - DNA, 551 bp, Homo sapiens
ttttttaagtctcgatttcatttagttttgctctgataactatttttttttctttccttctactaattatgggtttggtttgttcttgctgttctagtttgttgaggtgcattattagcttgtttatttgagaactttttatttttttgacgtaggcttcyttgtaatatatttgcaccttagcagtgcttttgctagatcctgtaggttgtagtttcattttaatttgtttcaatatttttaaaatttatcttcgtaatttctttattgatccaattgccattcaggagcatgttgtttaatttccatgtctttatacagtttcaaaagttcctcttgatattagtttttaactttattttattgttgtctaagaagatacttgatattatttttactttgttgagcgtgttgagttttgttctgtggcttaacatgtggcttattctagagaatgtttcatgtactgatgagacaaatgtgtatgttgtaactattggaagaaatagtctgtaaatgcctattaggtcaacttggtctgtaatgcagat

SEQ ID NO: 420051 - DNA, 605 bp, Homo sapiens
tggtttccacttgcatggattttttttttttcttcacttctttcagtctatctgtgtctttactggtaaagtgagttttcggttggcagcatatagttggatcttatatttttaattcattcatccagtctatattgtttagttggggaattaaaaatatttataattaatgttattattaataggtgaggacttacacctgccattttgttactagttttttkattgttttatatatttcttttcttctcttccttttttatttacctttataatttggtaaagttttttgttgtaatttcatttgactcctatcctttttcacttgtgtgcctgctgtactagtgaattatatacttctatgtgatttaatgatggtagatgtcagccttccacttccacaagtaggtccctcttaagtatttcttgtagggcccatctagtcatgatgaattccttcagtttttgcttggctgagaaaagctttatttctccttcattttggaaggataactctgctgacaggtttttattttttcctcttagcactttaaatatattttcctttttattctagcctgtagggtttatatgagtaatccact

SEQ ID NO: 420052 - DNA, 562 bp, Homo sapiens
ctaactgtacatttgttgttgcagtggcttcttcccgttttttggattagctttctcagggaaatactgtttcctatggttgtatcctatagtgttggttgggtaggatgcttttgctttgattctagtgggttcaatagtgtagcctctatatgatttgttcagctgtcattaacatccgtgttgtctgtgagttgctcaatggataggatgcagtgctagtggaggctgtggcaaggtttttgctgggtacagtgacacagtttaggtcattccatgggcaccagttgtagtgatggtaggccaggtaggtgaatctctgttcccctgggtagcatgcatggccttagcagtgttagtcrtggcagcaggctcagccttgggcccctgtgcagcatgtacaagtgccagttggcagcagcagaatgggaagactgattatcatgtctggatggcacctataggcatcagtgacagtcagggtgagactgtccttatcctcctaggtttgctcatgtgtcagtggtaatgggcaaggcaggcttatctccagaccctcaga

SEQ ID NO: 420053 - DNA, 562 bp, Homo sapiens
ctaactgtacatttgttgttgcagtggcttcttcccgttttttggattagctttctcagggaaatactgtttcctatggttgtatcctatagtgttggttgggtaggatgcttttgctttgattctagtgggttcaatagtgtagcctctatatgatttgttcagctgtcattaacatccgtgttgtctgtgagttgctcaatggataggatgcagtgctagtggaggctgtggcaaggtttttgctgggtacagtgacacagtttaggtcattccatgggcaccagttgtagtgatggtaggccaggtaggtgaatctctgttcccctgggtagcatgcatggccttagcagtgttagtcatggcagcaggctcagccttgggcccctgtgcagcatgtacaagtgccagttggcagcagcagaatgggaagactgattatcatgtctggatggcaccwataggcatcagtgacagtcagggtgagactgtccttatcctcctaggtttgctcatgtgtcagtggtaatgggcaaggcaggcttatctccagaccctcaga

SEQ ID NO: 420054 - DNA, 516 bp, Homo sapiens
ttcatgtgatttgccataatgactataccaatttacattcccaccaacagtgyacaagaattctctttcctgtgtgtttttatggccgagactgctagcttctgccctttctctttcttaccagttgtgatcaaatatctcaggtttgaccatctctccagtaatcctttctgtgtggttgttctctgttttttgctccaatagttccatgtatgttgctgcattttcttaaatggacccttgagctctcccaaggctactaactattcatagataactgtctatttgctgttttttgtgaggtgggggtggtgggggagaaatgaggctactccaccattttgctgtttattatcatacctgactttttcatgtttagctttaaaatacacctggaattcattttgttataatataaaatagagtaactcttcacccttcactcctcaccctcattataaatgagtgtcatgcaaactggagaaagcccttgttttcctgatcaatttggaatga

SEQ ID NO: 420055 - DNA, 516 bp, Homo sapiens
ttcatgtgatttgccataatgactataccaatttacattcccaccaacagtgtacaagaattctctttcctgtgtgtttttatggccgagactgctagcttctgccctttctctytcttaccagttgtgatcaaatatctcaggtttgaccatctctccagtaatcctttctgtgtggttgttctctgttttttgctccaatagttccatgtatgttgctgcattttcttaaatggacccttgagctctcccaaggctactaactattcatagataactgtctatttgctgttttttgtgaggtgggggtggtgggggagaaatgaggctactccaccattttgctgtttattatcatacctgactttttcatgtttagctttaaaatacacctggaattcattttgttataatataaaatagagtaactcttcacccttcactcctcaccctcattataaatgagtgtcatgcaaactggagaaagcccttgttttcctgatcaatttggaatga

SEQ ID NO: 420056 - DNA, 512 bp, Homo sapiens
gcagtggcatgatctcagcttatttgcaaactctgccttccgggttcaaatgattctcctgcctcagtctcccaagtagctgagattacaggtgcctgccacagtgcctggctaatttttgtatttttagtagagacggtgtttcaccatgttggtcaggmtggtctcaaactcctgacctcaagtgatctacccgcctcagcctcccgaagtgctgggattacaggtgtgagccacagcacctggcctgatttccttagtattttttaaactgtggtataatacatttaacataaaatttaccatcttcactatttttaagtatagagctcaatagtgttaagcatatacacaccattgtgcgaccaatctcaactttttcatcttaaaaaattaaaactctatgctattaaacaattttccatttcctcctgccttcagcccctggcaaccatgattctactttctgtttctctagatatcctaggtgtctcatgtaagtggaatcataa

SEQ ID NO: 420057 - DNA, 594 bp, Homo sapiens
caccattaaccagtcttatgacctgagcagtctctctctctggacttcagtgtccttattcacaaaaggcagatgtttggtaacwggaccatacgctctctaagatatttttcaacttggaaattctatgaatcaatttggagaaatatttgaaagacaataagaataacagttgacttttatatggtattttatacttgctaaattacttttccttccaaattcttggctggtgttaatttcacggcaattgagattaaggattccagaggcgatagactggtattgagttctgatgtgtcactaaccagctgtgtggccttgagtaggttatttaacccatctacagctcagagagttgataaggtgattaaatgaggtaaggcatgcacagtatttagaatagattccggcctatgttacacacacagtaactattattaacacctgattcaatgtattgtaattgtatgttcacatgtctctctcccctcctagactatgaactccttatagatgaagacctcatcctgctcatcactgcattcctagcatagtgcctaggtcataatcagtactcagtaaatgctcact

SEQ ID NO: 420058 - DNA, 594 bp, Homo sapiens
caccattaaccagtcttatgacctgagcagtctctctctctggacttcagtgtccttattcacaaaaggcagatgtttggtaacaggaccatacgctctctaagatatttttcaacttggaaattctatgaatcaatttggagaaatatttgaaagacaataagaataacagttgacttttatatggtattttatacttgctaaattacttttccttccaaattcttggctggtgttaatttcacggcaattgagattaaggattccagaggcgatagactggtattgagttctgatgtgtcactaaccagctgtgtggccttgagtaggttatttaacccatctacagctcagagagttgataaggtgattaaatgaggtaaggcatgcacagtatttagaatagattccggcctatgttacacacacagtaactattattaacacctgattcaatgtattgtaattgtatgttcacaygtctctctcccctcctagactatgaactccttatagatgaagacctcatcctgctcatcactgcattcctagcatagtgcctaggtcataatcagtactcagtaaatgctcact

SEQ ID NO: 420059 - DNA, 550 bp, Homo sapiens
ttataacaatgactgtggcactcattgtcatgatgtttacttcaatcagataggatatgattttacctctgattagcmcttgtgggtattgttgcaacactatctacaaatcactgtaaaatgggcaaaggtctctcctactccttcctgactcttccattgtgtaccttgctgcgtccctctaccctagccacaacacatatccaccctacttgtgataccagaagtatattcctagaacataatcaaatcatggtcagatttatttattatgtaaaatatattcagtggtttataattgattgattgtgcaatgaagtccaagtgccatgacctggtaacctggcattggagacaccctatgagagagcttgctctgcttctaccgtgtgtcccactgcctacccttgtggaccataagttgtaggctggtcaaactacttattactcaacaacatacctgcaagggtgatatcttcttccccatgataccgcttccaccatcattgatgtcaacatcctgcccatatggtataccaagctctaataa

SEQ ID NO: 420060 - DNA, 494 bp, Homo sapiens
tgacaggctgttttctggtcccctttycttattagaaatttagttctctatgttctatactcagctccttgctgaacttatacgttttttccccataaatcctatacattctctttcagggccattaagtcccataaaggcgatgattcggggagacccactttcctgggcagctaagccatgctaagggatgaatggagaagcataggtggatggagccgcatggaccacttgctctcagagggtcttggactctaagtgaaggcatgtgtgccttatggagtaaagcacagctctgctagagggttccacacagaggagaggctgcatcagctttagaaagttccctctagtgactgttagaagatgcgtagagaccatcttctacttgttgaaatgatattataaccatggtaccatatcccttcctgtctcttggcaaactacatggccttgcaattactattaaaagcaagaagactcttcaagtattt

SEQ ID NO: 420061 - DNA, 576 bp, Homo sapiens
acatgcatggcctgaactaagagaagactgaagtaatcatttttgacttttttgcttacaacattgccgatcaaccagcatagcacatgtttacctatgtagccaacctgcacatcctgcacatgtattaaagtaaaataaaataaaataacaaaaaacttaaagtaaaataaaataaaattwaaaaacccacaaaaaatgttgctaatcctttgttttgattttcagaattaagaaaactaatgtgagctatttacagcttgtagcaattgaagaaagtacactactgtgaacaaaatttggagcatatttctttctctctacctgatttctccagggtttggaaactatttgtgagtattcttaatttacaggaatatagttattcgcatcagtgcaataagcatgtgttacaactggataccattagagaaactggttattttaccaagactttgactggaatggtgtgctttccttaaggaaccaaacttgacttatagatccaataaaagcccattgggaaaactggcctcataccttgtctcctcagtccctgtacagggtttctgatct

SEQ ID NO: 420062 - DNA, 503 bp, Homo sapiens
ctccagatacattttgaaggtaaaggcagcatatttgcctgcagactgsatatagtgtgagaaagaaaggttaagggcaagatccagaatgtcaactgcatagctgacttcagaaaataaccagttcaaatcagagcaaatggatgaagagggcataggtttccagatgaaatgggcaaaatatctttgttttgaatacctgaaaattatattagtaggcgtataacagatttagtagagcatatttaaaaattaagagtagatacatagaaaatgaaccaataaacaaaccaggcaattattaatcttaggaaaaaaatattaaatatataataaaaggtatataagcacaggtttatttagctttgcagggaacaatatttttatagtattaataacataaacacagagtaattgatttagcaaaatattgtgatagaactctactggaaggatgagaggagggggaaaactacaaaaaactaaataaatccttatttgcc

SEQ ID NO: 420063 - DNA, 503 bp, Homo sapiens
ctccagatacattttgaaggtaaaggcagcatatttgcctgcagactggatatagtgtgagaaagaaaggttaagggcaagatccagaatgtcaactgcatagctgacttcagaaaataaccagttcaaatcagagcaaatggatgaagagggcataggtttccagatgaaatgggcaaaatatctttgttttgaatacctgaaaattatattagtaggcgtataacagatttagtagagcatatttaaaaattaagagtagatacatagaaaatgaacmaataaacaaaccaggcaattattaatcttaggaaaaaaatattaaatatataataaaaggtatataagcacaggtttatttagctttgcagggaacaatatttttatagtattaataacataaacacagagtaattgatttagcaaaatattgtgatagaactctactggaaggatgagaggagggggaaaactacaaaaaactaaataaatccttatttgcc

SEQ ID NO: 420064 - DNA, 386 bp, Homo sapiens
gatacagaactagcaagcactgtgctaggcactttgtataatgatttcacttaatcctggaatatgacaaaatcttcctaataggccaagggttttttgtttgtttgactcttctggccatagatgacataggtcatggttagcgctttttttgtgtctgcttttgtctccctgttattatttctgctagtttccttactgctacttcagccatcttaaattctttaaacaaaacaataaacatcatcatataataawtaaattggaagggatctttaaagaccccaagcccaatccttcattgtaaagataaagaaactaagggctactaggaagagcgtgacaaggaataagtgccacaagcaacagtcaactttctcctgttc

SEQ ID NO: 420065 - DNA, 511 bp, Homo sapiens
aaacatctcatgctcatgaattagcagaattaatattgttaaaattaccatactatttaaagcaatctacatttatttaatgtagatttattcaatgcaattcctatcaaattaccaatgtgatttttcacagaattaggaaaaataattctaaatttatatggaaccaaaaaggagcccaaatagccaaagcaattctaagcaaaaagaataaagctggagacatcacatactggtataaaaatagatcagtggaacagaatacagaaccaaggaacaaagccacatacctacaaccaacaaatctttgacaaagtcaagaaaaatatacattggaaaggacaccttattcaacaaatggtgctgggaarattggatagctgatatggtttggctctgtgtccctgcccagtgaggtgtcagagcactggcaccagaaagagatcgactcgcaagttggtaaaaataatttaccaacaacagtataagtttgaaaaagcaaagtttatta

SEQ ID NO: 420066 - DNA, 528 bp, Homo sapiens
acaggtgcacaacaccacacctggcccattgttattattaagaaattaagctgtcgtttaattgtgtctcctttgttgggtaatctatcatttctttctagttgcttttaagattttcttcttgtctttgttgttttgcagcttcactctatgttggggtgggaatttcttttatttatactgttcrggatttgttgaccttcctgaatatgataattgatgtctttcatcaactttttaaaattattagtcattatttctttaaatattacttctccttatttgaatgacctcttcctggaaatgctaattagctcttctcactctatattctatgtttgtaaacctctctatacctgtctgtctctctgagctgcaatttgaatattttttcaattttataatccattcattaattctaattagctgtatctaatctgctttttaaccttttgattgagttttaaatttcattacattttcatttttgaaggttcagtatggttagttttcaaattttcctgatga

SEQ ID NO: 420067 - DNA, 573 bp, Homo sapiens
tttggaagtccaatatcaaggggctggcatatggtgagggcctttaggctgcctcatcccatggaagaagagtggggcacatgcaaaagagaaaagcacaaggcactgtgcctgctttataacaacccactcctgagataactaacctactcgtgtgataatgacaatcagttcatgagggtggagcccttatgacctaaatatctcccattcagccctrtctcctaacactgttgcactgggaattacatttcaacatgagttttggaaggaacattcaagccatggcagctcccaagattcccaccgcctggtgtataaaccctataaaatcccctccctttgagtattgtaggaattagtgaatatgatgggatagtttctccatgtgagcaaagtgatgagatactcattcccattattatgttatgttgcttaaaatttcatcagagcagatagcccagactaccccactgcaggagtctcctgctgaccttgaaagagcaaactgacaatgtagcagggactagcaggtggcttttaagggagtggaagatacgccccggctgacaa

SEQ ID NO: 420068 - DNA, 573 bp, Homo sapiens
tttggaagtccaatatcaaggggctggcatatggtgagggcctttaggctgcctcatcccatggaagaagagtggggcacatgcaaaagagaaaagcacaaggcactgtgcctgctttataacaacccactcctgagataactaacctactcgtgtgataatgacaatcagttcatgagggtggagcccttatgacctaaatatctcccattcagccctatctcctaacactgttgcactgggaattacatttcaacatgagttttggaaggaacattcaagccatggcagctcccaagattcccaccgcctggtgtataaaccctataaaatcccctccctttgagtattgtaggaattagtgaatatgatgggatagtttctccatgtgagcaaagtgatgagatactcattcccattattatgttaygttgcttaaaatttcatcagagcagatagcccagactaccccactgcaggagtctcctgctgaccttgaaagagcaaactgacaatgtagcagggactagcaggtggcttttaagggagtggaagatacgccccggctgacaa

SEQ ID NO: 420069 - DNA, 557 bp, Homo sapiens
acccaatccatttgggtggtgaaggttggtaattacagtatagcatagctctctctaaattaatcatcctcaaaaatctcttcaaccttccaaaaagccaaacatttcgtgcttttttttttttttttttcagagacagggtctcactctgttgcccaggctggagtgcagtgtggtgcaatcgtagttcactacagtggactacaggcacacacgagcatgcccarctaactttattgttttccaaattctttttacaggcaagtctcactactgctcaatctggtgtctaactcctagcctcaagtgatcttcccaccttggcctcccaaaatgctgggattataggcatgagccactgctcctggcctttttatgcacttaataaggatgagtcatctaacatatttttgactgtttcctttgaaaatttgcatctggattatcatatcctctggaatgtgccctctgttgtatcttggtgtctcaattgaaatttgtggtatttatatacattataaagtaatgctacatagagaaacatgattatttttatg

SEQ ID NO: 420070 - DNA, 476 bp, Homo sapiens
acccaaaccaccttgggtatatgttctcaggacctcttgagactgtgcctcaggccatgatcattcatatttggctcagaataagcctctgaaatcttaaaatattttacagagtttgacttttttttttttttttttttttgccaatgtaggtatcatattgaacaattttttatcttcctctttttgaattgtcattcctaggtgcatttctccatgtaattgaaaattattttaaagataaaatttgatcaattcatcatactgttaaatcaaggttagcctaaagctgcctccttacatattttcagttcagcctaaagatttctgtgtatgtagtgaactgtaacttaaaggtataaacaggctrtaacctactcttgtgccactcactgagtttgggccaccctaagggggctatcattgttcaaaccacattcaaataaggcgaatcgaagctgtaaccaatctggctg

SEQ ID NO: 420071 - DNA, 574 bp, Homo sapiens
atgctaaatgtataaacaggataataaaatctgcctgctgaatttaaggcttaaccatttctgttataactttaatgatttaaatcttaatattgaataaaagtgatcttctcaagagtattttaaatatacaaaaaccactgctgaaaaatccaaaatctttacagaaatgaaaagaccttttctatcacttcccatcgtagcattttgagaaaatcactttatttcactcaacctcagacatgaaatctataaaatagggatagaaataactactatttaatataatttctttgaagattgacagaaactgcatatggagcatttatacagtaattraaacataagtgaacaataataggaattgttattattaaaactcttagtgaccttttaaaaatacaattattttgatttcagtacttaaaatgttcttttaaaatataaatctggtattctcaatgccaacatatggaactgaatttaataacatctctactactgaataccttcttggtaatttgcccgtggaaatatttggaacacttcgtaaattaagcaatcaaagtgtttc

SEQ ID NO: 420072 - DNA, 574 bp, Homo sapiens
atgctaaatgtataaacaggataataaaatctgcctgctgaatttaaggcttaaccatttctgttataactttaatgatttaaatcttaatattgaataaaagtgatcttctcaagagtattttaaatatacaaaaaccactgctgaaaaatccaaaatctttacagaaatgaaaagaccttttctatcacttcccatcgtagcattttgagaaaatcactttatttcactcaacctcagacatgaaatctataaaatagggatagaaataactactatttaatataatttctttgaagattgacagaaactgcatatggagcatttatacagtaattaaaacataagtgaacaataataggaattgttattattaaaactcttagtgaccttttaaaaatacaattattttgatttcagtacttaaaatgttcttttaaaatataaatctggtattctcaatgccaacatatggaactgaatttaataacatctctrctactgaataccttcttggtaatttgcccgtggaaatatttggaacacttcgtaaattaagcaatcaaagtgtttc

SEQ ID NO: 420073 - DNA, 631 bp, Homo sapiens
gctcatgcccataatcccagcattttgggaggtcaaggcgaacagatcacctgaggtcaggagacctggctaacatggtaaaatccattctctactaaaaatacaaaaataagctaggactggtggtgcacacctgttgactcagctacttaggaggctgaggttggaggatcgcttgaatctgggaagcagaggttgcagtgtgctgaggccatgccactgcactccagcctgggtgacagagtgagactttgtttcaaaaaaataaawaataaataattatatatataaaattgaggataagtaaataataatttaaaataaagaatataatcagtgtgttgaatacagtgagataatattatgttatatgcagattatttgaatatgtaccttccaagatgaaaagatacattaattccataaaaacatatttcagactttgattggtactagacagtgcttgagaatatgcatgtaaaggaagatatggtaaggacatattgcttaatttccttttttactagtctatttggttttttttttaattttatttgaatctttttttacattaaaaattatccacatgaattggttttattaaatattattctttaaaatatcgcagacc

SEQ ID NO: 420074 - DNA, 631 bp, Homo sapiens
gctcatgcccataatcccagcattttgggaggtcaaggcgaacagatcacctgaggtcaggagacctggctaacatggtaaaatccattctctactaaaaatacaaaaataagctaggactggtggtgcacacctgttgactcagctacttaggaggctgaggttggaggatcgcttgaatctgggaagcagaggttgcagtgtgctgaggccatgccactgcactccagcctgggtgacagagtgagactttgtttcaaaaaaataaataataaataattatatatataaaattgaggataagtaaataataatttaaaataaagaatataatcagtgtgttgaatacagtgagataatattatgttatatgcagattatttgaatatgtaccttccaagatgaaaagatacattaattcyataaaaacatatttcagactttgattggtactagacagtgcttgagaatatgcatgtaaaggaagatatggtaaggacatattgcttaatttccttttttactagtctatttggttttttttttaattttatttgaatctttttttacattaaaaattatccacatgaattggttttattaaatattattctttaaaatatcgcagacc

SEQ ID NO: 420075 - DNA, 631 bp, Homo sapiens
gctcatgcccataatcccagcattttgggaggtcaaggcgaacagatcacctgaggtcaggagacctggctaacatggtaaaatccattctctactaaaaatacaaaaataagctaggactggtggtgcacacctgttgactcagctacttaggaggctgaggttggaggatcgcttgaatctgggaagcagaggttgcagtgtgctgaggccatgccactgcactccagcctgggtgacagagtgagactttgtttcaaaaaaataaataataaataattatatatataaaattgaggataagtaaataataatttaaaataaagaatataatcagtgtgttgaatacagtgagataatattatgttatatgcagattatttgaatatgtaccttccaagatgaaaagatacattaattccataaaaacrtatttcagactttgattggtactagacagtgcttgagaatatgcatgtaaaggaagatatggtaaggacatattgcttaatttccttttttactagtctatttggttttttttttaattttatttgaatctttttttacattaaaaattatccacatgaattggttttattaaatattattctttaaaatatcgcagacc

SEQ ID NO: 420076 - DNA, 513 bp, Homo sapiens
ggatgtactttgtgagatccatccctgcccgcaaaacattgctcttaacttcaccacctatcccaaaacctataagaactaatgataatccaccaccctttgctgactctcttttcggactcagcccgcctgcacccaggtgaaataaacagccatgttgctcacacaaagtctgtttggtggtctcttcacrtggacgcgcatgaaagatatgaactggattttttaaacacattatttttaggtctgggaaaaataatgaccttttatttcttctctatattacttttcagggtatgtttaccattaagcttttcccaactaatgctccatactaattcctctggcattcatgaacagagaattataagggctaattctcttgaaagtcagagttaaacagtgagtcattggggactgcaagaacttttatttgattttcctctaaatgttaaataggttttaaagaaagcattgataagctaacaggtaataaaaacataagccctttaa

SEQ ID NO: 420077 - DNA, 560 bp, Homo sapiens
gatgggtgcaccaaaatctcataaatcaccactaaacaactgatttatgtaagcaaacaccacctgttccccccaaaactattgaaattttaaaaaaggaataagaaggctggaaaagagaggggggatgttatttttggaaacgtgaaggggattgctattttgcaatggtggtcagggaagactcactgaaaaatgacttttagtagacaacttagtgacaaagatggaaaaaaaaatgtgattaagtgagccctgttggtacttagggtacaagtattccagacagtgcgaatcacaagggcaaaggccctgaggctgaatttgcctggggtgttagagaaataagtgttccactgtaggaaagcttacagaggggttagtgggacaggagcaatcacgaagaaccttttgttattgaaaatgttttgacttttattctgagaaaatataagcatttaatcagagtagttgaaatgacttgtcttccatttcaaaagtaccatcctsactgctctgttgggaacagactataaggggcaagatcagaagctgggaga

SEQ ID NO: 420078 - DNA, 554 bp, Homo sapiens
aatagtgtataaattacatattaataagtgagtcactttcttttttcaggttttttttttttaattttgtttttattttcatttttatgttcgaaacaaggagtacatgtgcaggtttgttatatgggaatgttacatgattccgaggtttggagtatggatcttgtcacccagatagtgagcatagcacctgataggtagttttctaactcatcctccccaccagcctcccacacataaactttgcagcagcatggatgtagctagcggccataatcttaagtgaattaacacaggaacagaaaaccaaatacctcaagtttagcttgagtttagcatattatgtccgtatgtgctcaatgtttagctcccaygtacctcagtgttaagtgggagctaaacactgagcacacatggacacaatatgagaataatagacactgtgggctactaaaggaatgagtcactttctaagtcaacaaatgatgctagcagaagaactgtggaagaagaaaagttatatctttaaaatgtaccatttttttttttggaga

SEQ ID NO: 420079 - DNA, 276 bp, Homo sapiens
ccaccagcctcccacacataaactttgcagcagcatggatgtagctagcggccataatcttaagtgaattaacacaggaacagaaaaccaaatacctcaagtttagcttgagtttagcatattatgtccgtatgtgctcaatgtttagctcccatgtacctcagtgttaagtgggagctaaacactgagcacacatggacacaatatgagaataatagacactgtggrctactaaaggaatgagtcactttctaagtcaacaaatgatgctagcag

SEQ ID NO: 420080 - DNA, 607 bp, Homo sapiens
tttttatgctgttagaaatgctaaatggtgaaagcaatctgaggtataatcataatatttaaaataatggtaattaccattatgttctaaaagaacttcaaatagagctttatacaaaatgattagaaacatgttttgtaataaaaagtaagtgcatggaaataatgtaatgaaatgaagaataagtgattttcatacagaaaataatatatgaattattttgtaaagttattgttaactaaatgatattgttgataccttaaaaatgttagaggtctgctgttagaaggttctttgatcatagggcaagaaacagaaattatagagaaaagttatttctacatacactatgtatttttcacaagaattttccaaggaaaaaatgaaaacaactatacatttcttaaatattaagtaatttataattaaggtaattacatcagggacrttttctaatttgttcatcaggaaacagaactattctatgatgaatatgtaagcaaaagttagaaagctatgtaacctttggggaacatgagttacagaaacagaactttaattgctcttctaaattgtcttatacatgagatctaatatataattatca

SEQ ID NO: 420081 - DNA, 607 bp, Homo sapiens
tttttatgctgttagaaatgctaaatggtgaaagcaatctgaggtataatcataatatttaaaataatggtaattaccattatgttctaaaagaacttcaaatagagctttatacaaaatgattagaaacatgttttgtaataaaaagtaagtgcatggaaataatgtaatgaaatgaagaataagtgattttcatacagaaaataatatatgaattattttgtaaagttattgttaactaaatgatattgttgataccttaaaaatgttagaggtctgctgttagaaggttctttgatcatagggcaagaaacagaaattatagagaaaagttatttctacatacactatgtatttttcacaagaattttccaaggaaaaaatgaaaacaactatacatttcttaaatattaagtaatttataattaaggtaattacatcagggacgttttctaatttgttcatmaggaaacagaactattctatgatgaatatgtaagcaaaagttagaaagctatgtaacctttggggaacatgagttacagaaacagaactttaattgctcttctaaattgtcttatacatgagatctaatatataattatca

SEQ ID NO: 420082 - DNA, 284 bp, Homo sapiens
tatgtactgtacaagggaaaagagagagtgacaaatgaaaaagtagcacaagaatgttgtggcatgaaagaaggtaagttaaaaaaaaaaaagcccttcctttgacactgtcctgctacaacaagttccttatgttatacccatatatagttcaaaacattctggaacatgtctcctaagaacaatgctttatttttgaatgattaacraaatcttaaattcaagcatttctcttaatctttaattggctttactttagttatcatataactaaatatatgcta

SEQ ID NO: 420083 - DNA, 597 bp, Homo sapiens
tgagctgctttttcttcaaagtctcaggtcaaaggagtccctgtgcttcaggatgcactccagaggggtgtaagctgaagatggtctgttacctatttagaaagatatgcaagaaaaaggagtccctttagtctccttccttttggtatgtcctaggggggaaaggaagacagtgggagtgttccccctactgttttctctccttggttcctgggtcccagcaccttgttaaatgtgctgcccatggttatgggcatgactcttsaagctatggaaccagagaaactatatgatgctatgagtcacgcataaccatgcagcaagttctccacttgtgattctactttgacttcctagatttgtgtgctctatgtgcctccctgaaaaatagatcttgggaaagaccatttaatagttgcctttgggcaaggctcctttaatagggggagggtactagatttaactctattatcttgctattgtggcctgtgctaaggtgtttccccttagagaatgtttctggttaacttctggacttaaaatccccttactaattaagtactgttttaattggagacagaataggtgccttaaagg

SEQ ID NO: 420084 - DNA, 597 bp, Homo sapiens
tgagctgctttttcttcaaagtctcaggtcaaaggagtccctgtgcttcaggatgcactccagaggggtgtaagctgaagatggtctgttacctatttagaaagatatgcaagaaaaaggagtccctttagtctccttccttttggtatgtcctaggggggaaaggaagacagtgggagtgttccccctactgttttctctccttggttcctgggtcccagcaccttgttaaatgtgctgcccatggttatgggcatgactcttcaagctatggaaccagagaaactatatgatgctatgagtcacgcataaccatgcagcaagttctccacttgtgattctactttgacttcctagayttgtgtgctctatgtgcctccctgaaaaatagatcttgggaaagaccatttaatagttgcctttgggcaaggctcctttaatagggggagggtactagatttaactctattatcttgctattgtggcctgtgctaaggtgtttccccttagagaatgtttctggttaacttctggacttaaaatccccttactaattaagtactgttttaattggagacagaataggtgccttaaagg

SEQ ID NO: 420085 - DNA, 545 bp, Homo sapiens
tagcctagggtgcattttcattttctttttaccctcatctaccatgccctcgagttctcattttctccttcatagctctctactttgtctcttaagatctaagcctctctgagaaggaaaagtctcactttctctagctaatgagcttttatatttaatcctgaagcagttttttttttctaaagaagatttagctcctttttgattttttgagtaaatgtaatcccccaaagacagagtattcaaggcatagagctttttaatgtcccttgcctttggatttgcaaggattttggaaatcacatcgtgttattttatttttaaataatatatgcstttatttcttcttttaaaattagccacctttctgtaaatgaaactctgatataaaactcatattcatgacttctaaaatcaacaaactcagagccaacattttaccacatggttaaggttacattagtctactcaaatgaagcataaaatattaacaggaatgaaattgtactgctaatctagcaaaacttgtttatattttgagctgt

SEQ ID NO: 420086 - DNA, 513 bp, Homo sapiens
acattcaacattcttaactccccctctcatagcacaggaagggatcccctacataacagtaaatataaaataattgcaccccattggcctgcaagtcagtgccatgaaaaaaagtaatttcttagtaaaaagcaatgcatccatttatgtaaggacagaggatccragaagagtatttaaaaaaaaaaactgcataaatattgtctggaaactgacctagcaggtttccatccaccctgttgaaagtagtgacagaagatgcagaaaaataaaggcaggcattgtgtaagcaacacaacataagataaataaatgtattcttagcagcagtgtttgccccaattatagcaaaattaataagacgaaattcatttaggatcgagtatgttcagtgggcaaaagactgcctttagaatgaacagcagctcctgcctctgcaaactgcccctgccccagaggctggggacttgtttttcaggtggcatctagcagaagaaatgattaccgacaaca

SEQ ID NO: 420087 - DNA, 544 bp, Homo sapiens
gcaaaactccatctcaaagaaaaaaaaaaaaaagaaatacattttacatcatgatccagtacacatacacatgtgcacaggcatattcacacacacagccaaaagatcagtttcctggaggacagattggtggttgccaggagttggggaatggtagggggcaggtgagctacaggggtgtacacaagggagacttgtggtgatagtctggctctgtatcttggtggtggtgggattacaggagactacacatgcaacggaatcacatggctctatatatgcccattcaggccaatgagcctgtgcataactggtgaaatcttcataagcgccatgggttacaccaatgtcaactctctggttctgatgttgtactgtatttgtgaaggttactaacattggaggaggctggggtgggggtgcatgggacctccctrtacatttctttgcaacttccttttcatctgtaattgtctcgaaataaaacatttttaaagttttttaataaaagaaaaatacatttcatgaacaaaaataaatttca

SEQ ID NO: 420088 - DNA, 574 bp, Homo sapiens
tcaaggaatgattttttaaacttttcaaatacacaggaagtaagagaatcatctgaagccagacagaggagttgggggggaaacagaaaaagaaaaagcaaacaaagcaagcatgaatttagagaaatggataaggtctgaagactgaagctttcattaggacatctgttaatctctgaagccctgggatctatgtttaaatacgccacaacttctctgaaaacatgaaacatgcttggatctctaagaataatatgaggctaggtcaggaatttttcaaatagccaggagtccttaaagagaataccctcaggtgggtccaagtcatttgataaaagtcattttatgcttaccaaagtttcaactcaccagaaatatataaaaagcctaaacttctatacacataataacattcacaatatataaagcaaaaattatgagaatgtagagaaatcctctatcacatgagaagtttcaggatatccctcttaggacttgataaatcaagcaagaaaaaatcagaaaagmtaaagaacaacaaaaaataattaacaaaattaataagtttgagttc

SEQ ID NO: 420089 - DNA, 516 bp, Homo sapiens
attttgcaattgtgaattgtgctgcaataaacatgtgtgtacaagtatctttttcgaataatgacttcttttcctctgggtagatacccggtcagtcaatcttcaatgttagctcagtgccagttttctgacaacttaccyacccagatacaccctttcctctgagtttccttggcatctattgaatttcacatcacagtacgtgcctagatttttccattcaatggttaataattcatgctggggaccatggtttgttcaacattgggccccaaatgtttgtacagccttaggacaaactagtatctcaataaatgaatgaacaaatgaatgaaagatcgaggtgagaaatatgtcagcctttgcctacctcgccttgcttctgactcaaaactagttggacaaattctgtgggggtctttgtgtattttagtcacatttgagtttattctgataataaaaatacatccagtatagagaatttggaaaatatagacaagtgaaaaaattagaaag

SEQ ID NO: 420090 - DNA, 459 bp, Homo sapiens
catgtgattgtaggggctggcaagtcctaaatatgcagggcaggtcagcyggcaagagactaaggaaaaagttaatgttgcaactcaagcccaaaggaaagcaatctggaggcagaattccttcctctttgagggacctcagctttctctcgtaaagtcttcaattgattgggtgaggcccattcacattatggaaggtaaccagctttactcagtctgccaacttaaatgttaatcacatctaaaaaaaccttcacagcaatatatagactgatatttgaccaaacaactgggcaccattgccaagccaaggtaacatagaaaattaaccatcacagtcactttcaattgatgaatctgtacagagcttagatgactcagctctgtggctatgcagaaaagtacatcaactgtgcttcccaaatcttctctcattgttttaattatttaatgtttggg

SEQ ID NO: 420091 - DNA, 421 bp, Homo sapiens
tatttaaattgcccaaacatgtacaaatagatgattcttaaagagagtattgtgggtcargtttacttagttatttctgtaactatgctcatcattcccaggattaaatggtgtttatggatttccaaacaagtgggggtttccagcttgttccaatttagttgaccaagattaattattaaccagagaattttggggctgaggtgcagaagaaatcaaactcctgggcttcagcaatcctcctgcctcagcctcccaaagtgctaggattacagttgtgatctgccgtgcctcgcccccaattcttagagatagtaatatgacactccattgggctctgcatatctctcatggctttgtgaaactctttagttctaatattaaagtcacgctattaaagacaaacacatggaaaagacgt

SEQ ID NO: 420092 - DNA, 548 bp, Homo sapiens
agggcctgacagaacaaaaaggcagaagaaaggcaaatttgctcactctctcttctggaactgggacacccatcttctcctgcccttggacatcagaactcccgggcctttggactccaggacttgcaccagatactccccarttttcaagctgtcagcttaggactgagagttacaccgttggctcccctggtcctcaggcccttggatttggactgagccatgctaccatcttcccttgttcttcagcttgcagacaggatattgtgggacttctcagcctccataatcaagtgaaccaattcccgaagtaaatcccttctgatatatctatatctctgtctatctatctgtttatctatctcgctctctctctatctatattctattggctctatttctttagagaactatgactaatacaggttctgagtgctttcacttttaaaatgaagtttggtataaggccaccttcaaacctattctctaccctttcccttctactcaatgttctggggtcctatggctacatcaacaggttttcttgc

SEQ ID NO: 420093 - DNA, 577 bp, Homo sapiens
tttcatatctgtttgcctgaggtctttatgtagaaactatattaactttgacattttatggaaaacatttttccattttaatatttgtctaatagttgttttgtgtatagaatttctcatttttatagatctgctggtctttatagttttttctgttatttctagtataggaaaacttcccccttgtagaagttttataaataaatatccatgttttcktcaaatgtttctactgttaaatttttaaatatttaaatgtttaaccaatctagaattcactttggtgtgtggaataaagtgagaaatcaaagtttttgtatttctaggcattcatctcatcaccatttattgaataatttgttcctgctcaagggtttaataagcttcctatggcataatagattcttatgtaaaatagagtcaatttatgaatctcaaaaacaaaatgtcctagacaaatttttcttcaagcatgtgctacatgttattaatttgctacaagggctccaggaaagtgacagaaacatgtgtgccccgtataaaagtggaggggttatacagtgagagacagaaggct

SEQ ID NO: 420094 - DNA, 577 bp, Homo sapiens
tttcatatctgtttgcctgaggtctttatgtagaaactatattaactttgacattttatggaaaacatttttccattttaatatttgtctaatagttgttttgtgtatagaatttctcatttttatagatctgctggtctttatagttttttctgttatttctagtataggaaaacttcccccttgtagaagttttataaataaatatccatgttttcgtcaaatgtttctactgttaaatttttaaatatttaaatgtttaaccaatctagaattcactttggtgtgtggaataaagtgagaaatcaaagtttttgtatttctaggcattcatctcatcaccatttattgaataatttgttcctgctcaagggtttaataagcttcctatggcataatagattcttatgtaaaatagagtcaatttatgaatctcaaaaacaaaatgtcctagacaaatttttcttcaagcatgtgctacatgttattaatttgctacaagggctccaggaaagtgacagaaacatgtgtgmcccgtataaaagtggaggggttatacagtgagagacagaaggct

SEQ ID NO: 420095 - DNA, 539 bp, Homo sapiens
ttaactttctactgtattggctgtagttgacaatttggaaaacaacttacttaaagaaaataggggctttaaaaatcctatttctaataatcaagaaagaggcatttttttcctttaactttcctattaaactttttaaccaccccagtttcaagaatcttcaacatacaattagatcttttattatttggtgatgttgggtgtcagcaatctgtgyttctacaaataaagctaaatgttcatcacagccacatatcactgatttctaaatccagcttcctttccagattccctttctaccctcctctctgctgctgtgtgtcctgggaggctgacctgcctacttaataggcttcctgtcctctggcttcagggggatttgggcaatgggagaccctgtcaggagatcagagggtgcaaggaaagtaaggtcaggaggtttgtccctcgtggctccctcccactgggttgctatgggttggctgcagagtcagatgcctcactctaccaaagatgacagcttctctcagatggccata

SEQ ID NO: 420096 - DNA, 547 bp, Homo sapiens
agacatccccgtggatgtctaagcagacatttatcctggcagctgtggggccagattcctggactttatggctcaggctttttcaaaagcaaaaaaacactacaagagaaggccctcattatttaaaaagaattaaggattcccagttcaggcaagtcttccagggtcctaaactggggatcagtcaggtgaattcagccagtgattggtttggttcacacawcgttttattttttatttttaattggcaacccctgcacaaagcaacaatactggaggtagggtttcaggatttagactgaggcccacaagtgttttctgagcactctggatgggcaggctctctgataggccggttctctgataggccagtcttccggtcactcactctagtcctgcccagtgaccttgaaataaattgcagcgcaaaatagcagagtgccccaccttcagagtgtttgagactttcccctcctgagtggaaacacggaggctcagagcaagattaggagaatcagtcttggcaacagataaagggatcaatgga

SEQ ID NO: 420097 - DNA, 533 bp, Homo sapiens
aattgaaacatccaaactcaagtgcctagttttgtaacggaatggagaaagacatcttactgcagtctcaccataatttgctcagaagcattggaaagatccaccttgttaactayctcccaaaattttcattgtgagttaaaacagttgtaatttaatagaacaaagagaaacctggccaatggctcaaagtatctgttgatccttccatgaaagacggtaaaaaaagtatgatccttcttaccaatatggaactattaatgataataacaatgaaaaattaacatattataatttagttttatttcttaaattgtgaggaatcttttgaaaatgtttgcatttattggtgatttgtgcaatttggacacagagtaaatggtccacaaatgctgaaagttttagaaacttttaaaaatgatagttccatgaaaaagttaaggcttgtagttttgaaactgcccttgcaaaaagtatgacagtgagagaaatcttcatagctgactctgtcttccttctaacctcacaagcta

SEQ ID NO: 420098 - DNA, 523 bp, Homo sapiens
tagatgttataggaatacataagtaaaaatttttaaaacagagtgatgatttttcccaacatagcagtccttctttcaggctttcctgtatcttttaaatgacactttattgtgcttatttcccaaggaaaatcctgaaattcatctttgaaacttttctttttttttaccacccactctaattcaactcacaagataatcctgtaagctctgctttcagtattatattgaaaatcctagtatttatctcctccttctacctctagtactgccattagtttaggyctttatctgttctaacctggtgatcagcatggctgggtttcttatattcctcagatctcagcctagatatttcccctcccttttcactattaacaaactgtttgttgctgtttttatacatggagcttagttaatacaattttggaaaatatgcttttattttgttttattttattttgttattgttactataagacctacacgggtatagacatcatttctctcattcacactgggt

SEQ ID NO: 420099 - DNA, 443 bp, Homo sapiens
attattataaaactattgccaatcaaactagagtctctggtaaaggaacacaggcatgagcattttttaagsgttcctaagtgattcaaaagagcacttcatctgacgttcaccaaactaggtcaaaaaccccatcttattcttcatcctttccttactcctttctctaaagatgacagatcagattggtgagtttcactaagaaacaaagttcagccccttcttttccttctcttccagccagtctgtgagatgatgtgctctgatctgtgatctatctctgacaataggcccaccctcatggaattctggttttgttctgtctttgttttggaaataaattgcaccaattgctacagtgataattaatcacttactttgttttaactttttattagagacagggtctcattctgtcacccaggcttgagaacggtggcaca

SEQ ID NO: 420100 - DNA, 443 bp, Homo sapiens
attattataaaactattgccaatcaaactagagtctctggtaaaggaacacaggcatgagcattttttaagcgttcctaagtgattcaaaagagcacttcatctgacgttcaccaaactaggtcaaaaaccccatcttattcttcatcctttccttactcctttctctaaagatgacagatcagattggtgagtttcactaagaaacaaagttcagccccttcttttccttctcttccagccagtctgtgagatgatgtgctctgatctgtgatctatctctgacaawaggcccaccctcatggaattctggttttgttctgtctttgttttggaaataaattgcaccaattgctacagtgataattaatcacttactttgttttaactttttattagagacagggtctcattctgtcacccaggcttgagaacggtggcaca

SEQ ID NO: 420101 - DNA, 595 bp, Homo sapiens
ttattttcttatgagcgctcttttacttgtaagccagtttgktagacacaacatataacaataactgtacatacaaataaacacatctagacatgtatacacacacataaatgaacatccagtagctgggaaccttagccatgagatagcaatacaagcttgctggctttactttgcccaaatagataagccaatgaaggctttgagccaaatttttaggtaagcagtctccatggcagtttaatttttaaaggccaaacctccccagacgccagagaacactgggatcaaacagtaacaaaggaaggcgtcacatgttaaccaggcctcctgcttagaatagcagcacaaaagcctgggtacatgcaacaccatcccactttcccattagacagtaaactccagattccgaacagtgtaggggccaagcagcattgcacctgtgagagaaaattctaaggagggcttagtactagacctcagaacctctgctgagagcatccccttttgggaggctgggaggatcccccagagcatcctcctgtggggttcaatcttagagtgtcagacgtctctgaccttaggtgggcaccgg

SEQ ID NO: 420102 - DNA, 507 bp, Homo sapiens
agtgaccccacccaattgccctcaatttccaaggagttactaggaaacagccagtgaaagactgaaaaagaaagaaaggaaaaaaaaaaaaaaaaaaaagaccctggtcccttaagcaaactgagcaatgggggttaggcacctccacatggaaacccctttagtttcactggccacagccagaaacctacagttgttttcctctttaggcactgccagcaagggtcacaagttggaaaggaaaagagagagcaacagagagaaagagagagagattccctgtatggagcaaaaaggaaaggatgaaggagaaaaatcccaagctttgggcctaccttctggaatttctcctgactggcttgccraaatatgttattgatggagtgtgtccagtttcttggcatcttacacacagaattggaccaactgcataaacaaagcagggaaagaatgaaaggatttattgaagatgaaagtacactccacagtgtagtgtaggagcaggcc

SEQ ID NO: 420103 - DNA, 568 bp, Homo sapiens
agccttggaccaaatggattcacagccaaattctaccagatgcataagaaaatctggtactattcctatggaaactattccaaaaaattgtggaggrgggtcctccctaactcattctaggaggccagcatcattctgataccaaaacctggcagagacatgacaaaaagagataactttaggccaatacccatggttaaaatagatggaagagtcctcaacaaaatattagcaaactgagtccagcagcacattaaaaacctaattccctatgatcaagtaagctttattcttgggatgcaaggttgattcaacatacacaaattaataatcataatttatcacgtaaacagaactaaaaagaaaaccattttgttttcaaaatcatttcaatagatgcagaaaaggctttcaatgaaacttaacatcacttcatgttaaaaaccctcaacaaactaggcatatctcaaaataagaattttctatgacaaacccacatccaacatcatcccaaatggatagaagctggaaccattacccttgagaattggaacagattgaaaatgct

SEQ ID NO: 420104 - DNA, 591 bp, Homo sapiens
aaacctaacatgttatcacaaaaattgctaatcaccccaacacactggaaaagtttcaacctagaagagagaaaaggtaaagtccaatcttgctccttctccctctttgaactctgcattaaggaaaaacaaggagaacacaaccttctttcccttctcagttgatgggacaggtagaacaattaaagttttaaaacctgctaggatctcaataattgaaaatgtttctgaagttatggagtctgcacatgctgagaataggagaactgctcccaagtgatgaagtggaacttgatatagactatattatttgatgtgcccttgtggttttctttagacaagacatactatacaaatatgctagaataaaagttgactactactttaatagtttgaacttgttatggtactaacataaaatagaattaaaatagacaaaggaaaagtaacckctatacgttaaccaatatgtatcttgcttaatgttttcttaaacgtgaggtcaaaatggagcacagccctttttatttatttatttatttttgagacagagtctcgctgtgtcacccagtctggagtgcagtggcacga

SEQ ID NO: 420105 - DNA, 604 bp, Homo sapiens
accctgtaacaataaataaattaataaatacatacataaatacataaataaagtattaatcaattacataaaattatacagtagtccccccacttatctgggggatatgttccaataaccacaatgggtggctgaaaccatgaatacaattgaatcctatatacactatgcttttttaatacatacaaacattatatacatacatacttatgataaagtttaacttataagttaagcacagtaacagactaacaacaaaaactaacaataaaatagaacaattataacaatatactgtaataaatgttatgtgactgagttctcaaaagatcttattgtaytgtaatcacccttcttgtgatgaggaaagatcttattgtattgtaatcatccttcttcttgtgatgaggtgagatgatacattgcctacataatgagatgaagtgaggtgacatggtgttaggctactattgaccttctgatgacatgtcagaaggagcatcatctgctttaggtgatcctgaattatccaaccatgaagatgttggtgggtggatgtcaggaacagacaatgttgatgcccaatgggtgaatagcatcttca

SEQ ID NO: 420106 - DNA, 532 bp, Homo sapiens
acttttcagtaattttaaataaactcaatataagaataaattgttttaagataccatataggaaggtgggtggtaaaagaagttactaaatgtcacagatgaatgaaacctaaaaatgtaggtatattttaatatatgtaacttgctatgtacttagagatataattgtgttaggccattctagcattgctataaaggaatagctgaggctgggtaatttataaagacaagagatttaattggctcgtggttctgcaggctgtgcacagcatggcactggcatctgctcmgcctctggggaggccttagggagcttttattcatgggagaaggtgaagcagaaataggcacatcacatgacaaaagcaggagaaagagagggtgttgagtggggggtgccacacacttaaccagatttcacaaaaacttactctctatcacaaggacaacaccaaaccatgagggatctgtcctcatgacccaaacacctcccacccggtgccacctctggcaatggggattaaaattcaac

SEQ ID NO: 420107 - DNA, 635 bp, Homo sapiens
atcccttctcaacagtctcccaaaagaccaaagtctcatctggagatgagcttctttcacctatgagcccataaaattaaacaagttacttagtttcaagatacaatgggattacaggcgttgggtaaacatttccattccaaaacggagaaattggctaaaagaaaggagcaacaggacccaagcaagtcctacacccatcagggtagtcatttaatcttaaagctccaaaataatctcctttaacttcatgtcccacattagagctcactgattcaaggggtggcttcccaagaccttgggcagctcttgctcctgtgtctctgcagggttcagtacccatggctgctctcacaggttgttgagtgcttgtggcttttcaaggcacagagtgaaagcttccagtagatctactattctgggtactggagggggctggcctccttctgacagctctactaggcagtgccctcaatcccacatttttcctccacaatgccttagtagaggttttctgtgaggattctgcccctacagcagtttctgcctgggmacccaggcattcttatacatcctctgaaatctaggcagaaactgccaagactctttcactttgtgcacctacaagcataaca

SEQ ID NO: 420108 - DNA, 535 bp, Homo sapiens
atgtgaagtcatctgatctcaaaagcccagggatataagcagcacataggccctctttatttcacaaaaaaataatagagtgactccgaggtgagaaacttctttgatttcataggactagtagagggagatactgagatgaaaacaaggctattatcattcatgagttgccctcatgcatgcatcggaaacgctacccaataacattttggctgctgtattagtccattctcacactgctataaagatactacctgagactgtgtaatttataaacaaaaaaggttcaactgactcaaagttctgcatggctagggaggccacaggaaacacaatcatggcagaaggcaaaggggaagcaaggtgtctcctacatggtagcaggagagagagagagagaggamaaagagagagagagagagaggaagggccatactttaaaaccatcaatgcttgtgagaactcactctctatcaggagaagagcatgggagaaccaccccatgatccaatcacctgccaccaggttcctccct

SEQ ID NO: 420109 - DNA, 575 bp, Homo sapiens
ctacatgccaggagaggggcagtgcagagcaataaagaggctgtttccaggacaaaaacaaacaaagagcatactccccagagtctgaaacccacatgtcttgggccactatcaccaacagcaaccctgcctccctccagcaacaggaatgccacccatgtccaagtactctggggacaractctattcaccatctcctgcagccactgtcaccactggaaaattaaatgcataatccccagagtctaaaacttatctctgtggggccattgtcactaacggcaatgctgccccctcaacagcagagctgccacatacgtgcatgtgccctagagacaacatttcaacactcactgcttttgctgccaccaccacacaagcacaccaccagggcctagggatcaccctgccctgctcaccacagcctgcacctgtgtttgccactggggatcctgaggacagtgaccaagcctgctacctgggggtccagtgatcaacccgcccagttggtcactgggcacacatgcagatcaccagggagccaaagaacaagtccagaaataactgctactgat

SEQ ID NO: 420110 - DNA, 616 bp, Homo sapiens
caataacaaaccagctgaaagagaaatcaagaaaacaatcacatttacaataggtaccaagaaataaaatgcctagaaataaatttaattaataaggtgaaaaacatctacaaggaaaagtacacaacactgatgaaagaaattgaagagaacacaaatggaaagacatcctatgctcgtagattagaataattaatattgttaaaataactgtactgtccaaagcatctacagattcaacacaattcctatcaaaataccaatgacatttttcacacaaacagaaaaagcaatcttacaatttgtatagaaccaaaaaagagcctgaatagccaaagaaatcatgagaaaaaaagaataaagctggaagcatcacactacctgaaattatgaggccatagtaacaaaaagagcaggatattggtatacaaatagacacagagaccaatggaacaaattaaagaacccagaaataaaccctcatatttactgctatttcacaratcaactgctatttcacaaagatgccaagaacatacactggggaaagaaaatcctcttcaacaaacagttctgggaaaactgggtatccatatgcagaagaatgaaactagat

SEQ ID NO: 420111 - DNA, 513 bp, Homo sapiens
aggaaacactctcccatttaacagattgaagaggtaatctgttaaatgggagaaaatagatgcaactattcatcttacaagggcctaaaatctagaatatgtaagtttgtaaacaactcaatagcaaatcacaatcttatttaaaagtgggaaaaggatctaaatacacacttatcaaaagaagacatatgaatgcccaacaggtaagtgaaaaaacactcaatattgctaatcatcagaaaaatgtaaatcaaaaccacaatgaaatatcatctcgccgcagttagaactgtattatcaaattacaaaaaaaaatgcaaatgctgatagggatgcagagaaaagggractctcatacactgttagtatgaatgtaaattaatagagccactatagagaaccgtatgaaagtttctcaaacaactaagaatagaactaccatatgatccagcattgccactactgggtatctaaccaaaagaaaagaaatcagtatatgatagggtttggctg

SEQ ID NO: 420112 - DNA, 618 bp, Homo sapiens
tgcattccacattaggtgatacagtaaaatagaggaatggccagaaatttaacaagatcttgaaattgccagaaattttcagggtccttatgatctttcacaagccttgggctttctgtgcaggtacgtacacacatagtaaagatctgagagaaccaaacgaaactaaatactgaggtaagctgaaaaattacctgaaattcaaatgcactttcacatccacattttgatacatcagcagagggtggaaccttatttcttaagatgtttcagcacattacaaattataatgcatcagtagctgaccacaaagaagtgaacacctctagaaaactaagtaaaatgataactataatatttttttacaaagcaataatacagtgactayacaacacagcagagagagtccatagaccagtctaggcaaattacttttcaggttaataagtaaacaaaataacaaaaacagtaatgctcaaggaaaaaaaaataaggatccaaagttgctaaaatattttctaaaatgcacatttcaacaagattttatgagctatccaaagaaacagcaaaatgtgacccctgccccagaaaaaaagataaatatgcagaaactgccac

SEQ ID NO: 420113 - DNA, 618 bp, Homo sapiens
tgcattccacattaggtgatacagtaaaatagaggaatggccagaaatttaacaagatcttgaaattgccagaaattttcagggtccttatgatctttcacaagccttgggctttctgtgcaggtacgtacacacatagtaaagatctgagagaaccaaacgaaactaaatactgaggtaagctgaaaaattacctgaaattcaaatgcactttcacatccacattttgatacatcagcagagggtggaaccttatttcttaagatgtttcagcacattacaaattataatgcatcagtagctgaccacaaagaagtgaacacctctagaaaactaagtaaaatgataactataatatttttttacaaagcaataatacagtgactacacaacacagcagagagagtccatagaccagtctaggcaaattacttttcaggttaataagtaaacaaaataacaaaaacagtaatgctcaaggaaaaaaaaataaggatccaaagttgctaaaatattttytaaaatgcacatttcaacaagattttatgagctatccaaagaaacagcaaaatgtgacccctgccccagaaaaaaagataaatatgcagaaactgccac

SEQ ID NO: 420114 - DNA, 580 bp, Homo sapiens
tgaactattgatctatggtgttttaacaacagcttttgagtttactgataaaattatagtaagcatttagatttagtgtctacattgtgagaataataaaacatgaagatacctgtgaaattctttttataaatgtctttctcttaataagactagatagagaaaacatttctgtacagtgtctaaatgcctaaccacttagttccccaaagtctgtttttaggaatttgacatrctttgaacaacattatcttttagttcagcatttacttgaatgccttgatttttactttatatacgagttgaattccatgatttgactaatttttatacagcattattttatgatagcaagattccttcttcttgtccattatcatcaaagtattactctgttgctggaagaaatatggtgattaatttgcctttgatatatttggttcctctttatgtacagtgtttaagagtttagtcacaaagagctctgacatcctaagaaaaagctatgctagaaacaaaaattaatcctagtgactaagagcccttaacaaaaaataaattacgtacgttgtagcataaa

SEQ ID NO: 420115 - DNA, 586 bp, Homo sapiens
tagaattttgagctgataaggtacagatgagatttgcaacgctgaaataatgctgtcataaaataagacttttgagaacgttggaaagaggtaaatgtattttggtttcaggagggacatgattctttggggatgagaaggcacattgtgacagctaaaattctgatgaagatgacacttccatgattccaattttgcaaatattaatttagttactgctttaaagagattttgctggtgtaaagtcccaaatcacttgacttgagatatggaaactttcaggtgggcctgatccagtcagactaaagcccttaaaagccaatagctttcaccttggaaggagacagaaggcatcagagatttgragtgtgggaagaacttggcaaaccggtgctgatttgaagatgaagggagcacatgagaaggcagcctttagaagctgagagagaggcctttggtcaacagacggtgaggaaggggaacctcagtctcccatggcaaggtctaaataaattctgccagcatccaaaatcccaagagcaatatgctaaccccagaccccttccccacccacaaaggaccctta

SEQ ID NO: 420116 - DNA, 586 bp, Homo sapiens
tagaattttgagctgataaggtacagatgagatttgcaacgctgaaataatgctgtcataaaataagacttttgagaacgttggaaagaggtaaatgtattttggtttcaggagggacatgattctttggggatgagaaggcacattgtgacagctaaaattctgatgaagatgacacttccatgattccaattttgcaaatattaatttagttactgctttaaagagattttgctggtgtaaagtcccaaatcacttgacttgagatatggaaactttcaggtgggcctgatccagtcagactaaagcccttaaaagccaatagctttcaccttggaaggagacagaaggcatcagagatttgaagtgtgggaagaacttggcaaacyggtgctgatttgaagatgaagggagcacatgagaaggcagcctttagaagctgagagagaggcctttggtcaacagacggtgaggaaggggaacctcagtctcccatggcaaggtctaaataaattctgccagcatccaaaatcccaagagcaatatgctaaccccagaccccttccccacccacaaaggaccctta

SEQ ID NO: 420117 - DNA, 568 bp, Homo sapiens
aataagaattttaataaaattgaaaatgcaacccatctcccttttatacttctccaggctaccaatgttctctctgagctgtgtttcattgttataacattgataaatgtgaagaaagcagataagagttttgagagctggcaaaatagttttgcatgttgggccatctgaaaactaatatggcaaagttcatttctaatatttaatttggttgctatattaattgcataataaattatataatttaaaatgaggaatattttacatrtgagtattaagatgaaagaattattaatttttatatatagtaaatgacttagagatttctaatccagactttcaattcatagccaaggaaatagaagattagaaagagtaaaaataattgacatgtttaaataaagttgaaaatctgaaatttgagtctattcctcctgatgctaactttgtgtgctcttcttcgccaggtaagataactagtaaaagagtgcacgtcttaaaagaaaaagaaaatatgatagtaacacttacctctttaaattattaatattaccaagattaccaacaa

SEQ ID NO: 420118 - DNA, 568 bp, Homo sapiens
aataagaattttaataaaattgaaaatgcaacccatctcccttttatacttctccaggctaccaatgttctctctgagctgtgtttcattgttataacattgataaatgtgaagaaagcagataagagttttgagagctggcaaaatagttttgcatgttgggccatctgaaaactaatatggcaaagttcatttctaatatttaatttggttgctatattaattgcataataaattatataatttaaaatgaggaatattttacatatgagtattaagatgaaagaattattaatttttatatatagtaaatgacttagagatttctaatccagactttcaattcatagccaaggaaayagaagattagaaagagtaaaaataattgacatgtttaaataaagttgaaaatctgaaatttgagtctattcctcctgatgctaactttgtgtgctcttcttcgccaggtaagataactagtaaaagagtgcacgtcttaaaagaaaaagaaaatatgatagtaacacttacctctttaaattattaatattaccaagattaccaacaa

SEQ ID NO: 420119 - DNA, 568 bp, Homo sapiens
aataagaattttaataaaattgaaaatgcaacccatctcccttttatacttctccaggctaccaatgttctctctgagctgtgtttcattgttataacattgataaatgtgaagaaagcagataagagttttgagagctggcaaaatagttttgcatgttgggccatctgaaaactaatatggcaaagttcatttctaatatttaatttggttgctatattaattgcataataaattatataatttaaaatgaggaatattttacatatgagtattaagatgaaagaattattaatttttatatatagtaaatgacttagagatttctaatccagactttcaattcatagccaaggaaatagaagaytagaaagagtaaaaataattgacatgtttaaataaagttgaaaatctgaaatttgagtctattcctcctgatgctaactttgtgtgctcttcttcgccaggtaagataactagtaaaagagtgcacgtcttaaaagaaaaagaaaatatgatagtaacacttacctctttaaattattaatattaccaagattaccaacaa

SEQ ID NO: 420120 - DNA, 568 bp, Homo sapiens
aataagaattttaataaaattgaaaatgcaacccatctcccttttatacttctccaggctaccaatgttctctctgagctgtgtttcattgttataacattgataaatgtgaagaaagcagataagagttttgagagctggcaaaatagttttgcatgttgggccatctgaaaactaatatggcaaagttcatttctaatatttaatttggttgctatattaattgcataataaattatataatttaaaatgaggaatattttacatatgagtattaagatgaaagaattattaatttttatatatagtaaatgacttagagatttctaatccagactttcaattcatagccaaggaaatagaagattagaaagagtaaaaataattgacatgtttaaataaagttgaaaatctgaaatttgagtctattcctcctgatgctaactttgtgtgctcttcttsgccaggtaagataactagtaaaagagtgcacgtcttaaaagaaaaagaaaatatgatagtaacacttacctctttaaattattaatattaccaagattaccaacaa

SEQ ID NO: 420121 - DNA, 634 bp, Homo sapiens
cacataattacagttagataggaagaatacgttctagaggtttattgtgcagcatgatgactatagttaatgatgatatattattaaaaaatgctaggagtgtggatattaagtgttctaaccacaaaagttataactatgtgagtctgttctctattaaaatttcttacttacttttctactgacaaataaaattctatatatttatcatgtacaacatgttgttttgaaatatgtatacatggtggaatggttaaatcaagttaattaacatatgcattacttcatatgctcatcaatttttagtgagagtccattcttttctcacattattctaatttgactttattgagtctgtaacagccctctcactagtctttttggagttagagatggtgtgtccattcattcttcgtctttcaatcatttgatatttattggtsgaaattcagatgcataactttacctgtaatggagtatacttctgtatagtcccagagatatgccacacatattagaaagggacggctttaagaagagatggagaaagcaggcctctctacattggagataacttaacgttcataattttctatattattatgtagcatcaataaatcaatatccatgttaa

SEQ ID NO: 420122 - DNA, 634 bp, Homo sapiens
cacataattacagttagataggaagaatacgttctagaggtttattgtgcagcatgatgactatagttaatgatgatatattattaaaaaatgctaggagtgtggatattaagtgttctaaccacaaaagttataactatgtgagtctgttctctattaaaatttcttacttacttttctactgacaaataaaattctatatatttatcatgtacaacatgttgttttgaaatatgtatacatggtggaatggttaaatcaagttaattaacatatgcattacttcatatgctcatcaatttttagtgagagtccattcttttctcacattattctaatttgactttattgagtctgtaacagccctctcactagtctttttggagttagagatggtgtgtccattcattcttcgtctttcaatcatttgatatttattggtcgaaattcagatgcataactttacctgtaatggagtatacttctgtatagtcccagagatatgccacacatattagaaagggacggctttaagaagagatggagaaagcaggcctctctacattggagataacttaaygttcataattttctatattattatgtagcatcaataaatcaatatccatgttaa

SEQ ID NO: 420123 - DNA, 532 bp, Homo sapiens
catactggccctcttgattatttatgtatgtgataggagtaatttgaatgtaaagatagggcttaatatatacaartgtcataattgtatgtatataatcgtacatattattttttcttcatacccatactaatagtctgtacccatactaatgtgtgtgaagaaaaaggattaataatgtgtaatggtcttctgactcacttgggtagtctattgacatttagggatgtagatgaggaccaataggtaagagaaaaacagaaactgtataggaggtgatgaacctatgtagggtggtatggtagaggtaataagtcttcaagggaaccagtgactgtattacttgacaaagtcaagctggtttttctgaaaaaggaagtatgggaagtagacgtggaatttccccagtagagataaaaacattgggaatgatgttaaaaaaaaaaaaaaaaagacagagagatgttgggtaaaatatagtgaaggtggaacagcattgggtctacagagagaagatcagcatgaaagctgg

SEQ ID NO: 420124 - DNA, 532 bp, Homo sapiens
catactggccctcttgattatttatgtatgtgataggagtaatttgaatgtaaagatagggcttaatatatacaagtgtcataattgtatgtatataatcgtacatattattttttcttcatacccatactaatagtctgtacccatactaatgtgtgtgaagaaaaaggattaataatgtgtaatggtcttctgactcacttgggtagtctattgacatttagggatgtagatgaggaccaataggtaagagaaaaacagaaactgtataggaggtgatgaacctatgtagggtggtatggtagaggtaataagtcttcargggaaccagtgactgtattacttgacaaagtcaagctggtttttctgaaaaaggaagtatgggaagtagacgtggaatttccccagtagagataaaaacattgggaatgatgttaaaaaaaaaaaaaaaaagacagagagatgttgggtaaaatatagtgaaggtggaacagcattgggtctacagagagaagatcagcatgaaagctgg

SEQ ID NO: 420125 - DNA, 586 bp, Homo sapiens
atattttctgttacttgctctcaaaagtatattaaatgtaayacctagtgaaaatatactcaaattgactaatgattaactaacataaaaattccagaaagggaaatcatggtataatatgcctggaagagtgtcctgttatagtatggtagctatactcaaaggctttggacccagactgcctgggttcatatccctgttccgctactcattaactgtgtgacctggagaaaactagtttagtttcttcctgtgtaacctgcaggtaatcttatggctgttttgaatattaaattagttaataaatggagagcaatgagaaattttcctaattgctaatgtattctaagcactcagtatatgttagcaatcattattaccatcaacacgtaatatattcatcacatcagagaagtcctaaaaaacaaaccacacctgactaaactgaccacattaatattcttttaataatgtgatattgttggtgccaaattactctcacgatagcatttggattcaaagtaaataattttattatgaaatgtgtatctcattatggggacaacactgtaattgtgtatttaaa

SEQ ID NO: 420126 - DNA, 586 bp, Homo sapiens
atattttctgttacttgctctcaaaagtatattaaatgtaatacctagtgaaaatatactcaaattgactaatgattaactaacataaaaattccagaaagggaaatcatggtataatatgcctggaagagtgtcctgttatagtatggtagctatactcaaaggctttggacccagactgcctgggttcatatccctgttccgctactcattaactgtgtgacctggagaaaactagtttagtttcttcctstgtaacctgcaggtaatcttatggctgttttgaatattaaattagttaataaatggagagcaatgagaaattttcctaattgctaatgtattctaagcactcagtatatgttagcaatcattattaccatcaacacgtaatatattcatcacatcagagaagtcctaaaaaacaaaccacacctgactaaactgaccacattaatattcttttaataatgtgatattgttggtgccaaattactctcacgatagcatttggattcaaagtaaataattttattatgaaatgtgtatctcattatggggacaacactgtaattgtgtatttaaa

SEQ ID NO: 420127 - DNA, 586 bp, Homo sapiens
atattttctgttacttgctctcaaaagtatattaaatgtaatacctagtgaaaatatactcaaattgactaatgattaactaacataaaaattccagaaagggaaatcatggtataatatgcctggaagagtgtcctgttatagtatggtagctatactcaaaggctttggacccagactgcctgggttcatatccctgttccgctactcattaactgtgtgacctggagaaaactagtttagtttcttcctgtgtaacctgcaggtaatcttatggctgttttgaatattaaattagttaataaatggagagcaatgagaaattttcctaattgctaatgtattctaagcactcagtayatgttagcaatcattattaccatcaacacgtaatatattcatcacatcagagaagtcctaaaaaacaaaccacacctgactaaactgaccacattaatattcttttaataatgtgatattgttggtgccaaattactctcacgatagcatttggattcaaagtaaataattttattatgaaatgtgtatctcattatggggacaacactgtaattgtgtatttaaa

SEQ ID NO: 420128 - DNA, 586 bp, Homo sapiens
atattttctgttacttgctctcaaaagtatattaaatgtaatacctagtgaaaatatactcaaattgactaatgattaactaacataaaaattccagaaagggaaatcatggtataatatgcctggaagagtgtcctgttatagtatggtagctatactcaaaggctttggacccagactgcctgggttcatatccctgttccgctactcattaactgtgtgacctggagaaaactagtttagtttcttcctgtgtaacctgcaggtaatcttatggctgttttgaatattaaattagttaataaatggagagcaatgagaaattttcctaattgctaatgtattctaagcactcagtatatgttagcaatcattattaccatcaacacgtaawatattcatcacatcagagaagtcctaaaaaacaaaccacacctgactaaactgaccacattaatattcttttaataatgtgatattgttggtgccaaattactctcacgatagcatttggattcaaagtaaataattttattatgaaatgtgtatctcattatggggacaacactgtaattgtgtatttaaa

SEQ ID NO: 420129 - DNA, 479 bp, Homo sapiens
attaacacatcaacaactaacctccatatactttcctcaccttctaaacttctattgagtgatgatatggaattgcactctgcatccccgtctccctcctagtacttcctgccaaaaggctgttcagctactgtccagacatcctaatagagcttggaattagccatgatttctagaaaattatgatttatgtacaaatcagcaagctgtcttcactgagaaccctcaaggcarctgagaaaaaccttcaggttaacccgctgagaaacatttgagttgcttcctagactctagaaaatatggctaagttgagataaatgatacatctttcttgtgtctctgagctgccagtttcacagctgtcaatggcagctgaggtccagaatagctccgtgaaatagcaaacactggtaaagttttcaagagctcattccttgggatttaataagtttgctgttcccaagttctggcaagatgct

SEQ ID NO: 420130 - DNA, 572 bp, Homo sapiens
tgtcacaggcatgtccttaacattggaaaaatgaacttctaaattgactraggcttgtcacagatacttttagcttacaaactgtttgtaaatggacaaaactcctacagaaactttgtgagcttactttatgtagttcacttatcttacggatatcatgtacatgtgtgaattgtgatataataagaaatatgtattttgatcttcatcactggcttctggacagagctcctaaaatccttgtaattcccaagagataaaagcaaaaattgaattttttgttgttgttgttatagtattagtcttttgtccctagctcctgaaacaactcagaaagataaaggaaaaaggcgcatcttttgttattcaaaacatccctttcaaccacacctgagtttatgataatgaggtgactttcagaagccccctaaggatcaggggactagttgccagggaagctcaccctgtgattacagagttggaacttttagcttcacccccaatgttgagggaggggaaaggggctggaggttaagttaatcaccaatgccagtatttcatgaatcattcct

SEQ ID NO: 420131 - DNA, 618 bp, Homo sapiens
tgcatctaattaggcacatattcacagtaagtttcctataaaactaggtagccagatttaggggcaaggaaagagcttaaactataatttgagctggctagtctgaaacaaagacagaaatcataaattgaatagctttcaaaaagatagtcattattccaatatttgcacttatttgccacacagcttcaaaaccaaaatgaatttcttgtttactgtccatagaaataataaaatatctctaaaaatgtttttgattttgcttgtgttttatggagtataagttttattgaaaatataaaatctttttcaccaccactttatcaacatttcagttatttcatactgtaaacaatttctggtaaattcatgaaaaaataagccaacagaagttaaatggcattattcactcagattcagtgagccacacaattagctaaatcatgccagatctaaaatattrcataatgagtagtcataacttatccagcatatactggaaaagtctagtaaagacataactgagaagagaaagctcctttggtactttgaacatctgagaaatatatacaccatatccccctcccccaccacacacttattgatgtaattttcaaa

SEQ ID NO: 420132 - DNA, 460 bp, Homo sapiens
ctttccaactgccagtatctccatttctttgaccaagacctttttcagaagctgctgcgagatacattctgcccatacacctggcaggacaaaagtgcctgggagttgacacccagtaaaagaagccttctactattgatgaatggaagttggtgtaaaaatactctagctccccgctgcctcaagtagaaaaatctctgagttgtgtgttttgcagcattttccagagtggcctgtyatggtagtcgacttaacagtgcaccctatattggcgattttgcctttcctatgtcactttttctcacctcatctgtttatttgcatctccaaataaaccccttgtgtgcaagtccttgcctaaggatctgcttttgagaaaacctaaactaagacaaaatccaaattaaggggatgggggagaattagaaagaagagggtcttataagaataaagagaatga

SEQ ID NO: 420133 - DNA, 559 bp, Homo sapiens
gctgtcattttctggttgtcacttttgtatggagaaggcaaagggtttcgtttagaagttatgtacttatataaccttttatgttcaaagtacatgtttgataaactgtaagctgcagtgtaattatagtatagcatacaagtattcgttatttttatgccagcaatttatcccttaattataggagtttttcatatagttaattaccatagtttatgaggaaaagtcctgatttttctggaagacaagtatatctatctgaacattcattacatttggtttgtgaaaagaattaatcatctgtggaaactggcccrttgcatcccaacgtccactaaatattcaggttactagtaacttttttatgactgcttgtcatattaaaatatataagctaaaatatatatgagcagtgaattattaaatcaatgggatccagtgcattgtagtgtagtgcttctgctcgtaggttctggatgcaaactagctgagaattttggataattttgaccttaggcaactcacttaaatgcttggtgatttggttttctctttcata

SEQ ID NO: 420134 - DNA, 575 bp, Homo sapiens
ggataattgtctatatgaagagcaagagaggaagaagcatcaaggggaccagtccagaggcttttgcagtaattcagacaaacaagagatcatggtggcttgaactgcaatggtaatgacagaggtacctaaggtggtcagatacaggatgtatctacttttcaacgtagagctgaacagacatgatagcttggttataagacaatgagagtaatcaaggatgggttccagatttttggcctgagcaaatggttaaacagtggtacagtggggccacttyggagtaggtttactttaaacaagggtcctattttaatatgatgaattcagagccggcaagcaagtcccagagcaatgttcaattgtactatggtttagtcaaactaaagttccaaaattcagtgagtaaattctttgattctcagaatgtctgggcactgaacacagtagctgaatttgaataaaaatatgcaaagagaccaataatgacacctcacataagaaatacctatgtgtgccactgtcttggagaagcacccctgacacctgcacatacagatggcctaactgggcac

SEQ ID NO: 420135 - DNA, 574 bp, Homo sapiens
aactgcttgatcattctggcactctgtttcttatgtcaaatcaaggatctttggattatatgatcaataatggccctccttaaattccaaagaatcactgcagagtatgtctcctcccctgatactcctaattcattccagcatggaatacactatatgagagactggcaaaaaataaatgtgaccttaggtgatactaaaagaaatgtatatgtcaaatgaagatggggcaagcctagtctactctacacaagatatatcacatgtaaagttcaattatgagtaaaacactaacaagactctccacaggaaaacaaccagggatctaaaagattctgaagattttggtaaatgagatatggttgaaaaacctgggcaagagtggagagcaaaaatttagtgagcataatactatctttcaaaatgcttgtaaccaaacaaatattagaacataaataaaatattccaggcctaaatgatatttctgaatcctcaactataatgagtrtaagttctgtgccttctaagtcttcgtagcatcttgagtctgtaaagttattgctaataacaatgt

SEQ ID NO: 420136 - DNA, 463 bp, Homo sapiens
gtaactattcataaatataatgttctcagtaggacacagtttataataaagaaggccatcttgtacygcaaacaaaaaaaacatcaaaatatttcaattttaaaaatgcactcagtgatgtgagaggctaataccatgaggtgtgcaagaagccacttgagagtcatagtatggaatggagaccaaattgtccctactgtttataatgtcagatacctcctctcctctttttctttttattttctctctcttcctcccttgctctcttttccccaccagctgttgttgaaatcaagtaaacctggacactcagatactccaaggcattttgagccttaccagttttctattgctaccattacagtatatgtacaatcaccacagacgtatagcagcttagagcaaacacaggcttagaacaactcaagtctattacctcacagttcagtaggtcagaagtcag

SEQ ID NO: 420137 - DNA, 597 bp, Homo sapiens
tttaatattctcttggaaaaggaagctttaagtttttctaacacaagaatatttttctctagagaatgctatcacttttaccagggtgctcatttttactatataaatagtttcttcagyttttacttggtcatacgcaacagaaactgtaattatttgttcccagagttcaggaaaatcaaccaggtagaatcaatttcaggtggggctattgaaactttctaataaaataaaacacatatttaattaacacactctttcatttctaccatccaatttctaattaaaaatctgattctgtaaattcagattatttgaaaatcatctgaaactaattacatttttaaaactcaaccaataaaagggcagattatacataagtgcaatagttgtaaataaagtcaatagaaacgagaacgtctaatctttagaatgaaatgtctttttagttagttccactatatccacctaatcaacaattacacacatacgtgcacttacatacacatacaacccacttcctcaggcattcacaacattattaaactgtgtttaaacagtatgtgaacacagacaaaactataggcccctataagc

SEQ ID NO: 420138 - DNA, 618 bp, Homo sapiens
aaaaaaatacttcttaaggtggttgctttctttaaattaaaatatagagaaatattatgtgactataataacatcagaacttactctttaaaatgtacctaaagttctttataaaatatactactgtgactcaacagtgtaatactgtcttagtctgcttgtgctgctataacagaatgccacagattgggtaatttataataaaaaatatattgactcacasctttagagactgggaagtccaatattaaggaaccagcaggtttgatgattctgatttcaagatggcaccttgaatactgcatcctctagaggagaatactttttccacacagagcaggaggcagaagggcaaagaggaaaaaggggactgaagtcacccttttataaggcattaatcccagccatgagggtggaatcctcatggcctaatgacctcttaaacatctgacctggtaatactgttacaatggcacttaaatttcaacatgaattttggaggggattcaaaaagtcacaaatactacttgaaaaaatataacggtttaaccagtaatgcccatctgggcaaaaaagctatttaagtaccatgcactttgatgaatgacctttaaaata

SEQ ID NO: 420139 - DNA, 593 bp, Homo sapiens
catggcctaatgacctcttaaacatctgacctggtaatactgttacaatggcacttaaatttcaacatgaattttggaggggattcaaaaagtcacaaatactacttgaaaaaatataacggtttaaccagtaatgcccatctgggcaaaaaagctatttaagtaccatgcactttgatgaatgacstttaaaatagccttcctcattttatactattacttttcagtcagtgcaggataacacattaaatctaaaaacaatggcccagtgaaaccaagctagtagatttaaagaatccattaatttaatggtaattatcatttcctattcagcacatatattttctttgtttgaaagactatgctttgtttttgtgtttgtgttttttttgtgacagaagaatgcaatacagtgttttaaaagactctgtaccaaatattttgtgaagtagaatttctccttgactagagtctacataattccataatgacttgtagaaatgacataatttataatctcattaggtttttgtgaaatgaaacaatttatatgaacaacccaaatataatcatggctaatttgagaggaatgt

SEQ ID NO: 420140 - DNA, 633 bp, Homo sapiens
taaaatattatcctaatcccacaataagaagttattttggggcagagactgcttttttttttttttctcttttatcccctaaaaagctcaggaaaacgcctggcctaaagaagcttctcagtaagtgttggctgaatgaaggaatgaataaatatcacctccaaggctgcagagttcagaaaytgagcttggcatacatactgttctttgaggtggtgtccctttgagactatttttattagttagcaatttgtatgtgtgcagaataatgtattttaaaaaactaaacataaattggtgctacagaaactgaaactattcattatctaggatggtttttaattttcaagataatttcagtgttgaattactttactttagatcagtaaatcattcatgcaacgaagcaatattgtggctgttagaaaagcccacagtaagttaatgactgctgtttatttttaattactattgcgaagaaagttttcagctttttaaagaaaagtgaaaaacaagttgaacacatcttaccatcatatactctgtaatataagtgttcttcaattaaaatcagtcaattagttcctgacatcactacagcttttattattagattgcctctaagaactaata

SEQ ID NO: 420141 - DNA, 612 bp, Homo sapiens
acattttcatttctcttctataaatgaaatggttggctcacatggtacgtgaatgtttaaactgtaaaactgtggccaaataccctatttttaaaaggaaaaaatgattttttttctttttcttttcccccacctcctactcggttcttaatgaaggcaaatgtagcctttaccttctctccaccaggcatggcaaacttatctatgagtttacttagaagtcccagagaccctaccttgaagcaaaccaggtgcctccagaactctcttccaccaggaggtagccccaatttacaacctgactctacccaccttggtgccaaccagaccacctgacaggtaagacatccgaagaccccgtacctcctcaccccctcccctacatgtcattcatgccaaaccccctttaaaagcccctgccttcttgtcctgaagactgaagtggtaccctcaaggcaggagcctataatacctcccctcagctacctcaggagtaaagttactttctatcagatctcactattgttaattagatactgcaaggggtgagggatgggacctgygtttggttacagaactgttttccaaagcagtgggactaccaatgtttaa

SEQ ID NO: 420142 - DNA, 488 bp, Homo sapiens
gctatgtaaatcccaccaggaacaacacagctctgtgggagcaatgttcatgttaattacatggtgattttgccagacagatattccttttgccataaagtgacatgtgctacacaggaaccccaagtcttcctagaatgtcatagaaggtcagacgtcccaggagcgctatatccgcctaatgacccagtgccttcaggaagacttctttcactgaacacttgcttttctgtgtacatctttaatgtaatagttgcccaaataagaacacagtacagtcttcgataccttcctgtgaagatgcagatctgctcaataggaacgtttgctgtattgtatgtataaaaataacttyaggaacatcaactgccatgaaacacatcaaaaggattttgacagggacaagacagtgcatgaaatgtaaaggtctgaacttaggtgaagaagtgtgactgggagggggaaggcatttcactgttaattttaat

SEQ ID NO: 420143 - DNA, 413 bp, Homo sapiens
tttaacaattgtaattcaaaatcatgtgttttcagaattttcttaaatctgttttcaccaggtgcttctagagagaaaaatagaaaaattatagtcaatatcaagtttcaaaataataacaagaggcattatctgacttcatgtataggaaaacacttttttctttaaaagatctctaaaggttctatcatctcacaaggtaactaacattatagaaaaatggcatcacatttctgttcaaaggaaaccagcctgtactgtctgaaaccatttccactgctatcctaattgctatcctaattacttcacatcacgacataygcgctcagtgcctactctctatagaaagttgatggaagaataaaagctcatgaacacacaatctagagattaaggtgtatacacattatttt

SEQ ID NO: 420144 - DNA, 597 bp, Homo sapiens
cttatcatttttaatttctgcataaattcctattgatggacatttagaatttctgcatttcttttagctaagaatttttcagataacaatgtgtaaggtaaaggcttttgtgtcataattttgtgagttagttcaatcctagagggtaagtggctttcttgcctcatttcccttctccttttggaaaatggcctcacatttaggaaaaggaaaatgaggtaaggatgtcaggaaagcaaaaatgagaatgaggtactgagctgaccactgctcagtatcaagcatratagattgctcagtctttcagaatcatatcttcaaaggcaacataaacaacgtctcaggacaaggaaggaagggagagtaatttatctgctgtctcctgtctcccattggccaaagtttgcttatggggcattaattcctctgtgcatcatgcacctgcttgaatggtacaacgtctacattagacttaataaatatgaagtggcttacaagaggtgtctagtgtgtttgtatatcctgagtttttgtgtaaagatgatctatttatataaatctttgtgtacctgtgaacttatattgctaaaataagtt

SEQ ID NO: 420145 - DNA, 591 bp, Homo sapiens
agtcagaaagaatttaacctcatacattagacttaatcaacgtcctaattactgccaatctaatcaacataagtctttttgttttcctagtttctttgaggtttttgtgatgctgaacaaatttttacatggttattaatcttttttttctttagcaaattgtttttccatgtcttttttggctttttaattgaggcatattttctttttcttattgatattctgacttgctatctagattatgaatagcaagtctgtctacatttataaatatatattccagttttaatcttttatattacttttgtcagctcttctgtccaacagcacataaaaatatatcagtcttttctttatagttcctgacttttgagtatctttttctttttttttttactaagaattttgattttttactatatttcctaatttgttatagtgttagtgttacaggacaggtgagccctaaaattggggcttagcccaggagggttcttggcatgagggmgagccagtggtattagacagcagtctttaattgaatggtaccgttccttgcattgcaggactaactcataggcagtgcagcca

SEQ ID NO: 420146 - DNA, 578 bp, Homo sapiens
gctggaaaccaacattctcagcaaactaacacaagaacagaaaacccaaacttgcatgttctcactcataagtgggagttgaacaatgagaacacatgtacacagggatgggaacatcacacactagggcctgtcaggggttgggggcccaggggagggatagcattaggaaaaatatctaacgtagatgatgggttgaatgggtgcagcaaaccaccctggcacatgtatacctatgtaacaaacctgcacattctgcacatgtacttcagaacttaaagtataataataataataaaaacaattgccattatgttaaacttcagattagagcaaaccttttgcagctaacatttagctcccagaaagtaatgcttttacttagacaagctgccaggactaaactctaacagcataaatatgtcactaaaataaaaacttttcaatagacaaacactgtaaggattacctggtttaagtttccaagtgtaaattcaatttgaaatgatatagytaaaaatctctgtggtcttaaggaatttttttaaacttctacaaagagaatgaacagttacagc

SEQ ID NO: 420147 - DNA, 591 bp, Homo sapiens
tattttgtaattttatttataaatgtactataaaatacttagactatgaagaactcatgttcttaggaaaataagcattcaaatattgagaaatatataataaaatcataagatacggtcttctattcagaatatgtattattagcgtcttctttgttatgggccataaaaaccattaactataataggttctttcagtcagtaagtatttattgaacatctgctctctttaargcacaactataagaaccacgagaatataacagagtcaaaaaacaaagtcctgaccctgaggaacctgtgcagaggatgaagcaagaagatacatacggaaggctggtggagaaattacaaggcattatgggcacatagtgcaatggttcagtactcatttctgggccggttatctgtttaaggataactctaggtgtggtccctgccctcagcgagctaacagtctagaaggataaacacaaataaatggccattttcaataccacttgatgttaaaatagaaatatgcaaaagaagtagagattataaacacaattactagaagtctgtccagatcagctccatagtggttttatg

SEQ ID NO: 420148 - DNA, 569 bp, Homo sapiens
gttaggaagcagctgtgaggtatgagttgcagagcttagagacagccagttgatgtccactttgaatatcatcaaactgcagaacctggactcaatttgatctgccatagagagacactgagtgtggaatcattactgttgcagtatggggtctctggaaaggcagactctgaaacagaatttagtgtttaagatgtttatagagagtaggaatcaatgggatcaatgtgtacacagggagaaggagaaaggagaatgaggctgagagggaagtcagttgacaccactaggaggtctrccactgaaaggggctggaagaatgtcttgggttggggtcttcctacctctgctgtggttagtcattggatggggggagctccagaaatgggagtgaccttggaccaggcagctccctgtagccaagggcaagtcctgatgggctgacaggctatcccctgggagcactcccagcaattgggagaagtcattccttgaaggaacacctggggagtcagagttaccagtagttttcaaagtatggtcctggaaccatcagtatctcaacactt

SEQ ID NO: 420149 - DNA, 621 bp, Homo sapiens
aatctaattaaaatccctctgttaccaagccctgttggtttttgacatctaccttgtcctctatcctaccatggctattattagagtcaaaggtctcctcaaactactgtctagaactaaagtttcttcagtgttttccagatgtcctctttattcaacctttcatcaatatcacagttaagaaatattttgttatgtcacmttctcaaatattacatttgtgtatctctaacaacacagcacaaaaaatattgcatgtgaactattcaagcaatgtttgttaaattatgctgatttaaaaagtcaagctagacatattctaataaattaaagttacaggactatttcaataagttttaggagttcttagaccataatacattgaaaaggtttgctgaaaagctttttaagatgtacaacatggataaggaaaaaaagtagtgtaatacatgcaaagcacctgattttctgtttgtacttttgtactaccataaaacatgttttatcttaaatatatttcttttagcctgattataatcgatttaatacacgctcatttgagaaactcagataatacagaaaatataaagtgaaaagtaaaatagcattactttgtctagc

SEQ ID NO: 420150 - DNA, 630 bp, Homo sapiens
aaaatgcagtaacatgaatagaaagcgaagtcttgaggatttattacctttaattataagtaacgattttataaaatttgacttttaatcatggctacattttaayaatcaatcaaaaaactgaaaacttaataaccatctcccagaagtcaatacaaaccagtcccagcacaaactggccataagagtcattttattttgtccactttacaacagtctgatatataagtaacaaataaaggaagagattctactagttattcttatagcttttgttataagcaaataaaatgaaatcaaagttatttttatatgcaatgagtgtaaataattgtcttttcattcaaacatcttctatacctgaaaaatatagtaagttatcaaaaaataccaatggaggcaaagcaaatttgggtcagcaggcactgttcttactaaatttgaacaatggaggtttagttatcgagaaaaacatgacttgaactgaggtctggcagggggagaaaggcatttctgactcaggggaatttttggtgatgtgctactgtgtgtagctagttcttaaactccaaacagcatgtgtagcaaaacagtctacaatgcacagatttgtggtatttctaggaacag

SEQ ID NO: 420151 - DNA, 591 bp, Homo sapiens
gctgcccaaaataaataaactcttgattcccttctcctattataattgcagactgaagatttgaaatgttggatgacagcagatgtactgagattgttagcgcatggtggctgctctgctttatactgcctactaccaccaagccaaattcctaggtgtgggctagggtattggmacaaagtaaaaatgaaattatccttaacagaatgcatttaagttgaattttacagtccttaccatgtcctgagatagcttttatctttatttgaatatgtattttaagcagacactgagtattgaaatgtaattattgaaatgtaattactaaatgtaattattaaagtgaaaaactaatattttcccatgtactttccttccatggcaatctttttttaaggtaaaattttaaaactttgagaatattttagcaaactcatttgtaactttttcttaaaaaccttcaggctgtgtgtagctctagaaaccattgtaatcataacacacagatattaagccaatttctgtcatcaactagggcagaagttatactgatttcttctgacttgtatctggttcaagggacagtccaag

SEQ ID NO: 420152 - DNA, 714 bp, Homo sapiens
taaaaataaatgtgttttagccagaaaaatatccctgaaacaaggcttgtcatcttttaaaaatttgcatcaacacagtcttctgcttattatcacttttaagtaatggtcattttaaaataatatatcttcttattaaatgtctctaattctgttggtggtgattccacatcagtgtggctggatttaaaaatggttctggtgaccttgaaaatcagatgttctcaccctctaggatggtagagtcccaaggatctttttcagtattaggactatatacaatgagcttggagagcaaaaataaatcctaaggcactggacttcccatagattttcccattttgtcattagattagaaaatagtgacttcttgaaggtgacacatctaggaagaggtgaagcaaagatagaatcagtctttccatcctctactatggtagtcttttcaggataccgccttgcatcaccaatgagaggaatgcatatttgtcaacagaaagcattataaaccatatccacttaattttattgcagagatgtttgatctgatcaacaggctatatcatcatataattattacaagtaaaaacctttaataatggaaaatatggtaataaaayttcaagaaactatgatctataacactaattgttccacataatttgtcaatggcacattgatatgtatttttctctctctttcatatttctatat

SEQ ID NO: 420153 - DNA, 449 bp, Homo sapiens
ttgtcatagttaccatgataatgacactgtgaacttaaagagtgtcttttatttgagaatctgaaagtgcttcccaacccttaattcataatgttgcaatatacccccagtgaagtattaacatgctgtattgcacattttcctaataggtaagatgagttagtgtatggacaggtattttataaagaaccttacaaagcttttcttgaagcttttatctcttgattttcagtcctctctcctgagcaactgaactgctactcaatgtgatcagttgagggtagaggagggcttacgcagttgctttatgccaatttcttatctcaggagtctgtcaaatraggatccacttcagaaataatcaagttgccaaggacaatcttggtactagaaaatatataattctcccaaattattttcccattaagtcttctgctaatccccaggag

SEQ ID NO: 420154 - DNA, 549 bp, Homo sapiens
aggtagagaaggcattttatggttcagttgcattacatcatcctatgggacatgcctgtcaacatcaagcattcaaaactcyaaggaaggccaggcgcggtggctcatgcctgtaatcccagcactttgggaggccgaggtgggcagatctcttgaggtgaggagttcaagaccagcctggccaacatggcgaaaccccgtctctactaaaaatacaaaaattagcaggacatggtggctcatgcctgtaatcccagctactcgggaagctgaggcaggagaatcacttgaactcaagaagcggaagttgcagtgagccaagatcacatgattgtactccagcctgggcaacagagtgaggctccatctcaaaaaaacaaacaaacaaaaaaactccaaggaagtgtcaggaaggttgacagagagaggaagccaaagagcaaactaggatcttcttcaaaaaccctcagaatcattgcaactaattcagaacagttgaccttcttccaaatcaatatggtccccaggaaatttgtagattctgagctc

SEQ ID NO: 420155 - DNA, 583 bp, Homo sapiens
caccacttataaatttcatttttaaatggagaaaagaagaatgaagggaaaaaaagaaatagaagaaacacgaagacttggagaagaggaaaaggaaaatgagaaagtgactacatattcaggtcagggggagttttcattggaaaagagattgataaaatacaaatacaaatgaaagtgaacctggagtttaatttccaaggattcagtatgaaaacacgctttatagaccgtgtagtgctaaggcatggctcattatttctaacattctggagaarccaatagccaacatcaagcatagaactcttagctcactgccttctgtgaaccatctgtgcaacatactcataaagctccccactgaagatcaaatgaaagcagaaggcagtgctagtctctcctctccgccccacctctactggtaaatatgagcccaaccttcgtgtgtctgttcaaacaccaactcctccaggaagccttctctgatagtctcggggccaggtaggtgctttgcctggtgcttctgcggttatttctatcataataggtggaatgtcattttgtgtatcaacttacacagttg

SEQ ID NO: 420156 - DNA, 567 bp, Homo sapiens
ttttatttttaaataaaagatctaattatattggaaatctgtttcaacaataatcgatgtggtcttttccagtggttctcaagttacaggtttattaatacaataatatttagatttttcaaaaattgccattggaccactaaatttgacttgcacattgtattacttattatttctaggcacccacattttgtttaaagaatttttaaaatttgcatattataaaagttacaaaatgtggtacacaagctgcttaaaacatatgagatatttatttgaaaatgaacaaagaaaataatgaaatagcctaataaattgcctttctttggatccactgatcagagggaatcagcctgcatttgaactgattcatgctccttgactgctgtctacacacacagttttcattttgttcctgactctctcccaagtctcacctcacaagccaagctccaccttctgtcttctttgtcctgccaccaccaaatatttctaggctcctacatggaagcagkaaaaattattttagaccaaaggtattagtaaaaggtataggcaccatgcgtt

SEQ ID NO: 420157 - DNA, 567 bp, Homo sapiens
ttttatttttaaataaaagatctaattatattggaaatctgtttcaacaataatcgatgtggtcttttccagtggttctcaagttacaggtttattaatacaataatatttagatttttcaaaaattgccattggaccactaaatttgacttgcacattgtattacttattatttctaggcacccacattttgtttaaagaatttttaaaatttgcatattataaaagttacaaaatgtggtacacaagctgcttaaaacatatgagatatttatttgaaaatgaacaaagaaaataatgaaatagcctaataaattgcctttctttggatccactgatcagagggaatcagcctgcatttgaactgattcatgctccttgactgctgtctacacacacagttttcattttgttcctgactctctcccaagtctcacctcacaagccaagctccaccttctgtcttctttgtcctgccaccaccaaatatttctaggctcctacatggaagcaggaaaaattattttagaccaaaggkattagtaaaaggtataggcaccatgcgtt

SEQ ID NO: 420158 - DNA, 573 bp, Homo sapiens
taagatattttctcattctattttcttccagtttgaatgttataggtaaaactaaaaaattattctwaaaatctgattttgccctaacttacttctaaagttgaggggaaatttttctttgaaaatatgtatttctttttcattgaagaagtgtatttttctttaactttttaaaagatggttcaaaaacttcatttggccacgaatcactcaaaaacacatggaaatatacaaaagacccagtagaaaatatacaaaggaaactcctttgatattgaatgttgcgtaacgcccaggttacgggtaactgttatattgacttataatccatatagtagttgttaaaccttgcaggcaaaatttaccccaagatgtattaaaattcacagtaagatgctctgtcattacatcagacttcatagtgatcctaatctttagcaaaaactatacagtgatatgctggtaaaatgggctctctggttgcaggagccctaactggtggcttttgtcaatttctgtggtagaaaccctcacatcattgacagtttcaaattaccaatattttaacaacca

SEQ ID NO: 420159 - DNA, 578 bp, Homo sapiens
ctttacccctttgctagggggtggagggagcagggagaagaacggggggagggagcaagggtgagcaggcaggcatttttgctgcaattccagctgggatattcgaggattaaaaactctggagcaggtttaccagacttttcgaagactacctggatttgcatttatttttcatgaacactctgaagaaaggcgagctcacgccggcaagggagtgtatgtaaaacaggacagtggaaggtgcacagcgagttcggggctctaagtctcctgacagtttgtcatgatggctgagtcctaagaaatgccagcctaattcaaaataaatgagtttctgtggagtaggacagtcttttccgcaaagtcccgtggaataaaacattcccaagacacgcagtttccgtgtctcacagaaagggacagaaaacaccgtctcaagctttgcaaatcttaatttgagggctgctcgtctctgtccatggtgctaattcctgcctctttctcttgcgtggttgccacrgtataaattcacactggtgtcaattttcacaacttttcccccctttcggtgaaaggca

SEQ ID NO: 420160 - DNA, 588 bp, Homo sapiens
gtttttgcattgcatgcaataactccgtaatttccttgtggtatttaatgggggttccccagaggttaggaactccctttctttccatattgcagcatgggcatgtaggattagataagtatacttgctatctgtatacacatttattctttttccctttcccagttctaaggcttgggtaagtgccactagttctgctaactggatgctggtccctgggggaagaggcttactttcaagtatggttatatcactaactatggcataacatgccctttgtatcccattctccacaaatgaacttccaytggtatatagattaaggtcaggattagctaaagggacttctaagagatcatctcgggcagcataagtcaggactataatttgttggcagtcatgctcgattggttccccatcctcttggagaaaatggcagggttgagggccacacacatatgtatttgaagaaccagtccctcaaggagtagctcctggtatctaagtaggcagttgtctgatagccataaacttcctttggcacctagtatgccatttacatcatgagtagtccagacagtgagatcg

SEQ ID NO: 420161 - DNA, 501 bp, Homo sapiens
cctcttgtggcagagcttgcagtgagccaagattgcgccactgcactccagactgggcgatagagcaagattccacctcaaaaaaaaaaaaagaaagaaagaaaaaaagaaaggcgtcttgtgatttatccactccaaagagatttaactagaatatgtatagtgtttaatttttgcacgtgaaacatttcacagctagttttcctacgaaatacttayatttacatatatgtatttgtataaaagcatagatttatacacacaattaaaacactttagtgcacactgaaaaattattttgttttatgatgagcaaaaggaaaaataactgtttataatttttaagttaataatttaaattatatatatctttttaaagaattaatttagtttatagatttatgttatgactcaataagaaagaaattttcaagttattttatctgtgttgtaacatcaaaataaatcaaccaatagtagtgacatctaaaagactaattt

SEQ ID NO: 420162 - DNA, 565 bp, Homo sapiens
tcattttataaaaggagaaactgtttttcaaccacgggttaaggaaggagagacccaagacaaatcttctctgaagtaaaggagactataagatctaaatatgtaaggagcagtttaacatgattcaaacattatctgtaaatacaagagatcaaamgaatataaaacctttagaactactgcctttgtctttacacttaactttttaattcacgtggctttaggaagtatagcattagagacaccaaggccaggcaaacaaaccaaggtcaaagtgaaacaagccatgcttcatccttaaggcgcagtcgataaatgtggactccattgttgttgctccatccttccaagttttcaagaagcaatacatttggctccagatctttatatattaccaaaccgtaaatcaacaactcacaactatttaaaacacagttcagggcaatcaaaacacctataggccatatgaagctcacggatcacccttcaggacctgtggcacaaataatttgtccactgataccaactgctccttctggtatcagtgattcacttggtcacagaa

SEQ ID NO: 420163 - DNA, 591 bp, Homo sapiens
cgcccaggctggagtgcagtggcgcgatctccgcttactgcaacgccgcctcctgggttcacgccattctcttgcctcagcctcccgagtagctgggactacaggggcccgccaccacgcccggctaattttttgtatttttagtagagatgggtttcaccgtgttagccaggatggtctcgatctcctgacctcatgatctgcctgcctccgcttcccaaagtactgggattacaggcgtgagccaccacacctggccggactgctcttgtttttaacccctgaatacctgaaggctgragaagataacataaacccatcagtaatagtagtttaccatagcaagggttcccatttgaggggactttgaaaggggttctcggacaatgaaggggtggtttgaaaaagctccttagggtgattctgttacatgccacctcctgccaatcctgcatcaccagagggaatccatctacctaccctgatgaaatcattggtgtagtttaaagctagcctcactgggaatcagaagaccagattttgagccctggctccacaactaatttgacttagacattccgggataattta

SEQ ID NO: 420164 - DNA, 546 bp, Homo sapiens
gtattatttttacttatgtatttacttgcctcccatgtgaaagcaagatactaatcacttctcaagagtagagaagttctctctgctcacagtaaatttacaacctactttgacagcaagggtgtaagaaggtagcttcttaaaaaaatgatgttttgccatggaaactatcttcaaacacaattttacacgcaagtacaatgagagaaaatagataaaagcgcagcatctctggttgaagtaaagatagaagacttggatcctcctggattctctcctcttttcctctcagcctctmtaagtaacaaagacctccaactcatgcccactaggagctcttaaaaactatagacagatagggtttctttccaacataggcaagaatttttatatcctttgtatctcaatcactatactgtacttatttttatcaaaaagtaattacataagatatctttccaaatgtatgtctgtcttctcctccttcttttttctttttagtctcttttgctcacaatccttctatggatgaagcttacggtaaat

SEQ ID NO: 420165 - DNA, 448 bp, Homo sapiens
aaacattaaaataaggtcattggrgtgggtcataattcaatatgactaatgtgctcttgaaagggaaaagcattagacacagagacagacatgcacaaagggagaatgccatgtgaacatgaaggcggagattggggttatttgtctacaagccagtgaatgccagcaaccaccagagagacagaaataaaaatgatttttcctcaaagtcaacagaagaattcaacccgaatgacactttgatcttggacttctaacctccagaactatgatacaatacatttctgttattttggttacctacattgggtggtagttttctatggcagccctagcaatttattacacaacataccacctttggtaaatgttttgtcctccaacatggtttttcttctcttcccttaagggtacctcttttcttgggtctgtttccattttttttttc

SEQ ID NO: 420166 - DNA, 558 bp, Homo sapiens
caaacaatcatggaataagcattccagccgtgttgaactgcatgtgatccaggaggacgccctagagacacaaacacatatttaggtatcttccactttatatatatgatgtgtctgaatacacattcatgagataatattatattgccaataaattaagagtcacctaatttcagataccatagtgtaagaatcccgagacctttttgtttttaaataaaagttggttgtacatgtgagaatmtgatgaaactgagttcatagcatgggaatgcattctacttttttctttatttggtttttaatttgagcattttaatccataaacctcattaatgcatttatttaagaaaaggtatattgaatattatgtgtcaagatgtataataaaaagattaaaaatcacagcttctgatcataaggaaataattgcttactgagatgagagaatggtaagcagatacttataacagaattataaatgctagaggagcttatagaaagagcaggattaaggcagaggttaggactttgggaatatggttaggtatgtaggag

SEQ ID NO: 420167 - DNA, 613 bp, Homo sapiens
gttagccctaaaaatgttcttaaggccagggcacggtggctcacatctgtaatcctcgcactttgggaagccgaggaaggcagatcacctgaggtcatgagtttgagaccgcctgaccaacatggtgaaacccaatctttactaaaaatacaaaattagcctgagtggtggcagatgcctgtaatctcagctacttgggaggctgaggcaggaaaatcacttgaacccaggaggcrgaggttgtagtgagccaagattatgccatggcactccagcctgggcaacaacagcaaaactctatctcaaaaattctttagcagttaaaagcctttgcaagcttgaaattggcttctctaggttccttctgggaagagaaatagaaactgcttaatgctgtacctcagaagctgaagatttgccttttgacaacggctgcttgggttctattcttggcttctggagattcctttctgcttttttatttatgtaactttgccatttattgaaattttttccccccatggatagcttctgatttcctgtcttgaatttccctttctctacactaccctaggggagattctaaatcttgaaaaaaaggaaactgcttatc

SEQ ID NO: 420168 - DNA, 533 bp, Homo sapiens
tatgtaattctatgtaatttacaaaatgctgttaaatacattgactcatggwaggttggctagtagagtctatccacctcactagtgtggatatgtatttagtccagtctatctcacaatgtagggtcagttgttttgattctccagcctttcacacacagcaagttttctttattatcagcaattttcaactcatcacatatgcatgtactgcttaaaaatattttcatgttaactaataaaagtgcttggctctcccttatcacatcattttacttagctaccaattattacaccctgaggaagaaaaactaattttattattagctgagatacaacataactagaaagttaaacttactgcagaaaatcatctcatatatattcctttaaaattaactgtacttttagattattcatgcctctgtttctcttcaataacatggttaagtgaaagttgatgaaattgctaaattgagtacttcagagcaggaaactgaaatctttccaggaagttaacacttttcttgatt

SEQ ID NO: 420169 - DNA, 553 bp, Homo sapiens
caagaaggaggtctactttgggaaaaggttattaccatctttgcttaaactataaactataaattaagttgctcccaacattagttcaatctatgcctaggaatcaacaagaacagcttggaagttagaarcaagatgggagtcagttaatttagatctctttcactgtctcagtcataattttgcaaaggtggtttcaattcctcccttttggttttattactccttagtcttaaggcgtaggctatgaagatgtgaaaaggtcatcaatcattctggcttcttcccactgacggaagatgtagtgggaatgggagtgaacccattgagagtgagaatagtggaacagctttccaactgtctgtgtgtactcatacaggcttggctgggctatcaaggcttgcatggtgaaaatagtagtacttacatctgtagttttagtactgtatttaagtgaaaaacatgctataagggaaataatgagtcctaggatgaagagtacaattcccaattttaaatgcaaagatttgaaggcattcatttggggacttct

SEQ ID NO: 420170 - DNA, 577 bp, Homo sapiens
taatattaattgatttttaaagtcatatgatttataaagcaaatcaaaatctatgaacaattaaaaattactattccaaatatttttattgtcataaaagtaaaaagctctttctttaaaaaagttattcttttcaaaatctttgaataatctccaaaatraagatttttataagatttgaggataacttaataaaaaatattttttattttattcctgctcctttaaacatataccttattgaaataacctgacatactattttattttgaatcattttctgataattaaaaatgtgttcaataatttaataagccatagtgttattaattttggtactagaaaatatagttttattttataaaacaaatcgatttaaagattttttgttattcagtcctagccttgtactttaattttttctaattcctctttaagggtgatatttgacccacacctgtggaaaacctaattttagcctctagctttatttttcacctttggagatattctggaatttaatagcaaggcacccttgttactggactaactgaagtagaatcctgatcttgatcaa

SEQ ID NO: 420171 - DNA, 642 bp, Homo sapiens
  misc_feature (1)...(642): n = A,T,C or G
nnnnnnnnnnnnnnnnnnngaattctctaaacacttttttaatggctgcaggatcaatagtggtgtcctgtatttcgttgctgatattgataatttggcttcctctctctctctcttcctctctctctctgtcagtctcattggagatatattaattttatgaatttctttgaaaagatatattgattcattgtttttctgtaatgttttactaattttctagttccctgaggaactgaaattattgactcaagagcttttcacattttaatgtaagcatttagtgctatatatttttctctcagcattcctcatattttgccatattgtgtttttattttcattcagttatatgaatcatttaaaattttattgaaaacctttctctgacacatgacacatggatcattttgtagtttattttctacgattagtttatttatgtatttttttccttctgttattttgtgttttagtcggattttattatggtcacagaacacactgggtatttcatttcatttcttttaaatctgttgaggactattttatggcccaggatatrttctatcttaaggtcccataaacctgtgaaaaaaaatagtctgctgttattgggtgaactgttccatatatgtcaaa

SEQ ID NO: 420172 - DNA, 642 bp, Homo sapiens
gctgcctagcacatcaacccaagccaactctacctccagtgcaacagtgcacacaatctctagcagggaccccctgctcccaccccccaatcatccgttttgcctcccccactgtggtgagtgcccagaaggaggcaggaacccctgcatccactagcactctactgcagctgcctcacctcagcaacgccagcacaatggactccaaaccttgaggagccagagaaaaacatgggagtcaagtacaagttcctcaaagagcactcagtccaggagttgggaactgagagttggccctctaaaatttcccagaaatgaagccagttgactgaatctaccttataccacagtcaaaccctccaggtcatcaaataggataaaagaaaataaaaaacatcccaaagtcaacagcccccaagattgaaggtagataagcccataaatattatagtcagtgcaagaatgctgatccaaaragccagaatgccttatttccttcaaacgaccacatcacctcaccagcaacaggttgagactgggctgaggctgagatggctgaaatgagagatgtagaattcagaatatagacaaaaacaaagttcaccgtgttgtaggagtatgttgaaacccaatgcaaggaaa

SEQ ID NO: 420173 - DNA, 541 bp, Homo sapiens
ccaggagttgggaactgagagttggccctctaaaatttcccagaaatgaagccagttgactgaatctaccttataccacagtcaaaccctccaggtcatcaaataggataaaagaaaataaaaaacatcccaaagtcaacagcccccaagattgaaggtagataagcccataaatattatagtcagtgcaagaatgctgatccaaaaagccagaatgccttatttccttcaaacgaccacatcacctcaccagcaacaggttgagactgggctgaggctgagatggctgaaatgasagatgtagaattcagaatatagacaaaaacaaagttcaccgtgttgtaggagtatgttgaaacccaatgcaaggaaaataaaaatcatgatacattgcaggagctgacagacaaaatagccagtacagagaagaatgtaactaatctgaaagagctaaaaaacacactacaaaaatttcataattcagtcacaagcattaacagtagaatagaccaagtggaagaaagaatctcagagcttaaag

SEQ ID NO: 420174 - DNA, 541 bp, Homo sapiens
ccaggagttgggaactgagagttggccctctaaaatttcccagaaatgaagccagttgactgaatctaccttataccacagtcaaaccctccaggtcatcaaataggataaaagaaaataaaaaacatcccaaagtcaacagcccccaagattgaaggtagataagcccataaatattatagtcagtgcaagaatgctgatccaaaaagccagaatgccttatttccttcaaacgaccacatcacctcaccagcaacaggttgagactgggctgaggctgagatggctgaaatgagagakgtagaattcagaatatagacaaaaacaaagttcaccgtgttgtaggagtatgttgaaacccaatgcaaggaaaataaaaatcatgatacattgcaggagctgacagacaaaatagccagtacagagaagaatgtaactaatctgaaagagctaaaaaacacactacaaaaatttcataattcagtcacaagcattaacagtagaatagaccaagtggaagaaagaatctcagagcttaaag

SEQ ID NO: 420175 - DNA, 520 bp, Homo sapiens
actattgggtatattgccaaataaaataaaattaatatgtcaagaatatatctgtactctcatattcattgcagctttattcacaatagccaacatataggattaacccgtgttcatcagtgaacgaatagacaatgaaaatctggtatatttgcataatggagtactattcagtcttaaaaatgaatgaaatcctgtcatttgcaacaacgtggatgaacctgagggacatgatgataagtgaagtaaaccatgcacagaaagacaaatactgcatcttttcacatacttgtggaatctaaaagtttgaagtcctagaaagaaaggataaagttgtgaggccagtgtgtgggatgggttggtgagttatttggcaaagaatgcaaaattacaaagggatatgagcaataaacatgagacatctcatgtaaaacatagtgactatagttaataataatgtattcttgaaaattgctaagagagtaawtattaagtgtcctcaccacaaaaacaaagataa

SEQ ID NO: 420176 - DNA, 576 bp, Homo sapiens
tctctgcaccaactcacctcttgaactaaaaagaagcctgcaccaatacctatcctcccaactttcccaacagatcagagaaaaggcactcaatcctcttttcaaagaccagttgctctcatctcttctttcccctttaatcgcttctcaattacctaggctttcctctaaaatctccaatgttacctagtccctttccctctgcctatatgtacatcctctcctatttcaaaaagcattacatatttttattacactcccttgttattatagcttcaaaaaccccaataaaatgcataataaacttccaagtacaatatagcaatayatcaaaaaaaaaatcacacacatacaaacacacacacacacatacacacacacacacacacacatacactatatttcatagggaataggcttagcccagaaacgcaaggatggctcagcaagcttagtaacagaaaacctattactataattcatcatcacaataacagatttcagtagtagcaggaaaacgtcatcaatactgctttctaaggaatcagaaaatgaacagttttggaaatagaagat

SEQ ID NO: 420177 - DNA, 579 bp, Homo sapiens
ccacatctgcctccctgctctgtttgttcttttcttctgtagaacattaaatgattagtgtgcatggttcaggcaggaaccatcttcagatggagtaaaacagaaaagattatatcagcgctttgcagtgatttcctgtgtgctatatttggttatgaacagattagaaagacttatgccttttatagtctgagaccaaactcctctggccacataaccacacaaagtaatatccraagaacctaggatggttataagatctcatgaacaattctgcttttttgaaatgtactttagagtcctggaatctttaattaatggattttcctgaccctattcaaagaaataaactcaaaagtaaaaagtaagacgcattacaaatattatgctgaggtgaggcagtcgctgagaaatcctgaacactccctaggagccaggtgtggtgctgaatggtttcagccagtctgttgtttctcatttgtgcatttgcagatagacacttttgcacataaaaaaatgaaacttgtagttgaagactaaagagtttctgctttcaactcagctcctaaccatagaaat

SEQ ID NO: 420178 - DNA, 586 bp, Homo sapiens
tctgcttttttgaaatgtactttagagtcctggaatctttaattaatggattttcctgaccctattcaaagaaataaactcaaaagtaaaaagtaagacgcattacaaatattatgctgaggtgaggcagtcgctgagaaatcctgaacactccctaggagccaggtgtggtgctgaatggtttcagccagtctgttgtttctcatttgtgcatttgcagatagacacttttgcacataaaaaaatgaaacttgtagttgaagactaaagagtttctgctttcaactcagctcctaaccatagaaatcatcttacatttgatattcatctagmcatgagagcatactacagagtttgggaagtgtgtgggctgggtttcaaaaccatgggggcaagtacattaactgtgttcactcgggttttcatatcctctttttttgggatataattaatggttaaatagtagtttaaattatatttttaaatgcaggtgtaaaattgaaaggacggacttaaaactacctatcttcccttaagatttaaaatgttcatatttatcagcatgaaaacattggaatcgcattca

SEQ ID NO: 420179 - DNA, 595 bp, Homo sapiens
catccttttaccctaaaactcattagtacataaatgaggagaaaaagttgagaattggagaggtgggaggtcagggaagatagagggtcactgggggagtggactgtccactctaacccgtttctgatcactggtatccacagaatgaaccccaaagccatcgcccatcaaagggcaggtcccacacttcccagcaattagatccaggtggaggtgagcctctggtggkgtggtgcggaagggcagagccaggtaaccagggtagtcagggcatgcctacctcgcccctaccccagagcctctcacctgcaaactgggtacaagcagttggtgtaaggtcaggaatgttgtcaaaggcaacatgaaagttatagtgtatcaagttcaagacctggacttcacagatttatggctacataaatacacacaatgtctttatgaatttgcccctgcttttaatttagtaagagaccttcaaagcaggagttcaaaaccaggggcaattttacttcccctcctcaggaacatttggcaatacctggggacaattctggttaccacagtgaggggatactacgggtatctgtcaatagag

SEQ ID NO: 420180 - DNA, 489 bp, Homo sapiens
atgtccttttaaaacacctgtgtctttcataatttatggaggtcaaagttaagttttatagtgtctctagatgaaatgagtcatttagttaatatgctcatgatggctcaaccttttctttaatgccggctgcattttactactttacatgaagatacaaatgaacttcatctattaaggtccccactgctccctccgagaatatattgttatgcttagtgatttgtttctaataggccactgggggaagtgatgggacccaggaatgagttattcaatcctagagtcagtaagcaagaaactttggtgaagacgtagaaaacgcactcaggtgtctagtggggaaacgaagaatgggcttcaatattgtgattttgcatctgccaaacttaatagctttgtgatttgaattattcagcccattggatctgtgtactcctcatatrttattactcctaaaaggaatctggtttattgcacgtgaatgtg

SEQ ID NO: 420181 - DNA, 584 bp, Homo sapiens
agcactggttcagaccctcttgcaaagacagtaggatgtggggctatggaaaaactcaaagtgaaaaaggtgagcacatacatgttaattagggctcagtccatttcctctcctagacaggcccccagatcctcagcagcagcacccaaaccagacacatacacactcacggacacacacacaaagcaggaataccacagtagcagctcctccccccaccagctagaggctgcagaatatgagaacctggcctttgcagtgtaacaggccaggaatctagcctctgctctgttccataagcaccatgggttcatggactagttaattaaattccttagtttttttcctcagctacataaaaggggaaaaatagtcactttatacaattttataaagactgaatggcatactgtatgtaaggcactcagtaagcatttgttgttggattgctattgtgaggcattgttgaacttgacattgctatgctcagcttggcttggtgtttatccagtagattccctttataacataatrgccagaataaaggaatggccagagaaggaatttcctagcataaccagact

SEQ ID NO: 420182 - DNA, 602 bp, Homo sapiens
tttcaactatggactagagaaaaatgaaatacaacagaaagctgggtctctcaaaaccagctactactttaacctgtgaataaaatattgattgtttttgcccatgttaataagggtgatgatctacacaaaaaccattcatcattttttattacccaagtgtctttatgtaagtatggaggaagaaaatgacaaccatgtactgatctgctttattggagtaaagaacattctgaaatcagaaygtaggaatgatacaagcactgtggaatgcttgagtttctaagcagtctaaaccactcaactccaatacaggagttggggggcagggacaaggtactgtcctgaaaatgaaagagctgtgtcttcacctcctcaagatgggaaccttctgtgagcagcacaggaaaagaagtacagggcatattctctgtggagaaattctggaagttcttttttctgacctcttcctgaagttgtgaaaagatccatcctacctcaaaggtagggacctattactccttaaagttggcatgcttctcccttctatggacttcatttttggtttcagtgcattacataaaccatcctatcaatgaaat

SEQ ID NO: 420183 - DNA, 510 bp, Homo sapiens
tcacctcctcaagatgggaaccttctgtgagcagcacaggaaaagaagtacagggcatattctctgtggagaaattctggaagttcttttttctgacctcttcctgaagttgtgaaaagatccatcctacctcaaaggtagggacctattactccttaaagttggcatgcttctcccttctatggacttcatttttggtttcagtgcattacataaaccatcctatcaatgaaatctgagccaaaactatgatagaaaaacaagggagtggaatgtttaaaagctaacacaagtagaagaagagcacggcaggtctgtgctggtttactatgctgtgtcttgcctgctaccagtttccttccctttcctttgcagtytgcgttaccaggcctgttacttcaacaaccactcagaacaaggtaatctcactttggacaataaatcagcagcaaccccatgccacgtgtacccccaaaataagatacatcaggctttcaaccaacttggttc

SEQ ID NO: 420184 - DNA, 557 bp, Homo sapiens
ttgcagtttgcgttaccaggcctgttacttcaacaaccactcagaacaaggtaatctcactttggacaataaatcagcagcaaccccatgccaygtgtacccccaaaataagatacatcaggctttcaaccaacttggttccctcaaatcttttcagtgattatcatagctttcagtcccaaagcttcacacacttgtctggtgccagcgtgtgaatgcaaaacacgtcataagggaataaacatgcacattcatagatgtttaaaatatgctgctgaaaaacatacatatcagaataaccaacatttcttacttatacttctttatttactaactatattttcagtactgacttggtatcaggaattgtatgagatacttttacatattaactatttttatgtttataatcttgtgaagcgagagctatcatttttgttataaaatttttttaaaccctgaaattttgacaagttaaatatccaaacatgacataaggaataagtagctaaactggaatttacatccagaataaggctaaggcaatatttctataa

SEQ ID NO: 420185 - DNA, 616 bp, Homo sapiens
tgctgtgttttcagtgtcatatttacaaaggaaaatgcaaatgaaagatgctttatgcttcctgctattttgggtcttttttcgtgatacgaaatgttttaatttctctaattggttattattaaatatttttgttttttaaaagttctataaatgggacagactcatttcctgtagacattttttgagataatttttttctttctactgtagtctattaagtgtctataatatctatttgaatacacttaggcaaatacatatatatatatatacacacacacacacacacacacatatatatatacacaatgaccacattgatgcctatatttatatatctatgtgtgtatgaagccagatatttccctgaccccttcccaggacttgygatagggatgcctcatttactcagccctcagctctcaactcctgtgggagggagtgtgcaacgaggccggaaatggagtgcacacacgctggaaccagctggccactttggcactagcaggggtgagttccactgactcagaccctccgtgttccaccccatgctggagggagcatacaggtgagcagatgcaggagccagggtgagcaattttggatgctggca

SEQ ID NO: 420186 - DNA, 635 bp, Homo sapiens
tatcaatgagcccttgatagaaagaatggtctggaaagagtagagaatggaaggaaaagtagtatatttttaaaaacctaaaaacctacaatttaggatattggccttgaacctgaataaagaagatgtgggatcactgcttagagatgaagtcaaggtaaacaacttacaaagaacaaaacagttaccaaattcaatgaagaagcaaaccgtgatgactgagccaggcatcagagtttgaggtggctttagacaaagatgtgtaaattcaggtgcaagaatgggaatgttkcaggtgaaaaatttccaatggtaggttgcccacagccattgttaaacatcgctaagacctagaaatgtccataaagatgttctagttcaggaggttcatcattcagatgggaaacacatgaccagggagcactgccaggaccaggctccagagtgaatatcaggggctctgttcaccacaactcagcagccccgagagtgggctcacatccaatcttcaaaccacatgagggaagaacagagggccaagggctgaccttcctgctaggggagtgaagagatgagcctctaagaggaaaaaagactacgaaagatagaagaaaatcaggttactcttttcccat

SEQ ID NO: 420187 - DNA, 630 bp, Homo sapiens
ttaattaagctttgaagaacaaacactgtctataatattaagtcattctatccataaatatggaatatctttctatttattgagttctttaatctcatttatcagagttttcatgtttttcttatatatatttttgatatatttcattaggtttatatctaagaatttcatttttgtgcrcaatataaatagtattttgttgttcatttcaaattccacttctttactataggtatataggaaagcaatttgactagtgtgttaaccttctgttctgcaactttcttccaattctattattagttatgaggtttttttaaaattctctacatagacaattatgtcatctgttaacaaagtttgatttcttccttctcaatctgaataaatttatttctttttcttatcttatatcattagctaggatttccagtatgatgttgagaagtaatgatgagaggcaaaatccttgccttattcctgatcttagtggcaaaacttccagtttctcacccttaagtttaatgttagcaatgagtttttttctgtggatgttatgttattaagttgaagaagttctctattcctacttttactgagcgtttttaatcctgaatcagtgttggattt

SEQ ID NO: 420188 - DNA, 630 bp, Homo sapiens
ttaattaagctttgaagaacaaacactgtctataatattaagtcattctatccataaatatggaatatctttctatttattgagttctttaatctcatttatcagagttttcatgtttttcttatatatatttttgatatatttcattaggtttatatctaagaatttcatttttgtgcacaatataaatagtattttgttgttcatttcaaattccacttctttactatakgtatataggaaagcaatttgactagtgtgttaaccttctgttctgcaactttcttccaattctattattagttatgaggtttttttaaaattctctacatagacaattatgtcatctgttaacaaagtttgatttcttccttctcaatctgaataaatttatttctttttcttatcttatatcattagctaggatttccagtatgatgttgagaagtaatgatgagaggcaaaatccttgccttattcctgatcttagtggcaaaacttccagtttctcacccttaagtttaatgttagcaatgagtttttttctgtggatgttatgttattaagttgaagaagttctctattcctacttttactgagcgtttttaatcctgaatcagtgttggattt

SEQ ID NO: 420189 - DNA, 654 bp, Homo sapiens
caggttaatataggattgatcatttgaattatgccagaaacattttcttatgtgtttagtttattaggaatagataatcaaatgaagctttagaagttgtcttaaaatttttgattacttttcttctttattcatttktatcaggtttaccaaaaacatgtggttaatgagtttatatttgagaacatctgttaccatttttacaatttttatttttttattttattttattttttttagagtcaaagagtctcactttgtcaccaggctggagtgcagtggcgcaatctcggctcactgaaacctccgcctcccgggttcaagtgattctcctgcctcagcctcctgagtagctgggactacaggcacccgtcaccacgcctagctagtttttgtatttttagtagagaaagggtttcaccatgttggccaggatggtctcgatctcttgacctcgtgatccacctgcctcggtctcccaaagtgttgggcctcccaaagtgttgtgagccactgcgccaggcccacaatttttaatttttatgagtaaacagtagatatatatgtatatgtataggtatatgcatatatatgtgtatatatacatggggtacatgagatattttgacacaggcatacaatgtataataatca

SEQ ID NO: 420190 - DNA, 542 bp, Homo sapiens
ggttgttctatttcttgttagaatactccttaaacttactaaagctacataaaacaattgttctaaaattgcttcttcagtttcttttttgaatcatagatcattggtcagaaatcttcaggcaatgtctatagtgactatttcatgaaatatacaaaataaccctctagatctattttattggaaatatatttatattttctataaatctaagtacaatgtcaatataaaatatgattatctactaaataaaccaatcagaacctaaaataaaagtaaatactgtcctaacaataaactttttggcagatcatacactttctgtaataaggcttttgctcagaacacaytgaaagccctatttttttttttttggatgtggttttatatattatctgtagccttgtcatgctatagttacagtgtatttttgactcagaagagaatcagttagcctggttattacatttatttaccaagattaaatgacatttcactgtttaaaatgaatttaattcacactcaaatatacatttgttatc

SEQ ID NO: 420191 - DNA, 515 bp, Homo sapiens
tcaatttatatccacaacaggaagtgtatactatttaataaatgatagtctaatgaatgaatggatatgatggaaagatcaatcartgaaactaagatagataatttgataaagaatgtcataggaagaatagatggagagaaatgggaaaagggtatttccggaagactagtgtaatttacagcgagcttttgtaggacaagtagaagatgatgctgagaattataatgatgaagccttaacattgagaacttctaatgctaaaataataaattcagatttttcctaaaatgtaatggagcaacccatttaaagttcataataaacaaaggcaagataattaatctgtgtatttttaaggtagttgatccagcaactgaaaacaaaataattatctctgtctgaggtttatttaaatataggagaaataaattattaatgtgctctctaaagacataaatgttatataagtaattccactaaaaatacatccaaaccaataaaccagaaggctc

SEQ ID NO: 420192 - DNA, 629 bp, Homo sapiens
caaaaccaatacatttaatggtttgaaaaggcattaaactcatctccagatttagagaggaaagagtggccattcacagatgtgcaaagtgtcatgggcattcatgaagataattaaataattatcctcctttaaagagaaatatagcatccacatgggtttttgaaaaggttaaaatcaatccgattgactctataggagtctctactcttcmgagaggactaggggaattcaaggggctcttccggtctttgttgcattccaatctgcaaaaggtgcctcatgtgtaacagcacaaaacaggactgaagacggctctaggcatggtgtgaaccaacataaggcagcactttcagagcatctgatgtttaggaaattcactttgaactttggctttcttttcctcagatatagggtcaaaaatctcctctgcaacacctgtggatagcagatgggagacaatatttccaatgtgtagcattttgctctctatttcttggagtttgtgtgtgcagaaggtagagaggctgaggggacaatgaaagaagatgattaagggagaggataaccaacttgggggttcaaggtcagtgtttaatgtaccaaaaggaagcattttaattttaaga

SEQ ID NO: 420193 - DNA, 629 bp, Homo sapiens
caaaaccaatacatttaatggtttgaaaaggcattaaactcatctccagatttagagaggaaagagtggccattcacagatgtgcaaagtgtcatgggcattcatgaagataattaaataattatcctcctttaaagagaaatatagcatccacatgggtttttgaaaaggttaaaatcaatccgattgactctataggagtctctactcttcagagaggactaggggaattcaaggggctcttccggtctttgttgcattccaatctgcaaaaggtgcctcatgtgtaacagcacaaaacaggactgaagacggctctaggcatggtgtgaaccaacataaggcagcactttcagagcatctgatgtttaggaaattcactttgaactttggctttcttttcctcagatatagggtcaaaaatctcctctgcaacacctgtggatagcagatgggagacaatatttccaatgtgtagcattttgctctctatttcttggagtttgtgtgtgcagaaggtagagaggctgaggggacaatgaaagaagatgattaagggagaggataaccaacttgggggttcaaggtcagtgttyaatgtaccaaaaggaagcattttaattttaaga

SEQ ID NO: 420194 - DNA, 552 bp, Homo sapiens
caagcatagccacaggggacaggcctatggagcagcctccaaacagcagaagagaagacacaaatctcttcttggggtaactgtcttgtcagcaaaaaacccctcccactcatgtacaaagtctatcgttgtccttagggtaagcatgggtacatgctcagcttgtcttttagccctaaatcaaattcaaacctttattatttaggaagccacctactctgagtgaggtattatattaagttctttactcatgtgagttcaaygaatatttaaattttgaataaaggtaatggctaatgatagtcaattatacctagtagaggcatcattataattattgattttcataccaaatttttgaatgccataccttttcttataatgatagatcaaaaagttagaaatatagaaatatatacgggacctataaatcaaaaaaaactttcaagaaataattttaaataattatcagaattctgtggagaaataacatatattttatatatttaaagaaaaagcaagcaataaaagtttacctcttttgctatgcac

SEQ ID NO: 420195 - DNA, 640 bp, Homo sapiens
  misc_feature (1)...(640): n = A,T,C or G
taatcttctttggtgacaccctcacagacacatccaggaacaatactttgcatccatctatcccaccaggttgacactcaatattaaccatcgcacccctcaaaataaatattcttaaaaaaagtttttggccgggcgcggctgcacgcctgtaatcccagcactttgggaggccaaggtgggyggatcacaaggtcaggagatcgagaccgtcctggctaacaccgtgaaaccccatttctactaaaaacacaaaaaaaattagccgggagtggtcgcaggtgcctgtagtcccagctactccggaggctgaggcaggagaatggggtcaacccgggaggtggagcttgcagtgagccaagantcgaccactgtgctccagagcctgggtgacaaagcgaaactctgtctaaaaataaaaaaaatttaaaaaaaattttttaacatatctccaaatatgtacgtggatctaaacttgcccctgcttggaagcaaagtggggcttgatgccccaggctgtttcctcagcagccattctcagccctcttttccttcccctgtcccatcagagacgctgaaagttacttcccaagagctggaaaggatcctatgactcagctctggccaatgaggcagaagg

SEQ ID NO: 420196 - DNA, 532 bp, Homo sapiens
ggttacttatgaatatgactttakaaatatggtctgtgcagatgtaattaagttaaggatctagaggtgagatctgttacaaaccactgtgggactgactgaccacctgtccctttgcatcttgggtgcacccaaggtcaagtccaagaagacacatgttcttgctatgagagtaattggctctcgtgctttcaatgtggattgccagttggctttccatggagatccactgctgctctcctgggcaggtagggagcacttgttcccgtacaccctccccaacctcatgtgcgggcaaaaattattatctttgcccgtcaaataggtgggaaaagtcactttattattttttttttttgagacactccctcacctaggttgcagtacagctcatggccacttccacctcccaggttcaagcaattctcgtgcatgagcctcccaagtagctggaattacaggcacgagccaccacacctggccagctttgtgtatttataatcatcgtttctcttgttatattttcctaagt

SEQ ID NO: 420197 - DNA, 532 bp, Homo sapiens
ggttacttatgaatatgactttagaaatatggtctgtgcagatgtaattaagttaaggatctagaggtgagatctgttacaaaccactgtgggactgactgaccacctgtccctttgcatcttgggtgcacccaaggtcaagtccaagaagacacatgttcttgctatgagagtaattggctctcgtgctttcaatgtggattgccagttggctttccatggagatccactgctgctctcctgggcaggtagggagcacttgttcccgtacaccctccccaacctcatgtgcgggcaaaawttattatctttgcccgtcaaataggtgggaaaagtcactttattattttttttttttgagacactccctcacctaggttgcagtacagctcatggccacttccacctcccaggttcaagcaattctcgtgcatgagcctcccaagtagctggaattacaggcacgagccaccacacctggccagctttgtgtatttataatcatcgtttctcttgttatattttcctaagt

SEQ ID NO: 420198 - DNA, 532 bp, Homo sapiens
ggttacttatgaatatgactttagaaatatggtctgtgcagatgtaattaagttaaggatctagaggtgagatctgttacaaaccactgtgggactgactgaccacctgtccctttgcatcttgggtgcacccaaggtcaagtccaagaagacacatgttcttgctatgagagtaattggctctcgtgctttcaatgtggattgccagttggctttccatggagatccactgctgctctcctgggcaggtagggagcacttgttcccgtacaccctccccaacctcatgtgcgggcaaaaattattatctttgcccgtcaaataggtgggaaaagtcactttattattttttttttttgagacactccctcacctaggttgcagtacagctyatggccacttccacctcccaggttcaagcaattctcgtgcatgagcctcccaagtagctggaattacaggcacgagccaccacacctggccagctttgtgtatttataatcatcgtttctcttgttatattttcctaagt

SEQ ID NO: 420199 - DNA, 604 bp, Homo sapiens
aagcagtgatctgttaactagacaggtcagttatctgagctgtgtaaatcactgtctggcacaacagttgaatcaccttgacactgagctcaggagcagcccatttaagaagcatcttgtaaataacaaagtgacaccttcgagattacagttgtaactatgcaggtcattcatagagtagctttgggctctcttctaaaggaggacccattacatgaagatagacctttcatgtcttgttgccgatgtctcttgtgatccagaaatgccaggatggttgtttcaaatgcattgggtatgaatygcaccttgaatttgcccttccctttttgggttaaaccttttcacatagctgctgctgctcctcagcagtccatcccctggacagagatggcctctcaggacctggagcagagctgtaggaagctgccctctcttatggtagatgtggcccatcacaatatacctgctgcctggacaaaataaccagaacattaattcatagcgtcttttaaatgccatgaaacagaaaatataaggcctttaagaaatacctaagctgcaatctactatcttgctgcacaagttgaaactgatatttagt

SEQ ID NO: 420200 - DNA, 339 bp, Homo sapiens
ttaaatgccatgaaacagaaaatataaggcctttaagaaatacctaagctgcaatctactatcttgctgcacaagttgaaactgatatttagtctacaggcaaggtggaaacagtctagcgacctttagaagataaccaacccaaccaggccagtgcagtggcycacgcctttaatcccagcactttgggaggccgaggcgggcagattacttgaggtcaggagtttgagatcagcctagccaacatggtgaaacccatctgtactaaaaatacaaaaagtagcacggggtgtggggaagggaaagcaatatgtaaccagcccacattacagaacaaag

SEQ ID NO: 420201 - DNA, 339 bp, Homo sapiens
ttaaatgccatgaaacagaaaatataaggcctttaagaaatacctaagctgcaatctactatcttgctgcacaagttgaaactgatatttagtctacaggcaaggtggaaacagtctagcgacctttagaagataaccaacccaaccaggccagtgcagtggcccacgcctttaatcccagcactttgggaggccgaggcgggcagattacttgaggtcaggagtttgagaycagcctagccaacatggtgaaacccatctgtactaaaaatacaaaaagtagcacggggtgtggggaagggaaagcaatatgtaaccagcccacattacagaacaaag

SEQ ID NO: 420202 - DNA, 339 bp, Homo sapiens
ttaaatgccatgaaacagaaaatataaggcctttaagaaatacctaagctgcaatctactatcttgctgcacaagttgaaactgatatttagtctacaggcaaggtggaaacagtctagcgacctttagaagataaccaacccaaccaggccagtgcagtggcccacgcctttaatcccagcactttgggaggccgaggcgggcagattacttgaggtcaggagtttgagatcagcctagccaacatggtgaaacccatctgtactaaaaatacaaaaagtagcacggggtgtggggaagggaaagcaataygtaaccagcccacattacagaacaaag

SEQ ID NO: 420203 - DNA, 606 bp, Homo sapiens
gagtaggtggtttgtgattaacatttcacatgttatttttattgatttggcaagtaccagaaaacttgaaggatgaactagaggttatttttcttagcatttgtggtattagtactaaaaggggagtaakagagtagaaagaattctggacaactgttaagaattgttacattttgtctacctaggctcgagttcctcacttttaaaattaggactgtactttttggaagaatattgcttgttgttttgtggtgggaccaggctgtgatgggaaaggctgttgtcataggcataggcaggccttttgctttgctgaggtatagtgagcagcccggtgaccctccatgtagcctgcattgcatgcagtttccacagggtccatagagttagtgcaaagctccagcaggcctactcacctgcttttctcatgaggcaacctgggaccagtgtgtccctgtagtaactgtaattttttgttgtgttcacttattgcagtgaaaaaaaaatctgagcgtaaggttctgagtggacctggaaaggggtgggtgttgtagtgagagactgaagacaaaggcctgtaacagatgggtatctttttagcttaat

SEQ ID NO: 420204 - DNA, 615 bp, Homo sapiens
gcaaggaaacacttctctggtggttagatcaggaatgatgaaaacacttaagaagaattgaaaacttggttcctgtcttcaatgagtaatttatgtgactgattttttttttttttttttttttttttttggagatagagtctcactctgtcacccaggctggcgtacagtggtgtgatctcagctcagtgcaacctccacctccctggttcaagcgattctcctgcctcagcctcctgagtagctgggatttcaggtgtgagccactgctcccagccttcccctccactttcaagtaaaagaggaagcattagaattagacattgtgggcygagctccttgggaggatcccttgagcccgggagttctagaccagaataggcatcatagcgagaccccgtctctgtttcgttttagtattttaaataaaaattaaaaaacaagaattaggcattgtgtactaagtattagatacatggtacaggcattaaatgctgaaatcttaggaggagggagtggttagagggaaggattgactgctgtaggctgaggtgataggaagacctgagaagagatggatctagagttaggagtttacattccagtgcaggagtt

SEQ ID NO: 420205 - DNA, 615 bp, Homo sapiens
gcaaggaaacacttctctggtggttagatcaggaatgatgaaaacacttaagaagaattgaaaacttggttcctgtcttcaatgagtaatttatgtgactgattttttttttttttttttttttttttttggagatagagtctcactctgtcacccaggctggcgtacagtggtgtgatctcagctcagtgcaacctccacctccctggttcaagcgattctcctgcctcagcctcctgagtagctgggatttcaggtgtgagccactgctcccagccttcccctccactttcaagtaaaagaggaagcattagaattagacattgtgggctgagytccttgggaggatcccttgagcccgggagttctagaccagaataggcatcatagcgagaccccgtctctgtttcgttttagtattttaaataaaaattaaaaaacaagaattaggcattgtgtactaagtattagatacatggtacaggcattaaatgctgaaatcttaggaggagggagtggttagagggaaggattgactgctgtaggctgaggtgataggaagacctgagaagagatggatctagagttaggagtttacattccagtgcaggagtt

SEQ ID NO: 420206 - DNA, 327 bp, Homo sapiens
cttcccctctggctcccggctgtcccttcccgggctggcgcgacggcgctggctggggctgcatagaactacgtgcacccyccccaccccgcccaactctggtggctgcggagcggtgctggggctagtgcccagccgtgctgcagtatacggaggctggctgctagggacaaagggcgggcggcgcgcagcactggtcagggagctttctgcagggttagccttggaatagtgtggtgccgacagcttaccctctttactacacagtgcaaacagttcctcgctcacttcctctcgctccgcgtcgccggcccgccctgcccctca

SEQ ID NO: 420207 - DNA, 379 bp, Homo sapiens
caaaggcttaagtgggtgtgttttccctatcccctttcctataggctctacttggttccttttctagcatgctgtctgaccaatttagaaaatttcaattgtctacaggcgttgtcagktaaaactatttttttaacctatcaacggtgaatacttttgagtagtaattgttttgtgcctaatgcgaagagtatttattagcatttcggtgttgatctagaaaatttttacttttaatcctgtagtcttagaagtatgttattcctttatctgtttctttatatcagtttttcccataattgggtaaactcctattttataaaatacaaagtacatttctggttttttctacataggttactagacattttttcaattt

SEQ ID NO: 420208 - DNA, 469 bp, Homo sapiens
aacctgggcaacagagcgagaccatctcaaaatgaaaagtgataaaaaaataaaaacaccaacatatttcaaatcactcttggaatagtcatgttgactctccaatatccactctattctgattagttttaacccattctctttgccaatgattggttaggaatggccatgagatgtgagtagaagccccctggacagcctccaaaagagaactgtgagaaaaggttcttcaatcctaaaaatgatggaggaaaaaacagtccctcttcctcagacagtgacacctcaaactgctacagtcacctttgcagcaagyctgaagatgccaccaacatcaaagggaatagagagttggtccttggtgatagcattaagccactgtatcaaccaatcctgacaatttgtatgacttctggatttccagccacattacaacaatgtaacaataaacatttattaattgcttaag

SEQ ID NO: 420209 - DNA, 565 bp, Homo sapiens
tatgagaatgttcaacttcactaatactttcccaatgcaaatttaagtaaagatagtattttttatttatcagtttagcaaatatttttaaaggatcctccatgctaattggagtgtggttaaacaaaaaacctgcttgttacactgctggtatgactacaactgggaaccttttggaaagcaacctaacaagatatatctgtagtcttctgaattgttcacactctcttttattcttagattcatacaatataaataaatacaaaaagcaaagcctatgtgcacaaacagcaagcatcagaaagtccatgaaaagaatagtacaagtatatagtaaaggaattaacttatactttgcttttcaaactatgttcaatccaatagatttctaaatatggcaagtttctaaaaatccaactccttaagtacactgtaaagacatttakgcacacagctaaaatatactcaaactaagaagtcctcaaaggccgtaagatacactaaaaatataatacctcccagtgaaataaagggaaaagcagaagtcaggtgagaatatttacat

SEQ ID NO: 420210 - DNA, 520 bp, Homo sapiens
gatacagagtaaaagggctgaggaggggcaggtgggaaatcatccagacacagccaacagcccaaggctaagacaagagcatttggtccagaggagaaaagatgagtccagaatggccacaaacactctgagtgtggacaaacgtggtgaaaaggacactgagttgtaagtgggttcatgccaatgggtctaaacttaattattaaggtaggagggtcaatggatcttaatagtggaggaatgcttggattctctctatgccttaggcagatgactgacaacaagtgacaaggaaggtaatttgccaacctcacctctaccagcacaggtgggtttccttcttgcattatctcaactgggttgggaacccattcttttatcagagtctayttctgataaaacagattctgtatttcaatacacttacatttccaggcaaccatgccaactatgttccctaaaggtattcatgcacagtttatttttctgtcttttaatttggtaaattgccctgtgagac

SEQ ID NO: 420211 - DNA, 560 bp, Homo sapiens
ctaaagtgagcacaacaatggtgtctactgtaggtggttgatttgaagattggggtaattcatagaaaacccttagtctggggcttgatgctataaattgttattaaaagctggctttattatttattgttgcatcaagtctgtattgccactaataaccactgtgtttcatatatataaagaaagggtgcaaaacatatttacatagccccaactctctaccagctcagagctacaggggcccaaggaagcagcagagagcaataacagacaagtcatctagaacagcaaagcaggggaaaatatggtgtgctatscagtggtatctaatctagcccatgaatttgtaaaagcctttctgttggaggaagcaatatttaaactcaaccctaagggattagttgaagttaggcggaggtttcccagcagtttaggcagaagaagaaacaagaaaaaagattctgaggcaaaatatggcattacccagtcagaaactgtaagctgttccaagagagattagtagaaaatccttctgacaatcaggtggttttgaactggtg

SEQ ID NO: 420212 - DNA, 560 bp, Homo sapiens
ctaaagtgagcacaacaatggtgtctactgtaggtggttgatttgaagattggggtaattcatagaaaacccttagtctggggcttgatgctataaattgttattaaaagctggctttattatttattgttgcatcaagtctgtattgccactaataaccactgtgtttcatatatataaagaaagggtgcaaaacatatttacatagccccaactctctaccagctcagagctacaggggcccaaggaagcagcagagagcaataacagacaagtcatctagaacagcaaagcaggggaaaatatggtgtgctatccagtggtatctaatctagcccatgaatttgtaaaagcctttctgttggaggaagcaatatttaaactcaaccctaagggattagttgaagttaggcggaggtttcccagcagtttaggcakaagaagaaacaagaaaaaagattctgaggcaaaatatggcattacccagtcagaaactgtaagctgttccaagagagattagtagaaaatccttctgacaatcaggtggttttgaactggtg

SEQ ID NO: 420213 - DNA, 602 bp, Homo sapiens
aactggccaaacaaaggagctataggccccagacaagtcctaaatccagtggggcagtcaaatcttaaagctccaaaatgatctcctttgactcygtgtcttacatccaggtcacgctgatgcaacaggtagattcccatagtcttcagcagctttgcccccgtggaattgcagggtacagcctccctcctggctgctttcacgggctggcattgagtgtctgtggcttttctagtgtctgtgggttttctaggcacacggtgcaagatgttggtggatctaccattctgggttctggaggatggtggcctcttctcaccccttcactaagcagtgccccctgtagtaactctgtgtggggcttcgatcccacatttcccttctgcactgtcctagcagaggttctccatgagacccccacccccatagcaaacttctgcctggacatccaggtgtttccatacatggtctgaaatctaggtggaggttcccaaacctcagttcttgacttctatgcactggcaggctcaacatcacatggaagctgccaaggctttagacttgaaggctgaagccatggcccaaggtctacattgccccct

SEQ ID NO: 420214 - DNA, 602 bp, Homo sapiens
aactggccaaacaaaggagctataggccccagacaagtcctaaatccagtggggcagtcaaatcttaaagctccaaaatgatctcctttgactctgtgtcttacatccaggtcacgctgatgcaacaggtagattcccatagtcttcagcagctttgcccccgtggawttgcagggtacagcctccctcctggctgctttcacgggctggcattgagtgtctgtggcttttctagtgtctgtgggttttctaggcacacggtgcaagatgttggtggatctaccattctgggttctggaggatggtggcctcttctcaccccttcactaagcagtgccccctgtagtaactctgtgtggggcttcgatcccacatttcccttctgcactgtcctagcagaggttctccatgagacccccacccccatagcaaacttctgcctggacatccaggtgtttccatacatggtctgaaatctaggtggaggttcccaaacctcagttcttgacttctatgcactggcaggctcaacatcacatggaagctgccaaggctttagacttgaaggctgaagccatggcccaaggtctacattgccccct

SEQ ID NO: 420215 - DNA, 602 bp, Homo sapiens
aactggccaaacaaaggagctataggccccagacaagtcctaaatccagtggggcagtcaaatcttaaagctccaaaatgatctcctttgactctgtgtcttacatccaggtcacgctgatgcaacaggtagattcccatagtcttcagcagctttgcccccgtggaattgcagggtacagcctccctcctggctgctttcacgggctggcattgagtgtctgtggcttttctagtgtctgtgggttttctaggcacacrgtgcaagatgttggtggatctaccattctgggttctggaggatggtggcctcttctcaccccttcactaagcagtgccccctgtagtaactctgtgtggggcttcgatcccacatttcccttctgcactgtcctagcagaggttctccatgagacccccacccccatagcaaacttctgcctggacatccaggtgtttccatacatggtctgaaatctaggtggaggttcccaaacctcagttcttgacttctatgcactggcaggctcaacatcacatggaagctgccaaggctttagacttgaaggctgaagccatggcccaaggtctacattgccccct

SEQ ID NO: 420216 - DNA, 602 bp, Homo sapiens
aactggccaaacaaaggagctataggccccagacaagtcctaaatccagtggggcagtcaaatcttaaagctccaaaatgatctcctttgactctgtgtcttacatccaggtcacgctgatgcaacaggtagattcccatagtcttcagcagctttgcccccgtggaattgcagggtacagcctccctcctggctgctttcacgggctggcattgagtgtctgtggcttttctagtgtctgtgggttttctaggcacacggtgcaagatgttggtggrtctaccattctgggttctggaggatggtggcctcttctcaccccttcactaagcagtgccccctgtagtaactctgtgtggggcttcgatcccacatttcccttctgcactgtcctagcagaggttctccatgagacccccacccccatagcaaacttctgcctggacatccaggtgtttccatacatggtctgaaatctaggtggaggttcccaaacctcagttcttgacttctatgcactggcaggctcaacatcacatggaagctgccaaggctttagacttgaaggctgaagccatggcccaaggtctacattgccccct

SEQ ID NO: 420217 - DNA, 556 bp, Homo sapiens
agatacctaaatgcctacatgttctacactgtgcagctcaacattcccctgctctggcttcctttgttgtctctgtccattaaatggggaactgagkcaggttattttccagccttacttctctggtttcatgctaacctgtgtcttgagtgggtggtgcacctaattctatcccattctgcctcctccggggagcttttcccagcctgttccctggtctgattctgtgctcctcatctgtgttcctttctcttggagttgtaactgcccttcctacatgcctctgtagttgtccctctggttgtgaatttcccaagggtgatggctctcacttgtttgctgctatggcagtccagtgcctacaatgtagcagttcccaataaatctctgctgaatgaatcaaagagtgactacatggatacataaagaaagacccaaagaagagaaagaatgcctgggagaatcattgagcatttagaactcctggattctctgcacatctggtcctggtgcaggcatccgactgggcaacttggaggaagcagcttaaaggcat

SEQ ID NO: 420218 - DNA, 597 bp, Homo sapiens
cttctctggtttcatgctaacctgtgtcttgagtgggtggtgcacctaattctatcccattctgcctcctccggggagcttttcccagcctgttccctggtctgattctgtgctcctcatctgtgttcctttctcttggagttgtaactgcccttcctacatgcctctgtagttgtccctctggttgtgaatttcccaagggtgatggctctcacttgtttgctgctatggcagtccagtgcctacaatgtagcagttcccaataaatctctgctgaatgaatcaaagagtgactacatggatacataaagaaagacccaaagaagagaaagaatgcctgggagaatcawtgagcatttagaactcctggattctctgcacatctggtcctggtgcaggcatccgactgggcaacttggaggaagcagcttaaaggcattatcgctccctggcccgcatcaccgactccacatggtctatctcccaaaatctgcaaggggtttctctgagcatctcccttctcactgagttagaaacagaaatggcaataacactcacaaacaaaatagcaatccagtctccccactgctggccaca

SEQ ID NO: 420219 - DNA, 584 bp, Homo sapiens
ctttcagtcaccatattcctgaacaggcttggaaacttgacttaaccttgctgggccctcttatttcttcagctcttcaaggagtatggtaaaagcaagatccaacgatgtgctgcagagggaggctctctgcctattgaaaagtaccatgtccaccaggggcctgctgtaaatatttctgctacttcctctgggggagatgatggcttaatgacaacttyaatggattctaaagaggaaggcatcctctctgctctctgttcatgatatggggtggggcataggccatgctaaggtcaggtcaggctggagctgctgaaacgtaccaaggtgactcacttccctgataacactgctgagaaaaatgcaggcttcttcttgcccttcctgtatctgggacacacctcttaggatggaagatatttggcacctgggaagaaatgttaagtcaggtcaggaagaactggctctgagtctgggcttttccttttgagttcagaaagagttgggtaaaaactaaatacataaataacctgtgctttggctctgagtagcctctaagcctgagtttatagtcaatgtga

SEQ ID NO: 420220 - DNA, 472 bp, Homo sapiens
aaggccaaatccacccccttagctggttttgtaaatagtctttttttgtttgtttgtttgttttgagacatagtctcactctgttgcccaggctggagtgccgtggcgtgatctcagctcactgcaaccttcacttcctgggttcaagtgattctcctgcctcagcctcccgagtagctgacatttcagacatgcactgccatgcccagccaattttttgtatttttagtagagacggagtttcaccatgttggccaggctggtctcraactcctgacttcaggtgatccacccaccttggactcccaaagtgcagggattacaggcatgagccactgcacctggcctgtaaataaagtcttattggaacacagccatgaccatttgcttatgtattgtttatggctgctttcctgcaactgggtcagagaatgaatggcatgcaaagctgaaaatacttactctggccctt

SEQ ID NO: 420221 - DNA, 553 bp, Homo sapiens
gtcccacgaatatctttcatcactgttttttcctcaagctaggatccaatgtagattctcaaattgcgtttggttgctstgtccattttgtctccattagtgtaaaacaggcaaactatgtcccatgggccaaatctggcctaccacctgtttttgtaaatacatttttgctggaacacagccaggctcttttatttatgtaatgtctatggttgttttcacgctacaatgagagagttgagtagttgcgatcgagactgtgtggcccataaagcctaagagatttagtacccagccctttatggaaaaagtttactaaactgtgacctagaattccaccccctgcctttatttttaatatgatactgattactcaaagagtccaggacaatcgcttatagaaaatctcttcttttagattgatctgattatatacatttacacattaaacttttatttgaagtttcacatatgatgtgattgtgtgtatatacagatatttgaaagatatatatatatatatctttttttttttttgagacagaatctggct

SEQ ID NO: 420222 - DNA, 553 bp, Homo sapiens
gtcccacgaatatctttcatcactgttttttcctcaagctaggatccaatgtagattctcaaattgcgtttggttgctctgtccattttgtctccattagtgtaaaacaggcaaactatgtcccatgggccaaatctggcctaccacctgtttttgtaaatacatttttgctggaacacagccaggctcttttatttatgtaatgtctatggttgttttcacgctacaatgagagagttgagyagttgcgatcgagactgtgtggcccataaagcctaagagatttagtacccagccctttatggaaaaagtttactaaactgtgacctagaattccaccccctgcctttatttttaatatgatactgattactcaaagagtccaggacaatcgcttatagaaaatctcttcttttagattgatctgattatatacatttacacattaaacttttatttgaagtttcacatatgatgtgattgtgtgtatatacagatatttgaaagatatatatatatatatctttttttttttttgagacagaatctggct

SEQ ID NO: 420223 - DNA, 605 bp, Homo sapiens
gtatttaattttgttggtggttattgtaaatgatactactttttaaaaattttgttaaaaagtgttcacttttggcaaatagaaatgccactaatttttttgtatgttgattttgtatgctacaacttcactgaatttgtttatcagttataatagtttatttgtgaaatctttaggtttttcctagtataaaattatataacctgcagacaaggataatttgacttctttctttccaatttggatgtackttatttctttctcttttctgattgctctagttagggctttgagtaatgtgttgaataacagtggtgaaagtggggatccctgtcatgttccagatctttgagaaaagaccttcagttcttccccattcaggatgataccagccttgggtatatcctatacagcctttattatggtaagggacaatccaaccattcacaggtttttgagaaatattattatgaagggatgttgaattttatcacatactttttcaacatcaattgaaatgatcatatagtttgtatctttcattctgttgatgtgaggtatcacagtgaatgatttgcacttgttgaatcactcttgtatcctgc

SEQ ID NO: 420224 - DNA, 561 bp, Homo sapiens
atcacattaccagatttcaaactatactataaggccatagtcaccaaaacagcatagacctggtataaaaataggcacacagaccaacggaatccagaaataaatccaaatgcctacagctaactgattttcgatgaagaaacaaaaacataaagtagggaaaggacactctgttcactaatcacagaaataaaatcactaatcgtcagggaaatgcaaattaaaaccacaatgtgataccaccttacttctgcaagaatggccctaatcaaaaaataaaataaaataaaatagatgttggcatagatatgttgaaaagggaacactgctatactgctggtgggaatgtaaaataatacaactactatggaaaatagtgtggagattccttaaagaaktaaagatagaactaccatttgatccagtaatcccactactgagtcccacccagaggaaaagaagtcattatatgaaaaaacatacttgcacatgcatgtttatagcacaatttgcaattccactctatttattttgattgaaagagtttagtctgttgacatt

SEQ ID NO: 420225 - DNA, 617 bp, Homo sapiens
atatgcatattaacagggtaagactccaagaaacgcaatagaaagcaaaacttggaaagccacagagctaagcagaaattttactaactgtctgatgatagggaatgagaatttaagtccatttaacatgatggtatcttagtcagctttggctgccatgcaaaataccgtagagtaggtggcttgaacaacataaatttactttctcacagtttcagagcctggaagtctaagatcagggtgccaacatggtcaggtttcagcgagctctctttctgacttgaagatttccgccttctcttggtgttcctacatgacaaagagaaagagagagagagagagagagtaagctctctggcatctcttcttatcaaggcattaatcccatcatgaggttcttatcttcatggcctcatgtaaacatcattacttcccaaaggctccatctccaagtaccaycacattgcgggtgacacttccaacaggaatttgggcagaggggctgcacaatgtactccatagcaatggatcttagtttctcactgctactgtaaaaaattaccacaaatgtagagatataacagattaaaaatcatcttttagttctggaggtcaga

SEQ ID NO: 420226 - DNA, 583 bp, Homo sapiens
cagctgtataagattctgacttattaaatagaaatatgtattttggcccatctaggagaaatgcttccaaaatgaaatgcttgatataataaaagragagcaatgctatccatatgactatgatgtgaacttaatcaagaggataaaagtctccaaattgtaattacagatgaattactccacggcttgcgattttcaagaggaatcttgtttctaaatcttgacacagtgggaccaaagaaacctatctgtttctattactgggaaaaaagtgaatctcaaaatgaaaaacaatctgcggcttcaaagagagagagctgacagcaaaatatttgaattaattagagaactacaggttgttcattgacgggttctttttgcaggcatattctgaaacatctgtgcttgtttccacggagatgtggttggtttattttgttgttaatataccatatgagcatgaaggaaattagaggaagctacctgatggaaaactaaatttagacatttccagacagtctgagagaagttacaacctcctgggccaggcagaggatagttcaattccttgatgaactatgcc

SEQ ID NO: 420227 - DNA, 509 bp, Homo sapiens
ggactctttctaggagagtctctcactccaatctttctgttgagttatttgattgtcagcagtatcaactttggggaagtttcattctaaaatttgaatacctttcgtatctattggttccactgcattctttttaatgagttcttattgttctttcctgtacttattttgtactcttatctattcaagtatattcgcattgcttgctttaaaatcccagaacatatactacaataagatatacaaggatgtccagcaggcctctgaccttccctttggagtgactgtactcctcaggtcttaagtcatttgggcctgtgsgttatgttcccaggggaggacctgctactctggatgattaagtgtgaggggacagaaagaagcccaagctgcagtgagagccccaaggcagagaagatctgtccagagcagagggaatcactgcggctcactcctactgagctctttggggccatcccatcatcagggttttactctgaagacagaaa

SEQ ID NO: 420228 - DNA, 606 bp, Homo sapiens
tctatcccaccaacatttatacatgatccttagcacaacatccctcttctccatgcttctctcatctaatccctctcattctgccataaccaattcaaagaacgacctatacaaagtgggtttctgttttaatttctacaactccactcttaacccactgcttgctagtttttgtactccctaacatcccaaaactatccttaccaacaataggtttatcatttattgttgaaaatgggacacatttgagaaygaaagatgggttagtcataccattttagcctaaattcagacttttctgggcaaactagcacctatgggactcctataaataggcacatctcagtccttatttgactcgattgcctgggagcactgcactctcgaaccttcatttctgtaaagcacatcctttcctgctgcctctgtgacaagatgtcctctggttttccacatcctttggttgttctttatcattatttcaggggcttctgctcttccaagccactacagttttgtgtttctcagagtttattctaggtcttctaactatttgcctctgtgaatgccattcattcccatggtttaattaccatctaatgacgc

SEQ ID NO: 420229 - DNA, 575 bp, Homo sapiens
tcacaaatgaaaaaatttctttcctcttcaggctaatagtactctattttgcatatataccacattttctttatccatttatttgttgacggatgcttgggttaactccataacttggctattgtcagtatgaaaccaccttatacatattgtgacaatgagaaaattatgatattgaataagatctgacctaactgatcccatcttgcctttaacctccaaactgcccttgttcattactaggtgtaggtcaaactaactataggaggaatttagtttatagtttaactatgaaacaaggataataacmaccctttcctgaaacaaacccccttcttgcctggtgactagatcacctttgtaaaactaacaaattagccacaagattaaaattatggtttaggcatcatgcagccagagaccacaagattccttacctcccattgctattataaaacctaagattggtgttcaagatatttttcagaacctgcattctgaaggaccagctagcaccatgtagaccactaatctgactcaacagttatgtgcttccacccaggtacagaagacag

SEQ ID NO: 420230 - DNA, 493 bp, Homo sapiens
acccatcaatacatttcttttggtaacgggaagtgtgttataaaagaattagaaacctccccttgygatgagaggctggtactcctgtgggattcagttacatctttagacaagaagctttgaagtaaagataaaattatgataaagacaggcagtgcagaagcctgctgtttgaccttgctgagactcacactccatgctattgctggcctatgcccactgaagtatacccataagcagactggaaatacaatgattttttttgtccaaaggtgaggtggaatgccttctatattttactgtgtttttctggagtaactctgacataagccctaccatcatctagcacctggcttttcatgggccacagcatcagcattacttggaagcttgttagaaattaagaatctcaagttatttcagacctactgaagcagaatctgcattttaaaaatatccccagaatatttgtgtgcatgctgaaattttagaa

SEQ ID NO: 420231 - DNA, 559 bp, Homo sapiens
ctgaaatgaggaaatggaacaaagctacaactgagacatattggtatatatttgagggagaaataagcatttgtttttgtcaggcattgaacatttgtgccatttgttacagtagcattatcttgcctagaatgactggcatggtcatcagctattctatgttgctatcaattgatttctcttatgcttattccatttagtttgctctctctctctctctctctctctctctctctctctctccaccccccaccaccacacacacatgcatatctcagagaaattgcaggtttgtttccagaccactgcacacttcaataaagcaaatattgcaataaaccaagtcacataaattaggggggctttcttagtacatatgaaaattatgtttaccctacactgtacttttttatgtgtgcagtattattatgtctataaattcacataccttaaagaaaaaataataaaaaatcytaatgatcatctgagccttcagttagttgtaatcacattgctggcagaggatcttgcctcgatattgatggctgcttactgatca

SEQ ID NO: 420232 - DNA, 569 bp, Homo sapiens
acaacctagaaaataccattctggatgaagaacctgttaaaggtttcacgacaaaaacaccaaaagcaattgcaacaaaagcaaaaattgacaaatgggatctaactcaactgaagagcttctgtgcagmaaaagaaactatcaacagagtaagcagacaacctatagaatgggaaatatatatgcaaactatgcatctgacaaagctctaatatccagcatctataaggaacttaaattacaatgaaaaagtaaacaaccccattaaacagtgggcggaggacatgaaccaacacttttcataaatgtggcaaacaatcacatgaaaaagctcactatcactgatcattagagaaatggaaaccaaaaccaccatgagataccatcttacaccagtcagaatggctattatgaaaaagtcaaataacagaacagacaaggttgtggcgaaagggaacacttacacactgcttgctggtgggagtgtaaattagttcaactattgtggaaagcaatgtcatgattcctcaaagagttaaaaacaaaattaccattcaacccagcaatcc

SEQ ID NO: 420233 - DNA, 642 bp, Homo sapiens
gttatcatgggatttaagttgttcagggaattaggtatgtagttgtaaaagatctttattttgactccactactaatccggggagtgtgactaataaaataaaagttagtagttttagttacaaaatggcagagttgattgtttgctaacagatttcaatatgaataaatattactgatgatattgttttgtagctcttcatttcagccaaggtcaaaatgaagtaattaaattaaagctgcagcaggagactttagatcaggtagaaggagcacttctgctacaagggccattttgtaatgtattttgggtacctagttatgtttttctttagaaaagggatagacaaacctttcctgtaaagtgtcagtaaatattttaggctctaaagccagacagtctctgtcacagctatgcaattctgactttttaatgcaaaagcagccacaggtaatactaaacaaataggcatggatatgtcccaacaaggctttatacagtagtccccttttatcctctattttgctktccatggcttcaattgcctgtggtcaagcttggtctgaaaatattaaatgggaaattccagaaataaacaattcacgagttttaagttgcccaccattctgagtagcctgatga

SEQ ID NO: 420234 - DNA, 607 bp, Homo sapiens
ctgtctctacaaattaaaattataacaataatttctggtgktgtacttctgatcaaatactgcacatgctcaagcacattctctgacagtagaaaacatcccaatcatgtgtcattattacagaagtaaaaattaatttttctgatgctttattatagaaagatacatattgccttaatgactgaagaagtaatgcaaattttccttttttaagaataagtagataggagaggatggggtagggtttagagacagaggaggaggaagtttctttactctttaggacacctaatatatcactaaaataatgtcatactgacttataaaaatagatcacaaatgctttcactttctaaaacttagggcattcatttggataccatacattgatagaagcaaaaccaagtcaaatattaacacaaaatacattattaaaaatttattcatttattaagtcaactttgaaatttagtttttcaatatattgccagaattgatatagaggtttcataataactccttcctgcctcattcatatgttgatatattctacttacttttcagatttctattgagggcaaaatcccaagttattaaatggaaatca

SEQ ID NO: 420235 - DNA, 607 bp, Homo sapiens
ctgtctctacaaattaaaattataacaataatttctggtgttgtacttctgatcaaatactgcacatgctcaagcacattctctgacagtagaaaacatcccaatcatgtgtcattattacagaagtaaaaattaatttttctgatgctttattatagaaagatamatattgccttaatgactgaagaagtaatgcaaattttccttttttaagaataagtagataggagaggatggggtagggtttagagacagaggaggaggaagtttctttactctttaggacacctaatatatcactaaaataatgtcatactgacttataaaaatagatcacaaatgctttcactttctaaaacttagggcattcatttggataccatacattgatagaagcaaaaccaagtcaaatattaacacaaaatacattattaaaaatttattcatttattaagtcaactttgaaatttagtttttcaatatattgccagaattgatatagaggtttcataataactccttcctgcctcattcatatgttgatatattctacttacttttcagatttctattgagggcaaaatcccaagttattaaatggaaatca

SEQ ID NO: 420236 - DNA, 462 bp, Homo sapiens
ttgtcccctgatctatggttaagataaaataattttaggagtctttaatcctagactttcaatcccaaattggcaaattacctaaatatatctggaaaagatgcaatctcagctatgtctttgacatctgaatgcaaagaaggtgaaataacacatggggcaatttattgatgtgataagacaaggagaaaatgtttttattgtatatatttaaagtgcacaacctgatattttgatatacctatatattgtataatagttaccataattaagcttattatcrcatctatcacctcatacaattgccattgttttcttgcggttagaacacttaaaatctactcttagcaaatttcaagtacattattaactattgtcatcatgctacacattagatcttcagaatatattcatcttagaaagtttgtactgtatgacagaaattctcttatttcctccccc

SEQ ID NO: 420237 - DNA, 379 bp, Homo sapiens
caggccagtgggaggattccacagggtagcagattttactgaaaccaaaggctgaactcctccaggtcagagctagccagaggggccggccacccagaggggctgcaccacttcctggaaggstccaccctgactctaagtctcagccctgcccggaggattttctgacctcagtcctttgaggctggacacacgaggtctcaaggtggccccgaccttaatcaccacttccctcccagatacatcaccagattcaccaggcacagttagaatttggcaatattgacaatctgaagagtgaaaaaaagtgaatttcagaaaaatgaggtcaatatcccattttccaatataactgtatgaatattgtatacatatatgt

SEQ ID NO: 420238 - DNA, 379 bp, Homo sapiens
caggccagtgggaggattccacagggtagcagattttactgaaaccaaaggctgaactcctccaggtcagagctagccagaggggccggccacccagaggggctgcaccacttcctggaaggctccaccctgactctaagtctcagccctgcccggaggattttctgacctcagtcctttgagkctggacacacgaggtctcaaggtggccccgaccttaatcaccacttccctcccagatacatcaccagattcaccaggcacagttagaatttggcaatattgacaatctgaagagtgaaaaaaagtgaatttcagaaaaatgaggtcaatatcccattttccaatataactgtatgaatattgtatacatatatgt

SEQ ID NO: 420239 - DNA, 379 bp, Homo sapiens
caggccagtgggaggattccacagggtagcagattttactgaaaccaaaggctgaactcctccaggtcagagctagccagaggggccggccacccagaggggctgcaccacttcctggaaggctccaccctgactctaagtctcagccctgcccggaggattttctgacctcagtcctttgaggctggacacacgaggkctcaaggtggccccgaccttaatcaccacttccctcccagatacatcaccagattcaccaggcacagttagaatttggcaatattgacaatctgaagagtgaaaaaaagtgaatttcagaaaaatgaggtcaatatcccattttccaatataactgtatgaatattgtatacatatatgt

SEQ ID NO: 420240 - DNA, 441 bp, Homo sapiens
tattgtcaccatcattggtgtaagaatgttstggggaggactaggcttacctatgtaaccagtggaaaatgcagcatatggtacaattactaaagataaatatagacataaagaagagcgatgataaaagctgttctggatcccagttaaaatctttggggttactgcttaactctctggactcacagccccgacccaccatccccaatgtgcagtttcactcatggaaaaaaagtttctagaccagcagctgaggatgcatttgctctatgttcagcccactcaaaatacagttctgtaatcagaatacaaaaacaaccaccaacaacatcagcccaactttctttactgtgtttcatttaatgctgaaatcagacaatgattagaacatgaaactttgtttgaaaaagtatattcaataaattttgtctttaaaacaga

SEQ ID NO: 420241 - DNA, 441 bp, Homo sapiens
tattgtcaccatcattggtgtaagaatgttctggggaggactaggcttacctatgtaaccagtggaaaatgcagcatatggtacaattactaaagataaatatagacataaagaagagcgatgataaaagctgttctggatcccagttaaaatctttggggttactgcttaactctctggactcacagccccgacccaccatccccaatgtgcagtttcactcatggaaaaaaagtktctagaccagcagctgaggatgcatttgctctatgttcagcccactcaaaatacagttctgtaatcagaatacaaaaacaaccaccaacaacatcagcccaactttctttactgtgtttcatttaatgctgaaatcagacaatgattagaacatgaaactttgtttgaaaaagtatattcaataaattttgtctttaaaacaga

SEQ ID NO: 420242 - DNA, 441 bp, Homo sapiens
tattgtcaccatcattggtgtaagaatgttctggggaggactaggcttacctatgtaaccagtggaaaatgcagcatatggtacaattactaaagataaatatagacataaagaagagcgatgataaaagctgttctggatcccagttaaaatctttggggttactgcttaactctctggactcacagccccgacccaccatccccaatgtgcagtttcactcatggaaaaaaagtttctagaccagcagctgaggatgcatttrctctatgttcagcccactcaaaatacagttctgtaatcagaatacaaaaacaaccaccaacaacatcagcccaactttctttactgtgtttcatttaatgctgaaatcagacaatgattagaacatgaaactttgtttgaaaaagtatattcaataaattttgtctttaaaacaga

SEQ ID NO: 420243 - DNA, 576 bp, Homo sapiens
tcaaaccaaaaatattaaaaacttgaaataataatatgcctatttcaaaaatccttaccaatgtagtgatactcatgaagctgttgtaaagattggaaaatgaatcatttactccacacggtcatctgattcttaccaacttgctttatacttgcttttcaaatatactcttttagtccagaaaatttgtgtatttggaaacactgggctaaaggatcttccttttttgtttcttttgttgagcgcaatgtgtgaggctgcatgtgatacaatcgaaatataaaatccagtcacatttcccaccctcaagaaattcacggtcatatatyacttaatgcttggccatttcaaaaaacagagtaattcttttttataaaataaagttaaaatatggagacatatttccaaatttcagtaaaaattatcacttttaaatctctgaaatcttctctttgctgtattttgatcttcataactcacattaaggaacactataccttctctttgctctggaaatcttgcagcagtctacggcaaaaggcaataaaattctgatctgggcgaaaactccaaaga

SEQ ID NO: 420244 - DNA, 521 bp, Homo sapiens
tttttataaaataaagttaaaatatggagacatatttccaaatttcagtaaaaattatcacttttaaatctctgaaatcttctctttgctgtattttgatcttcataactcacattaaggaacactataccttctctttgctctggaaatcttgcagcagtctacggcaaaaggcaataaaattctgatctgggcgaaaactccaaagaaaagatcttttcaatgattttttttttttttttggcacacacaaccaacagccarctcttagttattcaagacatataatacttcgaggattatttaggtactctactatttctgacttaactcccccatgtttgctgccctttggccatttcactgatgcttaaaaacctttatcaaataagaaaagggcaaaactcacattagattatttagctactagcaaatactctcaaaaaactgtgacaaacaattttgtcacaaaaagcaaacaattttgataggcaagaatattgtgcgtgatgccttaaatg

SEQ ID NO: 420245 - DNA, 498 bp, Homo sapiens
acaggtgcatgccacctcacttggctaatggctaatatttttattatttttgagatggggkctaactatgttgccaaggctggactcgaactcctgggctcaagtaatccttccacctcggcctctcaaaatgctgggattataggcatgagcaaccatgtccagcccaaatttggggtgttactgaattataaacccactcaagatgatgcatatgttaagaaaatttattttaaaaacaagtaagattgtacaatcaaatgggaaggtctttaaatgtaaataaggggaacttgaacatgaggcagcatcagaatcacaagtagagcttgttaaagctcagattgcagatcgcatacccacagtgtctgattcaatgtgttggggtgactccccaaaatttgcatttctgacagtagttcccagatgatagtgatgctaaaccatactcttaaatgactgacacaacttgataaaaagtgtaaattacagtctatt

SEQ ID NO: 420246 - DNA, 600 bp, Homo sapiens
taatctaatgcatgttatctctgcttaggagaagagtggaagggaaaaaacggcatgtcagactttcctattcaagaattttttagtcaaagaaacaccaccactttcatcactattaccatataataatagaaatatgttaaatactcactttaattgagacagtcctaaggttagtgtattaatgttctttacatgcctatttttttcttgaagtattatttgaagaaggcatcacttcaaactcttttagactaaaagaaaactctctcgaagtctttctaaattctaaataaaattggtgtcatttaagaggtattgtttkattatctttgttcttatagttgtgggagaagtagtagcataatagtatgacagatttatgataaatttatggtaagtaaatttgcagtgtctggtgatttttatacaccttataatatattttacaaacagtattttaaatatctgtcaccaatctttggttattgaagttaaagtttgtgatttttaaattactaaatttcaggtttctatgattttaattttactgacttgttcttcagtcactattttcataattttgacactaagcctttg

SEQ ID NO: 420247 - DNA, 501 bp, Homo sapiens
ccaatgagacatacttttgctttcaaagtagtggtattatctaaagtgtttaattcatcacatcttcagtatccacaggaccattggtttgccgtgatattcatacagcgtgaggatcatgtaaattaccatatccctttttggcatctgtggttaggaagagcatcttgtggaccatctctcagaaagtatactagacttcctgctgcccatgtacgtattacgctgcttcatgtctagtttaaattttccactggtatttgccctctgtttcatttcttcacttarcaatttctgttgagcagaaataaggtgtatactacctcaaatcttttttgaaatagggtagaaaataagttattataaagagaaaaaataaatacaatacaaataaacaaatattcctctaactttaaaaaaagtaagtttgacaatacaagtaaaatgcagaagtctagaaagacaggtattctagaaagacaggtattcaagaaagactta

SEQ ID NO: 420248 - DNA, 535 bp, Homo sapiens
ccccactagagaaaaatttagcaatatattatataaataaagatgctagggggaaagaggaattggggagatgttggttaaaagacatataatttcagttagacagaaggagtaagttctagagatctattgtacattatgtctgactataaataacaatatattgtatacatgaaaattgctaagagaacaggttttaagtgtctcaccatgataaaatatgtatgtgtggtaatgcataggttaaataacttcatttagccagtacacaaaatatacatatatgaaaatattatgtcatacaccataaatatatacaatctgtacttgccaataaaaaataaaaacaaaacaaaaatatgttattgtctaaaactcatacatcccacttcaagttataawcttaaagaaactctcaaatagatgcacaaaaccatatataaatagatatattcattcaagtattatttgattgtaaaaaatggaaagcaatcaaattgtccatctactaaggaagggatttataaataagcat

SEQ ID NO: 420249 - DNA, 532 bp, Homo sapiens
gtgtgggataaagtaatatcagtgctcagaggaaaatttatcatattaaatgcaatattagaaaagaaaaaaagatatgaaatccatgacctatgtttgctctttgggaaactagaaaaagaatgtcaaattacatccaaagtaagcaaaagaaaagaaataataaggattaagaaataacttaatgaaattgaaaacaggaaataaatagaaaaaatcaacaaaagtaaaaattaattctttgaaaagatcagtaaaattgakgcgcctttatccagactccatagaaaaaagtaaggacacaaattactaatatcagaaatcactacagaggagagaaatcactacagataccatggatgtgagaataataataaagaaatattatcaacaattctatgcccagaaacttaataccctaatggatgaaagtctgaaagacacaaactgccaaacaactctatgcccagaaatttaataccctaatggatgaaagtttgaaagacacaagctgccaaaactcatataagaa

SEQ ID NO: 420250 - DNA, 638 bp, Homo sapiens
cagcaatttgtcctgggaaaataataattatttttgaggcaggtagagaaagtgacacacttgtctgaatcacaacctaatacccttctgaatttctcatgaggtaatcaaaagaataattattatattctaatagccaaagacttttaagtatatttaaatttttatctgttttttataaaatattactggcaataaaataattttgaygacatttaaacttagacaaaggcttctgtagttactgtatctcacttttcatagaacagagtatagcttttataaaaaatgttcatgctaactagaactgtctgttaaaataattatgagagctattaaagtcacataaaccataaacatgtaaatgtacgctactatgatgagcgaagaataatacatgtctaaaataacataaatactgtttggtatttccaatatcctgtgggagagaaaaaaatcacagtgctcttgacactgtcactaaaagtaatatatgaaaaattggaaagaggaaaagaatttcagacaataaaattaaaggatgaattctgattcaaaggtaaaaaaattttataatcataagcagtaagttaaacacaatttcctaggttagaacagactggacttaattcattcta

SEQ ID NO: 420251 - DNA, 638 bp, Homo sapiens
cagcaatttgtcctgggaaaataataattatttttgaggcaggtagagaaagtgacacacttgtctgaatcacaacctaatacccttctgaatttctcatgaggtaatcaaaagaataattattatattctaatagccaaagacttttaagtatatttaaatttttatctgttttttataaaatattactggcaataaaataattttgacgacatttaaacttagacaaaggcttctgtagttactgtatctcacttttcatagaacagagtatagcttttataaaaaatgttcatgctaactagaactgtctgttaaaataattatgagagctattaaagtcacataaaccataaacatgtaaatgtacgctactatgatgagcraagaataatacatgtctaaaataacataaatactgtttggtatttccaatatcctgtgggagagaaaaaaatcacagtgctcttgacactgtcactaaaagtaatatatgaaaaattggaaagaggaaaagaatttcagacaataaaattaaaggatgaattctgattcaaaggtaaaaaaattttataatcataagcagtaagttaaacacaatttcctaggttagaacagactggacttaattcattcta

SEQ ID NO: 420252 - DNA, 450 bp, Homo sapiens
ttaattatttgccagtgggttcygacttctaaacccctccatatctggtttaggagctcctatgatagaggagaaaactagttgatctctttaggcaatcttaatgctgtatataccatttcagacattaatttatcacctccactatatatttttacttccaaaacttccatagtattattagattaataaagttttattgagatgtcgagatacagtgtgtttttaaaaacataagctgacttctggtttctaattccacatgtaaggagcttgggagtcaccactccaccctaacaagaagtaaaaagctgaacaggctgaaaaatcaattcttccaagatctgtaagagaggtcaggatgcagtgcaaaccactggccccaggactgaagaggtagacaataaaaccaaggagtcctatcatgaccactatgggaaccagtaccag

SEQ ID NO: 420253 - DNA, 595 bp, Homo sapiens
ctgtgacaccaccatatctgggtccagaataaaaatctcatcttgggaaatctccatcacaaagtgcaaatgttcctaaagaagaacaagaagtctgttgcatgaagaataacaaaacaagtattcttggtctcgaggaataatgaaattctgcaacrtgtcaaaggatcacactgtgttgtcagaagcttgatcagttggtgatcctccccaaagctgctaacgcagacagtgggagatagggagagatgaatccccttggttcaggatttccaattaaccaggactttttcttagatatatctagaaatggtcttgcctcatcttcttcccaaatactattagagaagtgacacccacatacaattggcccagcaggagtgtatggtaagtggacttctaccccgtcatctggtcaaagctaagcagcatggttaacaactttatcattaggttcaatactgtacatttttctcctaggagaattcagataatgggaggaattcttaacttgggcaaaaccattttttttttctcatcactgacctccagggattggcgaactgaaactaagtagtctagttatacacctggg

SEQ ID NO: 420254 - DNA, 595 bp, Homo sapiens
ctgtgacaccaccatatctgggtccagaataaaaatctcatcttgggaaatctccatcacaaagtgcaaatgttcctaaagaagaacaagaagtctgttgcatgaagaataacaaaacaagtattcttggtctcgaggaataatgaaattctgcaacgtgtcaaaggatcacactgtgttgtcagaagcttgatcagttggtgatcctccccaaagctgctaacgcagrcagtgggagatagggagagatgaatccccttggttcaggatttccaattaaccaggactttttcttagatatatctagaaatggtcttgcctcatcttcttcccaaatactattagagaagtgacacccacatacaattggcccagcaggagtgtatggtaagtggacttctaccccgtcatctggtcaaagctaagcagcatggttaacaactttatcattaggttcaatactgtacatttttctcctaggagaattcagataatgggaggaattcttaacttgggcaaaaccattttttttttctcatcactgacctccagggattggcgaactgaaactaagtagtctagttatacacctggg

SEQ ID NO: 420255 - DNA, 595 bp, Homo sapiens
ctgtgacaccaccatatctgggtccagaataaaaatctcatcttgggaaatctccatcacaaagtgcaaatgttcctaaagaagaacaagaagtctgttgcatgaagaataacaaaacaagtattcttggtctcgaggaataatgaaattctgcaacgtgtcaaaggatcacactgtgttgtcagaagcttgatcagttggtgatcctccccaaagctgctaacgcagacagtgggagatagggagagatgaatccccttggttcaggatttccaattaaccaggactttttcttagatatatctagaaatggtcttgcctcatcttcttcccaaatactattagagaagtgacacccacatacaattggcccagcaggagtgtatgrtaagtggacttctaccccgtcatctggtcaaagctaagcagcatggttaacaactttatcattaggttcaatactgtacatttttctcctaggagaattcagataatgggaggaattcttaacttgggcaaaaccattttttttttctcatcactgacctccagggattggcgaactgaaactaagtagtctagttatacacctggg

SEQ ID NO: 420256 - DNA, 544 bp, Homo sapiens
catgtgacctgggtctcttgaagacagcataccattgggtcttgtgtcattatctaacttgccattctgtgcctttgaaatggggcatttaacacatttacattcaaagttagcrttaatatgtgtggatttgatcctgtcattgtgttgttagctcattactgtgcagatttgtttgtgtgattgctttatagtatcactggtctgggtatttaggcatgtttttgtagtggccagtaatgacctttcctttccatatttagcactcccttcaggacctcttataaggcgggtctggtggtaatgaattctcttagcatttgcttctctgaaaaggatcttatttctcctttgcttttgaagtgtagtttggctaaatatagaattcttggtttgaaattcttttctttaagaatgctgaatataggcccctaatctcttctgtcttgtagggtttctgttctaaggtcagctgttagcctgatggggtttcctttgtaggtgacctgccccttctttctagcttccttaaactttcttcctt

SEQ ID NO: 420257 - DNA, 544 bp, Homo sapiens
catgtgacctgggtctcttgaagacagcataccattgggtcttgtgtcattatctaacttgccattctgtgcctttgaaatggggcatttaacacatttacattcaaagttagcattaatatgtgtggatttgatcctgtcattgtgttgttagctcattactgtgcagatttgtttgtgtgattgctttatagtatcactggtctgkgtatttaggcatgtttttgtagtggccagtaatgacctttcctttccatatttagcactcccttcaggacctcttataaggcgggtctggtggtaatgaattctcttagcatttgcttctctgaaaaggatcttatttctcctttgcttttgaagtgtagtttggctaaatatagaattcttggtttgaaattcttttctttaagaatgctgaatataggcccctaatctcttctgtcttgtagggtttctgttctaaggtcagctgttagcctgatggggtttcctttgtaggtgacctgccccttctttctagcttccttaaactttcttcctt

SEQ ID NO: 420258 - DNA, 544 bp, Homo sapiens
catgtgacctgggtctcttgaagacagcataccattgggtcttgtgtcattatctaacttgccattctgtgcctttgaaatggggcatttaacacatttacattcaaagttagcattaatatgtgtggatttgatcctgtcattgtgttgttagctcattactgtgcagatttgtttgtgtgattgctttatagtatcactggtctgggtatttaggcatgtttttgtagtggccrgtaatgacctttcctttccatatttagcactcccttcaggacctcttataaggcgggtctggtggtaatgaattctcttagcatttgcttctctgaaaaggatcttatttctcctttgcttttgaagtgtagtttggctaaatatagaattcttggtttgaaattcttttctttaagaatgctgaatataggcccctaatctcttctgtcttgtagggtttctgttctaaggtcagctgttagcctgatggggtttcctttgtaggtgacctgccccttctttctagcttccttaaactttcttcctt

SEQ ID NO: 420259 - DNA, 552 bp, Homo sapiens
agtaaacaaaataatgcagcaatattttgacatagaaaaatatcattaatccttctgagtgttattaccaaacaatacatgcaatacataactcactcatattgtagtatcttatccatccgttgatctccatgaatagttacagatagggcataaaaaaatatggtacaaaatacccacaattttaactctcacaccaaaaatgactacatcrtataagccaggaataataaataaaagtagtttcataaacctagctaggataaatctaacatattttgataaagttttaaaggttcaaaatgtccaagaggaaaaagtataaactcttaaagacaatatcctcatagtcttataactactactgccaattgttagagatcagctcttacctttaaaaggactatgctttttttattttaatttttattttaagttcttgggtacatgtgcaggatatgcaggtttgttacataggtaaacatgtgccatggtggtttgctgcacccatcaacccataccctaggtattaaaaccagcatgtattagcta

SEQ ID NO: 420260 - DNA, 605 bp, Homo sapiens
ttctggagtgagattccacagcaaaatacaaacattattttgggaaatgagatactagaagtttgggaacatattaacagaattggacctgagtcactaaaaattcacgtattttaacttgtttaagcagctatcctcagtcaaaatagcttaatgaagccgtaagtgtaaaatttgttgaccatctttctctcatccacatcagtattcaatatttgtcatctatttctcaaaatcagtaatttttcacatcactatgtgcctctcccctgaatttatttctaccaagagaaacagaatcaaatattcagggtgaagtggttacaactcagagggattttaaacagtatgtgtctactttatttacaatatttacctatgtataacatgttgtctgggacagaattgcttatcaaggggtatcaagacaacccaacagctttaaaaatacaaatgtctaggccacacccaagaaaagtgactctaatatacatctttcatcaaaaaaaatgataaagaaatcgtcatatatgctttttgcaatttgtggaatggagacrgttaagactccccctcaaatttttgcaaaaacaaccaacaacaat

SEQ ID NO: 420261 - DNA, 528 bp, Homo sapiens
tctttctccaggagctagaagtcattttttgaaatgtaaacatcatgaaagacagagcccctytctctcaggctctgtgggtgggtaagagcctaaataattattggtaataagagacaattagcaaacacagatgcctagttacagaaaaatcaagagaaagggaaaagaaaaagaaactgttctgagtttgctatggacagatactttgctgatgagatcatcctgacatagaacaattatcagtacctattttgttactcatagcattcacattactcaggaagtcaaaaggatggtggaaataaggaactcaaggaggagaggcaggggagtagagaaaagaaacaaattcctaagggaggatgtaaacacaagtggaatctttccttttattctgttagtttcaaatgtgccaaggttatcaaaaaactacaattcttacttgatggatgacaataatcagatacaatgggttggcaattgaccaacctccccacaacatcctccagtacttttccactcgct

SEQ ID NO: 420262 - DNA, 561 bp, Homo sapiens
ggctatcataaatataaagttgctagagtgtccttttttttgccccatatcagatttttcctatagaatccccgttgtaaaaaacagtgctcatttttgaggctctttctcttcccgctttagctcatgttgctttcgagctttagagagttacttctactctgcttgcgggaccctctctagacctcgcctttcttgtctttatttagccataagctttctrtcacctcctaccatctctctggcaggcaccttcattgtccttcatgcaggtctcacctcaatgctcattaatttccgtgtcttggaaccacctctatagacgctaaggacaaacaaagatgaattttcctgacaacttaaatgcccatgatttctccttccttattgcctgttttgtttttttgagtgtgttccaattttctttcctcatgggtaatgttgctcttcttatttgactataaactcagtgaatagagacattgccctattctgtgctgtgccctggcacagaactgattctctctatacaagtcttactgttaaatttgctgcagtatg

SEQ ID NO: 420263 - DNA, 561 bp, Homo sapiens
ggctatcataaatataaagttgctagagtgtccttttttttgccccatatcagatttttcctatagaatccccgttgtaaaaaacagtgctcatttttgaggctctttctcttcccgctttagctcatgttgctttcgagctttagagagttacttctactctgcttgcgggaccctctctagacctcgcctttcttgtctttatttagccataagctttctgtcacctcctaccatctctctggcaggcaccttcattgtccttcatgcaggtctcacctcaatgctcattaatttccgtgtcttggaaccacctcyatagacgctaaggacaaacaaagatgaattttcctgacaacttaaatgcccatgatttctccttccttattgcctgttttgtttttttgagtgtgttccaattttctttcctcatgggtaatgttgctcttcttatttgactataaactcagtgaatagagacattgccctattctgtgctgtgccctggcacagaactgattctctctatacaagtcttactgttaaatttgctgcagtatg

SEQ ID NO: 420264 - DNA, 573 bp, Homo sapiens
tctgtgtttgaggcagtcagcttcagacaagtctccaggttcccaaggaagtaagtttgttcctctggaacggagtgttgtcatggcagtctgaatatatgaaattacccaactaaacacagctataatatcttggaatgaatcattttattagattaatatatagagatatcacaaatcagggaacaagacattcagcacatattggctagtggctgctgcattacagacagcactctatctaaactcaagcatctctaagaaactcaaagatactttttttagattgccttcaatccacaaattttccttcaaagccttttatctttctagtagatcgattacaaggcttaagggcactgaaaaatgtgcccagttttctaccagcaaaagagcaatacataaaagcaaatgagtattatatttgggaaggcaaaggactttataaagtattgcacctcttatgatgttttatcgtttttagtcaataaacctggaaatgaaataatgggtgtcaygactatttcagtctttatatctggtataatatactttacaataggttttagatat

SEQ ID NO: 420265 - DNA, 529 bp, Homo sapiens
atttatcctgacgatgtagccatcacattttagcattctgtagacaaaatgaaaaaagaaataattaaacccagcacagttgtgaagcaataaaggatgggtggcttgcctttagaaatcagtctctgcaatatagttgccagcccactttctaaaaaaaagggtgaagaaatagaaaaggcacattattctaaaatccagacaacggagacatacccggagagccaggaggaaggaccctttagraaaagccaagctgccagctttatcctagtgactctgggaaccccggccaacagcttctgttgagacataatccatctggattttgtaaatgtggacttcttttttttctttttaagcataagttgaaacatgagggagctctggattgtgaaggcaagtcacatgagagccacgtttagtcttagcacgtggggcttataagcaaggcacctcacttatctcgtgatcccggatatgcaatatctccctgtggtaattgagtaagggctcagccacagctact

SEQ ID NO: 420266 - DNA, 579 bp, Homo sapiens
gcttggtgtacttggtgctagggagaaacagaagttctattctgattgcttttattttctcaggaaaagaagaagcaagcttactagttgaaagttggaaatggatagtatcagtgttctggaaaaaaagaggaaggtttgaaatagcttgaggagagagacagtgacagggttcggcagaattgctgacctttactttggaaatggatgattgaattcattgtttttttgtaagcacatagagcctgacttgccggtttctggctgtcttggtttatagatgagcctactctatgtctttctaatttcaaaggactctgatacccggggaatattgggccaaaatatgatcttattattaatataaacttttttgccatctaattctgtttatgacctaaaggctttctttctttataagaaaataaaatatgctctggtgctgtgctatattagaagttaataatgttagatttcagacaaagaactgggcctaaaatgatgatgatatttgatccttccttcactgttaaaacttagcctttgsgaatgagagcaatcaattgcaggtagatcctt

SEQ ID NO: 420267 - DNA, 496 bp, Homo sapiens
ataattttgcattatgtacttgaactatttttggaagtcacagaaacaaactaagaggtatgaacatgtaagaaattttttgaagccatgaaattataatggccctctaatttcaataatgtttcttcaactaatcacatataaggttcttaaaataatcaattctgaagtgctcttaatcttccaagcaagtctttctgkcagtagtcaccctttaggacttcaaaggaccctgacatatgccccctattatttcataaccacttaagaagtcctagtggattatcaaattataattcacaagtttccctcacccaccatttttgtctgaatgaggaataaattctcatagacaggaaggcaaagacaaccaaaagtcattaaagggaatcctagttcaaaataaaaaccaaacacaagcttctagtttataatgtgaacatggaagcccaagggcctatataaatgggcaaacacctagtaataccaacagcaa

SEQ ID NO: 420268 - DNA, 617 bp, Homo sapiens
tttatagacttaaaggtttgttccatatgtaaacatagactcacacccttgtgtcattcatgtttttgcatgaatgcctccttatctgggacacctcccctgatcttcccatgtaaaatagcaacccttaatcaacctctaacttctccttcctagcacttctcaccacctgacatatgtagtgaatttatttgtttgtcttctgtctttctccactaactgttcagctccatgagctyatcatggctttgcttatggttgagtcacctgcacctacagtggtgccagcactggctaggaacgcatgaacagagctgaagcctcttttaatctccctgacacatcacctccctccccgcctctctccccagggggaaccactgtcctgaagttttatccttgtctttatatactctaattttatcaatacctttatgtgcacatatatacataaatgctagaacaataaacagtgttgtgtatctttaaaaacgttacatatgtgaacagtttgtatggtctgtaacttgctttttctcactcaacattatatgttccagattcatctatgtggatacatgagcatttacttcatatatttcatattcctatgatat

SEQ ID NO: 420269 - DNA, 548 bp, Homo sapiens
tattgccctcactctcatccctgtattccgtgctcagtggctgacacagaagagttctttattgatgtccgccccccacccactaggattctctgctctcccctccccctacaggcctccatcctcttcatcctgttcatttttcagatctcagttcaagcatctcgtcctcagtgtggtgtttcctgatccctcactctaatccaagtctttctgttttatgcacaggtggaatcttatttccgtttgcgtscaatcatgtattttaatatgcatgtatatatgtatgtgcatttgtatgcatgcgattaagaactagaataattaataattggaaagctccatgaaagctggttggggactaattttgtaactactttattcccagatcctgtaatttctctaaataaaccctggaatcttgccttatctccttcaggttaaaagccaactgcaaggtctaatgactgcaggatctagctatccattgtttctggccgcctatgcgtgcactgggtgtctggcagagaggctgggtaaattgtagt

SEQ ID NO: 420270 - DNA, 545 bp, Homo sapiens
aatttaagtagctggacactctgtgtggggaaaaactggtctacagcacagaaatccacacatttgaagacttcagctgttggcatctgggctcaggtggaatgaatggaactcaattttaagaatcttttagatttgtgagataatctttgtcttggtatgtcttgatagcacttccaagaagaatgaagtaaatacaaaytggaaagcccttctgaattgttgtctaatttctgtcagttctattaagtaattctctcagaaaggattatgaatctatggaaatacagaattaagtaaagaaactattaatatggtttccaaagtactgaaacaaagagttcaaaacactgaattgtaaatacattacttgctattttatgaagttgggcagatattttaaaatctctgggattaagtttcttcagctgtaaaatgggtgggtaaaattaaaatatgcctccaggtattgcttacagctgatatgacagtatatgaaaagagtttgaatgctgaaaaacatcataaacactacttatattaat

SEQ ID NO: 420271 - DNA, 545 bp, Homo sapiens
aatttaagtagctggacactctgtgtggggaaaaactggtctacagcacagaaatccacacatttgaagacttcagctgttggcatctgggctcaggtggaatgaatggaactcaattttaagaatcttttagatttgtgagataatctttgtcttggtatgtcttgatagcacttccaagaagaatgaagtaaatacaaactggaaagcccttctgaattgttgtctaatttctgtcagttctattaagtaattctctcagaaaggattatgaatctatggaaatacagaattaagtraagaaactattaatatggtttccaaagtactgaaacaaagagttcaaaacactgaattgtaaatacattacttgctattttatgaagttgggcagatattttaaaatctctgggattaagtttcttcagctgtaaaatgggtgggtaaaattaaaatatgcctccaggtattgcttacagctgatatgacagtatatgaaaagagtttgaatgctgaaaaacatcataaacactacttatattaat

SEQ ID NO: 420272 - DNA, 545 bp, Homo sapiens
aatttaagtagctggacactctgtgtggggaaaaactggtctacagcacagaaatccacacatttgaagacttcagctgttggcatctgggctcaggtggaatgaatggaactcaattttaagaatcttttagatttgtgagataatctttgtcttggtatgtcttgatagcacttccaagaagaatgaagtaaatacaaactggaaagcccttctgaattgttgtctaatttctgtcagttctattaagtaattctctcagaaaggattatgaatctatggaaatacagaattaagtaaagaaactattaatatggtttccaaagtactgaaacaaagagttcaaaacactgaattgtaaatacattacttgctattttatgaagttgggcagatattttaaaatctctgggattaartttcttcagctgtaaaatgggtgggtaaaattaaaatatgcctccaggtattgcttacagctgatatgacagtatatgaaaagagtttgaatgctgaaaaacatcataaacactacttatattaat

SEQ ID NO: 420273 - DNA, 576 bp, Homo sapiens
accaaacaaattaaattgatctctcggtataatgatccagatttaagtctaaaagttacttaaaattatatcgtttcaagtgattttcagaatggtttaagtacagcgttcttggagcctgatatgactttctggattaacttgctctgcctcagtgaggaaatgtagctgtgtatgtggaatctgaagccacatctgatctcccttgggttagctgcccccagtataactcttaccacatgcttaatccccctttcacatcttagtcttcatgttgttaagacaatgagataggcaattatataaaatagaaaatgtttgtggaacacatggctagtagtccaaatggaatgtaacagtttttttttaagtttctataattctcttactttatatttttcattagtttttcattagctacatctgagtttctcagattcaagcttgtagagtgagcatcattctgtgataaaagttctaatatatcaaagctaaaagaaagatgcttgttgagattttttccacataaatgaatttwctcagttaaaatacttttgttctagatttatgtccatc

SEQ ID NO: 420274 - DNA, 578 bp, Homo sapiens
tactattatgtgcaaagcactgctcaggtgtttcagaatttgtaagtatcatatagggaacagagtgtatctttactatcacttacagaaaataaaacaaatatagaaatactaaaggaaggggaagctgagtgtgccaaacaataagtgtcctaaacaaaccacaattcaaaccatgagrcattttgtcagagggagaaaacattttttcttttaaatacaaaaagaaaaccagttttataggatacatggtgtttgggatctccttaaaatgtatttcttattgttgacttttttactcacatataaaaattataaagaattgaaaagaataggaaaacaattcttccaatattccctgaggatagcacaattattataataattcattaattcccttaaagtttttcctgtatttgttaaataaaaattaatcaaattatatttacaattttacaacctttttgcttacttcatattttattctaagtatcttctattatgttgtatttctaataatccattgttaggattataaaatgttcaaattggtgaatatcaaattttttagtaatttc

SEQ ID NO: 420275 - DNA, 407 bp, Homo sapiens
tttccaggtgatactgatgcaccagctaggctaactcattagcctsgctgttaatctgagaaggatcccttctcagagagcaaacaaagcacagctggtaatgaagactttagccctctcccatctcctcctcttcctggatctggacagtgcaggcagctacaaagcatcagttctgtgtggtggggcaggcaggataagacaaaggaggttccttgaggagaagcaccaactgtaaggtgagaaaagtgagcttcatgaactaggctacctgacttctggttactgtttgcttttctttctccgtagttttcactgagcctttaataaagcctttaaccaaaggtccagttgcatctctttcctatgtttcagaatagattgaagctgagttcaacaagcatatt

SEQ ID NO: 420276 - DNA, 407 bp, Homo sapiens
tttccaggtgatactgatgcaccagctaggctaactcattagcctggctgttaatctgagaasgatcccttctcagagagcaaacaaagcacagctggtaatgaagactttagccctctcccatctcctcctcttcctggatctggacagtgcaggcagctacaaagcatcagttctgtgtggtggggcaggcaggataagacaaaggaggttccttgaggagaagcaccaactgtaaggtgagaaaagtgagcttcatgaactaggctacctgacttctggttactgtttgcttttctttctccgtagttttcactgagcctttaataaagcctttaaccaaaggtccagttgcatctctttcctatgtttcagaatagattgaagctgagttcaacaagcatatt

SEQ ID NO: 420277 - DNA, 407 bp, Homo sapiens
tttccaggtgatactgatgcaccagctaggctaactcattagcctggctgttaatctgagaaggatcccttctcagagagcaaacaaagcacagctggtaatgaagactttagccctctcccatctcctcctcttcctggatctggacagtgcrggcagctacaaagcatcagttctgtgtggtggggcaggcaggataagacaaaggaggttccttgaggagaagcaccaactgtaaggtgagaaaagtgagcttcatgaactaggctacctgacttctggttactgtttgcttttctttctccgtagttttcactgagcctttaataaagcctttaaccaaaggtccagttgcatctctttcctatgtttcagaatagattgaagctgagttcaacaagcatatt

SEQ ID NO: 420278 - DNA, 407 bp, Homo sapiens
tttccaggtgatactgatgcaccagctaggctaactcattagcctggctgttaatctgagaaggatcccttctcagagagcaaacaaagcacagctggtaatgaagactttagccctctcccatctcctcctcttcctggatctggacagtgcaggcagctacaaagcatcagttctgtgtggtggggcaggcaggataagacaaaggaggttccttgaggagaagcaccaactgtaaggtgagaaaagtgagcttcatgaactaggctacctgacttctggttactgtttgcttttctttctccgtagttttcackgagcctttaataaagcctttaaccaaaggtccagttgcatctctttcctatgtttcagaatagattgaagctgagttcaacaagcatatt

SEQ ID NO: 420279 - DNA, 548 bp, Homo sapiens
tgcaaatgtaactttttttgcccttacaggagcctttgagataggagctcttagaagttatatttagaagtgagaaaactgaggcacagaaagtaagtagcttgggtcacacaaataggaagttgcagggccaggaatgaatccaggcatctgacgccaaaggtcaagctcttagccactaccctaagagaaggagaaaagaataaccaaatgcactgtgtaaactaactttcagaacagtgtagctcagaggcattgacaaagaagaaaaggaaggttgggagctgtggctcagacccgtaatcctagcattttgggagaacaatgtggatagacagcttgagcccaggagtttgaraccaacctgggtaatatggtcaaatgtcatctccactaaaaatacaaaaattagctggatgtctagcgtttgcctgtagtcccagctaccaaggaggctgaggttggaggatcacttgagcctgggaaatcaagactagtgagccatgatcgctccacgcactccaacctgggctgcggagtgagaccct

SEQ ID NO: 420280 - DNA, 518 bp, Homo sapiens
ttaaaaacttggtaatcaaataaagtgagtaaaaaagtaacttaaaatggaatttggatgtgtagcctggattcattgtaraagggtattcctacttctgtttagtgctatagacaagaaaataatagaaaaaaggcttaacaggaaattttgaagattttcaacatgttgaggacaaagtgcccatggaacaagcatgtggaaatgcgaggtgacgggaaagatcagcagatttaccaatatgggggaacatcaaaaatttctgagagtaaatataattatcccaggacagaatagatggaaactcatctagagcagggatcttgtcttgctcacaatgcctaaaaagagcattttttaaatcgtattgactaccctgagaggatgtgacaaacattaagaacaagatactaggtaacttcaaaatgttgtaaggaaaggaaaattgaattattcaacggaataaataatcacaaataagatcaatgtagactttttcaaatgaaacctgataaaca

SEQ ID NO: 420281 - DNA, 537 bp, Homo sapiens
gaatgttaaaaacttggtaatcaaataaagtgagtaaaaaagtaacttaaaatggaatttggatgtgtagcctggattcattgtagaagggtattcctacttctgtttagtgctatagacaagaaaataatagaaaaaaggcttaacaggaaattttgaagattttcaacwtgttgaggacaaagtgcccatggaacaagcatgtggaaatgcgaggtgacgggaaagatcagcagatttaccaatatgggggaacatcaaaaatttctgagagtaaatataattatcccaggacagaatagatggaaactcatctagagcagggatcttgtcttgctcacaatgcctaaaaagagcattttttaaatcgtattgactaccctgagaggatgtgacaaacattaagaacaagatactaggtaacttcaaaatgttgtaaggaaaggaaaattgaattattcaacggaataaataatcacaaataagatcaatgtagactttttcaaatgaaacctgataaacagaagtagcaactat

SEQ ID NO: 420282 - DNA, 537 bp, Homo sapiens
gaatgttaaaaacttggtaatcaaataaagtgagtaaaaaagtaacttaaaatggaatttggatgtgtagcctggattcattgtagaagggtattcctacttctgtttagtgctatagacaagaaaataatagaaaaaaggcttaacaggaaattttgaagattttcaacatgttgaggacaaagtgcccatggaacaagcatgtggaaatgcgaggtgacgggaaagatcagcagatttaccaatatgggggaacatcaaaaatttctgagagtaaatataattatcccaggacagaatagatggaaactcatctagagcagggatcttgtcttgctcacaatgcctaaaaagagcattttttaaatcgtattgactaccctgagaggatgtgacaaacattaagaacaagatactaggtaacttcaaaatgttgtaaggaaaggaaaattgaattattcaacggaataaataatcacaaawaagatcaatgtagactttttcaaatgaaacctgataaacagaagtagcaactat

SEQ ID NO: 420283 - DNA, 511 bp, Homo sapiens
cttacaagcgtcactaactctaaacttttgttgacttgaggatcatttcctgacttttattggaaccattctgggcagtacattccctcttcccaatgtctttgtgagcttcggctccaacttcccttttcatgtcttctttttttttttgccacggacttatatgccttcagcacatgaggctgcatttaacttggctcaaaagcagggatagatattatcacaatgtaggagattaaaaagcatcccaacctcaaaagaaacacacacacagagtccacagaaaatgtagggaagattttttttcttatgttaatacaatggcgatcccagctttaatctargatgcatctattgagatctagaccaggtttgtcattttcagtgaagtgctgggatgtattctccagaaatctgcgtccatgaagaatttgcaaagccctcaggagttaatccatcttcagaaaaaagagtctgggaaacaagtttaggctggtagagagttttggtt

SEQ ID NO: 420284 - DNA, 511 bp, Homo sapiens
cttacaagcgtcactaactctaaacttttgttgacttgaggatcatttcctgacttttattggaaccattctgggcagtacattccctcttcccaatgtctttgtgagcttcggctccaacttcccttttcatgtcttctttttttttttgccacggacttatatgccttcagcacatgaggctgcatttaacttggctcaaaagcagggatagatattatcacaatgtaggagattaaaaagcatcccaacctcaaaagaaacacacacacagagtccacagaaaatgtagggaagattttttttcttatgttaatacaatggcgatcccagctttaatctaggatgcatctattgagatctagaccaggtttgtcattttcagtgaagtgctgggatgtattctccagaaatctgcgtccatgaagaatttgcaaagccctcargagttaatccatcttcagaaaaaagagtctgggaaacaagtttaggctggtagagagttttggtt

SEQ ID NO: 420285 - DNA, 511 bp, Homo sapiens
cttacaagcgtcactaactctaaacttttgttgacttgaggatcatttcctgacttttattggaaccattctgggcagtacattccctcttcccaatgtctttgtgagcttcggctccaacttcccttttcatgtcttctttttttttttgccacggacttatatgccttcagcacatgaggctgcatttaacttggctcaaaagcagggatagatattatcacaatgtaggagattaaaaagcatcccaacctcaaaagaaacacacacacagagtccacagaaaatgtagggaagattttttttcttatgttaatacaatggcgatcccagctttaatctaggatgcatctattgagatctagaccaggtttgtcattttcagtgaagtgctgggatgtattctccagaaatctgcgtccatgaagaatttgcaaagccctcaggagttaatccatcttcagaaaaaagagtctgggaaacaagtttargctggtagagagttttggtt

SEQ ID NO: 420286 - DNA, 616 bp, Homo sapiens
ttttattttattttcccttattttatttctttgtgaaacatgttggctgttagaggaatcaaatgcaatgatgtggacttggtagcaatggggtctaaatcattggtcttctaagcggagtgggatagttgtatgttagacaatgccaagatgacctactgaaggtcatactgtaattatagaaaataattacaatttttacttatattcacttttaatggaaacagctaagaaggaagtgaaggtttactgatatacacttgaaccggtgttgtcacttgctatrtgtatcagacacactagtaagggatcctattctgaaacaaggcccttcattcacttgttaattttcagcatgttgcagtttaagtaagctcagtgattgtatttaccaattaaattacccagatttagctaaaagtaactttacaaaataaacaaatggttttaaaagattctagcaagtacattataaattgagaatattgctgctaatgcaagcccaggcaaactacaaaaagaatggcagagctgactctttgctactcctagaacaagctgttcagtaataatacgagactaaaggcaaggacaccctaatctaatttgacaagaa

SEQ ID NO: 420287 - DNA, 572 bp, Homo sapiens
ctctctcttgctgccttgtgaaggtgcctgctaccccttctactatgattgtaagtttcctgaggcctccccagacatgtggaactgtggatcaattaaacctcttccctttagacattacccagtcttgggtatttcttttagcagtgtgagaacagactaatacagtggtccatccacaagggacctctgtgtttccagctgtccctggatctcaccttctgaccttcactgggcccttccctctacctggaacactcttctctctccctgaccagttccttggcccctttcagttaaggccttcctagsgcctccctgggcacccaggctaggttggcgcctcttactttgtcttccatcccacttgttatatcttccatccctgctctcatcatcctctgtttaaattacttgcttaatcatagagtatccttgttagactctgaggtctgggagagcagtgtgtggcccaatcccttgttgcaggccccagtgcttagcatgctactgggtgcatagtaggtgaacagcaaacatataaacaaacacacacagaagtgtgctgttgg

SEQ ID NO: 420288 - DNA, 572 bp, Homo sapiens
ctctctcttgctgccttgtgaaggtgcctgctaccccttctactatgattgtaagtttcctgaggcctccccagacatgtggaactgtggatcaattaaacctcttccctttagacattacccagtcttgggtatttcttttagcagtgtgagaacagactaatacagtggtccatccacaagggacctctgtgtttccagctgtccctggatctcaccttctgaccttcactgggcccttccctctacctggaacactcttctctctccctgaccagttccttggcccctttcagttaaggccttcctagcscctccctgggcacccaggctaggttggcgcctcttactttgtcttccatcccacttgttatatcttccatccctgctctcatcatcctctgtttaaattacttgcttaatcatagagtatccttgttagactctgaggtctgggagagcagtgtgtggcccaatcccttgttgcaggccccagtgcttagcatgctactgggtgcatagtaggtgaacagcaaacatataaacaaacacacacagaagtgtgctgttgg

SEQ ID NO: 420289 - DNA, 611 bp, Homo sapiens
ttataaagaaaagaggtttaattgactcacagttctgcatggctggtaagccctcaggaaacttacaatcatggcaaaaggcaccttttcatagggcagtagaggagagaatgagtgcctaccgaagtgggaagccctttataaaaccatcagatctcatgagaactaactcattatcatgagaacaggatggaggaaaccacccccatgttttaattatctccatctggtctctcccacgacatgtggggattatgggaactacaattcaagagagatttgggtggggacacagccaaaccatatcattctacccctggatcctcccaaatctcatgtcctcacatttcaaaacacaatcatgcccttccaacagtatctcaaagtcttaactcattccagtattaactcaaaagtccaagtacaaagcctcatttgagacatagaaagtctcttcttcctatgagcctgtaaaaatcaaaagaaagttagttacttcctagatacaaytgaagtacaggcactgggtaaacacaccctttccaaatagagaaattggccaaaacaaaggggctacaggccctgtgcaagtccaaaatccaatagggcag

SEQ ID NO: 420290 - DNA, 540 bp, Homo sapiens
tcttctcagaaaccattctttctccaagccatctcatgccctatctgaattaggatactcctctccagtggcttctcataggccactgtggatatctcctctattaagcaccatactgaaatggtttgtttctctttaggcagtaaatccctataggacagtgaatatatatgtgttatctttataaactcagaatctagtaccattttcaatgacataatagccattcaaaaagtattttgtttactgagtcattcaataaatacagagtgagttacttgatgggtatgtaattgggagtgtgttagtccattttgcattactgtaaaggaatacgtgagtctgggtaattataaagaaaagaggcttatttggctcacagttctgtgggctgtacaagaaccacgaaccaacatcagcttctggtgagggcttcaggctgmgtcctttatggcagaaggggaaggggagtcagtgtgtcacatgacaagatagggagcaagagggagaggaggtagtgccaggctctttttaacaacc

SEQ ID NO: 420291 - DNA, 387 bp, Homo sapiens
tagtaacttccaagatacaatggggttacaggcattgggtaaatgctaccattccaaaaggaagaaactggccaaacaaaaggtactacaggccgcatgcaagtccaaaacccagcagaaattcattaaatcttaaagctctgaaataatctcctttgattccatatctcacaatcaggtcatgttagaacatcccatggcccatcccatggtcttgggcatttctgcccctgtaactctgcagggtgcagctccttcagctgctttcacaggctgytgtcgactgacagtggcttttccaggtgcacggtgcaagctgtcagtggatctaccattctggaggctggaggatgatggccctctactcacagctccactaggcagtgt

SEQ ID NO: 420292 - DNA, 541 bp, Homo sapiens
gcacagagcaatctacagctttaatgcaattcttatcaaattacctgtgtcattttttaccgaactggatccaaacaatggggaaatgatatcccattcaataaatagtgccatgaattttggctagccatatgcagaagaatgaaattggacccctacctcttaccatatacaaaaattaactcaaggtgaattaaagtctttttattgttattattgttattatttagaaagagtcttattctgtcacccaggctagagtgaagtggcatgatctctggttaccataaacactgcctcctggattcaagtaattctcctgcctcagccccctgagtagctgggattacaggtgtccatcmccatgcctggctaagttttgtatttttggtgtactaaaataggatttcaccatgttggccaggttggtcttaaactcctgacctcaagtaacctgcccacctcagcctaccaaagtgctgggattacaggcatgagccactgtgcctggcctggagtaaagccttacacataagaacag

SEQ ID NO: 420293 - DNA, 488 bp, Homo sapiens
ttcattgaaaaaaacctttcttttttctgctaaattgcctttgtacctttatggaaaatcagttgattattgtttgtaagtttatactctctactctgttatcttgatctatgtgtctttattgatgccaataacaaaaaatacttataagtaytgaaatctggcagttcaggactttcagccttgtctttcttttacaaagttgttttgactattctagggccttttcaatttcacattaatttaacaatcagtttttcaagttctaacccccatccccccaaaaaacctgctggaattttgattgggattttgttgactttatagatcaatttggggagagttacatcttagtaacatcgggccttccaattcatgaacatggtatctatatatttatatctgttgaggggatagatcatcttaatttctctcagtcatatttgtagctttcagtgtataggtctttaacctcttttgtaagatgt

SEQ ID NO: 420294 - DNA, 563 bp, Homo sapiens
cagaaccgtcatgccatgagccactgttgtcaggtgggagagatagagctcttctgaatctggattcccactcccacccagtccagctgcaaacaggctgtaaaatgtccactagcattagagtctctgtgacacatccctcacttcctgagcacttggagtcctttctctttgagcccaggtctrctctcgggctcagatcaaacctgccctctcatagctaactaaatccacagcttcttctcttcttttaacatcttgtaacagtgcccaggggactgaggttaagcatcctcaatggccagcggtggagggaggaaaaggtatgtgggcactggtgggcactccagaggacacaccatgatcccactcaaggtatgaaccagtgggctggaatataatttaatataatttaatgtattcatgaattttggtcaaagacaactaagacattgaaacctatgaaatgacacaaaaatgcacaataattatggctgcccttatgaataactcccaataacaagaaatagatgtggttagcctaattgttgccttcagttttg

SEQ ID NO: 420295 - DNA, 563 bp, Homo sapiens
cagaaccgtcatgccatgagccactgttgtcaggtgggagagatagagctcttctgaatctggattcccactcccacccagtccagctgcaaacaggctgtaaaatgtccactagcattagagtctctgtgacacatccctcacttcctgagcacttggagtcctttctctttgagcccaggtctgctctcgggctcagatcaaayctgccctctcatagctaactaaatccacagcttcttctcttcttttaacatcttgtaacagtgcccaggggactgaggttaagcatcctcaatggccagcggtggagggaggaaaaggtatgtgggcactggtgggcactccagaggacacaccatgatcccactcaaggtatgaaccagtgggctggaatataatttaatataatttaatgtattcatgaattttggtcaaagacaactaagacattgaaacctatgaaatgacacaaaaatgcacaataattatggctgcccttatgaataactcccaataacaagaaatagatgtggttagcctaattgttgccttcagttttg

SEQ ID NO: 420296 - DNA, 563 bp, Homo sapiens
cagaaccgtcatgccatgagccactgttgtcaggtgggagagatagagctcttctgaatctggattcccactcccacccagtccagctgcaaacaggctgtaaaatgtccactagcattagagtctctgtgacacatccctcacttcctgagcacttggagtcctttctctttgagcccaggtctgctctcgggctcagatcaaacctgccctctcatagctaactaaatccacagcttcttctcttcytttaacatcttgtaacagtgcccaggggactgaggttaagcatcctcaatggccagcggtggagggaggaaaaggtatgtgggcactggtgggcactccagaggacacaccatgatcccactcaaggtatgaaccagtgggctggaatataatttaatataatttaatgtattcatgaattttggtcaaagacaactaagacattgaaacctatgaaatgacacaaaaatgcacaataattatggctgcccttatgaataactcccaataacaagaaatagatgtggttagcctaattgttgccttcagttttg

SEQ ID NO: 420297 - DNA, 573 bp, Homo sapiens
gaaccttttgtattccaacagatgaagctgctcctcttcctaggaagcagtcctttgttcccctggacctgtgactgatccacagcaggcatgtgatctaagcctgatagatcaggtccctcgctgggcttgctgcagctggagaagaagcagctccatgctgctttgkggggggcatggtgctggaaggagttgtagtggatggtataggtgctccactcatatcccattggttcacccttgaggtcatcttcagacagtccctgcacacaaactgagctcctatgtctctctgcataaagctgcttctctggcctggggagcaagctagggagagttaccactcccagagcaactcttaaacaatgaaggagaggagctggcagataaacacctcagcttccttgttcttcaggggctcaattctgagtggtgctccacacattctttttgaggcatcccagtaggattgagatctacttgctccagctgtaacccactcaccgagacacccgtttggggtttccgccccttctttgtctcacttacctgctctctcattttgcttctggt

SEQ ID NO: 420298 - DNA, 548 bp, Homo sapiens
agctggtgaaaactggagaaccaggcaggtttgtgtctgccagttccctgcttactgggcagagcaaggccagtctctcttcttcttacaattcactacttaagtagcaaacatgggttgtggttactggaaaaggactaggggaaccttttgtattccaacagatgaagctgctcctcttcctaggaagcagtcctttgttcccctggacctgtgactgatccacagcaggcatgtgatctaagcctgatagatcaggtccctcgctgggcttgctgcagctggagaagaagcagctccatgctgctttggggggggcatggtgctggaaggagttgtagtggatggtataggtgctccactcatatcccattggttcacccttgaggtcatcttcagacagtccctgcacacaaactgagctcctatgtctctctgcataaagctgcttctctggcctggggagcaagctagggagagttaycactcccagagcaactcttaaacaatgaaggagaggagctggcagataaacacctcagcttcct

SEQ ID NO: 420299 - DNA, 548 bp, Homo sapiens
agctggtgaaaactggagaaccaggcaggtttgtgtctgccagttccctgcttactgggcagagcaaggccagtctctcttcttcttacaattcactacttaagtagcaaacatgggttgtggttactggaaaaggactaggggaaccttttgtattccaacagatgaagctgctcctcttcctaggaagcagtcctttgttcccctggacctgtgactgatccacagcaggcatgtgatctaagcctgatagatcaggtccctcgctgggcttgctgcagctggagaagaagcagctccatgctgctttggggggggcatggtgctggaaggagttgtagtggatggtataggtgctccactcatatcccattggttcacccttgaggtcatcttcagacagtccctgcacacaaactgagctcctatgtctctctgcataaagctgcttctctggcctggggagcaagctagggagagttaccactcccagagcaactcttaaacaaygaaggagaggagctggcagataaacacctcagcttcct

SEQ ID NO: 420300 - DNA, 622 bp, Homo sapiens
gggcagggcccctcacttgggagacccaactcctggagcttggggtaagagacaacatgaagatattttctcattattatttactgttgagtaacagactcccttaactcaaattactccaccattcagtccatgtacatgatctatctatagcccaagccagggatgcaatactataacctctaactactgtctgtcctcttcatcccagatttatgtctccttttttatgtgcaaaggcagagaagctgtcactgtackacatctggagttgtactgtctcatttcaggggccacaggttctagcccagaatgtttactttttataagatgctgagttgtggacttcctgggaacatattgattgaagcctgcagcatggcaaaggttgtgtaatactttttccaccctacctcttaggaactggggagcaactcttcccactgaagaaagagcatggctcctggctctttaccaaatctctcattttttagttctcagatgtgatttttctctctgacactccttaatccaacaccttttatccttacaggtaggccctatggacttatgccctaaagactgtaagggctaggcagcccatatgttcgtatgttttctg

SEQ ID NO: 420301 - DNA, 622 bp, Homo sapiens
gggcagggcccctcacttgggagacccaactcctggagcttggggtaagagacaacatgaagatattttctcattattatttactgttgagtaacagactcccttaactcaaattactccaccattcagtccatgtacatgatctatctatagcccaagccagggatgcaatactataacctctaactactgtctgtcctcttcatcccagatttatgtctccttttttatgtgcaaaggcagagaagctgtcactgtactacatctggagttgtactgtctcatttcaggggccacaggttctagcccagaatgtttactttttataagatgctgagttgtggacttcytgggaacatattgattgaagcctgcagcatggcaaaggttgtgtaatactttttccaccctacctcttaggaactggggagcaactcttcccactgaagaaagagcatggctcctggctctttaccaaatctctcattttttagttctcagatgtgatttttctctctgacactccttaatccaacaccttttatccttacaggtaggccctatggacttatgccctaaagactgtaagggctaggcagcccatatgttcgtatgttttctg

SEQ ID NO: 420302 - DNA, 622 bp, Homo sapiens
gggcagggcccctcacttgggagacccaactcctggagcttggggtaagagacaacatgaagatattttctcattattatttactgttgagtaacagactcccttaactcaaattactccaccattcagtccatgtacatgatctatctatagcccaagccagggatgcaatactataacctctaactactgtctgtcctcttcatcccagatttatgtctccttttttatgtgcaaaggcagagaagctgtcactgtactacatctggagttgtactgtctcatttcaggggccacaggttctagcccagaatgtttactttttataagatgctgagttgtggacttcctgggaacataytgattgaagcctgcagcatggcaaaggttgtgtaatactttttccaccctacctcttaggaactggggagcaactcttcccactgaagaaagagcatggctcctggctctttaccaaatctctcattttttagttctcagatgtgatttttctctctgacactccttaatccaacaccttttatccttacaggtaggccctatggacttatgccctaaagactgtaagggctaggcagcccatatgttcgtatgttttctg

SEQ ID NO: 420303 - DNA, 610 bp, Homo sapiens
ataataaaataaaaagaaaatccagacactcagagaaacatagmgaaaacaacaatgtattttcagttcaccttgcaccctcaagatgatcttcaattaactcgtttcagaagcttgaaagagaacagtagaaaatcattattttttccaacaaaaaatcacaaaattaactgcttacatccattgtgagaaataaagtgtcacgagtgaaacttaaaataacattttatggacacacttagaagaaatccaaatacattcatagaaatggcagaatgatctttattcccaagctgtattttttttaaagtgagttaacctgacagtaatgtgcctcaggaattgccaatatattcaaatttaatatacaatgcattcaagcatgcgttttactctcaaaaatatttaaaaatatatttgaaaacaaaattaagaacaaacattgaaagacaccctacagcacctaggtttctacaaaacaccattttaaaaccagccacctactgcttgataaacaccatctaagccaaacgagactgtgcatgctcagtcactcaatgcaaacctgtccccaccttatttacccaattacgcttttcagttgctatat

SEQ ID NO: 420304 - DNA, 547 bp, Homo sapiens
acaggatcctgtccccagctgcagagtgtctgctgggcgtccccaacacctgggaagtctgtctgtccttccaagggrccaggccagagaaatggggggcactggggctctgctttgcctcctcatggatgtcagtcccgggtttctgatggggtttgtgatgatggcgccctaaagggaagctctgtggagagccaggggtctcgagtatggccttcatggcagggaccccattgctctccttttttacacatggcctcaaaccaggttgactttttagcctaaagaaaatctcatgaagagaaagacagtggtgtgggggagggtgtatcacttgagcctacttcacaggctcttgggaaggagcagtaggaggaggaggggtgcaagtagtgaaccccagagggatgactctgctgtgatgactgttaatgaggcttgagacttcagctcatttgtcatgtgcagctggtgtattttgagtgatataagttgatgacagcctccttcctgaacccactgtcaaggctgcaagaaatttttgaga

SEQ ID NO: 420305 - DNA, 607 bp, Homo sapiens
tcacactgcaagtttgtggtagactcagaattagaacgcaggccacctgctcagggttctttctctgtactgcaggagagggaaccagcatcactgtgtgggagtcaaggggcttctcaggagtgagtagtcctttggccatgaccttgccttatgtgaatggaagttctgagcatagtgtgaactgtatgtctacagctgatggctgcctggcagggactcttggccatactgggtttctgggctggctcatttctggtgtttggtatctctctacttcacgttgaatggctcttccctgttgaaaggctctgccagtatcccttaatatcaggtaaaactgcacaattcaagatggtgccagcaagcatgatgtttcccccatggtgacacagggctgtaagtagggagatgaggagccaggcatctttggaattgagggctgacttatagggctgacttatctccgyaggtttggaatagtcataattaatggcaaagttaatggtccagccacttagggatatagcaaagcaagagaatcttggcttgttgtcttcagcttgttgaagaatatcatctccatttcatccacccattacttggc

SEQ ID NO: 420306 - DNA, 607 bp, Homo sapiens
ccacagtttaagggctcagtcccgcaagacttcccccatttcataagtcccaggttgtcacctatacttctggccaaccagctataaattgggggttcctaggacccctgctcaggtatgaacatttgctagaatggctaacagaactcaggaaagcactttatttactctttactgatttattataaaggatacaactcaggaacagccaaatggaagagacacctagggcaaggtatgcaatggcrtggagcttccatgacttctccaggtgtgccacctccccagcaccccgatatgtttacctgccaggaactctccaaactctgtcatttagggttttatggaggtcctgttacataggtacaactgattaaatcattgaccattggtgagtgaactcaatctctagcccttctcctttccccagtggcttaggggtgagctgcaagttctaatcctctaatcacatggttggttcctttggcagccagcctccatcattaagctatctaggagcccaccaagagtcacctcattagaataaactcaggtatggttgaaagtggcttattgagaataaaaaagatgttcctatcatgcaaga

SEQ ID NO: 420307 - DNA, 503 bp, Homo sapiens
tgaaaatattcattgcaataaattcagaagatgtcataaggtagaccatgattaatgcgtaatgcatgatayggacaataaaagtatacttgttaagagtgaaatggggatgctttggtttggagttctctgggaaagctcttgtctgttcctgcttcctgtagtctacccatcctcttttaggataagggcttctgatttccatgacttaggaaacagaattaagactgtttcattcattgaagatcagaatgccctgcgtacagtctggaaaagtaacatgtgccgcctgaagagacaagagtttgtgataagcaggtaagctcttctagtctgccccagaagcctcacacaaagtggggttgttttaacagtaagaaataggggttatgtgggacacacgagcagttgtggagagtcaggactcctgtactgatgggaagaatagagctatcagaggccctgtaagtataggattttagctgaatgtggaacagacaggc

SEQ ID NO: 420308 - DNA, 503 bp, Homo sapiens
tgaaaatattcattgcaataaattcagaagatgtcataaggtagaccatgattaatgcgtaatgcatgatatggacaataaaagtatacttgttaagagtgaaatggggatgctttggtttggagttctctgggaaagctcttgtctgttcctgcttcctgtagtctacccatcctcttttaggataagggcttctgatttccatgacttaggaaacagaattaagactgtttcattcattgaagatcagaatgccctgcgtacagtctggaaaagtaacatgtgccgcctgaagagacaagagtttgtgataagcaggtaagctcttctmgtctgccccagaagcctcacacaaagtggggttgttttaacagtaagaaataggggttatgtgggacacacgagcagttgtggagagtcaggactcctgtactgatgggaagaatagagctatcagaggccctgtaagtataggattttagctgaatgtggaacagacaggc

SEQ ID NO: 420309 - DNA, 644 bp, Homo sapiens
attttaaggagtactagagttagaattagcataagggtatcagttatcatcactattattttatatttccataagaagtcaacaaatcagtaaatgcataaaaaaccaacaaagaaaggatgaaacagaattttaattatttatagattgtataatagtatctatacaaaagtataattactatgcaggttaaaaattataacacatttcaatacagtagccactagcaaaataaattattcttctctaccaacagtaaccaaatgtaaaatatatatttcatctataaaattggtaaaaatacagcatacttataagtaaacattttagaaaatagctaatacccatatgaatgtgattataaaaaatctactgaagaacagtaaagagatcttgaatggagatacmtattgtatctcaaatagtaatagtatattttttacaagatttcaaaatatcagttattcctaagttaatgtaaaaactcaatgcattcctaatgaaagcagacatttgtctctggtctcaaatcaaacatgagtaaagctaagaaaattatttgaaataaaagcaatgagtgtgacaaatcctatgtaacattaaattttactttaaagttaaagtgattggaaacatttgatatt

SEQ ID NO: 420310 - DNA, 561 bp, Homo sapiens
gctatgtgaatatcaagaggatatgtcgccctctaggaaagtttagggaaggaatttagtagaagcctaaaccacaccttgaatactaaggccataaagagatagagtattctctgcacatcagattctggaaagttctctcctctgagcttctatgrctatgtaacaataccatttacttcactcttagcatataccactttccattgtcataaattgtgtatttatcacttttccagaaaacatatcaaggagaatgggaatcctgactttaattgctttatagaatttccatgtaacctagaggtattgatcataagagatgctcaataaataattaggaaccaggatttggtctgctacgcagttctcatcttaatgaccaagaggcacacatctcttgctaatgacactgccaactggcctgaagcccatagaagcatgagaaccaaaataaaaaaaaactggaacacaattgaatatgtagactctaaatatatattttgtcatcagattattttcttattttttagaatcacttttatatcctaattgatatga

SEQ ID NO: 420311 - DNA, 597 bp, Homo sapiens
ttaccagttgcctagggtaatgtcatagtaagtactctgagataaattcttgtctgctgtaggattccttaagctgaagtctatgttaactcagccagcactccagcgatcagggtgattttgctgtgccacaaatatgcccagtttactgcattcttcttcaaggcacttaccctctctttaaagccttgataacatttccccttcttcctttatgagcactttcaaagtcttaaacattttcacctgatgacttcaacaggtgcatgttggggactyggcagctgtggttttcgtcacacacacagccgacatctgaacaaaggcacagacattcctaaccacaatccacacattgcttacctatttccatcctcaaaaacttaaattaatggattttaaatttcttaatattcctagagagagaaaaagggcaggcccaggaatttagatacaagcctacattcaaataacacatttcaattaggagaatgtaaaatataaactctcctactatatatatacttgaacactagagggaaaatcacccaacatgttaaataaaaattccacaaggtagatattgtatagtgtatc

SEQ ID NO: 420312 - DNA, 568 bp, Homo sapiens
gagaataattctgaagtttatccattagcttcataatagtgtaaattattaattaacagttaggataataactgaagttttctaaattctcattccttgaaagaatagctcaccccatcattatttctatttgaccgttcatgtctctgtggaaagattcatttgaaggctattattttccacttatctactatttttttctggttcaggcaattaatatttgtcatacacaaaagtattctttatttcacagatataaacattaatctgctttataatctaagcatcacatcctacaaattatagagaagatataaaagacaactgaaacattctaccacacacagcagcgggggcayaaagcacaattaagatacgcaaatagatgttttagaaaataggtaattttttgtgttcttcatgctatcagaagctgaccaatgagtccagaatttctttccttgattaatgaagcaataatgatagcaccttgccttaaactctcctgtagcttctgatcatcctgaaaagaaaggataaaccagtaatattttagaaaaaacatatg

SEQ ID NO: 420313 - DNA, 585 bp, Homo sapiens
attttattattcacatacataagtgtgtgtgtgtgtatgtgtgtgtgtatatacacattattttgtgagttycaaatattatataataaacatttaaaatgtttattaaactcaggtaagcagggtccatatgaacagtgaaaaatcatgctgatagtatacattcttgaaattatgtgaaaatagcatttatgtattcctcccaaaaacctgtacctccaggctaatcatgaggaagacatcggaaaagttcctgttggagggacattctacaatatacctgacaagtgctcctcaaaactgtacaggtcatcaaaaaacaaggaaagtgtgagaaactgtcacagccaagaggtgtctgaagagaactaaaagtaacatggggtactggaacagaaaaacacattaggtagaactatggaaatctcactaaactatgcactttgttaataataatacatcaatgttggtacataaattgtaacgaacacatattaataatgggagaacctgggtgtgagtatatgggaactctctgcggcatcctctgaatttgtctgtatatctataaactgaagcatactc

SEQ ID NO: 420314 - DNA, 498 bp, Homo sapiens
atctatggatatgccactggatgtggtgaaatgaacacacagatataaaactcaggcatttccacatcttaaagatgaggcagcatcagcacctggaggaaacatctaaaggtgaaggtaccaaccattagcagcaatctggcacacagactggttacagggagatctgagggactgggcagggcaacaatagtgtctgctccaaattgtaacaaaattcaaggaagctaaaaagaaagaattgtcctcatgaagagtaaattttgtagtaaacatgtggtgttgagtctgccaygtacgaggctatgtgatgtaagcagagaacactgcaatagcttagttataagactgaaggttgacagttagctccgttcatctttctagtgattgcaaaaatgaacagaacaatgaacaatatcaatattgatataaattctttattgatcaaaggatgagtgtgtgttttatatatcagataagtattatactattatgtct

SEQ ID NO: 420315 - DNA, 598 bp, Homo sapiens
ataaatgggtctttgttgaattttaacaagccatcaatgcacagattcctggagatgtctgaagttcttcatttaatgtgaaaatactttacacttttccttaaacaacaacaaaaaaaattcaccccactggcaaggagccaaagcttgcacattttttgagtcaccacaggaaaagagaaagatgagagaggccaagcacttccacattcacactggaggaagaatgtgccccacttccccgagttctaatcagtggcagttctggatcctgattaatgagcccttccgcgctcttggcctttctacccccaactactgctctataktttcaattttcactccaaatctggaaatgcctcctcagcgaagaaagcgctgagatgatgtggagggaataaatgggaaacgcagatattagtgctacctggccagcaggaaatttgaactgtatcaactgagatggcccaaagagctgttgaaatgtaagatgaagttcagaatgggactactatgtcaagaatatgaatttgaatttctttttggaggagagagaagggagtcaaagtttgaattaaacgtttatgagtcaatggga

SEQ ID NO: 420316 - DNA, 577 bp, Homo sapiens
agaaactagctctctgctgagatatccattctttttttttttggcgggggggggatacttctaatacttacacttatctttctttatgttgagctaatatgttattcctaagaattaccatttagaaagtctggctttcccttttagttaatcaaaatgatgcctcactaaagactatttcagggctgcccttaagatagttggagaaaactcttccaattgcagttttctcttatgcagtctttgtatattcccttgttattcttctgtggaatgtcttkgagtccctttacccttcatacagttctacaggcagaagttctggaggtcttttaaagaatgaggctatgacttttgcccaaagcctccagtatactttgactatcatagagcaaggacatatatatcagctctgccattcagaacatttacccactcattgatggaaatcagattagcattcttgacagtcttgttgcaatgttgatataccaattttatatgaataggaaagaaggactagaatactgactttgaatcttgtgatacataggggtttattttatcactccacagt

SEQ ID NO: 420317 - DNA, 350 bp, Homo sapiens
agctgttttaaacatgtgaagatagttcttatgtttctcagtgtagctgttcaattgaatgctgtattctccagagaaaacattcctggttcttcctgtcatttgaaacataattggggtcatgtttgttccacaactttaatgaatcattgtttattccgtgtgcttaagatacactttwaaatgtgtcactaagcatgtcccacacagattttaattattgtaaatataggaacattatcacctccttatttatgttacctgtggccagaaaataccgtatgtcctgcaacaattacaatgaaccattctttctcctgtgttgccactcttgactcatcaactgaata

SEQ ID NO: 420318 - DNA, 352 bp, Homo sapiens
gggtcatgtttgttccacaactttaatgaatcattgtttattccgtgtgcttaagatacactttaaaatgtgtcactaagcatgtcccacacagattttaattattgtaaatataggaacattatcacctccttatttatgttacctgtggccagaaaataccgtatgtcctgcaacaattacaatgaaccattctttctcctgtgttgccactcttgactyatcaactgaataaactatctgtctccatatgtgtatgtgtatatatgtgtatgtgtgtataggtgtgtatgtgtgtgtacacatacacatatatacacagagaaaaattcttatcacaatctaatacaac

SEQ ID NO: 420319 - DNA, 561 bp, Homo sapiens
gccgtgggacttcaggatagaagtttctagaggtgagcgtctctgaaaagcctatgcaagtgcctcacaagagtcaagtttaatcatgtgctaagagcagtgagaacagctgacttaaaatatctgattcccactstcctgatgccttttgcaggctccagaataaagctggtccaaactagaagagagatttatacttaaacaaattcaaagttctaattaaaatcttgttctggacatgctaattattgaaataacacaatgattgtgacttacggcaaccaatcccataagaatgtgcagaaaatcacagggcctaagttttcgtccaagaatgaagaaaaattacccattgaataaagcctaaaaggtctgtgggaaacaaaaataaagtcacattttgattagttacaattcatgatttatgctatttcggaagactcacttccagcttctttgcaaacctctgaggaagtggaagaactttggagggtaataactttagggtgatcctagaaaggctagatccagcacactgaggctgccagtctgggcaaaatt

SEQ ID NO: 420320 - DNA, 561 bp, Homo sapiens
gccgtgggacttcaggatagaagtttctagaggtgagcgtctctgaaaagcctatgcaagtgcctcacaagagtcaagtttaatcatgtgctaagagcagtgagaacagctgacttaaaatatctgattcccactctcctgatgccttttgcaggctccagaataaagctggtccaaactagaagagagatttatacttaaacaaattcaaagttctaattaaaatcttgttctggacatgctaattattgaaataacacaatgattgtgacttacggcaaccaatcccataagaatgtgcagaaaatcacagggcctaagttttcgtccaagaatgaagaaaaattacccattgaataaagcctaaaargtctgtgggaaacaaaaataaagtcacattttgattagttacaattcatgatttatgctatttcggaagactcacttccagcttctttgcaaacctctgaggaagtggaagaactttggagggtaataactttagggtgatcctagaaaggctagatccagcacactgaggctgccagtctgggcaaaatt

SEQ ID NO: 420321 - DNA, 520 bp, Homo sapiens
tggttgagctttattttacgaagtttactttctccaatggcataggcacaatagattaacagaaaacctttgttttttagatatttcagaaaatatttctcaagcctctacatgtgaagtgattgagtttcctgggttagtcttactgtctcttctyattttatatatattacaatatgttatttctactgtaacctcccagagtatacttacctcaattctttcaagtggcttaatttgcacaattatttcagagtttaaagaagtgaattagtttgcttgataaggtagagctctactattttatatccaagtaacaattatttaattaatatgtactgaatacttagcatagcacctgccctggagaaatttaatgtataaaatgaaatactactattaataataatgaatacagctacaatttgttgagtgatttctatttgccagacaccatcacaggattttgcaggtctgatgtcaagtctcatacatacccagatgaatactattattattt

SEQ ID NO: 420322 - DNA, 630 bp, Homo sapiens
  misc_feature (1)...(630): n = A,T,C or G
catgctgctacaaaggacatgatttcattctttttacagctacttagtatttcatggtgtatatgtaccacatactacatagtatttcatggtgtatatgtaccacattttctttgcccagtcaaacattcatggacacttaacttggttccatgactttgctattgtgaatagtgccaggcatttttgtccctatctcagagacagtatagcctctagcaaatgaccatttccagtgaaagatgaaactgtgggtagtcaatagcgaatatttctagcagtttatgttacaactgaaaaaggatgaggatagaggatggagtatttgttatgagaggactcaagatgaggctttttattttgtggatgaaatatatagattaaaccataaaaatgcaatagaaaagagttggagaatagcatttcaggcagaaggaagaccatgtgtgaaggttctgaatttagaaataagcatgtccttcaaatgaacataaagatgtccactgtgaagtgtccaaacaagggaaagaggggctcaagatgtrtttggagagagaggaagagtgagatcaggtagttccttcagctcctgttagggattttgaattntaatgtaacataatgagaagc

SEQ ID NO: 420323 - DNA, 568 bp, Homo sapiens
agtaaaaaacatgaatttttcatgagaagtttatttctaaagttgtttcaaatatttttcgcacctgtggggttacatatccattgttcaataaattgcagttgatgaaatctgagcagctaacataaaattttattattrtcagaaataaaggtcagggggagattacctgggcaatgggtatgacactggggagagttttagaaagaactgtaaattctcttgtacatattcttgcttattatgattttcacaaatatcatgcattcctggactctgtagtttgtataaactaagaaagtttctctatattaaagttcttttaagcatttgaaaagagactctggagactctctgcaataaatatccgactgaaaagagaagacataagcatatggcagaagagcagacaagagaaatgagaggtgggcaaaggagtgactgtctatcagacaaaaatgctaaagtctagtatcccagcattcctagggccagggttctgggaggagcagttgatagataatagtagatacttattcctatatcttacttataattgtttttggta

SEQ ID NO: 420324 - DNA, 550 bp, Homo sapiens
agttgatgaaatctgagcagctaacataaaattttattattatcagaaataaaggtcagggggagattacctgggcaatgggtatgacactggggagagttttagaaagaactgtaaattctcttgtacatattcttgcttattatgattttcacaaatatcatgcattcctggactctgtagtttgtataaactaagaaagtttctctatattaaagttcttttaagcatttgaaaagagactctggagactctctgcaataaatatcmgactgaaaagagaagacataagcatatggcagaagagcagacaagagaaatgagaggtgggcaaaggagtgactgtctatcagacaaaaatgctaaagtctagtatcccagcattcctagggccagggttctgggaggagcagttgatagataatagtagatacttattcctatatcttacttataattgtttttggtacttactggctcatttattattttataatttctcatgggagaaagaagctttaattcattagtaaatgaagtgagatgagca

SEQ ID NO: 420325 - DNA, 549 bp, Homo sapiens
tgggcaagctactgaatccctgtgaatttcagttgttaaactgcaaattagagagaataacagctctcacrcaatgttgttatgaggattgaaagaaaacatgtatggaaaatttctggcacacagtagaccctcaataaatgttgatttccttccttcttttaacttgggtatttcagttccaatatcacatcaagcctttggctccttaatttgggtaaaaaccacttgggaaagaaattatctagttttaccactattggctgttttgtaactttttttttttaaattggcatcaagtctgttttagagcataagatagcctgtatcttctttagggtaaaaatacaaactggaagagtgcttttaccttatgagcagtgaggagaaaactggtatttcccttgagaaaaaatttaagattatctgggagaaaaaaaaaaaaaaaaaggaaggacaggaggaaggaagttagttacgcagttaaaaggtctataaatttaaaaggaacaaagtaggagaaggtatttgctgtgttgccctcctgtt

SEQ ID NO: 420326 - DNA, 588 bp, Homo sapiens
aagttagttacgcagttaaaaggtctataaatttaaaaggaacaaagtaggagaaggtatttgctgtgttgccctcctgttaagatgggttaggtattatgcatagaatgacagtcgtctttctctctcccaaaatgaacaaatatatatatttttctatgagactgaatgagtttttggcagraatgtcagttcagtaaatgattttgtgctctttgtaagaggaaatgtgtactttacaactttgacctttctatatttttcatattttgcctggatacgtattacaaccattcctttcagttagcaattaaaatctaatttgcagctgcctttataaaactctcccacaaatgaaaattgtgaagtcctcttgtttgatctcatatgattgatattattcagtgtcatacaattcagtatttgaaacacataaaatgccccaaatatgaagaaaatgcaataaaaagtcactggccattggcaccattgttttaatttgtcacacagtataaaacacaaattaagaaaaaaggaaaggaagaagtagtagtaatttacacctgtctagaaagtttggcactgcat

SEQ ID NO: 420327 - DNA, 588 bp, Homo sapiens
aagttagttacgcagttaaaaggtctataaatttaaaaggaacaaagtaggagaaggtatttgctgtgttgccctcctgttaagatgggttaggtattatgcatagaatgacagtcgtctttctctctcccaaaatgaacaaatatatatatttttctatgagactgaatgagtttttggcaggaatgtcagttcagtaaatgattttgtgctctttgtaagaggaaatgtgtactttacaactttgacctttctatatttttcatattttgcctggatacgtattacaaccattcctttcagttagcaattaaaatctaayttgcagctgcctttataaaactctcccacaaatgaaaattgtgaagtcctcttgtttgatctcatatgattgatattattcagtgtcatacaattcagtatttgaaacacataaaatgccccaaatatgaagaaaatgcaataaaaagtcactggccattggcaccattgttttaatttgtcacacagtataaaacacaaattaagaaaaaaggaaaggaagaagtagtagtaatttacacctgtctagaaagtttggcactgcat

SEQ ID NO: 420328 - DNA, 588 bp, Homo sapiens
aagttagttacgcagttaaaaggtctataaatttaaaaggaacaaagtaggagaaggtatttgctgtgttgccctcctgttaagatgggttaggtattatgcatagaatgacagtcgtctttctctctcccaaaatgaacaaatatatatatttttctatgagactgaatgagtttttggcaggaatgtcagttcagtaaatgattttgtgctctttgtaagaggaaatgtgtactttacaactttgacctttctatatttttcatattttgcctggatacgtattacaaccattcctttcagttagcaattaaaatctaatttgcagctgcctttataaaactctcccacaaatgaaaattgtraagtcctcttgtttgatctcatatgattgatattattcagtgtcatacaattcagtatttgaaacacataaaatgccccaaatatgaagaaaatgcaataaaaagtcactggccattggcaccattgttttaatttgtcacacagtataaaacacaaattaagaaaaaaggaaaggaagaagtagtagtaatttacacctgtctagaaagtttggcactgcat

SEQ ID NO: 420329 - DNA, 483 bp, Homo sapiens
aatctaatctacaagtaaatttgctgccatgtagtggtccctgtcccgatacctctcctctgcctcacgactcccacccccartaattgtgcaatgattttacaaagtcatgcttctgaggagacctagggcagatagaattactgcagaaaagtcctttaattctctggcataggtagcactttgctttcaaaaaaggttaagctttcttttctgtggcatagcagatccgagctggcacttgataggtttgtatctttggtatctctaccactctctctcaaataccatctcatcctatgttgatagtgttctgcctgccaagatttccccactgtcacacaccacaaggcttgtccaggatcacatggatctccgtacattttctgactccctcttcccacaaaaacacttctttcagcagcagataatccaaaagacaataattgtcatatggtacaaatgggaattaatacatgttgg

SEQ ID NO: 420330 - DNA, 614 bp, Homo sapiens
tctgcaggaaaggctgttaggctgtgggtaatagggtcagaaaaaaggagttggtagaaattcctcgaggtgccactctgtggagggaggagctctgagagccctccagtctatttatatattaccacggtttcaatccacggcgttactggagccatagagtggattttggaataataagggcaccagtgtgaaggcagccaaatcaggattctcgaaacgtgatactctttgttttggtgaggttggcasccctctctgcttctcctttctggatgaataaaaaccccaaacatcatgagccggatgtttgaatgtttttaaaccttgtaattttgtaaattgtctgttcctggccccttccccaccctcccaccccagctgaatgtcacgatgttcttcctttctgttgactttcgaatgaagaaactgtggtttgagtttgttttctcagcaaggtgatggcaaaaggatacttatggtgttgaagaattttaattttccctcagacaactaggatgtatagtatattttaaatcctactctccaggatatctgccttctgcccagataataaaattgatcagatgttttgaggttaaataaactgttgt

SEQ ID NO: 420331 - DNA, 614 bp, Homo sapiens
tctgcaggaaaggctgttaggctgtgggtaatagggtcagaaaaaaggagttggtagaaattcctcgaggtgccactctgtggagggaggagctctgagagccctccagtctatttatatattaccacggtttcaatccacggcgttactggagccatagagtggattttggaataataagggcaccagtgtgaaggcagccaaatcaggattctcgaaacgtgatactctttgttttggtgaggttggcacccctctctgcttctcctttctggatgaataaaaaccccaaacatcatgagccrgatgtttgaatgtttttaaaccttgtaattttgtaaattgtctgttcctggccccttccccaccctcccaccccagctgaatgtcacgatgttcttcctttctgttgactttcgaatgaagaaactgtggtttgagtttgttttctcagcaaggtgatggcaaaaggatacttatggtgttgaagaattttaattttccctcagacaactaggatgtatagtatattttaaatcctactctccaggatatctgccttctgcccagataataaaattgatcagatgttttgaggttaaataaactgttgt

SEQ ID NO: 420332 - DNA, 614 bp, Homo sapiens
tctgcaggaaaggctgttaggctgtgggtaatagggtcagaaaaaaggagttggtagaaattcctcgaggtgccactctgtggagggaggagctctgagagccctccagtctatttatatattaccacggtttcaatccacggcgttactggagccatagagtggattttggaataataagggcaccagtgtgaaggcagccaaatcaggattctcgaaacgtgatactctttgttttggtgaggttggcacccctctctgcttctcctttctggatgaataaaaaccccaaacatcatgagccggatgtttgaatgtttttaaaccttgtaattttgtaaattgtctgttcctggccccttccccaccctcccaccccagctgaatgtcacgrtgttcttcctttctgttgactttcgaatgaagaaactgtggtttgagtttgttttctcagcaaggtgatggcaaaaggatacttatggtgttgaagaattttaattttccctcagacaactaggatgtatagtatattttaaatcctactctccaggatatctgccttctgcccagataataaaattgatcagatgttttgaggttaaataaactgttgt

SEQ ID NO: 420333 - DNA, 614 bp, Homo sapiens
tctgcaggaaaggctgttaggctgtgggtaatagggtcagaaaaaaggagttggtagaaattcctcgaggtgccactctgtggagggaggagctctgagagccctccagtctatttatatattaccacggtttcaatccacggcgttactggagccatagagtggattttggaataataagggcaccagtgtgaaggcagccaaatcaggattctcgaaacgtgatactctttgttttggtgaggttggcacccctctctgcttctcctttctggatgaataaaaaccccaaacatcatgagccggatgtttgaatgtttttaaaccttgtaattttgtaaattgtctgttcctggccccttccccaccctcccaccccagctgaatgtcacgatgttcttcctttctgttgactttcgaatgaagaaactgtggtttgagtttgttttctcagcaaggtgatggcaaaaggatacttatggtgttgamgaattttaattttccctcagacaactaggatgtatagtatattttaaatcctactctccaggatatctgccttctgcccagataataaaattgatcagatgttttgaggttaaataaactgttgt

SEQ ID NO: 420334 - DNA, 586 bp, Homo sapiens
ggttataccatttcacattcccattagaaatgtatgagagtcccagctgctttacatcctcattaattttttgtatgaccaatctttataattttagccattccagaggatgatagtgatatctcattttgtgtgtgtgtgtgtgtgtgtgtgtgtgtgtgygtgcgtgtgtgtataacatgtccagatagtttttcttattttctatcatgttgcttatattctttatatattctgcatacaagtcttttactaattatatgttttacatttttttccaagtctacggcttaccttttatttttttgatgatgtctagtgatgaataaatattttaaaattcaattatcaattaatttttctgttactgtttttactttttctgctccaaggaatcttttcctgaccacagcttgtgaaggtctttccctatattttctttagaagttttatatttaacttttattttgataatgtttttcaaaataaattttgtatatgccataggataagggttacggtgaatttttcccttatatattcaattgttcagcacacttttgttagaaagactagtgatacagtt

SEQ ID NO: 420335 - DNA, 604 bp, Homo sapiens
atttacttttaggcttcaaataactcttaagcacattcgcaaatttaaactgatgctaagtgtgttgtatccagcaattttagttattttcagggcagattatgttaggctgccacactgccagaaaaagaattttcstcatctattttttttgttgttgttcttaagttctctagcatgctattcattcttccatttcttctatcataatgagtgtattctttaattttattgttgttattactgtcattttaagtgaactgccataggaaaggaagacaaatatagtcaaattcaagttataaattatgaaaagtcttctaagttacttcttttaaaatgctaatttttaaaatagaagacagcagggagttaaaaaataaatatctgatattcttcattttttattattttgaaagactggagtagattagtgaaaaaggattttatattggactggatatataaaagtttagacaatcacaattaacatgctaatgtgacattttatataattatatgtctaatttgctcttgcagtaaattcagtctttttgagcatgtactgtatgccatatgcccagtaaaaatattcacagaaaga

SEQ ID NO: 420336 - DNA, 604 bp, Homo sapiens
atttacttttaggcttcaaataactcttaagcacattcgcaaatttaaactgatgctaagtgtgttgtatccagcaattttagttattttcagggcagattatgttaggctgccacactgccagaaaaagaattttcctcatctattttttttgttgttgttcttaagttctctagcatgctattcattcttccatttcttctatcataatgagtgtattctttaattttattgttgttattactgtcattttaagtgaactgccataggaaaggaagacaaatatagtcaaattcaagttataaattatgaaaagtcttctaagttacttcttttaaaatgctaatttttaaaatagaagacagcagggagttaaaaaataaatatctgatattcttcattttttattattttgaaagactggagtagattagtgaaaaaggattttatattggactggatatataaaagtttagacaatcacaattaacatgctaatgtgayattttatataattatatgtctaatttgctcttgcagtaaattcagtctttttgagcatgtactgtatgccatatgcccagtaaaaatattcacagaaaga

SEQ ID NO: 420337 - DNA, 604 bp, Homo sapiens
atttacttttaggcttcaaataactcttaagcacattcgcaaatttaaactgatgctaagtgtgttgtatccagcaattttagttattttcagggcagattatgttaggctgccacactgccagaaaaagaattttcctcatctattttttttgttgttgttcttaagttctctagcatgctattcattcttccatttcttctatcataatgagtgtattctttaattttattgttgttattactgtcattttaagtgaactgccataggaaaggaagacaaatatagtcaaattcaagttataaattatgaaaagtcttctaagttacttcttttaaaatgctaatttttaaaatagaagacagcagggagttaaaaaataaatatctgatattcttcattttttattattttgaaagactggagtagattagtgaaaaaggattttatattggactggatatataaaagtttagacaatcacaattaacatgctaatgtgacattttatataattatatgtctaatttgctcttgcagtaaattcagtctttttgagcatgtamtgtatgccatatgcccagtaaaaatattcacagaaaga

SEQ ID NO: 420338 - DNA, 586 bp, Homo sapiens
ttatataattatatgtctaatttgctcttgcagtaaattcagtctttttgagcatgtactgtatgccatatgcccagtaaaaatattcacagaaagaattaggatattttccttagatttgtactaaagaaataagaatattcttctatttttgaatattatgcatattttaaatattatttgaggctagttatataaatgtagattttacaaacgwgttaagtcaaaatatctggatataatataaaaccttttttttttttaactattcttttaaaagctggtatggcagagatttcaggcctctgatcagaacacatatattaacatttcataaagaaagggaaatttggatcaaatttatgatatgccaaatagtaaaataaatatacactagataagaatatttctgtggtttggcccacacagactcattccctggccagctgacaacgactctcttggggattgtgaacatcaaaaaaaattttctttggcactgtcttctctagaatgggcttagctagggctgttgagtgtagcagctgccagggttggtaaccttcagtagataagactagacaga

SEQ ID NO: 420339 - DNA, 586 bp, Homo sapiens
ttatataattatatgtctaatttgctcttgcagtaaattcagtctttttgagcatgtactgtatgccatatgcccagtaaaaatattcacagaaagaattaggatattttccttagatttgtactaaagaaataagaatattcttctatttttgaatattatgcatattttaaatattatttgaggctagttatataaatgtagattttacaaacgtgttaagtcaaaatatctggatataatataaaaccttttttttttttaactattcttttaaaagctggtatggcagagatttcaggcctctgatcagaacacatatattaacatttcataaagaaagggaaatttggatcaaatttatgatatgccaaatagtaaaataaatatacactagataagaatatttctgtggtttggcccacacagactcattccctggccagctgacaacsactctcttggggattgtgaacatcaaaaaaaattttctttggcactgtcttctctagaatgggcttagctagggctgttgagtgtagcagctgccagggttggtaaccttcagtagataagactagacaga

SEQ ID NO: 420340 - DNA, 595 bp, Homo sapiens
ctgagatttttgcagtggaggtttgaggattctaccacaaccaaaagttgtttcgctgccattgtccaatcaatatggagtcctgtcaagagtttattggttacgtttcatagaaatactttgtatatttagtaggacatagaaggcaaatttgtaacttsctccatttccttattattgtttttgacaattagaatcagtaccaggctatcactcagtttcttaacagtgatttaggtgaacaatttgaaaatgttatgtttgtggtattactatgctaaagcactgactacattatggaataatatatttccttatcacttttaatgcagttatacattagctgcccccttttttttttttccattttaatggactgaagttggctttatttcctcgtggagttacaccgttaagcacatccaatttaagacatgaaacaaggaaggtagagttccactgttacaaaacttttattagcataaaagagtaggtcctttcattttactctaagctcatgttgaaaataatcacaattacagtgttgcaatataccacattgcaattaacatactacaaaaacttaatggattca

SEQ ID NO: 420341 - DNA, 595 bp, Homo sapiens
ctgagatttttgcagtggaggtttgaggattctaccacaaccaaaagttgtttcgctgccattgtccaatcaatatggagtcctgtcaagagtttattggttacgtttcatagaaatactttgtatatttagtaggacatagaaggcaaatttgtaacttcctccatttccttattattgtttttgacaattagaatcagtaccaggctatcactcagtttcttaacagtgatttaggtgaacaatttgaaaatgttatgtttgtggtattactatgctaaagcactgactacattatggaataatatatttccttatcacttttaatgcagttatacattagctgcycccttttttttttttccattttaatggactgaagttggctttatttcctcgtggagttacaccgttaagcacatccaatttaagacatgaaacaaggaaggtagagttccactgttacaaaacttttattagcataaaagagtaggtcctttcattttactctaagctcatgttgaaaataatcacaattacagtgttgcaatataccacattgcaattaacatactacaaaaacttaatggattca

SEQ ID NO: 420342 - DNA, 595 bp, Homo sapiens
ctgagatttttgcagtggaggtttgaggattctaccacaaccaaaagttgtttcgctgccattgtccaatcaatatggagtcctgtcaagagtttattggttacgtttcatagaaatactttgtatatttagtaggacatagaaggcaaatttgtaacttcctccatttccttattattgtttttgacaattagaatcagtaccaggctatcactcagtttcttaacagtgatttaggtgaacaatttgaaaatgttatgtttgtggtattactatgctaaagcactgactacattatggaataatatatttccttatcacttttaatgcagttatacattagctgcccccttttttttttttccattttaatggactgaagttggctttatttcctcgtggagttacaccgttaagcacatccaatttaagacatgaaacaaggaaggtagagttccactgttasaaaacttttattagcataaaagagtaggtcctttcattttactctaagctcatgttgaaaataatcacaattacagtgttgcaatataccacattgcaattaacatactacaaaaacttaatggattca

SEQ ID NO: 420343 - DNA, 595 bp, Homo sapiens
ctgagatttttgcagtggaggtttgaggattctaccacaaccaaaagttgtttcgctgccattgtccaatcaatatggagtcctgtcaagagtttattggttacgtttcatagaaatactttgtatatttagtaggacatagaaggcaaatttgtaacttcctccatttccttattattgtttttgacaattagaatcagtaccaggctatcactcagtttcttaacagtgatttaggtgaacaatttgaaaatgttatgtttgtggtattactatgctaaagcactgactacattatggaataatatatttccttatcacttttaatgcagttatacattagctgcccccttttttttttttccattttaatggactgaagttggctttatttcctcgtggagttacaccgttaagcacatccaatttaagacatgaaacaaggaaggtagagttccactgttacaaaamttttattagcataaaagagtaggtcctttcattttactctaagctcatgttgaaaataatcacaattacagtgttgcaatataccacattgcaattaacatactacaaaaacttaatggattca

SEQ ID NO: 420344 - DNA, 595 bp, Homo sapiens
aagcccacccaataactttcccatttccaaaaatttggagaaccataagagctagacctgcttgaccacggaagtcaaacagccactcaattctgcaaaaaaaacccatcctgtggctccaccttgacaagtagtcaattgtcaaccacgcatttctaaagagcatagcctctcttctgacctgtgctgagcagcaattctgcctaaacttggagtccagcctgcagccttgcccagctatagatcccaaagagttgaattggccatccagggagtgtatcttgtgactagtctgaccagaagctactacagtatccagccagaaactatgcctaatagcagatcccagccaccagacagcagagcccaaccagtagccccacctgacatttgagcaaaaggtggtgactcagccaactggagaactcacaacaagttctacccgtctggggttgttaccagctggcccttccagaatcacagtctaggctamatagtgaagatctatccctgctaaagaacacctcttaggctagaagagggggctgctgtctcaaatgtacagacaacaatgcaaagacataataatttaata

SEQ ID NO: 420345 - DNA, 403 bp, Homo sapiens
acatcacacaccggggcctgtcatggggttggggggaaaggggagggatagcattaggagatatagctaatgtaaaggatgagttaatgggtgcagcacaccaacatggcacatgtatrcatatgtaacaaacctgcgcattgtgcacatgtaccctagaacttaaagtattaaaaaaaaaaaaagaattacatagggaatatgagttcatccaatatggagacgtgtttcaaatcattaaatctggcactcttaaattatttgctgaatatatcctcagtaattcaacttttgagattctgttaatattaatatccatctctagacttccttaaataaaggactaagtgaagaaaaaaaagagtgaaaggtctgaaaatctaattttaaactctgtgcatga

SEQ ID NO: 420346 - DNA, 576 bp, Homo sapiens
attttgaaatggctgcagcaggggttacccaaaaaaaaacccagggtttgttctcctggtgaataacaaataactctccaagagaatgcaggttttgatcaaataggagttttattacttggcacaagtaaggagagcactgggtgtattctccaaagcagtgtctcctggagggaaggtgacaggagggttttatggggtgatggagaggggaaagggtgcatcatctcatgtagaggaggagtcccagttgtgcagacgtagtgagtcattatgccagctcatagkttgcatgttatggtaaagaagacacagctctttccagggtaatgaggaaagttcactagggttcatctacaaattgttgggatctgtcagtaactacttctaaccaactaggtgactgcaatccacagtttaggaagaaacaggctgcagggcaggaggcgtaaaacaggctgattgctcaaattgattaaattcctataatccctgaagaccctcccagttggctgacaccagcctactaaaatagccctgaaagttttttgtgggggaaatttgcatctgcagaga

SEQ ID NO: 420347 - DNA, 662 bp, Homo sapiens
ggactcagcttagagtgttttttgcccagctctccacaataaaggttgttgttatccttcaggtctcagctcaaataccctcttgagaggggcaatcccaaaccacccgttctaaattagctgaattatttcctgactcatcatacagcttattccctttataacgtattctaggatatcaacatctatatttttccagctttattgaggtataattgatacataagaattgtgtatttaaggtgtacaaagtgatgttttgatacacatactttttgtatatcatttttatgttttartttgaagcttttattataattattttctttttagagatggggatctcactatgttttccaagctggtctcaaactccagagctcaagcaatcctcctgccttggcctcccaaagtgttgggattacaggtttgagccaccatgcctgccttgtatatcactttaacttttttatgtcaaacaaatctctattttttgtggatatctagttaagaggtttccctccacccctatattgtttatgtcgctttgatgatttcattgttttatatttaaattttttatcaattgagaactattgtatataagatatattatataataaaaatatatttcatatttatgtatatacatttatgtttaa

SEQ ID NO: 420348 - DNA, 578 bp, Homo sapiens
ggcaccctggcttctctgtcattcaaaagagctattaggtctatggactcagcttagagtgttttttgcccagctctccacaataaaggttgttgttatccttcaggtctcagctcaaataccctcttgagaggggcaatcccaaaccacccgttctaaattagctgaattatttcctgactcatcatacagcttattccctttataacgtattctaggatatcaacatctatatttttccagctttattgaggtataattgatacataagaattgtgtatttaaggtgtacaaagtgatgttttgatacacatactttttgtatatcatttttatgttttaatttgaagcttttattataattattttctttttagagatggggatctcactatgttttccaagctggtctcaaactccagagctcaagcaatcctcctgccttggcytcccaaagtgttgggattacaggtttgagccaccatgcctgccttgtatatcactttaacttttttatgtcaaacaaatctctattttttgtggatatctagttaagaggtttccctccacccctatat

SEQ ID NO: 420349 - DNA, 654 bp, Homo sapiens
gcaaaacatgttaatttttaatgtaaataatcaagactcatttagaagaggagaatctcgagtactttggccttagtataaaagtgatatttcttcaactgttttttgctcaaaaagagaactgccattgcctgaaaactcatgtgatatcagatccaataccaaaatattcaactattcttccctaagaccgtgctacacagaacctgagcargaaatgcctgtgggcaattgttctgcgtaatttaaccacctcgttcatagtgtgggagaatgatggagcctgacagaacatccaaagtgttggaaccactgattagtaaatacttgcaagctatgtccgtacttggcccttgatgtagcagagtattgtaacacaaattccaagactgaaagaaattgggagatgcctactatatccgactatggagaggtagaaaaaaagaactaaaaataaaaatactacaattttggatcattaattcagcttgccaattttcactgataaatgataataaatcacaatacaaaaaatactgcatttatctttttatttaatcaaactagttttaaaactgagttccatcctgtaagactgatggaagattcaaccttatccttggggctcccctgatatagtggtacaaagctgct

SEQ ID NO: 420350 - DNA, 539 bp, Homo sapiens
gcccatccccttttcatagcaattaagaaagatgaatatcattaattgggtttccacttacatttttattctcaaggctaacatttgtgtttattactggatcacagataagggtacatgagggaatatgggtgagcctagctccccagtgtgaaatgcaaaacacagaaattttggagagattgtaaactctgaattgccttttatctcccaaaggcctggaacaaaggcaagctagcacaatgaatacatgtcttaattgcttttctcatactgcagacagagcctctgtcctaaatatgactccacgtgcttggggcagrtgactgggtgagccaggaaccaaccaaaactttaaaactaatagtattgttttaccttctaaacaatctacataaaaggccacccattaataaatgcagcaatgagtaaagctgtcattagcttccattgagagacacagatacaacctccctccttccacctacgttctctttcttgccagagagaaaattcagaatctacctgaagcaatagca

SEQ ID NO: 420351 - DNA, 514 bp, Homo sapiens
ggccgccaccccctctgtacaccatggaccctgccctgtgctccataactcccccaggctccctgtccactgcccttcctggtccggcccccttctccaagttggaggcagcaaggactgggggttgtgcagcccagccagcaggagggactgaggccctctaggaggaatgcgcagagtgagggggacctcattccttcagacccactttcctccccactccccttctcctgctgggctaggtctccactggggccagcctcagtttctcctcaacaggtttggggacagcccctcctgccctgcttgccccacactgtctaggctcacttcctgccacagtgtaataaagcctcctaccctgcaaaaaaaaaaaaaaattcagtatggcctaagaggttctctgggctttgagtccaaattaagctcaggcaaattagtacttagaaaaaaaaawtttttaacttgtcattctttcattaatatggaaaatgtggttaggctaacttcacac

SEQ ID NO: 420352 - DNA, 613 bp, Homo sapiens
atgtttatactgggaggtttttcctgtagcccctcgaccaagttagcaacttcttactctgcactataacactttgtacttagctctcattttatattagagattatttctgttgcattgtatcatttacatgtctctttccaccactaaatgataaagtcttaatcattttttattactacatctccacctgaggaccatgtctggtatagtacaggccttagtaatatttgttacatgaataaayggaaatgcacattacagtcagggaacactgattactgagacaaattcttaacctgttctttggtaatgtgagtcagtgtcagatcagaactttatcttcttagattttctgcttgtgctaacaattagacttgatggaccctcagcagcccgtgactctgttatggtaaaacgcagtctaaagcccctcaacttcctttaccagctatagaagtcagctataggagccctggcccattgtttttcctttcctctaatcctaacttaaattaacttttatctcttatgaatgaaacctgactgtgatctgtttacatgtacaggaacttacatagagcttatattcatatttaagtataacattact

SEQ ID NO: 420353 - DNA, 606 bp, Homo sapiens
gctcatttaatcctaattgtaactccatgaagtagttcttatgattggtatgataatttaacagatgaggaacctgaagcagacagaaataactcgtcccaagracacaaaactacttaaccagtagacctgggatttgaactcaggaagtcttatttcatagtctgtgctcttaactgtatgctgtactgcttagggttatataactgctttctctcgtgtcttctaccatgtagtactctacctgtgggaggacatgacaataagtgttatggactaataatatattattagctttgactatataaaacgcttgatgaaaatatgctgggaaaataataaccttttatttaatatctccttttacggataatatttggtgtgctgatttatactttctgcagatttaaactgcctgtaatttctttgtggcattcactccttactcaactcagatcccaggattgtcttccttcttttccccaggcttacttgacagctatgaagcattgcccatgccatagctttcaggctgtgctcttgtgtcttgtgaaacacttgtttatgggcacagagtgatctggagttaaatagaaaaatccctct

SEQ ID NO: 420354 - DNA, 584 bp, Homo sapiens
atgtaaatgctgcccatatccagatatacaaaaacttcctatacctgagaagacctcttgtgcgtcttcccagtcaataccacacacctgactccaccagaggtaaccattcttatcacttttctcaccattgattagtttttgaatttcatatgaatggaattattcagtatgactctttgtgtctggcttttttgctaaccataacgtgtgtgacagctttcaaggttgttgaggcagtagtagtttgctatcttttatggctacacaggatttcactggatgaataaagcataattgattcatctattctactcttgatatacatttatgtagttttcagtttggggctataattattattgaccatgtcttctaytgaacatatgtactgatagttcttgagtacgtacctaaaaagaagtaggaatgaagtgtcccaggtaaggcatgtttaccattatgaaataactataaattattttaagagttgtgtaccagtttaccttcccatcagcaataaatgactattccagttgcttcataactttaccaatatttagcattgttctttttaattttag

SEQ ID NO: 420355 - DNA, 505 bp, Homo sapiens
atcatcataggtcagattaaaaatataaaacaatatggcataataataatatgataaaagaacatattgtgcatacctaatccaaaaatctgaaatccaaaatgctctaatgagtatttcctttgaatatcatgtcagcagtcaaaaagttccagattttggaccattctggattgtggtttttcagattagggatgctcaacctgtattatataatatacattataataataatacataaaatgcttagcaatgtgaacaagcaataaatgtcagctattattartagttcaggacacgggctgcagattttagaaaagttaggaaagtttcatggcataggtgtccccatcttctgtggcttgagatccctgagtttattcaatattgcctgagaaagatctttacctcacttcccccatatgattatttctaccaacaaccaaagacaatagcacatctaagtcaagttttcaaaactccagttgtcttctggtccctgaca

SEQ ID NO: 420356 - DNA, 591 bp, Homo sapiens
ccgtggcaggctaagcactctagtcttcagtaggcaacttctgaataggcacagagggcagctgcatgccttcagaccagcctgcaacctcaggctgagcagcagtgaactcaggagctagagcagtccattcaacctgaaattcctcattggtcacagctttttcagcagcagcctgctcttccttctcaaactcttcaggatctctgtagaagtaaagatcaggcatgacctyccatgggtgttcatgggagatggtgtcacgcatgctcagaacttccatgggccagcctccaccacatcagacccactgagtgaactctcttgttgcaaggaatgccattgtctacatagtgcaaagaagaatgtgttacacagaacaatgataggcaggttaacataagatgcctctgagaggctggtggtcagccctaggatcagtaaacacccgaagatgtggctcccggaaggctgccagtggatctggttagtgaaggtttcagaaatgaagtggccggcaattggaatggctcccgtggcagcagcaaacttcaggatggcctgctggccaggattcctggaggatatgac

SEQ ID NO: 420357 - DNA, 376 bp, Homo sapiens
ggactaattgcctcttaaagcaactgcctaaatcacctctttaattgctaaaacatatttaacaattagatttccagcttgtgaacttttgggggacacatttgaaccatagcatgggtcattagacataatattttaaaataacactaccactttcacccccttggttcccagatccatgagttctgactgtaggagaaacagcaccatatattattaatagttacttgttcagacttttgaagcacccactcccctcgcctaacttccccagttgtcttccagctgtctcagtacctgagtttattargccatttaaccattctatatactcagttgtttctgggtaatgaggcacgtgataagatcagcaatt

SEQ ID NO: 420358 - DNA, 529 bp, Homo sapiens
gcccaaccccctcaccatgtgccctgcaccacctcaggattctgcagagtccccatcagcaagaaggccctcatcaggccctcacccttgaccttggatttctcagcctccataactttttaaaataaactacccagtttcaagtattgttataagcaagagaaaacaaactaagaaagtatgttaatggttaaacaatatataaacatgttacttgtgacaccagtaaaatgttgttaacagggtactaataactttggccaggtgcggtggctcatgcctgtaatccagcactttgggaggcaaggcragtggatcacttgaggtcaggagtttgagaccagcctggccaacaatggcgaaaccccatctctgctaaaaatgtaaacattagtcaggcatggtggcctgtgcctgtagtcccagctacttgggagactaagacaggagaaccacttgaacccgggaggtggaggttggggggcaaagctataaaggactagagtttttatatgtgattgaagtgaag

SEQ ID NO: 420359 - DNA, 529 bp, Homo sapiens
gcccaaccccctcaccatgtgccctgcaccacctcaggattctgcagagtccccatcagcaagaaggccctcatcaggccctcacccttgaccttggatttctcagcctccataactttttaaaataaactacccagtttcaagtattgttataagcaagagaaaacaaactaagaaagtatgttaatggttaaacaatatataaacatgttacttgtgacaccagtaaaatgttgttaacagggtactaataactttggccaggtgcggtggctcatgcctgtaatccagcactttgggaggcaaggcaagtggatcacttgaggycaggagtttgagaccagcctggccaacaatggcgaaaccccatctctgctaaaaatgtaaacattagtcaggcatggtggcctgtgcctgtagtcccagctacttgggagactaagacaggagaaccacttgaacccgggaggtggaggttggggggcaaagctataaaggactagagtttttatatgtgattgaagtgaag

SEQ ID NO: 420360 - DNA, 529 bp, Homo sapiens
gcccaaccccctcaccatgtgccctgcaccacctcaggattctgcagagtccccatcagcaagaaggccctcatcaggccctcacccttgaccttggatttctcagcctccataactttttaaaataaactacccagtttcaagtattgttataagcaagagaaaacaaactaagaaagtatgttaatggttaaacaatatataaacatgttacttgtgacaccagtaaaatgttgttaacagggtactaataactttggccaggtgcggtggctcatgcctgtaatccagcactttgggaggcaaggcaagtggatcacttgaggtcaggagtttgagaccagcctggccaacaatggcgaaaccccatctctgctaaaaatgtaaacrttagtcaggcatggtggcctgtgcctgtagtcccagctacttgggagactaagacaggagaaccacttgaacccgggaggtggaggttggggggcaaagctataaaggactagagtttttatatgtgattgaagtgaag

SEQ ID NO: 420361 - DNA, 541 bp, Homo sapiens
atcactggagctcaggagatctagaccagcctaggcaatgtagcaaaaccctgtctctacaaaaaatacaaaaattagctgggcatggtggtgcatacctgtagtcccagctactccggggtgttgaggcaagaggaccccagctactccagggggctgaggtgggaggatcacttgatcccaggaagtcaaggctgcagtgagccgtcgattgcatcactgcactccagcctgggtgacaaagtgagaccttgtctgaaaaaaacaaaaacaaaaacaaaaaaaaacttgaaaaaaaattacattaaatattagccaatttgtgctgggatcatagcaggaggaatacttaaggccaggaatttgagatgagcctgggcaacatagcaagacatagcctctaaaagaatttttaaaaattagccaggcctggtgsgacacacttgtagtcccagctacttggaaggctgaggcaggaaggattgcttgagccctggtgtttgaggttgcagtgagcatgattgccctccagcctgggcaa

SEQ ID NO: 420362 - DNA, 594 bp, Homo sapiens
tatagaatttttccagctaataaatgaatgaggatggatagaattgagacatcagcatgttgcaaccttctaatgaattaatggctctggacagtgttcactaatggctgctaaacaccaaagagagacacttagacattacgtacctcctaacggaagtgcagaacactacatgtgcattaatcttgacaacaaaataattgaacctgaatctggttaagcttctaaatccaactaccaatttacagcttacaatgacagaggaacatgtkaaacatcacagggatgccatcagcaaactccaaactgtgggagattccaagacagccagtttattcaacattaacttaaacaagttgcaaaggggaggtgggagatatggttgagaaacttacaaatttttttggcacgcaaacattcatttgaccgtattttaaaggcagagcagaatcacattcactttcttatatatatataagattatatataatcactataaacaggctggatttcagagctctaagttcactttggaaacttttgaacagttgaccactagcagcccagcaagctttttccttcccttccaggctc

SEQ ID NO: 420363 - DNA, 568 bp, Homo sapiens
tcaattgctcaataacaagatctgtatctgtgtcctcatctgtaaccaatcacttattttcatcattctctggacaagttacctttttaatcttatgtcttgacttataaaataataacagtaccacaatactgtaattgtataacgataacagagatagtatttagtatcttatacattaaaatgggtaacaacaaaatcaaactcaactgttttttagcacaaagcgtctccaatagtgttttctacttaaattaacttctgggaaataccacgtcttcttgttcttcttataggaaactggacctatatttggaagattcattttccagttctgattcaccaccttgtagttatatgagcttggcaagttacttaattgtttaaggttgagtttctttttctrgaagagcttatatatgggcccaaaccctactccccaccagctgcaaaagcattttatgtgttgtaaaagatttttaaatggaaggttttaacctaatttatctaaatatatcatcctttaggaatactttcgatgaactgttttcacttccttaaatagcag

SEQ ID NO: 420364 - DNA, 569 bp, Homo sapiens
ttactcagcaggaactctgataccaccatatcacagtagcctgggacgaattgaaaagatctcacacagattaccagtcaggtaattctttgaagaaaatgaccaaactttaagtccatttttgcactagttcccacattaaaatataatctcattttagaaggctttagatgatgctttataagttgatttggaaacggagttcatgtttcatcttctggtccaaccgaagacaactccagaaaatacttgctggtggccaacctccagttggttctcgctctttcaaacttattgaagatattccccacgctgtcgagacagcagaacccattttatttttagtgygcagaaattctttcactgtcaaaatgtttcatggacaccaacatgacgtgtggtttgtagttttccagcaattctagttctcttgacagaaccacttctttcccctgtgttagcatgggttctttgagggagcaggacccatgaaactgggcaaagccaatcaccaatcctattcctctggtcacaatgattgactcagagatggccaaatgacctgtttg

SEQ ID NO: 420365 - DNA, 569 bp, Homo sapiens
ttactcagcaggaactctgataccaccatatcacagtagcctgggacgaattgaaaagatctcacacagattaccagtcaggtaattctttgaagaaaatgaccaaactttaagtccatttttgcactagttcccacattaaaatataatctcattttagaaggctttagatgatgctttataagttgatttggaaacggagttcatgtttcatcttctggtccaaccgaagacaactccagaaaatacttgctggtggccaacctccagttggttctcgctctttcaaacttattgaagatattccccacgctgtcgagacagcagaacccattttatttttagtgtgcagaaattctttcactgtcaaaatgtttcatggacaccaacatgacgtgtggtttgtagttttccagcaattctagttctcttgacagaaccacttctttcccctgtgttagcatgggtyctttgagggagcaggacccatgaaactgggcaaagccaatcaccaatcctattcctctggtcacaatgattgactcagagatggccaaatgacctgtttg

SEQ ID NO: 420366 - DNA, 675 bp, Homo sapiens
aaaacattgttttcttccctcagatcacctttaattaagttctcagagttaccatttgacttgacaccatttatacatgccatgaaatcatttcactacttgctgctagtactttttggtgtaatgacatgtataaatttggtcataactagagatacatcaaaatctactatctrgcttccatttcatctcttgaagcaccagaagaccaaatgcttacttcctggtacttttgtataaaaaacaattacataattgtgaaggttattatttttaatcagcacaataaaatcagtaacaaagacaagacatattattcagctctactgtaaaaaactgtatgttggagaggaggtggagcatgacgaccaagtagaaacctccactgttcatcctcccctcaggaacaccaaatttgataatgatctacacaaaaagcaccttcataagaaccaaaaatcagcttaggtaccagcttggccacagtggggagcagcaccaagcaggctcttgtggtccccgattccaggccttggctcttgggtggcatttctggacctgccctgggctggaagagagcccactgccctgaagggtgagtcccaggcctggcagcactcaccacaagctgactgaagagcccttgcggcttaagtgaatgttggcagtagccat

SEQ ID NO: 420367 - DNA, 603 bp, Homo sapiens
aatacctagggggcttaaaaaacatgtaagctgaacatttggttaaatctcaacttttctctccttagattttttgtttctttgatattcttgaatttaaaacttactcaattcatgttctttccagtctactactgaaaatattgttgaaaatgaagacagtaaattttcctttgagtgcagccttggcagaatttttttgatgtttatggacaccttctgtttactgtcatttttcaatagtttgcaaatgaaattctgamcttcttttgagttgaattattaaattgctcaatttttctgaagtgaaagaattatatattacaagtgtaatgtcgacatgtgaatttctacaaagtctgcatgcctaaggacaggtggcctgggtaaagagtcaaattggtagaaccaataaagaataacaaaaagacaaaaaaagcatcatgtcattcattcaacaacttagtggacatatctttgtatattttcaccacctaaaggatgggagaatgcctccaacaaggagaaaatagcaactccttccattttgttctcttgtattgtgggtaggaacctacctcctcaacttgtaacatttccaga

SEQ ID NO: 420368 - DNA, 603 bp, Homo sapiens
aatacctagggggcttaaaaaacatgtaagctgaacatttggttaaatctcaacttttctctccttagattttttgtttctttgatattcttgaatttaaaacttactcaattcatgttctttccagtctactactgaaaatattgttgaaaatgaagacagtaaattttcctttgagtgcagccttggcagaatttttttgatgtttatggacaccttctgtttactgtcatttttcaatagtttgcaaatgaaattctgaccttcttttgagttgaattattaaattgctcaatttttctgaagtgaaagaattatatattacaagtgtaatgtcgacatgtgaatttctacaaagtctgcatgcctaaggacaggtggcctgggtaaagagtcaaattggtagaaccaataaagaataacaaaaagacaaaaaaagcatcatgtcattcattcaacaacttagtggacatatctttstatattttcaccacctaaaggatgggagaatgcctccaacaaggagaaaatagcaactccttccattttgttctcttgtattgtgggtaggaacctacctcctcaacttgtaacatttccaga

SEQ ID NO: 420369 - DNA, 550 bp, Homo sapiens
gaatcataatattattaaatgtttatgaatgtttacaaatgacagcatttttggaagaaacatgccttcacagctttgaacttcattaagaggttctattctggtgacattccagcaggtgttagtttctagtccaaataaattcaktattcccatggatgtgcgataccaggaggctatgattacctttaaaaagataaaaacaaagagataatggaggaaaatatattctcttcataataataatctttccaaaataccattttgtgatggttgccttagacattataaattctgacaaatttatttagatcatttcacttaggaatcagtcacttcaaaattatacattatgcctctatatagaaaaatattatatatgtgatacccaattctgtaatataaataatagtaagtcaatataaaagtatataattaaaatatggtgataatagaaaaatacaaagatttatagaaacatttcataattcacttcatttagatccttgaatttattccttcataaaatatataaaatatattataaaaa

SEQ ID NO: 420370 - DNA, 550 bp, Homo sapiens
gaatcataatattattaaatgtttatgaatgtttacaaatgacagcatttttggaagaaacatgccttcacagctttgaacttcattaagaggttctattctggtgacattccagcaggtgttagtttctagtccaaataaattcagtattcccatggatgtgcgayaccaggaggctatgattacctttaaaaagataaaaacaaagagataatggaggaaaatatattctcttcataataataatctttccaaaataccattttgtgatggttgccttagacattataaattctgacaaatttatttagatcatttcacttaggaatcagtcacttcaaaattatacattatgcctctatatagaaaaatattatatatgtgatacccaattctgtaatataaataatagtaagtcaatataaaagtatataattaaaatatggtgataatagaaaaatacaaagatttatagaaacatttcataattcacttcatttagatccttgaatttattccttcataaaatatataaaatatattataaaaa

SEQ ID NO: 420371 - DNA, 550 bp, Homo sapiens
gaatcataatattattaaatgtttatgaatgtttacaaatgacagcatttttggaagaaacatgccttcacagctttgaacttcattaagaggttctattctggtgacattccagcaggtgttagtttctagtccaaataaattcagtattcccatggatgtgcgataccaggaggctatgattacctttaaaaagataaaaacaaagagataatggaggaaaatatattctcttcataataataatctttccaaaataccattttgtgatggttgccttagacattataaattctgacaaatttatttagatcatttcacttaggaatcagtcacttcaaaattayacattatgcctctatatagaaaaatattatatatgtgatacccaattctgtaatataaataatagtaagtcaatataaaagtatataattaaaatatggtgataatagaaaaatacaaagatttatagaaacatttcataattcacttcatttagatccttgaatttattccttcataaaatatataaaatatattataaaaa

SEQ ID NO: 420372 - DNA, 550 bp, Homo sapiens
gaatcataatattattaaatgtttatgaatgtttacaaatgacagcatttttggaagaaacatgccttcacagctttgaacttcattaagaggttctattctggtgacattccagcaggtgttagtttctagtccaaataaattcagtattcccatggatgtgcgataccaggaggctatgattacctttaaaaagataaaaacaaagagataatggaggaaaatatattctcttcataataataatctttccaaaataccattttgtgatggttgccttagacattataaattctgacaaatttatttagatcatttcacttaggaatcagtcacttcaaaattatacattatgcctctatatagaaaaatattatatatgtgatasccaattctgtaatataaataatagtaagtcaatataaaagtatataattaaaatatggtgataatagaaaaatacaaagatttatagaaacatttcataattcacttcatttagatccttgaatttattccttcataaaatatataaaatatattataaaaa

SEQ ID NO: 420373 - DNA, 507 bp, Homo sapiens
ctttaaaataactttcaagtaaaagaaaatatcaaaatgcagttaacatgattactcctcgatagaactgacttttaaaagataaaaaatgtgtactcaatgacaatgaaaatggtaagtatccaaagctatgggaagtgactacatgtaacgagaagtaaacacagccttaaacgcttttatcattaaaaaatgataaataaaaaataaaagaactaagaagctaggagaaagaacaaaattaactttacaaaatgagaaagaacagaatagaggyaacagtagaaaaaaattaaaaaccaacaaaaatagaaaaatttattgttcaactgagcactggctctctgaaacatattacacataataaataacccattatgtatatatggcttctttgttctttttttttcctcagctcatatataaataggtaaattaaagaactattacacactaatcacaattcaagcaaaaattaggatattccacatggtcagaacttatgaa

SEQ ID NO: 420374 - DNA, 536 bp, Homo sapiens
ttgagtgatttttggaatactgggtaataattaaaaatcatgttataaaaaattttaatgtgatgttagaaactggtggaaatggaaagagcacgttatcaaagaatatgtaacccatggatcaagaagaaatcatacgggaaattaaaatacatttttcactgaatgttaacaagaacccttcaaaatcagtgggattcaggtaaagcaattcttggaggaaaatgtgtagctttaaarcttcgtattagaacatcagaaaggttaaaatcaaaacaatataaaaatgaatgttccaaattttgtgtctaaaacaaatacatatataaaagacattaacacttttttctggttatttctagtggtaagattataagcgatttgcgattttttttttttgagatggagtctcactctgtgggtcaggctggagtgcagtagcgcgatctccgcttactgcaagctccgcctcccaggttcatgccattctcctgcctcagcctctggagtagctgggactacaggcgcccatcacc

SEQ ID NO: 420375 - DNA, 623 bp, Homo sapiens
tgtattggtatatttctatagcccaattcatctaccccatccttgctgcatcattaaaggctatttkaccactcatgttatgctctatgaacaatagctacttgacagtggaaaaaaaaacgcagacgtaaattaaagccaaacaaaccctaaaataccatcaagatttttaaatattaggaaatacccttaagaccttttttaaaacaaaggtgatggaccacactagcagtagtcaagaaagcgtctgttcgctttaacactccccactctggaaagaataacaagcacaagatttacttcacctaaaaactcctaaatataatcacattctgatgtccggcaactcaattctaggaaatttctacacactgaaatatctggattaggcatttttcttccagttctctagagagaataagagtgtatatagccaaaatagatgtgcaaaagacagcaaaacataaaaccaacacagaaaacttcctcgttcaatgtggcaattcattttgagggaactactaacaattccacttgctagactcttaagtgttaaaaataaaagggggggactgtttttcattttctataaattacatgagacctcacaagagaataatttt

SEQ ID NO: 420376 - DNA, 623 bp, Homo sapiens
tgtattggtatatttctatagcccaattcatctaccccatccttgctgcatcattaaaggctatttgaccactcatgttatgctctatgaacaatagctacttgacagtggaaaaaaaaacgyagacgtaaattaaagccaaacaaaccctaaaataccatcaagatttttaaatattaggaaatacccttaagaccttttttaaaacaaaggtgatggaccacactagcagtagtcaagaaagcgtctgttcgctttaacactccccactctggaaagaataacaagcacaagatttacttcacctaaaaactcctaaatataatcacattctgatgtccggcaactcaattctaggaaatttctacacactgaaatatctggattaggcatttttcttccagttctctagagagaataagagtgtatatagccaaaatagatgtgcaaaagacagcaaaacataaaaccaacacagaaaacttcctcgttcaatgtggcaattcattttgagggaactactaacaattccacttgctagactcttaagtgttaaaaataaaagggggggactgtttttcattttctataaattacatgagacctcacaagagaataatttt

SEQ ID NO: 420377 - DNA, 623 bp, Homo sapiens
tgtattggtatatttctatagcccaattcatctaccccatccttgctgcatcattaaaggctatttgaccactcatgttatgctctatgaacaatagctacttgacagtggaaaaaaaaacgcagacgtaaattaaagccaaacaaaccctaaaataccatcaasatttttaaatattaggaaatacccttaagaccttttttaaaacaaaggtgatggaccacactagcagtagtcaagaaagcgtctgttcgctttaacactccccactctggaaagaataacaagcacaagatttacttcacctaaaaactcctaaatataatcacattctgatgtccggcaactcaattctaggaaatttctacacactgaaatatctggattaggcatttttcttccagttctctagagagaataagagtgtatatagccaaaatagatgtgcaaaagacagcaaaacataaaaccaacacagaaaacttcctcgttcaatgtggcaattcattttgagggaactactaacaattccacttgctagactcttaagtgttaaaaataaaagggggggactgtttttcattttctataaattacatgagacctcacaagagaataatttt

SEQ ID NO: 420378 - DNA, 623 bp, Homo sapiens
tgtattggtatatttctatagcccaattcatctaccccatccttgctgcatcattaaaggctatttgaccactcatgttatgctctatgaacaatagctacttgacagtggaaaaaaaaacgcagacgtaaattaaagccaaacaaaccctaaaataccatcaagatttttaaatattaggaaatacccttaagaccttttttaaaacaaaggtgatggaccacactagcagtagtcaagaaagcgtctgttcgctttaacactccccactctggaaagaataacaagcacaagatttacttcacctaaaaactcctaaatataatcacattctgatgtccggcaactcaattctaggaaattyctacacactgaaatatctggattaggcatttttcttccagttctctagagagaataagagtgtatatagccaaaatagatgtgcaaaagacagcaaaacataaaaccaacacagaaaacttcctcgttcaatgtggcaattcattttgagggaactactaacaattccacttgctagactcttaagtgttaaaaataaaagggggggactgtttttcattttctataaattacatgagacctcacaagagaataatttt

SEQ ID NO: 420379 - DNA, 584 bp, Homo sapiens
aaatatctggattaggcatttttcttccagttctctagagagaataagagtgtatatagccaaaatagatgtgcaaaagacagcaaaacataaaaccaacacagaaaacttcctcgttcaatgtggcaattcattttgagggaactactaacaattccacttgctagactcttaagtgttaaaaataaaagggggggactgtttttcattttctataaattacatgagacctcacaagagaataattttgaatcttataagtaccacattttcttattaggagacgttaataatataaacaacaattaaaacaagttttacaaaaaacaatatgaactttccattaattctgaaataatccttttatcaattttcagatggagttatttgtatataaccatttatacaatttgtaactgaataaacacaataatgctataatagatactaaaaaattaagtaaatgtgaagtacagtcaagtctaactttttaagrttcttcatctagctccctaaatctcaagatgatgagaaacatgcttctattgttttcctaataacccgtccactaaaatataggtaaa

SEQ ID NO: 420380 - DNA, 609 bp, Homo sapiens
gacttttctcaattgttccaagaatgatacataactaaaaccgtcctaaatgcactggtgctgaaagttaaaattcattgcacactacggcacaattstctccagaaagccgggtgagaaaggctgctataagttcctcagaaagtgtcactgtactactaggccccagtcacccaaccccaacagcactaaaagaactatagtgagtgcacaaatctagaacttagataagaaaaaagataaatgctttatctccaactttaagcaactaggtatttttacttactaggaatagcatggggctcaactgtctcttgctctgaatagaatgcatttacttaacaaaataaacccacagaactataatgtttctcaaagggaattatcagctcttagaaaatgaatttttaaaaatcagcatattaaataaatattaacttgacaaggcttttcctattgacccttctttagcaaacaaatattcatcttttgataactgctaaatgcaaattttcactttaaaaagataaagataaatattaaaaaccagtttgcccttcattttcgcactaatcaccaattctcagaaactgccttttatattcttca

SEQ ID NO: 420381 - DNA, 609 bp, Homo sapiens
gacttttctcaattgttccaagaatgatacataactaaaaccgtcctaaatgcactggtgctgaaagttaaaattcattgcacactacggcacaattgtctccagaaagccgggtgagaaaggctgctataagttcctcagaaagtgtcactgtactactaggccccagtcacccaaccccaacagcactaaaagaactatagtgagtgcacaaatctagaacttagataagaaaaaagataaatgctttatctccaactttaagcaactaggtatttttacttactaggaatagcatggggytcaactgtctcttgctctgaatagaatgcatttacttaacaaaataaacccacagaactataatgtttctcaaagggaattatcagctcttagaaaatgaatttttaaaaatcagcatattaaataaatattaacttgacaaggcttttcctattgacccttctttagcaaacaaatattcatcttttgataactgctaaatgcaaattttcactttaaaaagataaagataaatattaaaaaccagtttgcccttcattttcgcactaatcaccaattctcagaaactgccttttatattcttca

SEQ ID NO: 420382 - DNA, 576 bp, Homo sapiens
aacctagccaattactgtaccttgtaggcagagttgcaaaatttttgcttccctaagaaacttttccattttttaaatgctttccaaattaagcaggactcacattaactgtgatcttaagtagcagtttagtgaggtttgaaaacaaacttttcattaacgcattcatccaattaaagtgacatagtaggtgggactactgacacagatttaaggattacagctttatattaaaagtcagtccaaagatggtaactcagagttcatttgagaccctttgacttttggcttttaaaaattgtgccccackcgagtaccagatagaactacatttagcaaccgtctcctcctgacttcctggtactaaaagccacaaccacaagggctatttcgtgggtttgctgtaaaacaacatttgctccagtcaactcactggaaaatagactatctctactgagtacccgctgagatgtgggtgctcacgatgtttaaaaacaaaaccacgtgtctacgcggcagcacaccgcaggtttacgtgccgggtttcttcccaggatggagaccggcgcgggctgg

SEQ ID NO: 420383 - DNA, 606 bp, Homo sapiens
cattttacccaagttttcctcccaaaggcctgatacaacatcttccagtcacccaagggagatattgccaataagacagttaagcctcttaattttaagagactagctttgaccccagagtttagttttattacttaaacactagctctgaattatttgctggttagccagtgtgtgtatatgtrgtggtcaccaccttccattgcttctagattaatatatttggcccaaagtctggccttatttgtagtactgcagggccagtcaaatggttgcaaaccccctcaggctgatccttgggattttttccctcctggattgacctgggatccatgaccaaacactctgggaggccctacaggctgtcacaaagaacttttactggtgttttacctgtttatgaaactgtctcatttggtgatgtcaacaaatgctgaaatctccactgaaaatttcatgtttctgccccgaatggcaggcttatgtttcatgggtctccagggtcactgggtggattgttggagagaggcaagcagggctgtttgttgaatgaccccaagagctcaggctgactgatagtgggaacactgggatgctaactcagtt

SEQ ID NO: 420384 - DNA, 596 bp, Homo sapiens
gtatttggcttcgtccaccttgccacaatatcctttcctttatttcacagtacctttataggcctgatttttttcccttctacccatctttaaacattctctgcttaagtcccagaatttagcagagatgcttttttttttttttttwaaaaacagggtcttgctctgttgcccaggctggagtgcagtggtgcagtctcagctcactgcaacctctgcctcctgggttcaattgattctcatgtctcagcctcctgagtagctgggactacaggtgcatgtcaccacacctggcttgcttgcttatttatttatttgatgtagagatggggtttcaccatgttggccaggctggtcaactcctgacttcaagtgatcctccctcctcggtctcccaaagtgctgggattacaggtgtaagccactgcccccagcccatgtatttttttatgtatattttttctgtcctgaggagagatcccctaccttcactgcctggttctctattggagtccatgaaatacgtaatactcctgcctcgaatcctgattcctcctgatcatctcacagcttgaatgtcatgccagtgttggtct

SEQ ID NO: 420385 - DNA, 597 bp, Homo sapiens
ggagtccatgaaatacgtaatactcctgcctcgaatcctgattcctcctgatcatctcacagcttgaatgtcatgccagtgttggtcttccctactttttctgctgtttgtttgttcttttggaattgcaatcttaagtgcatttacagacagtgctgcagtgggggaaatgtgaatggcactctcatcaataccaaaggcacccaggagagacagctgcctagwtcccatggggttcctgaccctgtttctctggttctttgagcagaggagaaacatctttcaggtggactggttttgctgttttatgctgtaaagtataagaagacaaataagtacttttctaaatatagcttcactgttattttctgtgactggagaatcatattctggaaatttttggttttccttgtgttacaagtttccacctttttctgcatcttcataggcattttaactggaagttcagagagactttctcagggactgccatcctgacagctgtgaaaaaggagatgtcctgtttccagctcttcatgtgcacgtttgatttgccagcttacactggaaactgttcaagggaggggaccattgctt

SEQ ID NO: 420386 - DNA, 597 bp, Homo sapiens
ggagtccatgaaatacgtaatactcctgcctcgaatcctgattcctcctgatcatctcacagcttgaatgtcatgccagtgttggtcttccctactttttctgctgtttgtttgttcttttggaattgcaatcttaagtgcatttacagacagtgctgcagtgggggaaatgtgaatggcactctcatcaataccaaaggcacccaggagagacagctgcctagttcccatggggttcctgaccctgtttctctggttctttgagcagaggagaaacatctttcaggtggactggytttgctgttttatgctgtaaagtataagaagacaaataagtacttttctaaatatagcttcactgttattttctgtgactggagaatcatattctggaaatttttggttttccttgtgttacaagtttccacctttttctgcatcttcataggcattttaactggaagttcagagagactttctcagggactgccatcctgacagctgtgaaaaaggagatgtcctgtttccagctcttcatgtgcacgtttgatttgccagcttacactggaaactgttcaagggaggggaccattgctt

SEQ ID NO: 420387 - DNA, 569 bp, Homo sapiens
agtgtttcctaaagaacattccaggaattactagctcttaaagatagatgttactggctgggcacagtggctcacacctgtaatcccaacattttgggaggtcacggcgggcagatcatttgaggccaggagttggagagcagccgggctaatatggcaaaaccgtgtctctactaaaactacaaaaagtagctgagcatggtggcatgtgcctgtagtcccagctactcgggaggctgaggcrggagaatcacttgcacctgggaggcggaggttgcagtaagcagagattgcgctgctgcactccagcctgggcaatagagcaagactctgtcacacacacacacacacacacacacacacacacacacacacacacaaaagatagatattatttaaagaaaagctttcaaggtaaaagaagttcaagaaatactgacttaaacatgactttacaggtttattgatttcaggacccccccaatgtgctgctatgcaatgcaaatatctaaaagtgagatatggaatgtagtctggggactccattttccagcaacatagtgaaccag

SEQ ID NO: 420388 - DNA, 569 bp, Homo sapiens
agtgtttcctaaagaacattccaggaattactagctcttaaagatagatgttactggctgggcacagtggctcacacctgtaatcccaacattttgggaggtcacggcgggcagatcatttgaggccaggagttggagagcagccgggctaatatggcaaaaccgtgtctctactaaaactacaaaaagtagctgagcatggtggcatgtgcctgtagtcccagctactcgggaggctgaggcgggagaatcacttgmacctgggaggcggaggttgcagtaagcagagattgcgctgctgcactccagcctgggcaatagagcaagactctgtcacacacacacacacacacacacacacacacacacacacacacacaaaagatagatattatttaaagaaaagctttcaaggtaaaagaagttcaagaaatactgacttaaacatgactttacaggtttattgatttcaggacccccccaatgtgctgctatgcaatgcaaatatctaaaagtgagatatggaatgtagtctggggactccattttccagcaacatagtgaaccag

SEQ ID NO: 420389 - DNA, 592 bp, Homo sapiens
gaaccagtgctgtaagtgtactgcatcatctacatttcctggaagctctgaactaggcccatagcagaagcctggagccatagggtcggggcagctgaagagttacttccatatcataggatagaattaaaaatctaattcctctcttgccagatgtatgacttgagtcaattacttagattccttttctgtacaataaggataatgatgttatcaaaactaacagtattggctgggcatggcggctcaygcctataatcccaatactttgggaggccaaggtgggaggacagcttgaggccatgagtttgagagcagcctggaaaacatagtgagaccccatctctataaaaaagttagccatgtgtggtggcacatgcctgtagttccagctacttgggaggctaatgtgggaggatcacttgagcctggaaggtacaggctgcagtgagctactccattttagcctgagtgacagagcaaggccctgcctcaaaaaaacaaaacaaaacaaaacaaaaaaaaacaaaaccaaaaaccttacagagacactgtcccaaaaaacaaacaaaaaacccaaaaacgtacagta

SEQ ID NO: 420390 - DNA, 592 bp, Homo sapiens
gaaccagtgctgtaagtgtactgcatcatctacatttcctggaagctctgaactaggcccatagcagaagcctggagccatagggtcggggcagctgaagagttacttccatatcataggatagaattaaaaatctaattcctctcttgccagatgtatgacttgagtcaattacttagattccttttctgtacaataaggataatgatgttatcaaaactaacagtattggctgggcatggcggctcatgcctataatcccaatactttgggaggccaaggtgggaggacagcttgaggccatgagtttgagagcagcctggaaaacatagtgagaccccatctctataaaaaagttagccatgtgtggtggcacatgcctgtagttccagctacttgggaggctaatgtgggaggatcacttgagcctggaaggtacaggctgcagtgagctactccattytagcctgagtgacagagcaaggccctgcctcaaaaaaacaaaacaaaacaaaacaaaaaaaaacaaaaccaaaaaccttacagagacactgtcccaaaaaacaaacaaaaaacccaaaaacgtacagta

SEQ ID NO: 420391 - DNA, 524 bp, Homo sapiens
ttaactattgaaggagcctcttcaatgaatgaaaaaattaaaacatccaagatttatgccccacttccagtctcaccctcctcagaatgaccatgtgctttactctgataccgtattcctttctcttcccaactgatcagactttgcaaaaacaatccagttttcattatttttagaatgtatctttcttatatttacaaaattctcccctgaacatttgaattgagtttttcagcacatttactatgccaaacacatggtaaaaactttgtaaatattgaatrtttcccaaaatgtatttgataactacattattatgttttaagatgattattatcagaattattgctgtgtttaaattatgtataaaaatgtattgctctagaaggaagtggtaggctatgtttttatttgtataatgtaaatataggtaaattaatttttgaaccaaataggcataatgtacattatacaaatggagacagttataaaattgccttagaagtaaaattatactgtgctta

SEQ ID NO: 420392 - DNA, 524 bp, Homo sapiens
ttaactattgaaggagcctcttcaatgaatgaaaaaattaaaacatccaagatttatgccccacttccagtctcaccctcctcagaatgaccatgtgctttactctgataccgtattcctttctcttcccaactgatcagactttgcaaaaacaatccagttttcattatttttagaatgtatctttcttatatttacaaaattctcccctgaacatttgaattgagtttttcagcacatttactatgccaaacacatggtaaaaactttgtaaatattgaatatttcccaaaatgtatttgataactacaytattatgttttaagatgattattatcagaattattgctgtgtttaaattatgtataaaaatgtattgctctagaaggaagtggtaggctatgtttttatttgtataatgtaaatataggtaaattaatttttgaaccaaataggcataatgtacattatacaaatggagacagttataaaattgccttagaagtaaaattatactgtgctta

SEQ ID NO: 420393 - DNA, 540 bp, Homo sapiens
taccctgttctgaaatgattatcctatgagatccctctttgttcatcatcatcttggaaattgtatttgcctgcctctctcttatgttcagtttcctggttccttgaatttatgtgtcttctttcttgatgttctccattgtttttagttgatataatctcgtagttcctactgagaaagaatatgtgtaaggtaaaatttttttgaggcttccattcctgaaaatattttatttctgccctcatttttgattagtactttgacttgatatagaattctaggttgaagttattttccytgagaatttaaaatgtgttgccttgttgccttctggcttctagtgttgctgttgagcacatagatgtcattatggtttttgatcctttgtatgaaaatttcattattacatgccttgggagggaactgttttcattcattgtgcaccatatttggtaggctctttgagtcagctgctttctgtgattttttttctgccatttttttctttgatgatttagatgttgtacacctagagtaatc

SEQ ID NO: 420394 - DNA, 632 bp, Homo sapiens
gacacagtggctcacacctgtaatcccagcactttgggaggctgatgtgggcggatcacttgagggcaggtgttcaagaccacattggccaacatggtgaaacccaatttctactaaaaataaaaaagtagctgggcgtggtggcatgtgcctgtaatcccagctactcaggtggctgaggcawgagaattgtttgaacccaggagacagaggctgcagtgtgctgcgatcatgccactgcactccaacctgggcaacagagtgagactcagtctaaacaacaacaacaacaacaaaaacctatatggtattggcagaggggtagatgcataaatcagtggaagagaacagagaacccagaaatagacccatacaaaatatgtccaattgacatatttggcagaggcacaaaagcaattcagtgaaggaaagaaaggaaagatccactttcaacaaatggtgctggagtaatgaacatccatatgcaaacaaacaaacaaacaaacagaatcttgacctaaatttcattcaaaatggatcagttagatataaaatgcaaaactcttaacctttacaaaaaatacaggagaaaatctttatctctagggctaggcaaagaatccttagacttg

SEQ ID NO: 420395 - DNA, 552 bp, Homo sapiens
gtgatctaaataaatgaagagatataccatgttcataaactggaagattcaataaagatgtcagttcttccaaaattgatttacaaatttaatgcaattcttatcaaagtcccaacaagatttttgtagatatagcatgttgtaaaatatatatgaaaaggcaaaaaagaaaaaaagaacctagccaaaccaattttggaaaagaataaagtaggaggaatcaggctacttgcttctaagacttactgcatagatgcgttaattaagactactggccagacacagtggctcacacctgtaatcccagcactttgggaggctgatgtgggcggatcacttgagggcaggtgttcaagaccacattggccaacatggtgaaacccaatttctactaaaaataaaaaagtagctgggcgtggtggcatgtgcctgtaatcccagctactcaggtggctgaggcatgagaattgtttgaacccaggagacagaggctgcagtgtgctgcgatcatgcyactgcactccaacctgggcaacagagtgagactcagtc

SEQ ID NO: 420396 - DNA, 632 bp, Homo sapiens
gacacagtggctcacacctgtaatcccagcactttgggaggctgatgtgggcggatcacttgagggcaggtgttcaagaccacattggccaacatggtgaaacccaatttctactaaaaataaaaaagtagctgggcgtggtggcatgtgcctgtaatcccagctactcaggtggctgaggcatgagaattgtttgaacccaggagacagaggctgcagtgtgctgcgatcatgccactgcactccaacctgggcaacagagtgagactcagtctaaamaacaacaacaacaacaaaaacctatatggtattggcagaggggtagatgcataaatcagtggaagagaacagagaacccagaaatagacccatacaaaatatgtccaattgacatatttggcagaggcacaaaagcaattcagtgaaggaaagaaaggaaagatccactttcaacaaatggtgctggagtaatgaacatccatatgcaaacaaacaaacaaacaaacagaatcttgacctaaatttcattcaaaatggatcagttagatataaaatgcaaaactcttaacctttacaaaaaatacaggagaaaatctttatctctagggctaggcaaagaatccttagacttg

SEQ ID NO: 420397 - DNA, 579 bp, Homo sapiens
gttcccctgctaatctcttttctaaagctgcaaatacaacgacaatcttgtttgtagctaataagctctaagcacacaaggaccaggcacgcaaacatgttccataccacctgtgcaagacattgtctgaccccatcaactgtaagctcctggmaaccttttaagaaacaggattcaagctgcaagggtgaggggagtcttgatcctttgggaagctgagtttttctggttccagtccacccattccaggcaacctgagcacatagtcattgactgaataatcctgcccatccctctccccaagaacattgtcctgaagactcactcagaggaagatcacacctctaataaaaacctgcttttggaaaaatttaaaatgttagctactgaaaggcactcctggggctagagggggagcttgtcttgtttcttccttttcaatctggtgttactttacaataaactcattggtctattccatgggcttggctcagccttccttgcaaattacttcctgcaaaatcctactttgcatattcgaagcttatccttaactcttccctgttgcacttctgctat

SEQ ID NO: 420398 - DNA, 584 bp, Homo sapiens
ctcttggggtctggattgagacccctttccagtaacacagctacaccctgctttaaaaattgtaatggcgtctcaaggccaacagtgtaagggactaagctcttatcctgtgtggtataaaagacttcataatctgacccaggtacctctctttcctcgttttccaccatcccttattatgttcgctgtggaaaacagttacggtaactaacttgtcatcgtttccctcaaatggctaatggtattttatcactatgtgactcagctcagatttctgcttttccctagggcttcttaatgctactggctcatcagaatcacctggtgayattttttaaatgtttacttgtttatatttcaaaattttttaaattttgaaattgttttagatttacaaaagagttgtaaagatagcacatagagttcctgtctattcttctttagcttcccctaatgttaacatttaaacttaactgtggtacatttatcaaaacgaagaaatcggcattggcattttactaactaaactatagacttcctttggattctgccagtttttccaccaatgtcctttgttcaaagat

SEQ ID NO: 420399 - DNA, 530 bp, Homo sapiens
acaaaccattccactttcaaatcgctcaggtgatttcacagtccttttttctcttgaatagaaatcggagcaatttccatttattagtgtaatatccccaaacctcaaggaatgagtccagtccatctgtgctgagtaaacctgcagcagtgctgggttctagcaggcactctgctgaatggggccctaaagtcctggctgctacccggccagtttctttctcacatcctagcagattgtgagacagcgggggcaagtgtccttgtgttggagctgagatactagccattctcagcacctacatgtctttgaacaaatctccaagcttgtstgaactttgttttatttctaattcagtccataatcatgtattgagcattatatgaggccctggggtatatatagaccctgctctcaggatggctcagccaagttggaaagatgaaaaagtgaaaagtgtggatccatattagtaaaggcaattagaatgcatgagattgcaaagttcaacaaaactgacaaaactttag

SEQ ID NO: 420400 - DNA, 604 bp, Homo sapiens
ctatgagttttaccctgatagcaaaataagacaaagacatcacaagggaagaaaagtatgaccagtaagtattatgaatgtagacccagaaatcctacacaaaatactagcaaacaaaatccagcaatatgaaaaaaaaagtatacctcatgactaagtggaattagcccaggaatacaaggttagttttcaacctcaaaatcaattaatgtaatattctatgtcaataggataaaagaccaaaaccacacatcatgatcatctcaatggatcagaaaaagcatttaacaaaaatgtaacaccacttmatgatagaaacactcaacaaaggccgggcgcagtggctcacgcctgtactaccagcactttgggaggcctaggtaggtggatcgcttgaagtcaggagttagagactagcctggccaacattgtgaaaccctgtctccactaaaaacacaaaaattagttgggtgtggtggcgggtgcctgtaatcccagctgcatgggaggctgaggcataagaatagcttgagcctgggaggcagaggttgcagtgagctgatattgcgccacttcactccagcctgagtgacagagtaagact

SEQ ID NO: 420401 - DNA, 531 bp, Homo sapiens
cgtctgcctcccgggttgaagggattctcctgccttagcctcctgagcagctatgattataggggcccaccagcatgcccagctaatttttttatttttagtagagacggggtttcaccatgttggccaggctggtctccaactcttgacctcgagtgatccgcccacctcagcctcccaaagtgctgggattacaggcatgagccacctcrccctacccatttttgttttaaaaaataaaaatagatgtacccagaattcaggtcaaagttaggagagtacaacaaggaggatacagaaaaaatgataggtgtatggtacaacatggatgagtcctgaaaacactatgctaatgaaagaaaccagtcacaaaagaccacatattatatgattctagttacatgaaatgttcagaatgggcaaatctataaagacaggaagattagtggttatctaaagttggggtgggaaggaaggagaaaaggggattgattttagtggaagaacaagaatgttctgaaattgattgtg

SEQ ID NO: 420402 - DNA, 499 bp, Homo sapiens
tgcccagggttcctctcactccaaatgttccccctgctctactggtccaaccacccactctatgccaactcttcccaaatctctctctgcacagaatcccagggcatgtagtccaaaacctacagaccatctccatttgaataccctacaaggagctcagcctcaatatgtccacagctgaactcattatctttgcaacctcacccctctttcaccttcctggacttctccctcagtgagtggcaccaatgactttcagtgaggacctctccccatccaataaatgacaaagcttcttggctttatctcctaaatctcttccatcgtcactggmcctgctgtagtttgggccattgtctctcacctgaactcctcctcctcttcctatgggatgtctctactgcagtccctcatcactccatccacactgctgctatgttttagctaaacacaatgcctcaattccctcaccgtcctgctgaaaaccaccccgatggct

SEQ ID NO: 420403 - DNA, 535 bp, Homo sapiens
tgtagagttttaggaggccattgattagctatcccctgttaacaattttataagcacagattacaaagaaagcttctgaaaatgaactggaccatgccatgaggtggcgagatccttctcattagggctgtttcaggcaaaggctaaataatgccttatcatagaagcaattcacgctrctcaggcattggaactgcagcttaatgagagtctatgtttcatccacggtggtcacaggattctgtttcagaagtccagaggtgtctatgctatggggttaacagcacatttacctgtgtcatataaaatataatgtaagttatgttattattctgatcgtctttgtagcatcttatgctatgttgttagacactataaataaccatcaagtagaattaaggtgccagataaatcatacttttcagaggcaaagccattattttaatttgcatacttgacctccttggccagtaaactttaatttagagatctatgaattttctgaaagcgagggcagggagaagcttcagggcat

SEQ ID NO: 420404 - DNA, 591 bp, Homo sapiens
tttgtggtcactacttctcccacatccagctttgtttacagaatatgggacaagtatatttgacaaatytaaattttaccaagaaaacctcactgttcccttaatttttacctaacactaaacttcactttataccttgtgcagctttagccactgttagctttatttggaactattttaatattaatattcattatgaaatggttaaaagacaaaacgtttgtaatttatttttctgtagtattagcaaaagcatttgagccaagtgtccaatagggtcaaaaaaaaaaaaagaaagaaagaaaaggttaaaatatccttgggctgggcacaatggctcatgcccactgaggcaggaagataagcttgagcccaggagtttgaggctgcagcaagctatgatggtgccactgcattccagcctgggtgaaagagtgagacctccatctctaaaatttaaaaaaaaaaaaaaaaaaaaaaaggtttaatgtccttggactcaaaacaaggagccccgacagagaggctgtagctctccataatgtctgttgcattgaatctatgactgttgtcctattaattagtacggtt

SEQ ID NO: 420405 - DNA, 576 bp, Homo sapiens
tgtttttagagaaagtataaagatgaagcagagaagatgctttctaactattctaccatagcagayactcctgaaattcagagaattaagacaactcaacaaaacattagtgcggtgagtagccattacttcttttaagttgccaccttgaaattttgttttgtaagaaatggtcttttttcctcattgtctgatgttttctgctgtcttagttgaattttctgtcaagtgtattatctttatttctttaaaataataagaatactgataatttttacaaattatcatttttcattatttttttggaattacaaattcaaaatttcctcttcggtataaatgacagttattaactaaattttaaaatttaactcaggaaagaagtctgtcttctacacagattttactttgaaggtgaaaatagtcatatgaagtgattttattcctggttattgattgtttttactgataatatgtctaaccatttactcattcttaataaatttctaaacttctatatttttattttgaggaagaggaattgcatcagcacttttttttttaacttttatttta

SEQ ID NO: 420406 - DNA, 436 bp, Homo sapiens
agtaagctgtagactcaagagagctgatggtgtaagttctagtccaaaagccagcatgctggagacctaagaaaaatgaatgtttcagttccagtccaaaggcaggaagagactaatgccccagctcaagcagttaagcagaaggagttccctcttactcaagagacattcagmctttctgttctattcaggtcttcacctagttgattgaggcccatccacactagggagagcaatctgctttactccactgattcaaatgttaatcttatccaacagcaccctcacagacacacccagaataatgtttgatcaaatatctaagcactctgcagcctggacaagttgacacacaaaattaatcatcacaccttgatttacaatctaggctgtacactagaagcacttgagggttttaaaaatctggatgtcaaat

SEQ ID NO: 420407 - DNA, 608 bp, Homo sapiens
acattgttatttttttgcctgtggagaaatgatgattgaaaaaatcgtttatgcttctgggcttacagagtttcaagaactgtaatgcrtttctttttgttagcctggcatggctgtataaattaacatggaacggttttatctctggcatgataaggatgaagagaacggatttatgtgataccaaaataaccaggcagttccattaattcagggaaacaatgaggagactgagggaagccattagccccaaaggtttatttaactgagtgatctggtttcttctaaaaagctgcaccatttgtcctgggtatattacattcagttagagactgcgcctaagaatgcgtccattggctgcaccattacatttatttcagtgaacttccctttcaccttcattcctatcagaaggttgactatgtgaagatatctgcagagaggtaaacatagccagagaaaatgaagccatctgctgccatcttcttagtaggtgctcaataaatttatattgaactgagctggagaattatgacttcactttctgaatatgtgcttttcttactaagcaggaaaaccaaagtgacatctatgtattttcaactcag

SEQ ID NO: 420408 - DNA, 547 bp, Homo sapiens
ctccacaacaacaacaacaaaaagtaactgtaaaatttatctcagtgaaaatcaaacacttattgaattctgtctggtgcctaaggaaggctcagagcctgagtcctgttctctcattcttttttttttttttttaaaggaatggttagaaggcagctaaatatccacagttatagacatgctaacaccaaatagagaattcttcctttcattaatcggaaagagtgaaagacaactgaagagacattaactttctgcccaagtgatacattatcatttaaagtaatatttatatcacaaaatcacctcatattcaatgttggtacacatgcaaaatttgggagaacattggtaaagtggaaaaatatactactctaggcagcagatattgattctggaaaagattttgtcaacctcatttgcaaacacagtcaagtgctgcaatttctctgtgccttaartaactatttgacaatggggaatgtggattttgtatcaaacagggtgatctaagttaggctgtggttacaatcaccaaatcttactg

SEQ ID NO: 420409 - DNA, 396 bp, Homo sapiens
atgacaagaccataacaaaagggacatcttgctatcacatgaagactgcctaggtcattctttgttgggctcatgccattcaaagtgatgtggttgattgaaatgttatctaagcgggtctagatgtagctgggaaataaggcatatccttggcttatgagcagctttataatgttctgtgttttgtgtcttccaactagaatacaacttttccaaaaacaggcactgtattatactstactgtacttctctaagaacatagcacagtgctggccacagagcaaacattaagtacagacttctgatggattcatttcagctgtttgtaatgcttatcacacaaggatttctctcaaaaaccatcctcactgacagctacttttgcttcccattttt

SEQ ID NO: 420410 - DNA, 605 bp, Homo sapiens
ctcttgtttcttttggctcaggactgagggaatagtcttgtgtaatagatttacccagggaaggcttcacctgatgcaggcaagactggcctctgggtcaccccgttttggtttaacaaataagaagggtctcaaagagaaatgttgttggtactctgagacttgtatttatctttaatttctggaagacttaggataagaatgcaacacagtatctctggggagatgagtatgggatgagagtaatagctattaaaataagagaggcgttcagggaaatgactsgtcatttgatgctttttttttttcccttcaaaaatctgcctaaaagagttacctgattcatataccactgagatatctaattgtgcctatttttaagaacttatgcatctacctatgttttcctgcaaagacttaattggataaagaaatagctttaaccctaatggtcacactaatcatcaagattgaattatgggttaatcactgacaaccataaggaaaaaataactttttaaaaattctatatacctccttctaaagaaaacaaggcaagggtataatacctggtgaaatttttttctatatagcagattttctag

SEQ ID NO: 420411 - DNA, 539 bp, Homo sapiens
aatgaatttatcacttatctgagatagagcaggctcagtcattggtgaaaagtattcaagtaaaaagccattctgaaaaagatgcatggatggtgacaaagtgagaaaggaaaggttgactgtttgttcaagaaatctggcagcaacaacaggtaggaaatatatgcccagctcaagggaacaggagaaagtaatttttaaattagagaagcctaagccaatttgttagtagaagaaagattaaaaatccaagagagaagatataatgatagagcaatgtccaaaagctgcctttgaggcctttgcgtattttcaggggaataatgtctttccttattatttcataggwtttaaaaatagtatttcttttgatgataaaagtaacacatttctcagtgaaagcaatacagaaaagaaaataagaacaacttttaattttccatccagtgataacccatcttaatctttgagggatgtatgtttgtgtgtgtgtgtgtgtttgtgtgtgtgtgtatcacaaaattatgattatactatat

SEQ ID NO: 420412 - DNA, 614 bp, Homo sapiens
gtttcatttcttaaaataaacacatatcaagacatttgcacttggtcaaggtgtttttgtctgcgactgattcttgctaaaagcagcattcactggaattttgagggttgctaatggtatgagcttagatttgaagtggcatagacctggcttctaattcagctcccattgtttttacccgttgtgtgaacgtaactaagttatttaaccacttgaggcttctgtttcctaatttgtaagacagaagtaataatttttatcccacaggattgttaggaggattaattctccatcaaggtgcctagaaattgctcaataaaagactatctttgttgttaataygtcattcatgatatttaatgccactggttactaagcaccaaatgctataggataaagtcatcttctatgtaagtcatggactgggcaagtctatttagcttattacacgccagaaatgaaacaattaaccattgtttttattttattatgtcaatattttctgattactaacattagcatcagttttgccacaattagtaccttgactagatgcaaatagcaaattataattatgccattaggattacttgaaaagttttcaagtgactcag

SEQ ID NO: 420413 - DNA, 614 bp, Homo sapiens
gtttcatttcttaaaataaacacatatcaagacatttgcacttggtcaaggtgtttttgtctgcgactgattcttgctaaaagcagcattcactggaattttgagggttgctaatggtatgagcttagatttgaagtggcatagacctggcttctaattcagctcccattgtttttacccgttgtgtgaacgtaactaagttatttaaccacttgaggcttctgtttcctaatttgtaagacagaagtaataatttttatcccacaggattgttaggaggattaattctccatcaaggtgcctagaaattgctcaataaaagactatctttgttgttaatatgtcattcatgatatttaatgccactggttactaagcaccaaatgctataggataaagtcatcttctatgtaagtcatggactgggcaagtctatttagcttattacacgccagaaatgaaacaattaaccattgtttttaytttattatgtcaatattttctgattactaacattagcatcagttttgccacaattagtaccttgactagatgcaaatagcaaattataattatgccattaggattacttgaaaagttttcaagtgactcag

SEQ ID NO: 420414 - DNA, 542 bp, Homo sapiens
cctttactcatgaagtatttttcaatttcaattctatcaccaattctaccaccctaatccaagccaccactgtgccacatgtagaggcccgtgatagtacattatctgttctagtttcacccccccaccccaacccttctccaattcattttccatgcagcgggcagatggctatgatcttgtcaccacccactacctatctctatcccttgctattgctcttaggatgtttctcactgttgtacctattccatttagctatgayggaattaaatttattttaattgctgtgctcagatgggaagaaagactgataaacaaataatgagataaatgagggaactggaaatattcagagattggtcattttgcttttatgccctgaagcaatgatatttcacattaaataaatttttttaaaaaaggcagtttcttctccagggcaacattatctttgtttttttatagagttcccatgattactcattggtttggtattctggagtttgtggactttattcagaatatgagaaacctaattc

SEQ ID NO: 420415 - DNA, 609 bp, Homo sapiens
ctctgcctttctttctgctattctgggtttcccttgggtctcagcatttttgggctctcaaaggggctggggtggggtgaaagtctgtgtggcagtcatccaaatgctgattctgcactttttatgggctcctcagaggccccatctcccggaggctttctgagatggatggtgccttctacagctgacctctcctctctctcatctcccacccctggctgactactcaacagtttcttaggggtgcagttcccatgacacgggaggcttccaaggcttccatttgatccacaaaacactcacatatctttgtcatacaaaatgtggatgttgtaggctgtgccactactactgtgtcatcttgctctgtgtcgcagatgctccagctatttctcactcagagagaagagggaccagtccccatgtttgcataactccaaacgaactccttgagatatatgtgaaactctccctagagctgtcctrtcttcttctactctgctgtctggaccagcatggggctaatgaactcctatggctcagtaagatttcctcagtataggaagatgccagtcttccttttcaatacatactccaatgtatatgaat

SEQ ID NO: 420416 - DNA, 571 bp, Homo sapiens
ttttcatttgtttaagcaggaaaagtagggtgccaaaataaagctactccagaagaacatctcaagaatgtttatgaaaactgttacagctacacttattagagttaaagcatagttctaatttgtcatgcagaattccagggaagtgagtaatttctatatttctctaaatgccagtgtttcatattttgaggtaacaattttgcttgtaaatatgaaactagcaacatagactgcaatgtgacaaaatatatcagagattcgtcattatctggcaatagttgttggatgtgtttgctgccatgccacgaggtttcttaggaaagtaagttggggaatggaaagatttatcaccccaagttatctgacaataggcttaattttaaaaaattattcaaattataatatttctcagtggttaggtctttgggggatggcttcycccacccactcctcacaacccagagccttctctagctttccttgttcctgtctccatggaggcattctgagactctgtagcattttcatccatagaagttcaggctgatttcaagattgtaaccacact

SEQ ID NO: 420417 - DNA, 559 bp, Homo sapiens
acactgggggcagagatagagcacatttgcaygacaattggtttgtcatcatactctttcaacatctaagttttaagtatcaaattcatctgtgagaaagaaatctattatgatttgcattttttgcaggaaccctgataacagacacagttttcactaatatgtatctgatacggtttacctctgtgtccccacccaaatctcagctctaattgtaatctccataatccccacatgctgagggaggaacctagtgggaggtcattggatcatggttggaagggggtgttccctcatgctgttctcacgatagtgagttctcacaagatctgatggtttcctccttcccgggctctttctcacctgccaccctgtaagacatgcctgcttccccttccaccatgactgtaagtttcctgagacctcctcagccatgcagatctgtgagtcaattaaacctctttcctttataaattacccagtcttgggtatttctttatagcagtgtgaaaacagacgaatacagtatcattttatcctaaacagacacttttcagaa

SEQ ID NO: 420418 - DNA, 559 bp, Homo sapiens
acactgggggcagagatagagcacatttgcacgacaattggtttgtcatcatactctttcaacatctaagttttaagtatcaaattcatctgtgagaaagaaatctattrtgatttgcattttttgcaggaaccctgataacagacacagttttcactaatatgtatctgatacggtttacctctgtgtccccacccaaatctcagctctaattgtaatctccataatccccacatgctgagggaggaacctagtgggaggtcattggatcatggttggaagggggtgttccctcatgctgttctcacgatagtgagttctcacaagatctgatggtttcctccttcccgggctctttctcacctgccaccctgtaagacatgcctgcttccccttccaccatgactgtaagtttcctgagacctcctcagccatgcagatctgtgagtcaattaaacctctttcctttataaattacccagtcttgggtatttctttatagcagtgtgaaaacagacgaatacagtatcattttatcctaaacagacacttttcagaa

SEQ ID NO: 420419 - DNA, 617 bp, Homo sapiens
ccaggcactattctaagtgctccagctgttttatctcccacagttttgctcagataggagttccaaagctggagctggaagactcatatttttagaaatgttacagttaattctgaggtgggtcagattgagattcatggctatgcattaatgtttaggtggtgactaaccactcagggttttagagacaaacagaccttattctgtcactcactgactgagcgtggccaagtctttcagcctctctaagcctcagtgtcctcatccataaaatgggaccaatcgtagcatccacttctgagaactgttcagaagtggaaatgagctagtttaggtggctgtgtctggcataygccaatggtttgataagtattagcttgtgcctttattaggccaactcctttttgttaggtgactgagaaaccaaggaccttctgccctttatgcaccagtcactattagtttaaatttgttgctcttccatccacatgattcattccaaatttgaagtgttggagaaagggagttagtatgtcatagaaaaatctctgtttttggctcagcaggactgagtttgactccatgtaactgtctgagtcttagtttcctcatccata

SEQ ID NO: 420420 - DNA, 638 bp, Homo sapiens
taatatcaaacgatgtacatactgtataactggagaagaaagagataaagaggcagaagaaatacttgaggaaatgatgacttaggttttcctgtattcatgacatcaagccacagatccaaggagattagagaacaccaagcaggatgactacccctcccaccccccccaaaaaaatcacacttaggcatatcatattcaaatagtaaaaaccaaacaaaaaaaaaatcctgaaggcagccagagagagtttaaaaaacactttatctaaaagtaaatmagaacttatcttcttgtcataaaccatgcaagccagaagacaacagagcgacatatttgtgttcacttctgtcaactcagaatactatacccggtgaataggaggttattcttctaaatgatttatgtgaacaggtaaaaatattttctatttagagccatattcttacagactgtttttgttttccaaatgaaagtcaatacttgaatagatatgttttgtactcaaggtgatgttccacaaatatggtttaatgaaagcctaattagttgtcattaaggtatttatttagggaaaagcttaggcagtcagcacaatccctatgtactaagctagaattagcagaaagaatgcttat

SEQ ID NO: 420421 - DNA, 570 bp, Homo sapiens
ccttgaggttgtttcctcataacttgattgttactwgaccttcacaccagcttctgtcaatcgctctcacctgagaaggtgttatttcacatctggtgctaattgtagataaacagagttctctgtatctatagggcttagttctactttccacaagtttgaagtcactcccaggtttaagatgtcggcttccttcaggtgtgggattcaggaaaggattccttcacctgaaaagtagtgtgaggagaaaatgaaccttctgcctgaattacaaaacacctttcacagccagcacatgttctaaagccaacactaagccctttcagtaaccatcttagctattcatccttcttagttactcaccatgcatcggaattgatgggtgaaaggctctgttttctgatttttctctctcttaatattaaactgtttgcatgacttgtagtttataatattaataaatgacttaaacaaggtagtcatcagctacatattaatattctaaccttgattaaattgaagaggctgcccttaaaaaatatttttaagaaatcaaattgcgggggaggg

SEQ ID NO: 420422 - DNA, 570 bp, Homo sapiens
ccttgaggttgtttcctcataacttgattgttactaraccttcacaccagcttctgtcaatcgctctcacctgagaaggtgttatttcacatctggtgctaattgtagataaacagagttctctgtatctatagggcttagttctactttccacaagtttgaagtcactcccaggtttaagatgtcggcttccttcaggtgtgggattcaggaaaggattccttcacctgaaaagtagtgtgaggagaaaatgaaccttctgcctgaattacaaaacacctttcacagccagcacatgttctaaagccaacactaagccctttcagtaaccatcttagctattcatccttcttagttactcaccatgcatcggaattgatgggtgaaaggctctgttttctgatttttctctctcttaatattaaactgtttgcatgacttgtagtttataatattaataaatgacttaaacaaggtagtcatcagctacatattaatattctaaccttgattaaattgaagaggctgcccttaaaaaatatttttaagaaatcaaattgcgggggaggg

SEQ ID NO: 420423 - DNA, 574 bp, Homo sapiens
gggcacgatgtaaaagtcatgaggaaaactaagccagaaaagactttgtctccaaaaccaaggttaaatttaaaaattccttcaaaaaaagattccactgccttgcactgaggatcctgtaaaatagyacccccagcaaccctaggaaaggggttatgggtaaggaaatgacatcagaacacatcagaaagcaccgaccatgttatccttgaccactgctggcctcagtttattctgaccacaaatgcaaagtcaagaagacagctttgatgttcctttttgtttctttgggatggtatcttgagtgatcgtcttttttcttttttagttttttattatacatacagaaaagtgcatgaattctaagcctacagctcaatgatttatcctaaagtgaacacactcatggaacaactacctagctgagaaatagaacatactgaagacccccgaggaccctatgtccatgccctttcccaaactctacccactccttacaccccaaaggtaaccaccatctgatttctaatggcatagaataccaacttgcctattttaacctttttgtcattgc

SEQ ID NO: 420424 - DNA, 527 bp, Homo sapiens
ttggctggaacatagaaatgggaaactattctcttctctggtggattcccagtgcatatagtaaacactcaacatatacatgttaacttaagacattaatgaatatgcccagtgtgttaagagagcctgcttcgtgggaaggcttargcaagaggttgggagagattgtcatgggaagagtagattgaagtgtcaaaggaggacatttagttccacttagtttgggtttgttggtctgcatagccaagaactaactactatttttaattttttcaaaacatttaaagaaattttttaagttaaaaaaaatcaaatagaacagaattatatgaaacaaaacgttcaagcctcccccccccaacacccatttccccaaagtagccattgctaacagatgggcatatattcttccaaatatgttcaaatcatatacaagtatattggagattttatatatatataaatgatcccaatatataaatgagaatcatcctgagcctactatttggcaaatcacattttccatt

SEQ ID NO: 420425 - DNA, 578 bp, Homo sapiens
catctgttttccttcttatgaaaccatgcatttcatctaaagttgtaaatcagcatttgttgtaactaagcaaaacatgagaaaagggctgacgatggtgcaatctgccagcagagttctctaccctgacagtacattgaaggtcaaagaaaaacactgaacaacaaattaatcacagccaccagctaacggagggataaaaygattacaattaatacatacacacaactacaaattaagaggaatgcaaaggcgacaagcaaaaagtacacaaataaaatttttcttatttcctaagaattgatggtgagatggccaaaagcaattgtaaacatggttcagttggcatatttccctctgtccatcaaaaacaagttggcttgtttcctgggcagtgaatacaattgcaaagaataaacaaggctttgcttaaagcaggaaacatgtgattaaagatagtacaaatttcagagaaagtgtcagaaattttggaacgtgtttaaaagaaaatcaaaggcaacataagaagacaaatactggtggtatttggtgcaatgaaaagtacagtttatgtggaa

SEQ ID NO: 420426 - DNA, 616 bp, Homo sapiens
gggtggtaggatgtgccaccaaaactggaattttctttttgacataatcaagctttaaaagattgagacgacttgaaagtgcaaattcagattgtaactatacattttctcaaaacagtaagttcctttgagaggatggaggctaaaggcatgggggtccattttctcagtgcacagggaggcctatgaataaatcccccaacatatccagagaaaaataggccctaggaaaaaggtattgttaacagtggtcagtttgttaatgcccaaactgsacacctgccctgggagacacaggtggcagacaaggcctggttagaagctgattggggcttaatcacattgggctcattatttatgtatcttgaagaaagaaatggtcggaactgagaaattcaggtacataagagagccattccttttctcttacatatcacagtttcccggtttgcttgcagaaagtaaggtgtcagcttctgatgtttgctacaaaaattttctatgtaagtgtcacaaaatcgagttttcctgattttgctgtgatatgtcctgctgttgagccaggggtattagagcagctggtgtctggcccatgttccatttttcattcagggtt

SEQ ID NO: 420427 - DNA, 616 bp, Homo sapiens
gggtggtaggatgtgccaccaaaactggaattttctttttgacataatcaagctttaaaagattgagacgacttgaaagtgcaaattcagattgtaactatacattttctcaaaacagtaagttcctttgagaggatggaggctaaaggcatgggggtccattttctcagtgcacagggaggcctatgaataaatcccccaacatatccagagaaaaataggccctaggaaaaaggtattgttaacagtggtcagtttgttaatgcccaaactgcacacctgccctgggagacacaggtggcagacaaggcctggttagaagctgaytggggcttaatcacattgggctcattatttatgtatcttgaagaaagaaatggtcggaactgagaaattcaggtacataagagagccattccttttctcttacatatcacagtttcccggtttgcttgcagaaagtaaggtgtcagcttctgatgtttgctacaaaaattttctatgtaagtgtcacaaaatcgagttttcctgattttgctgtgatatgtcctgctgttgagccaggggtattagagcagctggtgtctggcccatgttccatttttcattcagggtt

SEQ ID NO: 420428 - DNA, 616 bp, Homo sapiens
gggtggtaggatgtgccaccaaaactggaattttctttttgacataatcaagctttaaaagattgagacgacttgaaagtgcaaattcagattgtaactatacattttctcaaaacagtaagttcctttgagaggatggaggctaaaggcatgggggtccattttctcagtgcacagggaggcctatgaataaatcccccaacatatccagagaaaaataggccctaggaaaaaggtattgttaacagtggtcagtttgttaatgcccaaactgcacacctgccctgggagacacaggtggcagacaaggcctggttagaagctgattggggcttaatcacattgggctcattatttatgtatcttgaagaaagaaatggtcrgaactgagaaattcaggtacataagagagccattccttttctcttacatatcacagtttcccggtttgcttgcagaaagtaaggtgtcagcttctgatgtttgctacaaaaattttctatgtaagtgtcacaaaatcgagttttcctgattttgctgtgatatgtcctgctgttgagccaggggtattagagcagctggtgtctggcccatgttccatttttcattcagggtt

SEQ ID NO: 420429 - DNA, 616 bp, Homo sapiens
acctggtaaaacatacaaacagaaagataaatcaaagacaggaagtagacatgcacatcttactctccagacttagtataagcctctaagacagtattccagttgggttcctcacaacaagatctgtgcacaccctccctcataggccagccagcacagaattgcttctgatgtcttcaggccctgtcttctttcagctagcacattccctaccttggctgaaaataacagctrtaggtttggattgctgcccacaggataccaatagcccttgtatacaagaatgagaagaaagattatttctcttgcactgctgacagatggagaagaaaagggttagtaaaaacataacaatttgaaaatgattttaagctgaaatttttgcttttctattcttaacttaatataagacttcagacaaaaatttattgaatatataactggtgctagttatagattttaggtacagagaattcagcagtaaaaaagaggcaaatccctgttttcataatacttatattctgctcatcttgtcttgctgtaggcttgttttatacaaggatgtcgctgtcttttttttaaagcttaactgagatatattttacataccataaaa

SEQ ID NO: 420430 - DNA, 543 bp, Homo sapiens
tatttttctgtgtgttacattgttattttattgtattgttgagggatattgcattttgtggacacataacagtttatttatacattttcttgttgttgcacatgaagtttcaggttcttactattaagaatgatactgctatatcatatataaacatatttaagtacatatttataagacaatttttttggcatgttggtctgctaattccaacacctttctcatctcctagtctaatgctattgacttttttttcttcattaagaaaaaaatatctttctgcctcattgtatgtctrctaattattttattgcaggttggccattgtagattatacattgttggacaactagattatgttgttttcttttaatgggtgttcatttttatgctggttggccattaagttactgtggatttcctgactgtaacaagctttattttcgtctttggtaggttattgttatttcacttttgcgcttagtattaaaatgtgtctcctactctagagtgtttccttaatccaaagatgaagactatttc

SEQ ID NO: 420431 - DNA, 543 bp, Homo sapiens
tatttttctgtgtgttacattgttattttattgtattgttgagggatattgcattttgtggacacataacagtttatttatacattttcttgttgttgcacatgaagtttcaggttcttactattaagaatgatactgctatatcatatataaacatatttaagtacatatttataagacaatttttttggcatgttggtctgctaattccaacacctttctcatctcctagtctaatgctattgacttttttttcttcattaagaaaaaaatatctttctgcctcattgtatgtctgctaattattttattgcaggttggccattgtagattatacattgttggacaactagattatgttgttttcttttaatgggtgttcatttttatgctggttggcmattaagttactgtggatttcctgactgtaacaagctttattttcgtctttggtaggttattgttatttcacttttgcgcttagtattaaaatgtgtctcctactctagagtgtttccttaatccaaagatgaagactatttc

SEQ ID NO: 420432 - DNA, 526 bp, Homo sapiens
tctaaaaacaataatggacacactttattagtttagtttgttttccattcaataaatagaaatatgtacttctagaaatttaactcaaatctcagtttcttataaaagatgttgctattatttgtttgtagaatctctattagattcaagaacccaatgccacaaccttagttttagtttgtaaagctcttctattggataaggattgctagtaactagaagctatcaattgcagagatgctatatccatgttgaagrctcattatctccttgatcttaattacgttggtctataagagataatatgaaaatctgaagctagaacatttgacagaaaatatttgttttcattttaaacggtagacaatggggttgatttttattcaaagctatgtcccctgtgcttatccacattggatgctttcactgcatgtttatttaaatgtattcaaaccctgattcctttgctctatcctcaacccttcaaccttgcctgtctcgaagactgtgcacaaacataagaaac

SEQ ID NO: 420433 - DNA, 646 bp, Homo sapiens
tcgagtttctacaacactaggaaggggaattcagagctatagaacaaaattccttgaaaattcagaatctcttaatagtggtctatttaagaaaaaaaatacagatagccatttaggaatagtcttgattttatatttatacacacacgtaatttttaaaataatatattgacagggtggttgttttgtttgctaacataaaatttatggcaagggtctaagcatttttctaaatacaatttcccaattattgtgtaataataatattgtataataatctgttatcatgtggacattattttatagaacaggaataactaaaaatatagtattgatctctttgtaaggcattgggtctatattaacacatggatgtgacatatccactaagttttcacagacttctattttatagatagagaaagggaaacacggggagtggcarctaacccagtcttcgtctccacactcttctgaagacgtctttgcattggtcttcactgactactctttttctgctttacattaagcattagttttatttcggatattatcttaccatttctgtaaatcgtttttatattaaggtaactaattttaatagtttattttaaagtctttgtctgtgaactctttgagagtagat

SEQ ID NO: 420434 - DNA, 579 bp, Homo sapiens
tcagataagaaatatgagtttgtctggtcaggaattataaacctattagtgttttgctattattaaccacagcatatacgttctgtttcagagtcttatttcaacaaacatgtgtgttcattcactttaatttccaatttccttcccaattaaaataaagtgtctaacaccagagactagcagctggttaaggaaagaggaagatgagccacatttccttctgcatcactaacttttagtgtgtctggccttcacgtcatatactgaaactatttgtgcatgggttcatttaatcacaaagcctccaagtccactcttcttcaaacacaacctttcgcataaattaaatagatgaatttctaaattcgggattcccacccatttattattactttaaaataacccaggcttataattctgcccagattcactcaaattcctgagtgcaaaggcctaattggaatgtctagccttagaaattcacrttttgaacagttatttctatctcatatatttaacccacaaactgaatatagttgaaaacagcagcaagtctgtttcaaattagatgacgcactt

SEQ ID NO: 420435 - DNA, 529 bp, Homo sapiens
ggaaatgaaaattcccaagttattttccagtgtggctgtgccatttatattcccaccagcaatttctgagtaattcggtttttccatattctcaccagattcggtattgtcacaagtttttttcttaactaatctaatatttgtgttgtaatatctcattgtggtggtttttttttaactcttttttttggatttttttttattattatacttcaagttttagggtgcatgtgcacaatgtgcaggtttgttacatatgtatacatgtgccatgttggtgtgctgcaccgattaactcatsgtttagcattaggtatatctcctaatgctatccctcccccctcctccccatcattctcattgtggttttaatttgctttaacctaatggtacatgttgttgaacgttttttatgtgcttattgctatctatatgttctctttggtgaaatgttagttaaatatcttttgcccattttctaattgaagtgtgtgtgtgtgtgtgtgtgtgtgtgtgacattttaaaagg

SEQ ID NO: 420436 - DNA, 620 bp, Homo sapiens
gaacccgttgctacaacaaaatttaaaatattagccaagtgtggtggtggttgtggtgtgtgcctgtagtccagctactcaagaggctgagatgagaggattgcttcagcctgggaagtcaaggctgcagtgagctgtgatcacaccactgtactccagcctgggcaacagagtaagaccctgtcaaaaataaataaataaataaataaataacataaaaaataaataaataaraagcatttcctagaaggtaatttggattttacaaacaaagctgactgactttgtgtcttttgccttgtgagtgattctttttctcccttaaaaatgccataaaatattacaataataacatccctctagtattattgtatcaaatataaatattcttgggcaactaaaaaggactataatcacatgtttttttcagaaacttttaaatattaagggaaaaagacagacataacataacctaggaggagacaacatcaaaacatataaccaacaagggcttaatattcagaatttataaaggaaacgtacaaatcaatatgacaaaatacaggaaactcccaaaaagagaaaatagaaatggtgctaacatagaagagaccacacag

SEQ ID NO: 420437 - DNA, 534 bp, Homo sapiens
ctcttattaagagaaatgctaaacaaatgtcacctatttttgtatttgtttaatggttaaataaatatgtttgttttgactctgttacaaggacaaatgagcaaaatctgctcctgcgaaacttgcaatggacacacactggcttctcaagagtttgatcactgaactcaatatgtgttatatttgacaaaagtgaattgttaattatatgtataataagtaagataatgaatgaaaaaacaatattttwaaaatagctgttcagaattacagcagcaaatactttgttgggcacagctaattagggatgattatctttgatgtattcttcataggttttatatatatatgtatgtgtatatatatatgtatatatgtatataactatctagtcttatctaatcttcaacattgatattttttcctttgctctcacagtcacaactacccatgtcttttctataaaaaccagcctcctgtctgtaaatgagattacatactgctaacatggttctaaccatctgtcctagacca

SEQ ID NO: 420438 - DNA, 534 bp, Homo sapiens
ctcttattaagagaaatgctaaacaaatgtcacctatttttgtatttgtttaatggttaaataaatatgtttgttttgactctgttacaaggacaaatgagcaaaatctgctcctgcgaaacttgcaatggacacacactggcttctcaagagtttgatcactgaactcaatatgtgttatatttgacaaaagtgaattgttaattatatgtataataagtaagataatgaatgaaaaaacaatattttaaaaatagctgttcagaattacagcagcaaatactttgttgggcacagctaattagggatgattatctttgatgtattcttcataggttttatatatatatgtatgtgtatatatatatgtatatatgtatataactatctagtcttatctaatcttcaacattgatattttttcctttgctctcacagtcacaactacccrtgtcttttctataaaaaccagcctcctgtctgtaaatgagattacatactgctaacatggttctaaccatctgtcctagacca

SEQ ID NO: 420439 - DNA, 544 bp, Homo sapiens
cattacatgcttattgtggaraatttggtaaataaaatacagatataatgcttaaagttatattccctcatcactatatcacataacaataacatttttgaaaatccatcatctactttatatttacacaattcagaaaattatatactattttctaaattgctttctgcacatctttatcattacattgaaagttattttataatatatgtaagtgtgatttaccttttttgttttatagtcaataatacttatgtgtttacttcttctgatatagacttagaagtaatgaataatttcgtgagacagccacttttcaaaaatgtccaatatatttcaatttgttttagatattttaaaaataaaaagaagttgactcttctaaaatttgtttctccaaaaatagcttattaactgctaagaaatttccagttgagagaagtagggatgcactgttgtatatgtaaaacacattggtcaatgatttttgtggtggcatataagtacttgtgtacaggtgatgttataagattttctctagcct

SEQ ID NO: 420440 - DNA, 544 bp, Homo sapiens
cattacatgcttattgtggagaatttggtaaataaaatacagatataatgcttaaagttatattccctcatcactatatcacataacaataacatttttgaaaatccatcatctactttatatttacacaattcagaaaattatatactattttctaaattgctttctgcacatctttatcattacattgaaagttattttataatatatgtaagtgtgatttaccttttttgttttatagtcaataatacttatgtgtttacttcttctgatatagacttagaagtaatgaataatttsgtgagacagccacttttcaaaaatgtccaatatatttcaatttgttttagatattttaaaaataaaaagaagttgactcttctaaaatttgtttctccaaaaatagcttattaactgctaagaaatttccagttgagagaagtagggatgcactgttgtatatgtaaaacacattggtcaatgatttttgtggtggcatataagtacttgtgtacaggtgatgttataagattttctctagcct

SEQ ID NO: 420441 - DNA, 602 bp, Homo sapiens
cagctagtgtctgtatctgtcattttaatcccacttgataatttactactaatagggagtttcaattgaactacatttaggtacatttaaatatcatattcataaactgattcatgtaaaacatcttttttaatactataatatctaatttgcttaaactctgctctaacattttactataaaatccattatgaattataattagggattattatgagcatttagaatagggaaaagtaataaggtagaaagcatatgtttgaaaacagaagcttcatttctggttttaccactcatatgactttactaaattctttctccttccaggcctctttattatcatcaatttaccaaacatttattgagcactttcttagtttcaagaatagtggacttaaagatgaaactacaaagtctctgtgcatgctctgccctgactttatctcagtgttttcatgaaagacaaatgaaagagctccgtgaactgtagatacacatcaatataaacattttattwtttgctgagattgtatcgattaaacataaaaatctgccattaaaagtttgttttataagcttcctaaagatcgcataattaacaa

SEQ ID NO: 420442 - DNA, 586 bp, Homo sapiens
ttttttcagctttattgaaatataattgatatacaataaacagcacattttaaagtgtataatttaatgagttctgacatatgtatacagccatgaaaccatcaccacaaatcaagataatgaacttttttcatcactcacaaaaatttattcatgtccctttgtattatttcctcctatccctccccacactccctgtgcawccctaggctataattgatctgctttctatcatgatagatgattttggattgtacagaattttatgtaaatgggaccatatagtatgtactctttaatttctagctttttacactcagcataattattttaagatcattgatattggatgtctcaatagtttatttattcttttatttctgagtagtattctattgtgtggttataacaaaaattgttatctatttgcatattagtagacattgctcttgtttccagtttttggctattacaaataaagctgctaagcacatttgtgctccaggctttgtgtgcacatatggcttttttcctcctgtgtaaatacctgggagtgtgcattagtgtgctaagactgcagtacagt

SEQ ID NO: 420443 - DNA, 445 bp, Homo sapiens
gggaaacaaggacattcttcacatggtgacaggagggacagagagcatgtgggggaaagtgccacacactttgaaacaaccagatctcctgagagctttttcatgagacagcattagggggatggtgctaaaccattagaaaccacccccatgatccaatcacctcccaccgggccccaccatcagcacgtggggattacaattcaacatgagatttgggtggggacacagagccaaaccacatcaattgtatttgtcatattaggcttcatggaaaagactgtctcagattaccttcaattactgggattcattgcaatgcaaatgtmgtttagtttaatacacaccttagtttctagtgtgtattgggtgaattgtgtcctcccccacattcattccactggatcccagaatgtgaccttatttggaaataaggtttttgcag

SEQ ID NO: 420444 - DNA, 592 bp, Homo sapiens
tctttggtatgttccattttttattttctactcagaatttttcctttccttatatcttttttatttagtttggcattctgcccaatatctctctcctcagctggtaccaatttgactcctgggttctccagaacattatgtgcttctataagccagctggccacaagtctgatttttgacaatttactgacctaatcagctgctatttgtgctgctcaaaatatgcaggctctccctcatctagacattacawattgaggatacttttatttttttctggtgggcatattttttctgattattgagagaaatccctgatattctcactcagtgatgattcaaagcatagcattctgttctggttgctgaacaaaataaatacagtaaagagttggggacagaactgaataagagccatgaactctacctatcacttaaacattacgttcatccacctttgccaaattgcctcctatcagaaaggaagaggtcttctttctccaaagctttctcctaatcaatcaactccatattctcttgcctataaccttaacatttctctctcaattatagtttcctctctaatgttagt

SEQ ID NO: 420445 - DNA, 583 bp, Homo sapiens
tggattctgctctcactttatatccctcctctgactgcccactcaacactgaggacagaggtacacacatagacagagctaagttaatttttgttagatatagtttagcaattcaaaacaaatggaaaaacagccattgcatgcctccagattttgccttcatgatttcaactcataattttctatgcaatgttatttgttccagatagcatagttatattgtatggtacgtataatgcagcatagataatcaaaattatatattaagcttaattcattcaacaaatacctattgagcttctgttagatgtcagacaatatttgagaactagaaatatattagtaaacaaagcatggattttgcactcagaacatgaggagataagagtgaagaaatctcttaatacagtgtgttagakcctagactttttgtacatttttctaatttcttgttaaatttgtctttttaaaacacaggaagaaaaatagtatagatttcaatagatataaaatggctcaatttaggcttccatttgtgtgaattagtaattttaggatagaatctttctcttaatgtaaaaaa

SEQ ID NO: 420446 - DNA, 535 bp, Homo sapiens
tgtgactaggatgtgggacatgaagtcaaagggaatcattctaaaactttaagagtgaatgtctgccctgctggtttttagacttgtgtggggcctgttacccctttcttttggaaaagttctcccttttaggaaaggaatgtgtaccyaatgattatacaaccattgtatcttagaagtaaaaaatatctaagattttgattttacagagtcatagctagaagaaatgtattataccttgagtttcagatgagactttggactttggacttttgagctgatgctggaacaagtttagacttttgagatctataaggatggaatgattatgttttgtatgtgagaaagacataagctttggagggtcaggggaagaatgctatggtttggatgtttgttccccaaaatcttcttttgaaatttgaaccccaatattggagatagaggcctgagggaggtgtttgagtcacgggaacaaactctttatgaatagattaatgccctccctgggcagtgaattcttgctctattagtt

SEQ ID NO: 420447 - DNA, 619 bp, Homo sapiens
agcatattgattataactatttttaaatctttgttaattctgaataatctctgagtttcagtctgttgattttttctcttaattattggtgccattttatgcctcttttgtgtctaattatttttatctaaaaataatttttattgtgatatgttatagagcacctagattataygaatctattctaaaggattttaagttttgttctaaaagaaagttaaattactagcaatcctgttgggggcttggacctaagcttgttatgtctaatttagctttgtccttagccttaaatcatgattcttactccagggcatggcctactccattagtctcaacagaaagcccaagatattcatcagggtctctccttatagctatacctgaattccagtaagtctccatcatgcggagatttctgaaatctatgctcatctctctgggctcctggtggctcttccttgctcagtgttccaaagtctttccctgtgcattgaagtaaatttttttgcacacactcaggtcttttctgtgggtccctcctctctaacaacgtgcccttcatttccaactgccctggcaacccaaactttagtctttgttttctcaacctagaagg

SEQ ID NO: 420448 - DNA, 560 bp, Homo sapiens
aatgaatgtaggctaacctgatgtatcatcacttcttttgaggatcttagtattgattgctgatcaatgacttcagttgtacacacacacacacacacacacacacatacacacacacataaacatatagttacttgccactggatggsaggtcagatatcaactaatctattatggttagaaaaaaaaatccctgttattactgctttattttatcatgccacttctttttcattttcataagcctgtgtatctgtgttcatgatattgctgtaatgttttgtgctacatgtcttaactttttaaaaactatggaaacaaggtacagtggcttgtaccacaataaataaagatactatgcttttttatgcagcctaagatttcagtgtttaatatatctatgagatggtttgaatctgtgtccccgttcaaatctcaggttgaattgtaatccccagtgttggaggtcaggcctggtgggaggtgatgggatcatgggagaagatccctcatgaatgatttagcactatccccttggtgctgtcctcatgatagtgagt

SEQ ID NO: 420449 - DNA, 657 bp, Homo sapiens
atagaattgggtaaaatgacacactgaagttctatatagcccttaaaaagcctgcagcatcagcttcctgacactggaaacacttgcttttggtaaacgtcccctgggaacccatcagctatgctcttagaagctcagatcacatasagactgtagactgtgtctagggactttggtcaacagctccagctaagctcccaagagacatctagcagaagttgagagccatatgagtgagcctttctggacatccagcctagtctagctttcaggggactgcagtcccagatatctgtatctgtaatcaataattactgcattaaagaaagacccaaatgagaagcaccctgctgattccagtcagcctatggaaacatgaccaataataataaatggtcattttaacccactaagttttaagatggtttattatgtaacaatgaataaccagaatagtcacaaaaacactttaggtgttttctgtgtttttattttgctttaagcaccaagaagtatttgaataaacccaagtgctttgcccaagggtacctatataagaatcctgattttcaaagcagcagcatgaaatgagttactaattttatctttacttagtacatgtggacaatagatacagagaaacagtatcacttggca

SEQ ID NO: 420450 - DNA, 607 bp, Homo sapiens
agtgcagtggcatgatcttggctcactgcaacctcggtctcctgggttcaagcaatcctcctgtttcagcctcccaagtagctgggactacaggcacacaccaagacacctggctaattttttggtatttttaatacagatggggcttcaccacattggtcaggctggtcttgaactcctgacctcaggtgatccacccgccttggcctcccaaagtactgggattattggttatcttaatgctggcatagtgggtgcataaacagagcagccagggtgtcaaggatagaggtggccatgagcctgatagtttgggttcccactcaccaaggctgacacagctacttccactgctgggtattcaacattccccaacaaagactactctgggatcccatctctcaaggagacaaacaagtcatcaagtggcaacttccatcctggaaggagcacttactcatcttggtcagaaacaacacatcttctatcaataattacaggtttgctgtttacgtactcaagacctaaaccactaccactatctgaggactcactgtttgatttagcaaggwttacattttacagcaaaggagatatgactgggaac

SEQ ID NO: 420451 - DNA, 462 bp, Homo sapiens
ttctgctagcaagattggctcttgggtgactcttggcttggcttctaaaacttactgtaattgataaggttkggtacctacagagtctgtaaatacaacgtgatttatggtgaacaactgctagaagtatgggattttcatagtgtctaagcagagaatgcctatgtgaccagtctcaaatgggcagaagcatcacacactgttgctgctagagggagaatgtcatctgtgtggccactcacccaaaggaggagtgtaggaggtgaatgtgtgtttgttgagactccccccaccactacctatttttcctttatttaactagcttaggatgcttgctgtgttgtgataaatcttagatatgagtacggccctatgccaagtcccatgagtccttctagcaaattactgaacatgtgggtagtgttaaggattgccaaaagtgtttccttatcaaatcaaata

SEQ ID NO: 420452 - DNA, 541 bp, Homo sapiens
gtactggaattgtgctctcctctgttgcaggcctgaggcaggaggaggagctgctatagctgcagtttctgctggacaatgagacttgcagccagggccatcttggcaacctagcactggccagcctgctcctgagatcgtggggttgggcagggagctcagaccactgtgcactctatggattagcccattgcctgaggcaacagagagcttttcctggtaaacaaggatcaaatatatacacagccacattggccacatccagctgttatgcttaaaggccatctactgccttgtagatcacacctcacagcccgatataaaacctgctgaaagaagtatatagggctatagaagcaaagccaaaagtcactatccagcatcctctaccataaggacacctggcaggggaagggaaaataataayaataatattatagtgaaagaaaaataaaagaaaaaactctacccacatgaaaataattaataaaaatgccagagtctccagatgggaagaaaccagtgcaagaattctggcacc

SEQ ID NO: 420453 - DNA, 495 bp, Homo sapiens
  misc_feature (1)...(495): n = A,T,C or G
nnnnnnnnnnnnnnagtgagagccttcttaattataaaattcagtgatcttgtaatccatccatctggcttaaaaatggcgagggtagaaccaagtcaataagcactgggcaaktctctctccaagaagccctgctccaccttcctctggtttcttcccatctacacccctggccttctttataagccatgatctccccagtccccagccccaatccccgctcttgcctgggtctgaggcaacatctggcacagctcagcacaagtaagaagcggttgtatttaagcatcccatcccctctcagaaaacctcaattttctagtctcatgtacactgataacatatttttgcataggtttattatgtagcataatgcccagcacattctaagactatataataaatacttattgaatgtacaaataaatggattgacaaatttgagcatcttgcaaatatttgactttacatttcaacatacattttcgtattcat

SEQ ID NO: 420454 - DNA, 568 bp, Homo sapiens
atctactttagaagtggttgctttttttttaaatcgctaccataaaggaaggcctcagggattctctgctcatagtgataccagttttggagaagtcgactcttgatagaaatagttgtacagcttatgtgccggggatcgagtctactgccccactgccaccagtgttagtgtaaatctcaagctaacctctccatgtcatgttcaggttgaggttactctatgattgtgatcataaatcttcaggcttgggttacactcgtaggctcttgtcactgcaaagcattgtgtatctgggtataaaaagatttttttcttcagtcacactgtgtaccatacycagccctctaccagcattggtccataccccacttcatatgggggaaacatatttaggttgtttcttaaattgtgccaaccaggttaccacagtcccttcacgtgtgaggttatatttagagtctttcttatttttttattagaaataatgctggaatgaacatctttttacatatatattgcatatttgcccgattattatgttagaataaaattttagaacccctat

SEQ ID NO: 420455 - DNA, 568 bp, Homo sapiens
atctactttagaagtggttgctttttttttaaatcgctaccataaaggaaggcctcagggattctctgctcatagtgataccagttttggagaagtcgactcttgatagaaatagttgtacagcttatgtgccggggatcgagtctactgccccactgccaccagtgttagtgtaaatctcaagctaacctctccatgtcatgttcaggttgaggttactctatgattgtgatcataaatcttcaggcttgggttacactcgtaggctcttgtcactgcaaagcattgtgtatctgggtataaaaagatttttttcttcagtcacactgtgtaccatactcagccctctaccagcattggtccataccccwcttcatatgggggaaacatatttaggttgtttcttaaattgtgccaaccaggttaccacagtcccttcacgtgtgaggttatatttagagtctttcttatttttttattagaaataatgctggaatgaacatctttttacatatatattgcatatttgcccgattattatgttagaataaaattttagaacccctat

SEQ ID NO: 420456 - DNA, 568 bp, Homo sapiens
atctactttagaagtggttgctttttttttaaatcgctaccataaaggaaggcctcagggattctctgctcatagtgataccagttttggagaagtcgactcttgatagaaatagttgtacagcttatgtgccggggatcgagtctactgccccactgccaccagtgttagtgtaaatctcaagctaacctctccatgtcatgttcaggttgaggttactctatgattgtgatcataaatcttcaggcttgggttacactcgtaggctcttgtcactgcaaagcattgtgtatctgggtataaaaagatttttttcttcagtcacactgtgtaccatactcagccctctaccagcattggtccataccccacttcatatgggggaaacatatttaggttgtttcttaaattgtgccaaccaggttaccacagtcccttcacgtgtgaggttatatttagagtctttcttatttttttattagaaataatgctggaatgaayatctttttacatatatattgcatatttgcccgattattatgttagaataaaattttagaacccctat

SEQ ID NO: 420457 - DNA, 607 bp, Homo sapiens
aacacaaattattttaataaatttaaatgcagtataatagcatatttttatctaaacttctaaatatgtaaaatgggaatgattatgttttacattgtctgaaaacatacatactggggaatagaatttttgcatgaatttagaatgtcaaaccaattagaaggctagaaaattagtctggtgtgcacattttaaggaatggagtttaggaaaattgagagatcatatctatgaggctaaaccgagaggttaattcaaccaggtctgcctgacctgctagcttttggttacttgctcttgttttgtttggttttggttttggttttggttttgttttgttttgttttgttttgttttgttttgttttgttttgtttcaaagaagttgaaggctgcagtagctgaaggccrtaccactgaaccttgaaacttaatcttcactggctactttatagataacattcataggtcactatgataatggttgtttcagttgtttttcaggaacttggccagttcctgtccaattaaaactggttgagaccactgattcttcagctgacctgaacaggtgcctgaaaggtggcatttgcatgtgggagggccaa

SEQ ID NO: 420458 - DNA, 508 bp, Homo sapiens
cagaattaaaaacaaaaactatatgatcatctcaatagatcagaaaaacttttgacaaaatccagcatcccttcataataaaagcccttaacaaattaggcatcaaaggaacttgcctcaaaatagagctgtgtatgtcaagcccacagcyaacattattctgaatggctaaaaacaggaaccattccccttgagaactggaacaagacaagtattcccactcttagcactcctattcaatatagtactgtaagtccaagccagaacaatcaggcaagagaaagaaataaacgacatttaaataagacaaggagaagtcaaactacctctcttgactaataatataatcctatacctagaaagtcctgaaaactccatcaaacagctcttagagctgataagcaacttcaataaagttttaggatacaaaatcaatatacaaaaatcaatagcatttatatacattaataaggttctagttgagagcaaaatcaagaagataattcca

SEQ ID NO: 420459 - DNA, 562 bp, Homo sapiens
taggactgctacaacaaaataccataaactgtatggcccacaaacaacagaagtctatttctcacagttttgggggatgggaagaccaagataaaggcactggtaaatttggtgtctcgtgagtgatatcttcttgctgtggggccaggcagctctctggggcctctttataagggggctatttatgagagctctaccctaatgatctaatcatctcccaaaggccacatctacatcatcacatcagtgattagggtttcaacatacaaatattttttgaggtcaagggaagcacatacattcaaaccacagcactattttcttttaattttttcaagaaattgactagtattattttcctgctttacagctgaagaaacaaacatggaaaggttcatttcattgtccaggttttcatagctcataaagggcagagctgagactataaatccaacctttctaactctaaagcyatcctctccccttccattcttgccagttggttattgcttatttgtaaggacaagcattattcacagtttattttacttcccagagaaca

SEQ ID NO: 420460 - DNA, 613 bp, Homo sapiens
actcctaatctcaggtctcaggtgatctgcctgcctcggcctcccaaagtgccgggattgcaggagtgagccaccgtgcccaactgaggtccaagtttttaatgctactcgtgaatcagagaagtaatttgtaggttgcctcaatggatttgcacaaaaaaagactgacatttcaactgcattctgaacacattcctgtttaaggccatagagagtttttattttatctttggagaagctccaccttgccacattctattatttcagtaacagatgtttctagccaacccattgagtcatcacatggtctttttgtaaatttgacattcatcacgatgtgaatcttctcaagttatcgtttataatgccaacctcgagtgagcatactttkactgccctgcttttagctgccatttgaaaccatgtgggctccaattagagagccaactaaaccactaggaaaacactatgattttaagtaggttttctggaaaggcaagtcttcttaccctgcatttactggcagttttatattattatctcatagggaggaacaatggggctgatgaaatatgtctactttaatggataatttcctctttgtaaaacattt

SEQ ID NO: 420461 - DNA, 594 bp, Homo sapiens
acgatgtgaatcttctcaagttatcgtttataatgccaacctcgagtgagcatactttgactgccctgcttttagctgccatttgaaaccatgtgggctccaattagagagccaactaaaccactaggaaaacactatgattttaagtaggttttctggaaaggcaagtcttcttaccctgcatttactggcagttttatattattatctcatagggaggaacaatggggctgatgaaatatgtctactttaatggataatttcctctttgtaaaacatttggctgaatttcagtgtgtaatgggaaccaaatactaacttgattttctatgtttaaggacagtatgtaagttccttacatgagaatttatgctttttcacacttcctacaaaatggaaaacaaattgttttccaaaatgttgtatcaatgacagtttccacagaatatgtgttctagttattccatacccatgtgaacattttaatcttgtcaggtttctaagattttgcgaatctaatraatgtaaaagagcagcatctcattgtggccataatttgtatttctaaagatcattaatgagttgatcttttca

SEQ ID NO: 420462 - DNA, 587 bp, Homo sapiens
atttcccatggatatcaagagatgactgtatatgactttggtagctgctttttaattttcatatatttattaaatgatagaattatcactgtttgtattgctctttgggaaacaatactctttcttcctggataagcatttttattgcctagttcacttttccaattacacttacataaggaaagcctgaacttamaattagcactcagctgtgtacttgatcataaaccagacagttttctgaaataaaaactgtctaaataaacatcttttaaacataaattttataaaaacaactgaagttactgatattgtcctatgttttgaagtataatgcagacagaaactgaaatgaattggcctttaacaggtgcaataattaaaactggagattgatggaagagaactgcttgatataacagttaggtggaaacataatcatttagagccaaaccgtccttctgaactctggctctaatgtgatatgtattcggtgttttgtttttatagtatcttttatttaatacatttcgtataatctgctcatgagatctcaaaacatatcgaagacatagatcttagaactg

SEQ ID NO: 420463 - DNA, 596 bp, Homo sapiens
tcttttcccactctaaatgcctatcagaaaaagaaaattgggtttacaaactagaacacaatcattatttatatacatagcgtatattatggtttggctcagtgtcccactcaaatctcatcttgagttgtaatccccataatccccacatgtcgagggagggatctggtgggaggtaattggatyatggggacagtttcccccatgctgttctgatgatagtgagtgagttctcacaagatctgatggttttataagtgtttgacagttctttctttacatgccctttctctcctgccaccttgtgaagaaggtgcctgctacctcttcatcttctaccatgattgcaagttttctgaggcctccccagccatgtggaactgtgaaccaattaaacctcttttctttataaattacccagcctcaggtatttcttcatagcagtgtgaaaatggactaatacagcatatattataataatcatgtttccccagtggatgaaaaattctgcctgctaagtgaaaatgttgacctcaccctgcacataaaggagatagctccctagtgaggccacattttatgtcccatctaggttt

SEQ ID NO: 420464 - DNA, 565 bp, Homo sapiens
aactgctcatattaggaaaacaaagcctcttgatactgatgatgagtggaccatctttgggcttgcagtcagaagggcattggctggcagtagatgctctactgtggttatgtggagcccacctggggtcatggtgatcagaagcctccgctgtgtgtatctgtgccatgtccagtcaaggtggttatcgggaacccgcccccgataattctttgtgggttcttttctattttccctaagtgtcagctggtctgagaaataaagggaaagagtccaaaagagagaaattttaaagctggatatctgggtgagacattacatattggcargttccttgatgccccctaagccacaaaaccaacaagtttttattagtgattttcaaaaggtgagggagtgtacgaatagggtgtgggtcacagagatcacatgcttcacaaggtaataaaatatcacaaggcaaatggaggcaaggtgaaatcacaggaccggggtgaaattaaaattgctaatgaagtttcgggcatgcattgtcattgataacatcttatcaggagacagggtt

SEQ ID NO: 420465 - DNA, 544 bp, Homo sapiens
cctgttcttttttcaaggtgcccagatttcatattgtttaaacaatttgtgcaattaatgcaatcatgacagggtcctgaggcgacattcatcttaagcttacgaagatgatgggattaagagattaaagtaaagacaggcataggaaatcatgagtattgattagggaagggataaatgcccatgaaatcttcacaatttatgttcagagattgcagtaaagacaggcgtaagaaattataaaagtattaatttggggaactaataaatgtccatgaaatcttcacaatttatgttcttctgccatggcttcagccggtccctccgttcggggtccccgacktcccgcaacaggtggtggggcctggtcaggtttacatgggtgtcaacaggctaggtggcaggccaagtttatgagagctgatcatgtgccaggcactgctctaagaggtttatatctatatttgttgatttaatattggaataggtatgttgattcatcttcatcttacagatgagaaaattgagggacaaaaaggtccaa

SEQ ID NO: 420466 - DNA, 498 bp, Homo sapiens
cctgttcttttttcaaggtgcccagatttcatattgtttaaacaatttgtgcaattaatgcaatcatgacagggtcctgaggcgacattcatcttaagcttacgaagatgatgggattaagagattaaagtaaagacaggcataggaaatcatgagtattgattagggaagggataaatgcccatgaaatcttcacaatttatgttcagagattgcagtaaagacaggcgtaagaaattataaaagtattaatttggggaactaataaatgtccatgaaatcttcacaatttatgttcttctgccatggcttcagccggtccctccgttcggggtccccgacgtcccrcaacaggtggtggggcctggtcaggtttacatgggtgtcaacaggctaggtggcaggccaagtttatgagagctgatcatgtgccaggcactgctctaagaggtttatatctatatttgttgatttaatattggaataggtatgttgatt

SEQ ID NO: 420467 - DNA, 622 bp, Homo sapiens
tctgtgtctattatcatatggtttttatttttaattctgtttatgtagtgagtcacatttattgacttgtgtatactgtaacaaccttgcatcccaggaatagatcctacttgatcatagaaaattaactttttgatgtgctactgggtacagtttattagtattttgttgaagatttttccacccatgttcatcagggawattggcctcaagttttctttttactttattttttaattaattcattcatttatttttgagacagggtcacactctgtcacctaggctggagtacagtggtgagatctcagctcactgtaacttctgcctcccaggctcaagcaatcctcccaccttagcctcctaagcaactgggactacaggtgcacaccaccatgcacggccaatttttgtattttttgatagagacagggtttcaccatgttggccaggctggtctcaaactcctgagcttgagtgatccacccatcttggcttcccaaaatgctgaggttacaggtgtgagccaccacacctagccaagttttgtgtgtgtgtgtgtgtgtgtgtgtgtgtgtctgccagattttggtataaggatgatgctcacctcatagaatga

SEQ ID NO: 420468 - DNA, 622 bp, Homo sapiens
tctgtgtctattatcatatggtttttatttttaattctgtttatgtagtgagtcacatttattgacttgtgtatactgtaacaaccttgcatcccaggaatagatcctacttgatcatagaaaattaactttttgatgtgctactgggtacagtttattagtattttgttgaagatttttccacccatgttcatcagggatattggcctcaagttttctttttactttattttttaattaattcattcatttatttttgagacagggtcacactctgtcacctaggctggagtacagtggtgagatctcagctcactgtaacttctgcctyccaggctcaagcaatcctcccaccttagcctcctaagcaactgggactacaggtgcacaccaccatgcacggccaatttttgtattttttgatagagacagggtttcaccatgttggccaggctggtctcaaactcctgagcttgagtgatccacccatcttggcttcccaaaatgctgaggttacaggtgtgagccaccacacctagccaagttttgtgtgtgtgtgtgtgtgtgtgtgtgtgtgtctgccagattttggtataaggatgatgctcacctcatagaatga

SEQ ID NO: 420469 - DNA, 622 bp, Homo sapiens
tctgtgtctattatcatatggtttttatttttaattctgtttatgtagtgagtcacatttattgacttgtgtatactgtaacaaccttgcatcccaggaatagatcctacttgatcatagaaaattaactttttgatgtgctactgggtacagtttattagtattttgttgaagatttttccacccatgttcatcagggatattggcctcaagttttctttttactttattttttaattaattcattcatttatttttgagacagggtcacactctgtcacctaggctggagtacagtggtgagatctcagctcactgtaacttctgcctcccaggctcaagcaatcctcccaccttagcctcctaagcaactgggactacaggtgcacaccaccatgcacggccaatttttgtattttttgatagagacagggtttcaccatgttggccaggctggtctcaaactcctgagcttgagtgatccacccatcttggcttcycaaaatgctgaggttacaggtgtgagccaccacacctagccaagttttgtgtgtgtgtgtgtgtgtgtgtgtgtgtgtctgccagattttggtataaggatgatgctcacctcatagaatga

SEQ ID NO: 420470 - DNA, 590 bp, Homo sapiens
agagcttctgcacagcaaaagaaactatcaacagagtaaacagaaaaactgcagaatagaagaaaatatttgcaaattatgcatctaaaaaaagcctaatatccagaatctatagacaacttaaacaattcaacaagtaaaagtcaatttaccccattaaaaagtaggcaaaggacatgaacagaaacttctcccagaagacatacatgtggcccccaaacttagaaaaaaartgcttaacatcactaatcatcagagaaatgcaaatcaaaaccacaatgagatatagtcttagactggtcagtatgattttgttaaaagattaaaaataacagatgttggtgaggctgcacagaaaaaggaatgcttatacgctgtttgttggaatgtaaattagttcagtcgctgtgtaaagcaatctggagatttctcaaagaatttaaaaagagaactaccactcaacccagcattcgaatactgggtacaaacccaaagaaatacaagtcattccaccaaaaaaggcacatgcacatatatgttcatcacagttctcttcacaatagcaaagacatcagatcaacctaaatgtc

SEQ ID NO: 420471 - DNA, 590 bp, Homo sapiens
agagcttctgcacagcaaaagaaactatcaacagagtaaacagaaaaactgcagaatagaagaaaatatttgcaaattatgcatctaaaaaaagcctaatatccagaatctatagacaacttaaacaattcaacaagtaaaagtcaatttaccccattaaaaagtaggcaaaggacatgaacagaaacttctcccagaagacatacatgtggcccccaaacttagaaaaaaagtgcttaacatcactaatcatcagagaaatgcaaatcaaaaccacaatgagatatagtcttagactggtcagtatgattttgttaaaagattaaaaataacagatgttggtgaggctgcacagaaaaaggaatgcttatacrctgtttgttggaatgtaaattagttcagtcgctgtgtaaagcaatctggagatttctcaaagaatttaaaaagagaactaccactcaacccagcattcgaatactgggtacaaacccaaagaaatacaagtcattccaccaaaaaaggcacatgcacatatatgttcatcacagttctcttcacaatagcaaagacatcagatcaacctaaatgtc

SEQ ID NO: 420472 - DNA, 590 bp, Homo sapiens
agagcttctgcacagcaaaagaaactatcaacagagtaaacagaaaaactgcagaatagaagaaaatatttgcaaattatgcatctaaaaaaagcctaatatccagaatctatagacaacttaaacaattcaacaagtaaaagtcaatttaccccattaaaaagtaggcaaaggacatgaacagaaacttctcccagaagacatacatgtggcccccaaacttagaaaaaaagtgcttaacatcactaatcatcagagaaatgcaaatcaaaaccacaatgagatatagtcttagactggtcagtatgattttgttaaaagattaaaaataacagatgttggtgaggctgcacagaaaaaggaatgcttatacgctgtttgttgkaatgtaaattagttcagtcgctgtgtaaagcaatctggagatttctcaaagaatttaaaaagagaactaccactcaacccagcattcgaatactgggtacaaacccaaagaaatacaagtcattccaccaaaaaaggcacatgcacatatatgttcatcacagttctcttcacaatagcaaagacatcagatcaacctaaatgtc

SEQ ID NO: 420473 - DNA, 535 bp, Homo sapiens
ggctaatgtgttggatgattcatttacatgaatgtataagattagtagtgtaaagaacagtgagaccgggtacttgaatcttcaatgaatgagaagaaaacatctgcgatattggtagaccactactgtaagtgagagtagcatatattatgccatttatttcaaaagaattatcttttgaaatttttttacatatttatktatttgttttgtgtaggaaggagaaaaggtattagaaatagcagtgtggaacgaatagcatttctacagcacctccagaatctctggaaactgtgtcatgaggagaaaacaaacatttcttaaaagaactgtccaccaaacagtgtccttaaggaattgccacattttaattacaggaatatggtaaagggaatgttcaaagaaatgcttaaagatattatacatgttacaaatgactgtaagttgaagaggactttgagaagttagagatatgtgaaaatttgggtccaactatggtatttcagtcagaaactcagctggtttgagttttcac

SEQ ID NO: 420474 - DNA, 513 bp, Homo sapiens
aaaaaagtaaaaaaaaactaccaaaaatatataaaaggattcaagtgaattataaatactcagtgttcaccaacggccagaaacggattgtgttcctaccttctgaatgaaagaatgcaaaatgaaaaccctcataattcaaagggcatagagtagaataacaagaagrcttttacctgagtaatggggggaagatatttctagagtaaattctgctctgctcctgccttattgagtttaaatgcaagaccagaaaagactgaattgttttcaagtaatttaattacatcccactgctaagcttaaaaagtacagttaggtatataaaaatattcagtatccaatttggtaattgcatgtctggtatctaatcaaaaatgatcaagctggaaaataagcagaaaaatatgagccacaatgtaaataaaaataagtcagcaaaaactgactcaggaataacacatatgatataatttgcagataagcacataaagcaagcattataattatgtt

SEQ ID NO: 420475 - DNA, 599 bp, Homo sapiens
atagtggttgctcagtactttatagttaacaaattagataaattagatgaaatggacaaatttccagaagaaaacaaactactgaaactggctcaagaagaaatagacaatctaaatagacctatattaagtaaagattaaatcagtaactagacaactacctatatctggctagggcctagatagcttcaccactgaatttattaaagaagaattaataccagttattcacaaattcttgcaaacctggaagagaagggactactttccataactttctaagaagtcagtattactctaatatcaaaactacacaaatctcagcacttttggaggccaaagctgatgggtcagttgaggccagcagttcaagaccagcctggccaayatggtgaaatcctgtctctactaaatatatatgtatatatttatattatatatttatatttatagtatatatactatagtatatatttagtatattctgcaagagatccagaatagcaaaaacaattgtgaaaaagaagaataaaacagaattcatactttctgatttcaaactcactacaaacaaaggtaataatgacagtgtggtttga

SEQ ID NO: 420476 - DNA, 608 bp, Homo sapiens
aatagttgtgaaatcattttttcattgagaatatcttaacatgactttatgagataaggtcaaaaaacatttttcaataaggaagcagcactacccagaagggcgaggcagaaagggtttggtgctaagctaatatagtctcaaattttgagaataaatttttttaaagactatgtaattatgatacttttgctttgtgttttaacccaatatctgtatatctacaagtgcaaagttttaaaaattccaaatagctcctccttattatagagttaataggactaatcactgtatccgtagactgtcctttatccgaaatgcttggaactagacatgattcagatcttagatttttgtttttgtgttttggaatacatgcattgtacttactagtttcgcatcccagatctgtaaatccaatccaaaatgttgcagtgaacatgttctttgatcgtcatgtcaaatgctccaaaattttcragcatttttgatttcagattattgtattatggacccccaaccttattaaattcaagagaggcttccttaccacagatttttttaaggcaagattgctattaatagcaacatagacaaagcacattttc

SEQ ID NO: 420477 - DNA, 568 bp, Homo sapiens
tcctgttaggttaaacttaaaggtggcactgatggtatattggaaggaaagaagaaccatttccttccaacttccactatgctgtcctgtgggactgtgggcctgggcagataacagagagcaactgtgggttccaacacattggtgacagttttcacagtgtcagtgggtgtgcaggcccctgatatcttgctcaaagggcagttatttgttcayaaaatgagaaattcttatgttcctccaacaagaacagagggaatagcagctttctagtaaatcagcctcagacttggtaacagtttcttgaactttgggttaagtccttctacttctgttggcttttcccatatcatttttaccatttggtatttcaacaatacgaaaagctttgtaaccaatttcaagacttaaaatttttggaactttgtttcccccctaacggaacatagactgatattgttactggtatcaagaatgaggtcaggaaacatatctacaatgataaccatctaggatttgtgattttatctaattgaatttaaatacagagaaaacctcattgctagtg

SEQ ID NO: 420478 - DNA, 568 bp, Homo sapiens
tcctgttaggttaaacttaaaggtggcactgatggtatattggaaggaaagaagaaccatttccttccaacttccactatgctgtcctgtgggactgtgggcctgggcagataacagagagcaactgtgggttccaacacattggtgacagttttcacagtgtcagtgggtgtgcaggcccctgatatcttgctcaaagggcagttatttgttcacaaaatgagaaattcttatgttcctccaacaagaacagagggaatagcagctttctagtaaatcagcctcagacttggtaacagtttcttgaactttgggttaagtccttctacttctgttggcttttcccatatcatttttaccatttggtatttcaacaatacgaaaagctttgtaaccaatttcaagacttaaaatttttggaactttgtttcccccctaacggaacatagactgatattgttactggtatcaagaatgaggtcaggaaacatatctacaatgataaccatctaggatttgtgattttatctaattgaatttaaatacagagamaacctcattgctagtg

SEQ ID NO: 420479 - DNA, 549 bp, Homo sapiens
gaggagggacaaagaggcactcaactttgcaaaatgaaagaaggaaaaaaaaaagagagagagggaaaagaaagagaaaaggacaaaaagagaaagaagaaagcaaggcagagaagcaaaagtctgaaaaaattagagacattagacattgttagaatatcaattagacacattctctcacaagaataaggggcttatataactgaagtttgaaaccagaagtgtgtggtgatgggatatgaagaatgtttgtgcaataaagctaatatgtaacacatatatgaagtagacgctcttctaacctttacaaatgttactcagtttaaagcaaaccaacttatattctcagtcctatttttatyccacagctaaaagtggtaaaggtgggatgtgaaatgagtgggttgtctgcagagtccatggtctaaaagatctccataaaatgtaaaactacaatattagtaatatggttaaatctctttacttttctcactgaaccatagtagctttgggctagaacaattcttaaatattaatgtctagacaaat

SEQ ID NO: 420480 - DNA, 605 bp, Homo sapiens
gggcatctaggttgattccatttctttgctattgtgagtactgctgtgatgaacaaatgcatgcatgtgtctttttggtagaaaaattaattttcctttgggtatatatgcaataaagagattgctgggttgaatggtagttttggtttaagttctttgaaaaatctccaaactgctttccacagtagctgaagtaatttacactcccaccaacagtgtataagtgttctcttttctctgtaatctcaccagcacctattattttaattttatttattttttgactttttaacaatagccatttgaccggtgtgagataccttgtggtggtattgatttgcatttttctaatgattagtgatattcagcactttttcctatgtttgttggctgcatgtatgtcttctttagctgttaattgttatcttggctccaaaaggccagaatgctttgaaattgtcacttgttaagtgttgaaccctatagaaagggtcatccwccttgttaatttttgcgtgggaaagagataacagttttttgtttctttgaattacaattgtaagcaaataaaatttttacatgtaatttcagtgacatagtagatt

SEQ ID NO: 420481 - DNA, 573 bp, Homo sapiens
taaaaagtgcactatggttctagatttgtaaaaccaacttgaggaggtctatattgtaattaacactctcatgtacctatctcaacartaggccaaaccttattaaactagcaatatttttaatcaagaatattctttctttgagattagtataatcacaaggaggagagattataagaaaaaaacacaagtgttttaaatgggcattttctccagaaaacagaaaatgatgtacattattattgatcataaaaataaaaattagttattaagtggaatgcaactgattattgccctaaggatagagtggttttgcacttatttataaatttatttcaacatttttaatattctcatatagtgtgatattttgaattctcctttgaatttttgtaacatcttacttgttccttcattaattaatgagttaaacgaaatctttgaaacattttcattttatatttgtgtgagagccatgaatatgccctctttaaaaattacctttaaatacttatttttctttctaatatttaaacaaaactacaaaatgaaatatagtagataaaggagatg

SEQ ID NO: 420482 - DNA, 428 bp, Homo sapiens
ttgctttgggaagtatggccattttaatgatactgattctttttatctatgagaatgaaatgtgtttccatttgtttgtgtcattcctgatttctttcagcagtgtttcttaattctcattatagagctttttcacctccctggttagctctgtttctggtgtgtgtgtgtgtgtgtgtgtgtgtgtgtgtgtgtrtgtgtgtgtgcatgcgtgcttcttagcttggatattgttggtgtatggaaatgcttctcatttttgtacacttgtatcctgaacctttgctgaatttgtttaaaagatctaggagctttgggcagagactatggagttttctacatataaaattatatcatctgtgaagagagatagttcaactacctctcttcctatttggatgcattttacttcgttgtttagcttgatt

SEQ ID NO: 420483 - DNA, 601 bp, Homo sapiens
gacttttccctggctttgaactccaatatgacctgagcatttgagaaggagagttaaacctatggtaagagattctgtggttctttccctgatggaaacagaatttaacgtggttgttcctggggaatttataattttatctcatttaaatacatggatagatagacagatagcaaatataaaataatagaaggaataaaatcaattatcatacctctccattaaagaagcagaaaatggtagagaccaaaagaccctgtaaaagaaaaatagaatgatctgaatccaaatggaaagatacatgtatttgtaatcaaatagctgtacaagtagtcaggagtaaaccaaagytatatgtatatttaattccaaacctctcaagctgccttcttatcaagaatgccatacctggaagtgcataaggatgtgcatgatgtagtcatatacctcctctgcaatctttccttcaggtcgccatggaatcagcacaaattcaatgccaagcaatggcaccaagataagagtagctctcacagctttcatgtacagattggattccgcttggtgtgtaacttttaacttggtgatgagaacgcgtaca

SEQ ID NO: 420484 - DNA, 569 bp, Homo sapiens
tctttcttgtaaaaatctgggttgaattcttcaatattaaaatatccattatttcagtgttttcttgtgttaaaatctcaactacatttaaagtgaaaaagaaaatactcatatatgttagaaaaatgttaactatatttactatcatagtatattttcagattttgtgtttctttagacaagaatattcccacattttaatgcacaacctaaaatacaaaatttgaaagttttgtctccattttttcccatagttcatagtaagagttactaatgatctgaaatctatgataatttctaataggagagaatggatttgtttgcttaaatcataattaggaatagtaaaacaattattttgttattaaaatattagtttatttcattaaaagatgtccrgaaggacaatcttttatatgggtaccttagcacaaattgtcaaaaaaggaccatggcctgctgtggtgattcaaatgcgtggtgacttaaatgatttaaataatattagcaatgtggacatctttcattgaatgatgccagaaggacaatcccttaatgaaagttgtcca

SEQ ID NO: 420485 - DNA, 592 bp, Homo sapiens
aatgactcatctaaatcaccacagcaggccatagtcctttattggcaatttgtgctaaggtatctacctaaaatgggaagcatttatcttcctaacccaatgttgtccaaatgattattcttgataagctgtcaatgagaattctctgatttcctgtaactttgtgggaattctatgtgtccatattctcccttcatgraaatgaaaacagatccatttctgaagacaggagacctcctgctaataaaagtatgcttcatgttctaaaattataccattagatgatcctcatcataatagcacaaagagatcaaaaggattaaggcacacttataaacattttttcttctgtaggatagttggaagatactactaataaattattttggttatctataatgtacttgtgtctatgcataatcatttagagaaaatattttaatgtaatatagtatatgtacagtaagctgttttattattcagggtatattcattagtagatctcaagtttaactgaatttccaaatttagatccccttattggaacaatcttcctactgcctctcacttgctgatttggctgactgagagc

SEQ ID NO: 420486 - DNA, 592 bp, Homo sapiens
aatgactcatctaaatcaccacagcaggccatagtcctttattggcaatttgtgctaaggtatctacctaaaatgggaagcatttatcttcctaacccaatgttgtccaaatgattattcttgataagctgtcaatgagaattctctgatttcctgtaactttgtgggaattctatgtgtccatattctcccttcatggaaatgaaaacagatccatttctgaagacaggagacctcctgctaataaaagtatgcttcatgttctaaaattataccattagatgatcctyatcataatagcacaaagagatcaaaaggattaaggcacacttataaacattttttcttctgtaggatagttggaagatactactaataaattattttggttatctataatgtacttgtgtctatgcataatcatttagagaaaatattttaatgtaatatagtatatgtacagtaagctgttttattattcagggtatattcattagtagatctcaagtttaactgaatttccaaatttagatccccttattggaacaatcttcctactgcctctcacttgctgatttggctgactgagagc

SEQ ID NO: 420487 - DNA, 477 bp, Homo sapiens
cataatagcacaaagagatcaaaaggattaaggcacacttataaacattttttcttctgtaggatagttggaagatactactaataaattattttggttatctataatgtacttgtgtctatgcataatcatttagagaaaatattttaatgtaatatagtatatgtacagtaagctgttttattattcagggtatattcattagtagatctcaagtttaactgaatttccaaatttagatccccttattggaacaatcttcctactgcctctcacttgctgatttrgctgactgagagctgattctcaatataacttcctcagagaggccttattgagcctccttcctctttctctaggtaaggtaagacaccacttatcttcccccttctataacatactatacaatgttagttatttgattggtagttatattccacccctctcaaaacaaattctcagctccataaagctata

SEQ ID NO: 420488 - DNA, 562 bp, Homo sapiens
attaatcacgcctatttttcaaaaggaatttgagaacattgtattstaatcttaattaaaacatatccctggcttgaagaaatgtggatgttacaaattaaaggaaaaggctttgtattagccggtgttttccaagaaacaaaaatgataggatgtgtatatgtttacatacacacacacacacacacacacacacacacacacacacacacacacacacacacagagagagagagagagagtgattataaggaactggttcatgaaattacgtaagctaaatctcaagatctgaagttggcaagctagatacccaggagagctgatgggtactcgaggagaaccaatggtgtaggttccagtctgaaagccaacaggctccacactgaagaaaagctgatgttgtatcatagagtctgaaggacagaaacaaacaaacaaaatgtcccagctccagtctagcaggaagagttccttcttatttgctggagggtcagtatttttgttctatgccagacttcaattgattaaatgaggctcacccacattagtaaaggcaatc

SEQ ID NO: 420489 - DNA, 501 bp, Homo sapiens
aaaaaaaatgaaaagacattagctaggagtgggcagtatggtgtggaatgagggttgagggaggaaacagtatcctgagtcgagtgagtaaaccaaagggccacacctaacaaagctaagcattactaacggttttcagaaaaaatgaaacaggtttcctgcaaaaaaatgaaaaaccaagctgacatcagatgtctcatagtcagactaattgttagaagacaatgaagcagtatcaacagagtactaaggcagacactatgttgtgtctagtttcctacactcaggaaaacattggcatttaggtgaaatgaagaaaatagagatattttcagcgttcaccaccctcaggccttacttgagataattagataaaaatgcacaccagtaaaataagaaaataaagactaaggatgaagtagaattcatggaataatggtgaacaacasgcagtaacatttaaatagctgtaaaatctatagttatatctaagttactatt

SEQ ID NO: 420490 - DNA, 612 bp, Homo sapiens
tctccttcctgccaccatgtgaagaaggatgtgtttgcagcttccactatgattgtaagtttcctgaggcctccccagccatgctgaactgtgagtcaattaagcctctttcctttataaattacccagtcttaggcatgtctctagtagcagcatgagaacagactaatacagttggattagcctagaaaactatcttttaatacctatcaccctactctatttccttcataaaagttctgggcctcagggaaacattaaacagtttatagaatgagagatgtcttggtctgttttgtgttcctgtaacagaataccsgagacccattagtttataaagaaaagaggtttatttggctcataattctggtggctggaaagttcaatatggggcatctgcatctggtgaagggcctcttactgcttcaactcatggtggacaatggaaagggagctggtatgtgcaaagaaatcacatagtgaaaagcaagagagagaaaccaaggagtcagactctttttaacaacctgctctcttgggaagtaacctattcctgagagagtgagaactcaccctcttaggagggcatgaatctactcatgaggaatccat

SEQ ID NO: 420491 - DNA, 612 bp, Homo sapiens
tctccttcctgccaccatgtgaagaaggatgtgtttgcagcttccactatgattgtaagtttcctgaggcctccccagccatgctgaactgtgagtcaattaagcctctttcctttataaattacccagtcttaggcatgtctctagtagcagcatgagaacagactaatacagttggattagcctagaaaactatcttttaatacctatcaccctactctatttccttcataaaagttctgggcctcagggaaacattaaacagtttatagaatgagagatgtcttggtctgttttgtgttcctgtaacagaataccggagacccattagtttataaagaaaagaggtttatttggctcataattctggtggctggaaagttcaatatggggcatctgcatctggtgaagggcctcttactgcttcaactcatggtggacaatggaaagggagctggtatgtgcaaagaaatcacatagtgaaaagcaagagagagaaaccaaggagtcagactctttttaacaacctgctctcytgggaagtaacctattcctgagagagtgagaactcaccctcttaggagggcatgaatctactcatgaggaatccat

SEQ ID NO: 420492 - DNA, 620 bp, Homo sapiens
agttgaaaaatacaagtgacatactgaagaatacatcgaagtctcttaacaaaattgattaagcagaagaaaaaattagtgaacctgaagacaagctatttaaaaatacacaatcaaaggagacaaaagaaacaagaattttaaaaaagaagcatgcacaacacctagaaaatagcctcaaatggcaaacctaagagttattggccttaaagaggaggtggagagagaaagataggggtaaaatgtttattcaaagggataatagcaaagaacttctcaaacctatataaacgtatcaatattcaagtacaagtttaacccaaataagattatctcaagacatttaacagtcaaactcccaaaggtcaaggataaagaagggatcctaaaagcagcaagacaaaagaaataaataacaaacaatggagttccaacacatctagcagcatacttttcagtggaaaccctacaggcaagcaggagagttgcaggacatatttaaagtgttgaaggataaagatgataacctttgaatatacctggtgaaaatatccttcagacatggaggagarataaagacacccagacaaacaaaagcttaggaatttcatcaacaccag

SEQ ID NO: 420493 - DNA, 507 bp, Homo sapiens
tttctttccttgcagtctctttgtctgactttaatatcaagtaaatgctgtcctcctaaaattaatttagaagtgtttctttttcttcaactaaaaaaagtttgggaaagattgctattatttttttctttaaatgtttggtagaatttgcctgtgaagccatcaggtccagatcttttttttttttttttttttttggkgggagattttgaatactgatttaatattctcacaagtttctattcagattttctatttcttcatgatttagtcttggtaggtttcttcttgttgctaggaagttgttcttgtaggttatccaattttttgtagtataattgttcataacacgtttataatcctttttatttctataaagtcagtagtaatgtccccacttctacttctgattttggtaatttgagtcttctcccttttttcttagtttatctagccaatgtttgtcaattttattgatgtttttaagtgattaacttttgatttcat

SEQ ID NO: 420494 - DNA, 592 bp, Homo sapiens
tgtgtcatgctgtctcactctctgagaggctttaaaggtgtccaaggcaatcccagtgctcttactctttagatgacagtagtaacctaagttgttaaaggatggtccaaagtgagagaggcaaatgcacaactgccacattgtcttgaaaatcactccagcagataatacttgttgagcatcttttgtgcttaagggaataggtttaacatcttatggatgtaagcacctacaaagtacttgggaagacaaaacrtaaacgcagaaaaagttttatgaagacaaaactgtgtcatcaaccgaacacaagacaacatgatgaaaggggccacagcgcagtgtattattttgttcattccaggcatatctattgcatgtccactgtgtcatgctgtctcactctctgaggggctttaaaggtgtccaaggcaatcccagtgctcttactcttcaggtgacagtggtgtggtacctgtcatcagaattcagtgctgacaagggtacaactgattggctggcattattacatcaacagaactagatatgccctttatggtcaaattaagagcatagccatcatttatcaagtgcc

SEQ ID NO: 420495 - DNA, 557 bp, Homo sapiens
atagaaaatactttctatttccagattagaatagaaattattttaattgcttgttcatgtatcattgaatattaatggaatcttctccatttaacgaggcayagagaatttccgaaaggagggagagcaaagaaacattaagccatatggagattatcaatgttatcactctctgtcaaaaggactgaaaggttatatataccaaatcccaatatgtgcagtcatatcatctgctgaatatatttgaaagttaataactgtatgtaaaaataaaactgtggcatcattacattttaagaagcattgcaaatgtattgctccacatagaaatgcacacagactaatattaagtcatgctccatgcttcttgtcctatttcttgctaagtttgagtgtctggaatccttagctgagtgccagtgagtctggaactcagacagaagctgcccagcctcactggctctgcgtattacaggctgtatttggtcctgatttactctactggatatggtatctgagtttaatgatggatttcatgtagaatgaatacagtaact

SEQ ID NO: 420496 - DNA, 533 bp, Homo sapiens
gagcataggcagcatagatttagcatagttcttaagggccccaggattttggaatagtctgtagtattggtttcaacttaaagtcaccggctstgctagtccctaacaagagaatcagtctgtcttttgaagcttacaggcattggcttctcctctctagctacaatagtcctacataacatcttcttccaatagaaggctgtttcgtctacattcaaaatctgggtgggtgtggtgttctatatatgtctacttattcatttagttaatcatgtttttaaaatcatcaatatcatgttaattttattttatcagcagtttatttagctatgaggggaatatactaaaggtgtaggcaccttcatcaatgaccttagctagatattctggataacttgctgcagcttctacatcagcacttgctgtttcacctttcacttttgtactgtggagatggcttctttccttacacctcatgaatcagcctctgctagcttccaacatttcttctgcagctttctcacctctctcag

SEQ ID NO: 420497 - DNA, 593 bp, Homo sapiens
tctgggcttccatttgcattcatttaaattgcaattagctggtggcaggtcatatccaacttagtatattccataaagaatrgatttctaggtctgccagagaacactgtccatgttgaatacataataatcacccttggtgttgaacccaagcaaacagggtcacaagaaaattgtgtaaaattctctgagttctacaaccttcatgatggttgagaagttgctttctaaaacaagagacgttctgtagtaacattgagtagtaattaaagagccagacactacactaagaactttaaatatgttttcttagttaactcacgcaactactctgtgaattacatcctattatccgacctacttttcagatggtgtaccgctcaatgggttcacctttcccgctgcctagacagagctgatttatcaatgcaggggaattctgatagagaaagagtaattcatgcagagccagctgtggtcgagaccagagttttattattactcaaatcagtctcctgagcattccaacatgagagcttttagggacaacttggtgggtggggggacgccagtgacctggagtgttgattggt

SEQ ID NO: 420498 - DNA, 620 bp, Homo sapiens
agttgaaaaatacaagtgacatactgaagaatacatcgaagtctcttaacaaaattgattaagcagaagaaaaaattagtgaacctgaagacaagctatttaaaaatacacartcaaaggagacaaaagaaacaagaattttaaaaaagaagcatgcacaacacctagaaaatagcctcaaatggcaaacctaagagttattggccttaaagaggaggtggagagagaaagataggggtaaaatgtttattcaaagggataatagcaaagaacttctcaaacctatataaacgtatcaatattcaagtacaagtttaacccaaataagattatctcaagacatttaacagtcaaactcccaaaggtcaaggataaagaagggatcctaaaagcagcaagacaaaagaaataaataacaaacaatggagttccaacacatctagcagcatacttttcagtggaaaccctacaggcaagcaggagagttgcaggacatatttaaagtgttgaaggataaagatgataacctttgaatatacctggtgaaaatatccttcagacatggaggagagataaagacacccagacaaacaaaagcttaggaatttcatcaacaccag

SEQ ID NO: 420499 - DNA, 533 bp, Homo sapiens
atagtttttttttaatcttttaaaattattttaacagccttattttgagagagataacttttaaagaaaataaatgttccattatttttcattttcccataattaaataccaaggtaagtaatacatcactcctagacttatgggacccacactattacagccttcagagccttatactacagatttaaattaattaaacttaacctaatatcttcaaatacctccacaaatattatgaaaattaagtacaaacaagttgaaaatagctaagatttgtggaaaaaaattatttggttcaatctataggttcttcatggaattcactaacatttaaactatgccatctcctttatgtatatatttatacatatatgttcttcatttgtgtgattttaaagcactgtggaacattacacrtggtagactactgatattatttcccacgatcaaagagtcacaggacttggagaaacctcagaaatcatctggttcccctactgatttttatataaatagaaattgatagccaaag

SEQ ID NO: 420500 - DNA, 630 bp, Homo sapiens
tttttgctcttatttctatttctattttagatattactagttcagataataaggaatgctttctcttcactttagctctttgagtagatatcgtgaagcrattttgctctcatgattgtttaaagtagattaagagtttggaagaatgagatggttcaaagagtttcaagttctttggaggaagttttgttatccaagtatttctggaaattctcaggtacatgggaagaatatttctctctctcatgttaaatttaaaacatgttttatatcttctagtggtctaatgagggccaaaccattccataatatctagtttgacagaattgttagggagctagtaagttttggaaagaatagtgaaacaacatgcaaaacaaaatttagaagaggctacctgtgattctagacaatttaaattttgttgtaaaattctcattaccttgggaaaaaagtcattttttaatagtggaacaggactttgattgttagactcagtgaagagggaaaatttgaggctaatgtttcttgtagcatttgttgaatgaagtcattaagtggctgctgatttcttgatagagtcaggccagttaatttatacacattgtgatagaattaccttgcttgtac

SEQ ID NO: 420501 - DNA, 614 bp, Homo sapiens
tgctcatttgttttgtttttttgtttgtttgtttgtttgtttgttttgagacggagtctcgctctgtcgcccaggctggagtgcastggcacaatctcggctccctgcaagctccgcctcccaggttcatgccattctccttcctcagcctcccaagtagctgggactacaggtgcccgccaccaagcccggctaattgttttgtatatttagtagagatggggtttcaccgtgttagccagaatggtctcgaactccggaccttgtgatctgcccgcttcagcctcccaaaatgctgggattacgggagtgagccaccacacccagcctcatttgtatattttaatgaaactttattatcagtaaaagcccctatgtcatgcaatagatttccattttgttcttgactaaagttagaggtttccagtggtcagaatgacttttttttttcataatttacattacatagtccataaaacttgaaactataaaggtatgaggttactctacgtcaatgtattttaaaggtgagtttgggcttactttgtttcttgttaaatgtttatggaatattagcttcatacttagcattctcctgttaaagtagataccgt

SEQ ID NO: 420502 - DNA, 611 bp, Homo sapiens
ggtttagcatcactagttattattcagagtttcaatgaatgcctctgttttcaataaggtattgtctctgttgctttccatgatacctggcattacctagtccctagtctgtctgatcataaccttggagagaattaactctgtttttcacccagggyggcagaggagatctgtattccaacaacttcttattttcaacatattctgtttacaatctcataatatttacttgcattgaaatatgactgaacccttcaattcctggatttttctgtacttagcagaaaaaaaaatatttcgtggtagctttctaccttcttgcacacagcagattcaagaaaaggtaaatgctaactatgctttttttttctttcaaacttgtgttgaatattgcactctgctaccttatcctcttctgctgtttttactattacagagttatatcattgctttatctttagtttaattttagtggagtttagaagaaaacaaagataagatcttgggtttagtttactatatttgtactgaagttcttcataagcatttttcccccaggaaatatgttttactttgttaattatgacaataataaatgtgaagatttacaa

SEQ ID NO: 420503 - DNA, 526 bp, Homo sapiens
atgattcaattaccccccctcccccgccccaaccatgggtccctcccacaggatgtgggagytctcggagatacaattgaagatgagagttggttagggacacagccagactatatgaatatatattagaaattttgtcttaaatattataaatgtatgcccctgtaaaatatatgaaactgctactttctcttaatccttgaccaatattatattgtatattataaatgctatatattatgagttggaaaatttttgcaaatttgaaagtaaaaaaggttttcatgttattttctatttcttttattattgacattttcccatttttttattcagttatatttctttattggtgaagtgcccgtgtttgtcctttgctatattatttattgaagtattggtaattttcttattgatttcataaattctttacccattaacaaaattaaactgactattatatatcctttaaatacattttttttctaaaatctcccataaacaaaaccacacaaagcaaaatatg

SEQ ID NO: 420504 - DNA, 595 bp, Homo sapiens
acatacaatgtatctacatagacacttgaatgaacatttattatgaaataaatctcaaaattattggttttataatcaaagagatttatttaggtttaaatattagactgaactttcaaattagtgaccttcaaaagttattcaaccttcctgatatggtttcttttcccttcccttcccttgttacttttcttttgttttcttttctttttcttttttyagagacagggtctcactatgttacacaggctgatctcgaactcaagggctcaagggatcctcctgctttggcctcccaaagtgctgagattacaggtgtgagggacaacacctggcctaacatgtttccttttactagtaaaattggaacttctttgggtaaagattaaatgagaacaattgattcatccattgaataattttacatacttactctgccatacagggcgttagaaaaaaaagagaaacaaggaaaatctctgccctcatggccttcacattttagtgagataaacagaaataaacagattttctataatattatgttagatagtgatgtgttataaagaaaaataaagcccaataatggaccaga

SEQ ID NO: 420505 - DNA, 595 bp, Homo sapiens
acatacaatgtatctacatagacacttgaatgaacatttattatgaaataaatctcaaaattattggttttataatcaaagagatttatttaggtttaaatattagactgaactttcaaattagtgaccttcaaaagttattcaaccttcctgatatggtttcttttcccttcccttcccttgttacttttcttttgttttcttttctttttcttttttcagagacagggtctcactrtgttacacaggctgatctcgaactcaagggctcaagggatcctcctgctttggcctcccaaagtgctgagattacaggtgtgagggacaacacctggcctaacatgtttccttttactagtaaaattggaacttctttgggtaaagattaaatgagaacaattgattcatccattgaataattttacatacttactctgccatacagggcgttagaaaaaaaagagaaacaaggaaaatctctgccctcatggccttcacattttagtgagataaacagaaataaacagattttctataatattatgttagatagtgatgtgttataaagaaaaataaagcccaataatggaccaga

SEQ ID NO: 420506 - DNA, 617 bp, Homo sapiens
ttccaatgaacagcactgtacttgattgaggtgctacatgtatagcacacatttattacagagttgttggttggcttacttccttcatgagatgagattatccactgtgataccttctcaactggaagkcctcttccaaataatcaactggcttctaccatttctgtggcctttcttatatcaagagtttctactaataatgtcatcaatgttatcccaagtgagttccctgaaatacatattttgtaaaatgttaatgtgttaggcaaaaatgggtttgtggtcaaattagtttagaatgcacacagttaaacaaaattaaacagttttatctagtatagaacttctcgcagattttaaaatgccaatggatatggtgaatcttcaacgagggacttgatatgcaacatttgccaaacttatttgaccacagaacgctttttttcccctagtgcattttgcatattttataatctatggaaaacacatagaatttaatattctatggaaaaactatttcaacactgtgggaaacactaaatgtatgttaacatctacgttttagcccaactttacttcatgtggtgacttccatgatactaagaataattagaagc

SEQ ID NO: 420507 - DNA, 573 bp, Homo sapiens
accaagtatgtgctgtacttcatataaattaatgtattcaagactgttaaaattggaattgaaagattgccttgtgcaattatctccctttgaatatgaagtaatatacattagactagaacctggtcccctgccttcacttcctagtgaattccagggagatttcagacaccaagtgtgaaaaataattgggaatctcaaaccattgtcatctcttgacaagaaaccacatacaccactaccactccttcccacatcatgaaaagtgaagtaacagataaacctcaaggacgaaatggtttttagaaatggaaataattattcatttgcttaaagttcagttggttgcaggggaataaggatgttctgctccttggagttattaagktatgcaggctcttttatcttgtttagccttcctctaggcacctggaatgctctcatccagttccagatggagaagaggtgaaggatcacttagatggttttcaaggaccaagtcaacgaggaacatatatcacttccaatagaatttcatttgctaagacttcagtccaatgaccacacacaatt

SEQ ID NO: 420508 - DNA, 570 bp, Homo sapiens
cagcagatttgcaccagtaatgtcacaagtataatcttattttcaaaaatcacaactaagtcagtaggaaaagccaacacaaatggatccaaaagtagtaaaaaagccaaaccaaacttaaatactgaaagtatataaaattgccctcaataytgaaaatgcatcaagtattaaaatcctggaatacagaatataaaagaatatttcaacataatttcagaaataacaaagaaaattaaaattgtcagccaaagaaaataatataaaatttataaatttataaattattcatgattatttgaaaaagtagcaattgggtgtagaagtaaaaaatctaattgtttcaattaaaagataaatgaatatccagtcctagttattccataagaaaaactgaaatctatgcacagcaaaagatttatacattaatgttcatggcattccatctccatcaaaaggagaatcactaaataaatcgtggtatataaaaaaatagaatactactctgcaataaaaggcactaaactactgaaatatgcaaaaagatgagtaaaacttgaaaacacagag

SEQ ID NO: 420509 - DNA, 612 bp, Homo sapiens
caatgcaacttcagtgtaacacacagcaggggttttaaagaaattgacatgctaattccaaaattgtataataaaatgtcatatatttataaacattagaccaatatatttaaaaatataaccacttaaatraactatgctaccttatatcaaaatttgtgaaaaaaaatcacaggaaataaaccaggatggtatttgtattagggtagaaaatagatcatgggacataataaattgtctgtatttagacccacttgaatatggttaattgatttcactacagataattaattgagtcaattaaatgtaaaaagaaaaaggattttgaacaaatagtgtgtattagtccgttttcacgctgctgataaagacatacctgagactgggcaatttacaagagagatttaatggacttaacagttccacatggctgaggtagcctcacaatcatggcagaaggtgaaagtcatgtctcacatggcgacagacaagagaagagagcttgtgcatggaaactcctctttttaaaaccatcagatctcatgagatttattcattatcacaaaaatggcagggaaaagacctgctcccataattcaattacctcaaacc

SEQ ID NO: 420510 - DNA, 596 bp, Homo sapiens
gccagctttgaaacatttgatagcttgaaataatccatggtatagatgactttttacactatgaacattgaaatgggtgagctctaaaaatctggtgagcaggttgttaacatgagccagcacaccactacgggggccctgtacggtggggcacggcctgcccaccactctgacctcttcacaggctactctttccttctcactgggtttaagtaatatgccttcctgggccctaaaatgctaaattgatttctgcctttagttctttgcacttgttcctcccaggaatgttcttcagtcacaccctcacatggcttattccttctcatttaggccacgtgaagtgccacagtctgagagaggtcttctytaagcatccacactaaaggagcccccagtcactctgtgttatattaccctgtttctgtttcttcctagcactttaccatctaactttttctcagttgctctttttttttccccataagatgtagattctatgaagcagtatccttatctgtcttgttcactgctgtatttgtaatccctagaaccatggctagcatggtcagttgaataaattcaataaccctggt

SEQ ID NO: 420511 - DNA, 606 bp, Homo sapiens
acttgccttgcattttaattacactctggaggccaggggagcacccacttttaaaaataatttgcctgtagttactacttgaccatactttatatatgaaacagaagctaccctctgtgttttaatgatgatttgaaagatagtcaatctttcctttccaggtgctagccaaggttgagcttccggcaytgaccctatgtcaacaaagttgaaaaatatggaatattatgcagatttcacagctgataatgtccttgggaacagttattccagtgttttccaaagtgaactgtaaggtcccatcactgtggaatcttaacaagtgttaagtgataatagttttctgtggccatataatgatggccacattggattagtcgtcgtgacagcttctcctcctttttgggatttcgtagagaatttagcatatagcagatctttgaataacatcattttattcaacattgttttgctataaaaaaaaatagattcccagccagggctattatgtggagtttgcaagttctccccacatctgtgtgggatttctccaggtactctggtttccttggacatctcaaagatgtttatattatgtgatgtggt

SEQ ID NO: 420512 - DNA, 424 bp, Homo sapiens
ccctcctcaaattctagaacatccaacttttaatttcctgccttgcatttgatatcttamagtaatgtgaatagatgagtaagggtaatatcaactgtaacaaatggattcaaaaaatatataatgtcttaaatacaatagaagtttatttatcactcatgttattggtgggcagctcgttttgacttggtgttatggacagctaggaggttcacatcccttggctctctgatcccccaaggtttcattattattgtttgcatccaacagataaaaggagacagaagagtgtggaaaagaaatattacttaaaaactcttttctagatactcatcacttatgtttacactctaagacaaaaaaagaaaaaaaaagaatcaatcacatggttatctctgaatgcaaggaggccacggaggacaac

SEQ ID NO: 420513 - DNA, 499 bp, Homo sapiens
atattttctttcttatctatgattaaagatcaatctatttaaaataacttgtttctgtagaatgcatgaatgacagatttggatgattagataatttccgagaatttcctccaactctgttcacagttacatattattgcaattataaacacagcattgtaattggctaattaaacttcttctttgtgaaaggggtaaaagcttttcttctttacagayaacagacaactaccagcaatttcaattcacataaaaataaacgtatgtgcaaaacctataagaaaaacaaaaacacttttaaagagaaagaaccctgaaaacgtatagttgcccaatttgtcttatataaattgttaccatttttcacattcatcagaaataatttatttctcattcactggattttgctatgtgcaaaccaaagaattccttatattaacagtaaacatggtcataaaactagcaatcttattattctacttcagctgggttgttttgc

SEQ ID NO: 420514 - DNA, 655 bp, Homo sapiens
aataaatgctggcagtatgtggagaaaagagaacccttgtacactgtttgtgggaatgtaaattagtgcaaccactataaagaacagtttggaaattcatcagaaaaccaaaaactgagctaccatatgattcagcaatcccactgctgagtatatacccaaaagaaagaaattcagtatattgaagagatatctgcacctcctatgtttgtggtggcactgtttccaatagctaagatttagaagcaacctaagtgtctgtcaatatatgaatggataaagaaaatgtacttatacatggtagagtactattcaactattaaaaaatgagattcagtaattgcaacatggatggaactgagggtsattattttaagtgaaataagccaggcacagtaagacaaacatcacattttctcatttatttgtgagatcaaaatatcaaaacaattgaaaccatggaaatagagagtagaaggatggttaccagagtctgggaagggttgtgggccttgggggcaaggtagggatggttaacaaatacaaaaaaatattgttagaaagaatgaataaggcttagtatttgatagcacaacagggtaactacaatcaataataatttaattgtatattttaaaataaataaaagagtatt

SEQ ID NO: 420515 - DNA, 576 bp, Homo sapiens
taaacaacatttgtaaatgtttattagctgtaaatacttagggaaactggtgtttggttaaattaatattacatatctatattacagactagtacgtgaatattctaaacttattgtaagattataagcatacattgcttggggaagatgttaccaaatacttttatgactaaatgtagactaagaaacaacgttttcaatataaatatgttgttgtaatttgcatatatatataaaatacactaaaaattgttatatgagcatgatgacaataatagtaatttcatgatttcattttgcatttgtacttatgattttttcacaatgcatagttaaatatttataatgacaaaaacattagaaatcaatggcacatggaaacatttagatcaaaatatckatagaaattatttctttttattaggagctctgatattctaatgtaatcattattaacaacttttctattgtttttaaactagaaaaattagtaaaaacatttaaaatatagtttttgagtctaaaagatgtaaataactgggagattatgtgaattcacttgtaaaaaatttgaaa

SEQ ID NO: 420516 - DNA, 673 bp, Homo sapiens
acataagtagttgtgttttcaggagtgacagcaatggcacaaaaaaattgccaagtagggaaagtttagatttaaaaaattttaaataagtttaatagccatcttgccaacaattttctttcaataataacattataaagaaagtaaatctgattcaagaaatggacccagattaaaaaccgggtaaatctgataatatttgttgacaatatgtgcatagtggggataatggattttttaaaaagatgacaagagtagtcatacgttcaatgggtttgaattgaaaaaaaagatttgaagtttttatctatagttttgtttcattttggtttcttatctagccctattgtaagcaggtatctctaaaatgaagtcagaatttggcattttctaattttagacttaaaagaagaaaatgcattgtacttaggctacagctatgaaaattgtctttttacttaaaaaattaatcacaatacrgtttatttgattggttaactcactgtcattgctaattgtttgccaaatattttattataaagaatcttcaacttatcagatgcattatgaatgatttattgtgctttgccaatggaattatgatttttaatatgctgttgtatatgcttattttaaaatattaaataggttcattatgtttagaaatgaaaat

SEQ ID NO: 420517 - DNA, 503 bp, Homo sapiens
tcattaaaatgaaaataatgatattcaacttattgttatgaaaaagctgttttaaaaacaatatatggtaaagcagataatacattcatcttgtcccttgattcacaatgaatgattgatatgttttaattttttattttatatgatgatagctaagaaacctctattgaataatgtgtataccagagtaatacaagttggagagataaaagcattcagagtaaagagaaagacattgagaaattgagataaatctaaggaaatgatgcaataaaatgacaggcttatgaggggaacttaggaaaatgcaatggctggaaaaggagaagcaagtatggtaacaggaagagtcaaagaaaatgaaagaacccaytgcccatcaggaggtttactgtcacatgaccattccccaaaccttagggaaataattctgtttatatagactgtcatctctcttgaagtcaaaaatttcaaaatttagaaatattccatcacagaacttt

SEQ ID NO: 420518 - DNA, 609 bp, Homo sapiens
ggcaaatggtagatctaagaaaccacgtagcatcaagagaatatatgcattggctaagaatctttatttatgtatattaaataattatatttttatctcattatgttgcttaataatgacaaatgataagacacaatttctcctcttaagaagctttttatatcaaattatgttaaattaaaaataccataatcttcttaatctttaaagaagtgatcgttttagggtttttttttaagtgtatgtttggctggaaatataagtctaaacataattattatttagagattttgttatgactgtagtttcataaatacctacattacatttcaatgtattgcatgtaatatattacatttcaatgtatttcagcattgaaataaattctaaaatgccattttcactctttcaaaatcaggttgaacaaagagaaatccagtttcagagcaggaagaagaatactgattgtgttcaggctrcataaatcatgaatcactcagtagatattctgcgtccctattttatgtcattctctagatacactatcttaactgcttttttttttttaacctgttcttacaacactgcatcttatatcaccaaggctat

SEQ ID NO: 420519 - DNA, 575 bp, Homo sapiens
cttgccctttaaaatatattttttttctatttactgcttctgcacccatggaattgaagtatttttgatatttcagacatctgttagtgagaaggctttataatcaggaaggttagacagtgctttagaaaagtttcaatattcgttaattttctatcatcacttaagtaaaattaaaattacaaatcaagaactcatgaagggcccacatttctatatttatctagtgacttcctgacattctccttcctgaatttcattatatcataatatcaaatggcttgtagtcccccacagacatgataatcttccagttccatttgtctgtgwccaagttgttatcactcgctctataattctgcttagcctgttatcaccttatcttcccattctcatcttgggtgtgttttcccaatagaggcattgctgacacaaccaggcagaattaagtgtcctgttctatgttaccattgtcctctgcatatgccttcagcaaaacaatatcatatatgcaaaactatttatttatctgtttgtaaagtcttactagattgtaagcactttagaaaagccac

SEQ ID NO: 420520 - DNA, 596 bp, Homo sapiens
agggggtggaagtgctccctagactctgagccgcatccccacctggaggtcctaggcagctggggggcagttggtagaagacatttccaggaccactatgtttgttgccccctaaactgttgcaagtcatagcccaaactctgtaagctaaatcggcctcctgttatttttgcagctcctttccagaggaacacatttctagtctccaagtatttgtttcctcaactttaaaatagagataagagaacctacctcacagggtagatgagaggatgaaataagttaaagtacgtaaaggcacttggcatactaaatactaatcctggcatactggaagggcttagcaaaattacttagttggcattattatacaatttgcaacactctgctccmagttttagactctcaaaagtctaaaactcagctagcatgaggcactcttggtatagcttatactttgcagactggcttatctaagctgaattttccttgaatctaaacatattagttgtactcttaacctcatctgttgggatgaggttgtcttggatctgagaccaatggttactataccttctttgtgaataatgttttat

SEQ ID NO: 420521 - DNA, 572 bp, Homo sapiens
tgtttacacatttcagaactgcctggaatcctgagctacatgacctctaagagaccttcctaccaatctctgaccagtctgaaacattttcaagaaaaccaggacttttagaaagctgtctttttggactctaycaatagagagaatgttttcaaagtggtctctgcttggttgaccaccatttccaaaatttcctttcagttaatattttcccaaatgagacaaagctgtttgtgcattctccgagtcatccatgtctaacttcgcataattgatattctgagctttgtgaggagtttatgaaaatccgaaggtttatttttagtagtcctataatcctgaagtgttgcttaatgtggtttttctttttttgctcaaaagataacgatgcttcatttattctttaccaataggtgaattcttcccattattaatttctatatggtgttatctgtaccctctagtgctacgggaaaagtatacaacattcctgaaaaggggaacgcatttcaataaaaacaaagtgtagctaattattgtgattttgatttaaataaatgaattaatgattt

SEQ ID NO: 420522 - DNA, 560 bp, Homo sapiens
gtagtcctataatcctgaagtgttgcttaatgtggtttttctttttttgctcaaaagataacgatgcttcatttattctttaccaataggtgaattcttcccattattaatttctatatggtgttatctgtaccctctagtgctacgggaaaagtatacaacattcctgaaaaggggaacgcatttcaataaaaacaaagtgtagctaattattgtgattttgatttaaataaatgaattaatgattttggtctacctgtaggtctgtgccctatgaccatacaagtttgaatcactggagcagtgaaatagtggacatttttaatcactcaccacaatgcctggcactttaaaatattgaagtaatggaagaaagatttaaggtacatgtcaattgataaatgctttggcttatgtgaattctgcacagcacagactgatccatgtttttagaaagtgttcatctttcacaytgacgtgcttttaaagtttggaaatattccatgaattgtaataattttgtacatttttacaataccagagctaaatttgatgtttta

SEQ ID NO: 420523 - DNA, 592 bp, Homo sapiens
accaaattgttcttcacttttattcttctatcatcttgtccaacaaatactcaayccaagaactatcacctcttgcttaagggtgctgttttttttttaaataaacacaactcgttatttctaccaatgtcaatatggagaataaaggaaactgacatttattaaacttcacttatgaatcagatatgctgccagccagtaattttactaatttgttcatgatcttatgctcagaacttggatcaaatccaggtccatttaatgccaaaacatttatttccactgagtattactgcccaatacaaaaattaaagtaattttctctgaccctatatgtatttcaggcatttcttgacccaatacttacaacataagtgctatgtgctcaaatttaccttctatgtaactccagatttaaggatctttccactagagtcctgtgtattcagatgcagacaaatggtcaagttcactggctatagttgataaataatttttataataggtgtttgcttcatacagtaggttctaacttccaaggatgaccctgtgccagagttcccatattcaacaaaatggctaagagcttctc

SEQ ID NO: 420524 - DNA, 592 bp, Homo sapiens
accaaattgttcttcacttttattcttctatcatcttgtccaacaaatactcaacccaagaactatcacctcttgcttaagggtgctgttttttttttaaataaacacaactcgttatttctaccaatgtcaatatggagaataaaggaaactgacatttattaaacttcacttatgaatcagatatgctgccagccagtaattttactaatttgttcatgatcttatgctcagaacttggatcaaatccaggtccatttaatgccaaaacatttatttccactgagtattactgcccaatacaaaaattaaagtaattttctctgaccctatatgtatttcaggcatttcttgacccaatacttacaacataagtgctatgtgctcaaatttaccttctatrtaactccagatttaaggatctttccactagagtcctgtgtattcagatgcagacaaatggtcaagttcactggctatagttgataaataatttttataataggtgtttgcttcatacagtaggttctaacttccaaggatgaccctgtgccagagttcccatattcaacaaaatggctaagagcttctc

SEQ ID NO: 420525 - DNA, 476 bp, Homo sapiens
gtgaatctggtctcctaacttcaagtcctttcctcagtccaatgtcacagctgcctctcaaaggtgtttactagatgtgtatagagatgacacggatgggttgctgggtgaataattagatagcaaacctatttcattgttcttttgcagtgtaatrtcatccttaactctaaaatactaaatatttttggaaagtaaaagtgttctttcatcaagggaaagtttccagaggatattagaaaagtattttttaaaagttgtttacttataaaattcctagaagaatacagtgacctgctactattaaaaaatacttttcttccacttgagttgtttgtgctattattttcaattaatttatatttatgtattttaactccattgtcttttttatttttgtatcaagtgaaaatgttttgaaaatgactctggttaacaaattaattaaacattcaataaaatcacctttatgccta

SEQ ID NO: 420526 - DNA, 582 bp, Homo sapiens
accttccgtctcccatcaccagagtatctaaggaagaaaaaactgtaatataaggagcaatgttcataaaccccatgattattcatataatacaaatactctatccygcctctcccagcttccactttgtatatgatttggtgacttgattattgaataccttgaataatttaacataactccccataggtaacggctttaacctctagaaatctacacacacacacacacacacacacacacagacacacacacacacacacacatcccagttgaaaattggcactttagaaactcacctgccagttaattattgctaaaggtcttattacactataattttatcacagttatccttcagtgataactggtggtgtcaataaaagggcacgaatggagattctgtccctctctcagcctcctcatctgccaagaaggccaatcttccggaccaattttgttgactatcatatatacaggatatatgagacacacaaaaatacatatatgtacatacatatgtgtgtgtatttgttctctaagactgaaggagatatgatctagcaacacattaaccacgtg

SEQ ID NO: 420527 - DNA, 582 bp, Homo sapiens
accttccgtctcccatcaccagagtatctaaggaagaaaaaactgtaatataaggagcaatgttcataaaccccatgattattcatataatacaaatactctatcccgcctctcccagcttccactttgtatatgatttggtgacttgrttattgaataccttgaataatttaacataactccccataggtaacggctttaacctctagaaatctacacacacacacacacacacacacacacagacacacacacacacacacacatcccagttgaaaattggcactttagaaactcacctgccagttaattattgctaaaggtcttattacactataattttatcacagttatccttcagtgataactggtggtgtcaataaaagggcacgaatggagattctgtccctctctcagcctcctcatctgccaagaaggccaatcttccggaccaattttgttgactatcatatatacaggatatatgagacacacaaaaatacatatatgtacatacatatgtgtgtgtatttgttctctaagactgaaggagatatgatctagcaacacattaaccacgtg

SEQ ID NO: 420528 - DNA, 343 bp, Homo sapiens
acattttcaggtaactttatagtaatgcctcacttctcagtactgattttatgtatcaggttgttcttacrctgctctaaaaaaaatacctgacactgggtaatttatttaaaaagaggcttaattggctcatgcttctgcaggctatataggaagcatagtgacagctgcctctaggggggtctcaggaagcttccagtcattgtggaaggcaagggggagcaggtacttcacatagtgaaagcagaaacaagagagaaagagtgaggggagtagatgtcacatacttttaaatgaccagattttgtgacagatcactccttatagcaagcacagcaccaag

SEQ ID NO: 420529 - DNA, 343 bp, Homo sapiens
acattttcaggtaactttatagtaatgcctcacttctcagtactgattttatgtatcaggttgttcttacactgctctaaaaaaaatacctgacaytgggtaatttatttaaaaagaggcttaattggctcatgcttctgcaggctatataggaagcatagtgacagctgcctctaggggggtctcaggaagcttccagtcattgtggaaggcaagggggagcaggtacttcacatagtgaaagcagaaacaagagagaaagagtgaggggagtagatgtcacatacttttaaatgaccagattttgtgacagatcactccttatagcaagcacagcaccaag

SEQ ID NO: 420530 - DNA, 343 bp, Homo sapiens
acattttcaggtaactttatagtaatgcctcacttctcagtactgattttatgtatcaggttgttcttacactgctctaaaaaaaatacctgacactgggtaatttatttaaaaagaggcttaattggctcatgcttctgcaggctatataggaagcatagtgacagctgcctctaggggggtctcaggaagcttccagtcattgtggaaggcaaggggsagcaggtacttcacatagtgaaagcagaaacaagagagaaagagtgaggggagtagatgtcacatacttttaaatgaccagattttgtgacagatcactccttatagcaagcacagcaccaag

SEQ ID NO: 420531 - DNA, 343 bp, Homo sapiens
acattttcaggtaactttatagtaatgcctcacttctcagtactgattttatgtatcaggttgttcttacactgctctaaaaaaaatacctgacactgggtaatttatttaaaaagaggcttaattggctcatgcttctgcaggctatataggaagcatagtgacagctgcctctaggggggtctcaggaagcttccagtcattgtggaaggcaagggggagcaggtacttcacatagtgaaagcagaaacaagagagaaagagtgaggggagtagatgtcacatacttttaaatgaccagattttgtgasagatcactccttatagcaagcacagcaccaag

SEQ ID NO: 420532 - DNA, 582 bp, Homo sapiens
tattatctaccattgttatacttatcactattattcttacttgaagaactatgtagaaaataattattgaaatccatgcaacaacatttagcatacttattaaatgcaaactgtgtgaagcattgttcaagattctggagtctatattttaggtaagaagctagacaataaagaaataaataataaatgggaaatttttatatacttgtaagtactcttgaaaattaaatagggaaatatgaaagagagcagctagggaatgaaagaagggaataaagatttttcattttttgtaacactagatggtatgcttaagtaagatcataactaagaagtgaaygataaaaaggagtcaggcttacaaagatttcagggaagaggatttcagacaagggaacatagaaaacaaagggtctgatataggaataaacatgctctgttcaggaccagaacaaaaaacaactgaaacagtaaagaagtggaagagctataaggtcaaagagggatagtacatactgacccacagaaagcactgtaggacagagtgagtgaggagtttgaaatttttccggagtgcagtgg

SEQ ID NO: 420533 - DNA, 574 bp, Homo sapiens
agcacagtaagggttctcctccttatgatttttttctattcccttgtcttcttttgttcttttctctgctttttgttatgtcttggcttaaaagatgtagtagatacattaatttgaaaattattttccaaatcacctgcagatatgttcttaagcttcattaactctctaacttttttcctgcagaaaacaacaacaaaaacaamagtataaaatcagcttcgtttcttctccatcctcagcagcagttatttgctccaaggatgtagatgagaagctatttccaaagccatcacagcccgcaagtaaaaaccgtttgtaattctcatctggaggctataaacgcaagcaagcctgccgcagctctcttcagttgctgacagtctaattttgaatgttctgccaccagagggaactggagttgtaagattttacaatgcctcacaagtgctgtatatacctaatgaaatatgggttgcttaatgagacgaatgctgttaaacttggaaattttcacataaaattttcagagggattaattgtattaaatatctctagagctgttattagtcat

SEQ ID NO: 420534 - DNA, 548 bp, Homo sapiens
agcacagtaagggttctcctccttatgatttttttctattcccttgtcttcttttgttcttttctctgctttttgttatgtcttggcttaaaagatgtagtagatacattaatttgaaaattattttccaaatcacctgcagatatgttcttaagcttcattaactctctaacttttttcctgcagaaaacaacaacaaaaacaacagtataaaatcagcttcgtttcttctccatcctcagcagcagttatttgctccaaggatgtagatgagaagctatttccaaagccatcacagcccgcaagtaaaaaccgtttgtaattctcatctggaggcyataaacgcaagcaagcctgccgcagctctcttcagttgctgacagtctaattttgaatgttctgccaccagagggaactggagttgtaagattttacaatgcctcacaagtgctgtatatacctaatgaaatatgggttgcttaatgagacgaatgctgttaaacttggaaattttcacataaaattttcagagggattaattgtattaa

SEQ ID NO: 420535 - DNA, 548 bp, Homo sapiens
agcacagtaagggttctcctccttatgatttttttctattcccttgtcttcttttgttcttttctctgctttttgttatgtcttggcttaaaagatgtagtagatacattaatttgaaaattattttccaaatcacctgcagatatgttcttaagcttcattaactctctaacttttttcctgcagaaaacaacaacaaaaacaacagtataaaatcagcttcgtttcttctccatcctcagcagcagttatttgctccaaggatgtagatgagaagctatttccaaagccatcacagcccgcaagtaaaaaccgtttgtaattctcatctggaggctataaacgcaagcaagcctgccgcagctctcttcagttgctgacagtctaattttgaatgttctgccaccagagggaactggagttgtaagatttyacaatgcctcacaagtgctgtatatacctaatgaaatatgggttgcttaatgagacgaatgctgttaaacttggaaattttcacataaaattttcagagggattaattgtattaa

SEQ ID NO: 420536 - DNA, 553 bp, Homo sapiens
tctgttccagcaataaaattctgtgatctcttgtcttttatctgatttgtcacagaacattttaatatcattgatttttaatagcaaaaaaagaaaaacaaacacttaaaacttattgctaacatactgagtaaacaatgacagttttattaaccatatgtgtaaagtgcacttaaaacttaaatagacaagcctgggcaagtaaacaagactccatctctacaaaaaaataaaaatataattagctgaggacagtggtgtgcaactgtagtcccagctactcaggagactgaggtgggaggattgcttgagctcaggagcttgaggctgcaatgagcaaacgagtgtgccactgcactccagcctgtatgactgaatgagactccatcactaaaaagaaaaaataacttgaatagacagctctcagtttgtacctttaaatagtatgagaaagtagatcagaattacagacttgctactactamtaataatgataatacattaaaatgggtctttacaaactcacaaaatattttctgattagaaaagtttt

SEQ ID NO: 420537 - DNA, 706 bp, Homo sapiens
tcatatgctaattagcttgatttagccagcccacaatgtatatatatatcataacatcatgctgtatctcatgaacatatacaatttttatctgtcaattaagaagaattaaaataaataaatctgtaatttcattgaccatttctcacaggttgttttaaagcataagttaaggtgatcaacatattcttctctttgttatacttttccctacttgatatattagtgagaatattaattatcacctcattctcaatgactaggttaattactacaattattttaactaatataactttaaatactactttagagtttctactcttagtatgctttatttgtggataaacacttttagttatctaggtacatttttatggcacttggatttgatgggaataaaaagaaattakcctgatctaaatctttagtctttctttgtattctccatatattagtcatggtttccatgttgttgaattgtccttttttggagttaacatgcctgatttctctttacattggccaataagaggatgtagaactgcagctggtatttaattctaattatttgcatttttcaataacatttatttcagaaaaatttttcaagattattttttgctaagcacaagatatttgctattctgtaccatgttccctaaaagcataatgctaatagaaatctgcaccttgattaattttt

SEQ ID NO: 420538 - DNA, 601 bp, Homo sapiens
gggatattataataagggccaaaggcgaatagtcaaacctgagaaaaatgggatgtgagttggtgatatcatggagaattaacttaggagttagtgggttaaaaatatgatctccagggaaatgagttcaaacttttaaaatgctggaaaaaagaattttaaatctgagagaatggatttctyactttggggacattctggtgatagagggtaggggattggtaaatgatttctgacttactgctgctgattttgaaatattttaccttcatattcttttacctatggctttaatgtccataacttaaaacagtatcttctaaaattattatgattccctaaatatgcatgttaaaaataatgaatactcgtcaaaaagactaacataaactctgttagataatagaaaagaaacagctagtagtcaggatttcaattttcataacttatttcctaactccatggtgtctaaaacttacttgaaagaaacattatttcctttatccctgtcatagttcttcaggctgtattatgcataccacatcctctgtagccctcagcctttggtggaagaaacgaaagaaaaaaaaagtaacaatta

SEQ ID NO: 420539 - DNA, 601 bp, Homo sapiens
gggatattataataagggccaaaggcgaatagtcaaacctgagaaaaatgggatgtgagttggtgatatcatggagaattaacttaggagttagtgggttaaaaatatgatctccagggaaatgagttcaaacttttaaaatgctggaaaaaagaattttaaatctgagagaatggatttcttactttggggacattctggtgatagagggtaggggattggtaaatgatttctgacttactgctgctgattttgaaatattttaccttcatattcttttacctatggctttaatgtccataacttaaaacagtatcttctaaaattattatgattccctaaatatgcatgttaaaaataatgaatactcgtcaaaaagactaacataaactctgttagataatagaaaagaaacagctagtagtsaggatttcaattttcataacttatttcctaactccatggtgtctaaaacttacttgaaagaaacattatttcctttatccctgtcatagttcttcaggctgtattatgcataccacatcctctgtagccctcagcctttggtggaagaaacgaaagaaaaaaaaagtaacaatta

SEQ ID NO: 420540 - DNA, 575 bp, Homo sapiens
gctatggtggctatggggagggactccttttgtttgagaaaaaaagaaggaagagtaaaggggacttcatctgtcagcataggtactaacatgaccacagagggatggtgcaccaggtggactcatagggtctccaattccaggccttggtcttagatggcatttctgaacctgccattggccagatggaagcctgctaccctgaagggggcgttctaggcctggcatcattcaccagaagctgacggaagggcccttsgtccttgaatgaacattggcagtagccaggcagtactctctacaagttcggggtggtggtgtccatgaggggagaccctctgcatgtggaaagggatggtaataatgggaaggactttatcttgtggcttgggtgctagctcagctgcagtagaatatagaaccaagtagcttcctaaggtttctgactctaggccttaactcctagatggcatctctggacccacctgggatcagggagaacttgccaccctgaagggaaggacatgagcctgtcaggcttcactatctgctgattgtacagccctatgcccttg

SEQ ID NO: 420541 - DNA, 603 bp, Homo sapiens
tccccagtagctgggattacaggtgtgcaccaccacgtccagtaatttttgtatttttggtagagacagggtttcgccgtgctgcctaaggctagtctcaaacttctgggctcaagcgatcctgccaccttggcttcccaaagtgttgggattacaggcatgagccaccacgccccgcaaaaatatctttaaaatttatataataaaataaatctctctcytctaagatctgttgaagtaaaatccatatactaaatacactcatatgtacaattttcttatacctgaattagaaagaacaacaatattggtccaaggatacaaatttcagttagaaaggagtaagttcaagagacttattgtacaacatggtgactatagttattgacaatgtattgctgaaacatgctaaaagagtagattataaatctcaccacaaaaaccatactttatgatgtaatatgtatgttaattagctacagttagccattctactatatatatttcaaaacatcatacatgataaatacatacagttttatctatcagttataataataataataatagtcccttgcatttataaaaagagctgcagttcaa

SEQ ID NO: 420542 - DNA, 609 bp, Homo sapiens
gtctattattaaaaagaaaaaagataagtgttggtgaggacacaaagaaaaggaaacccttgcatatcgtttgtaggaatgtaaattagacagccattataaaaaacagtacagaggttgcttttctcaaaaaactaaaagtagaacaaccatatgatccagtaaacgcactataggttatgtatccaaaggaaatgaaatcagtacatcaaagagatatgaagactatggttaatacctatatatgtattacatttttaaaattggtaaaagagtagattttaatgtctcacctgaaaaaataagtatgtgaggtaatacatatgttaattagctcaaataagtcattgcaccaatgtgatcatattgtaaaacacaatgttgtacactatacatatataacgactttatttttacatacaaaataaataattttaaaaacaacatgagaagaatcactttagttaatattaaagcttgctacatagctagagtaacttagactgagggtcttgggtgaagagatagacrtatagatcaataaaacagaataaagaatcctatattagatcccacacaatcatattcaactgatttttgacaatagtg

SEQ ID NO: 420543 - DNA, 582 bp, Homo sapiens
ctatattagatcccacacaatcatattcaactgatttttgacaatagtgcaaaagcaattcagtggaggaagaataacccttaagtaaatagtgctgaaggatctggcaaaaaaactgatgtgaactttatactttttataaaaattaacccagaatagatcataaatatatatgtaaaatataaaacaaaaacacttttaggagaaaatccttgggcaaagaattcttagaattgacaacagttgcaaaattcataaaaaaattaattagacctcatcaaaattaaaaaaaaaaacttttgctctggtaaaacccatgtgaaaagaatgaaaaggcaagctagaaatttggagaaaatatttgcaaaccacatatctaacaaaggagtaggaaawaaaaaacctctcaaaatataacactgggaaacaatctaattagaaactgtgcaaaagacatgaacattcatttcaccaaaaaggaaatacagatggcaaataagcacataaaaaatgtccaatattattagctatcagagatatgcaaattaaattcacaatgagctatcactatatacctttcag

SEQ ID NO: 420544 - DNA, 582 bp, Homo sapiens
ctatattagatcccacacaatcatattcaactgatttttgacaatagtgcaaaagcaattcagtggaggaagaataacccttaagtaaatagtgctgaaggatctggcaaaaaaactgatgtgaactttatactttttataaaaattaacccagaatagatcataaatatatatgtaaaatataaaacaaaaacacttttaggagaaaatccttgggcaaagaattcttagaattgacaacagttgcaaaattcataaaaaaattaattagacctcatcaaaattaaaaaaaaaaacttttgctctggtaaaacccatgtgaaaagaatgaaaaggcaagctagaaatttggagaaaatatttgcaaaccacatatctaacaaaggagtaggaaaaaaaaaacctctcaaaatataacaytgggaaacaatctaattagaaactgtgcaaaagacatgaacattcatttcaccaaaaaggaaatacagatggcaaataagcacataaaaaatgtccaatattattagctatcagagatatgcaaattaaattcacaatgagctatcactatatacctttcag

SEQ ID NO: 420545 - DNA, 645 bp, Homo sapiens
tgccttttcagtatacaaagaaacaaacaaaagaaattccactcaggataacttatataaaataggaaaatttgcatttttcagctcttcccacattcrcacattatttccatcataacctcttaaatattttcttgtatctaaggtgtagcttggtctataagatgagagacaaataactaaatgtattattactcttattttcccttcctaattacaaaacataaatacgtcctgggaatcttcagcaacttcagatgctaagcagtctctctgcctccagtaacttctagcaggatgtgctccatccaacatccttgaccatcctttctacaacatagactttagcatgccactgtcgcccagcccctaaccctccactcccaccatcttaccagtccctaaacataaactgtgtgttatcgtaaccctccctttgctcatgctcgtgcctggaatgtccttcttgagactttctgaaatttctatagaaagtgtggagaagcaagtttctaaagatgccagtcctaggaaaccagctgcatttactctatttcttctagagtatttctagatatactctagaatgagtatttctcaaatcacaacaacagacttttatgataaaaccaataggtgtatcag

SEQ ID NO: 420546 - DNA, 645 bp, Homo sapiens
tgccttttcagtatacaaagaaacaaacaaaagaaattccactcaggataacttatataaaataggaaaatttgcatttttcagctcttcccacattcgcacattatttccatcataacctcttaaatattttcttgtatctaaggtgtagcttggtctrtaagatgagagacaaataactaaatgtattattactcttattttcccttcctaattacaaaacataaatacgtcctgggaatcttcagcaacttcagatgctaagcagtctctctgcctccagtaacttctagcaggatgtgctccatccaacatccttgaccatcctttctacaacatagactttagcatgccactgtcgcccagcccctaaccctccactcccaccatcttaccagtccctaaacataaactgtgtgttatcgtaaccctccctttgctcatgctcgtgcctggaatgtccttcttgagactttctgaaatttctatagaaagtgtggagaagcaagtttctaaagatgccagtcctaggaaaccagctgcatttactctatttcttctagagtatttctagatatactctagaatgagtatttctcaaatcacaacaacagacttttatgataaaaccaataggtgtatcag

SEQ ID NO: 420547 - DNA, 589 bp, Homo sapiens
ttttatattgtcaacgtatatttatttaatataatatgtaatatttatttagcagtgaccatatgccaggtacctctttatcagtatacctatcatttaaaccttacaaaaacacatttgtggagcactattgctttccccttatgcaaatgggaagctgaggcacaggtatgttaaatagttactccagattacccagtgggtaacagattagagctgtgatttaggtcccaagcaytgactccagatactgtaggcttaaccccaagttgggtactgtatgtctggtaacatgtaacctagatgttatgatgcaatgaggtttacatcctgagattctaataatgataattaaattgtagaaatttattatacttccaggagaatataagaagaaaaatatgctgttaataaacctgctttgatgcattcttctcaatagtgaacttgaactataatagaattcccactggattataattcaaagaaatctctttttttcccagtgaaacattcatcataaaatgaatgtgagagacagtgagatccctgtctagataaataacttatggttgagcataaaaatgta

SEQ ID NO: 420548 - DNA, 589 bp, Homo sapiens
ttttatattgtcaacgtatatttatttaatataatatgtaatatttatttagcagtgaccatatgccaggtacctctttatcagtatacctatcatttaaaccttacaaaaacacatttgtggagcactattgctttccccttatgcaaatgggaagctgaggcacaggtatgttaaatagttactccagattacccagtgggtaacagattagagctgtgatttaggtcccaagcattgactccagatactgtaggcttaaccccaagttgggtactgtatgtctggtaacatgtaacctagatgttatgatgcaatgagrtttacatcctgagattctaataatgataattaaattgtagaaatttattatacttccaggagaatataagaagaaaaatatgctgttaataaacctgctttgatgcattcttctcaatagtgaacttgaactataatagaattcccactggattataattcaaagaaatctctttttttcccagtgaaacattcatcataaaatgaatgtgagagacagtgagatccctgtctagataaataacttatggttgagcataaaaatgta

SEQ ID NO: 420549 - DNA, 589 bp, Homo sapiens
ttttatattgtcaacgtatatttatttaatataatatgtaatatttatttagcagtgaccatatgccaggtacctctttatcagtatacctatcatttaaaccttacaaaaacacatttgtggagcactattgctttccccttatgcaaatgggaagctgaggcacaggtatgttaaatagttactccagattacccagtgggtaacagattagagctgtgatttaggtcccaagcattgactccagatactgtaggcttaaccccaagttgggtactgtatgtctggtaacatgtaacctagatgttatgatgcaatgaggtttacatcctgagattctaataatgataattaaattgtagaaatttattatacttccaggagaatataagaagaaaaatatgctgttaataaacctgctttgatgcattcttctcaatagtgaacttgaactataatagaattcccactggattataattcaaagaaatctctttttttcccagtraaacattcatcataaaatgaatgtgagagacagtgagatccctgtctagataaataacttatggttgagcataaaaatgta

SEQ ID NO: 420550 - DNA, 572 bp, Homo sapiens
tgtgattaatgccatagatcttttccagcttctcttagtttccgcatttaacttccttagcaattcattaaaagactgagggcttgcttgactttattttttgtatctaaarttaaaaataaagcagggcagccataagagaggacattaaagtgatggtacttacttttgtttgcttatttttattttctgatggaacaaatagtttccttggtaggcaaacaactttctgagggtcagcataattgcagtcagcatttatgccctttctgagttggcagcttactctgctgtgagccctgcataagatgcctggttcagtgagcaaaactcacatggtgtcactttgaagataaagtcatgtctcccaggatgcattgtcaacaagcctgatgaggtacagtgttggcgatttgactctttctttagctgttctttgactttccagtcctttgggttattctttactaatctgaagaaatcacagcttctggctattctgtactgtttgaacagttaaacaagcctgactgtcagatttccaatactgaaggaatctacaaaatgagtaa

SEQ ID NO: 420551 - DNA, 572 bp, Homo sapiens
tgtgattaatgccatagatcttttccagcttctcttagtttccgcatttaacttccttagcaattcattaaaagactgagggcttgcttgactttattttttgtatctaaagttaaaaataaagcagggcagccwtaagagaggacattaaagtgatggtacttacttttgtttgcttatttttattttctgatggaacaaatagtttccttggtaggcaaacaactttctgagggtcagcataattgcagtcagcatttatgccctttctgagttggcagcttactctgctgtgagccctgcataagatgcctggttcagtgagcaaaactcacatggtgtcactttgaagataaagtcatgtctcccaggatgcattgtcaacaagcctgatgaggtacagtgttggcgatttgactctttctttagctgttctttgactttccagtcctttgggttattctttactaatctgaagaaatcacagcttctggctattctgtactgtttgaacagttaaacaagcctgactgtcagatttccaatactgaaggaatctacaaaatgagtaa

SEQ ID NO: 420552 - DNA, 564 bp, Homo sapiens
tcaatgtaatttcctacatctcatatggctactatacaattaatttttatttgttattcagatataataagtctttagtatagcctcagggtgtcaatgaaaaagaaagcagcatatatttttcttgggcagtccattcaagagttcaatatatttgtcattttgtacctcagagaccttaaatcactattccaagggtcaagtatttatattccacccaaaagtctcatgattgcaggataaatatattgaagtgataacacatatagaattttccttaaggagaatttgcgtttggtgatgggggagttattttatttgaattttaacaggactttgtaaaaacttgttaacttgaaggctctgtattttaacaatgtatacagagattcttttagttattagctctggtcctggtgtcagctgggraaccaggatgtgaatccagactccatcactgctatttctatttacctctaggcaactaagagtaactgttggctttcataccggtgaaataggattaattatagtgcctacctcagagggctcttgtgagggttg

SEQ ID NO: 420553 - DNA, 584 bp, Homo sapiens
tcaagcctatctccttatatgttctataatttgataactcaaacctctctatttttcagactggcctcttcccatatgatatgaatccctatattattcatcttttaatcactttctgcattcctcaatgtttcttgtagtcagtgcagtgttaattgaagttcatttgaattatcaagccaggcactaggacaattagatctgtctagcctgcttcacaagagtttcctgaagaccaaatggaaatgggctaatgtgtgtaaacttatactgttacagctaaaatgttatatatatttgggccttgtyattaaagcacatgaaggataaactaagtcattagactattttgatgaaaaaaattatttgtatcttatttctattggtcttactttaggttttctaactatatgcacagtaggaagagtgttttttcgaagagagctctcagttctgaagttaggagcattatcagttacaaacacatttgaaatgccttgctcaatgaactccttattggtagaaccaggtttacatgctgaatgcacaatctagagacctaatgccaaaatctttctgatggg

SEQ ID NO: 420554 - DNA, 366 bp, Homo sapiens
cttataaaaacaatgctcttgtctttattcactgggacctcataagaagtcgttttctaagttttaggtatttatctaaagcctgctctcaagccctttatttgaagtgtaggagctacactttacaggagagatgctcagaaatggtttccatttgytctttaaaaagacccagaattatacctggctaaagtttggcatttttaagtgtttcagttcacacatgaatgctttcgtcttatatttttattaaaaatgatcttaaaaatatttagccttcagaagtagaccaccacacaggtcacagaaatggtgatgatggggtagcactttctattttgtggcttaggtgactaatagatttta

SEQ ID NO: 420555 - DNA, 627 bp, Homo sapiens
agtgcagtgtgcaatcccagctcactgcaacctccacctcttggctcaagcaatcctcctacctcagcttcccaagtacctgggaccacagggtgtgccaccacactggaccaatttttgaatttttttgtaaagatgaggtttcgccatgttgtccaggttggtcttgaacttctgggctcaagcgatctgcctgccttggcctcccaaagtgttgggattccaggcatgagccactgcatattatgtaatatttaaatcatttattgtcatttcaacaatattcacagtaacttcacaggggtagattccatttcaagaaaccactttctttgctccttcataagaagtaattcctcatgtgtttatctgttcaagtttttcatgaaattgcagcaaattgttcacacaatgtatgcatcttaatttaaaatatttattgctaaaaaattctaacaatcatctgagccttcagwaagttataattaatttgctggtggaggctcttgcatcaaaattgatggctgccagctgatcagggtggtggttgctaaagggtggagtgacttcaggctccacttctaattctagttttcttgctatttctactacataagcagtgacttc

SEQ ID NO: 420556 - DNA, 552 bp, Homo sapiens
cctgtgccccatgtcacggtgttgaggcagaggccagcacagcgaccccctgtgaaattagctgttatgttatttctttctggtgktgttgacagttgaaatcttctgtcagatctaaactcaggcacttgccatacagaacttcagagacccaaaaaggccacaaatactaagctgatccactgaaattaaagggaaacatagagataatccaaaagaagctaaaatatctctagtatacttcagtctgcggtttctatttaaaactttaaaaaatcccaaattaaaaatcatttaatgtcacattctctgtgatgctgggacaattgttatgagtaatatggttttgaaggctagcttactttgaaccatgttaaaggttagcgtttccaacgctaggaaagctacatatttataaatagcagctaagaaaaagcatgaagattcttaatacatcgtcaatgctttggccctttacaataaaaatatattaaactatataagttctgtttattagattatatttgtgatgatggtcactgtataaatctg

SEQ ID NO: 420557 - DNA, 596 bp, Homo sapiens
agggggtggaagtgctccctagactctgagccgcatccccacctggaggtcctaggcagctggggggcagttggtagaagacatttccaggaccactaygtttgttgccccctaaactgttgcaagtcatagcccaaactctgtaagctaaatcggcctcctgttatttttgcagctcctttccagaggaacacatttctagtctccaagtatttgtttcctcaactttaaaatagagataagagaacctacctcacagggtagatgagaggatgaaataagttaaagtacgtaaaggcacttggcatactaaatactaatcctggcatactggaagggcttagcaaaattacttagttggcattattatacaatttgcaacactctgctcccagttttagactctcaaaagtctaaaactcagctagcatgaggcactcttggtatagcttatactttgcagactggcttatctaagctgaattttccttgaatctaaacatattagttgtactcttaacctcatctgttgggatgaggttgtcttggatctgagaccaatggttactataccttctttgtgaataatgttttat

SEQ ID NO: 420558 - DNA, 535 bp, Homo sapiens
caatgagtgaagcttaagaatccatgcacttaagaatctctctaggtaattccgatattctgtatgtattggagagtactggagtagattaccaggaacttttgaggacaggcaaasagtgtcagaaaggtccatcaaggggtgacaggtgttttcccagtgggtggccagcacatcattgctatgtggagtctgtgggaagaaaaaatgtcaaaatgtcaaaatccaggtaggtggtctgcatcagggtggtctagcaccaggtataatggtcttgatcattgggcaggagctgagtctttgagaactggcaaataaaattacaggacaacatatctgaaataaatgagagattcaggaacaaggcaggagatactaggttggtgcaaaagtaactgcagtttttgccattaaaagtaatattgagtatactggtactcaaagtgacagcttagacacaggaatgaagcagaaattcagttagtagaactgtgattcataatccaaatcgcaatgtgcacctgatgtagagcca

SEQ ID NO: 420559 - DNA, 608 bp, Homo sapiens
taatgtaaacttggtcaaatctggatgcagctaaacatgtatcgtgacgattgaatttatgaggagattagtgtttggtgtctaagctggttcccttgtcacagtcagatatgttggaacagggcagtaaagatgaaggcccccaagcttggttctacatttttaacagcaattttatgcccaaatatatcatataaaccaatacaaataatacagcaagtccatgtgcatgcggtatttaatttttagaaccttgaattgattcaaaatgcacttattcattttactatcaaaacttagcataacgtggatggaactggaggacattatgttaagtgaaataagccaggcacagaaagacaaacttcaygtgttctcactcatttgtggcagccaaaaactaaaacaattgaactcatggagatagagtgtagaatgatggtttccagagcctggaaaaggtaggaggggcagggggggtaggaaaagcggggatggttaaggatacaaaaacgcaggtagaatgaataaggtctagtatttgatagcacaacagggtgactagtcaataatttcttttacatttaaaagtagctaaaatagtataa

SEQ ID NO: 420560 - DNA, 472 bp, Homo sapiens
  misc_feature (1)...(472): n = A,T,C or G
ttcctgttttataccacttgaaatgtgtggccgatcagaaaattgtttctgtccacactggttcttacagagctggaagtcaaatttttcaaataacattaataataagggagccttaatacatttatacagaggtcatatcccatccccttttatagagtcagaggcagaagagaggccattgaaacccacaaagcatcttatatttatatttttcaaggcaattaattatgctgatggcaggagacctcttatagctctcatctgktatggataattacctaaatgaattaggctacaatttgaggcagttttcctaggaccataaagctagcagtaaaaagaatgaaaatggctggttatgcagggtatgtggatgattccttgatactttagttggtgcagaaactgtgtaccaanttctggcttcatcattagcatctcttagctcatcanatcgaatcctggagca

SEQ ID NO: 420561 - DNA, 639 bp, Homo sapiens
gggttttcttaaaacagcattgctaggttaactgttttaaaataaaaatatttgcttaaaaaggtttactttagcaatagtaatgctttcctttcaaaatattatttcaagttttaaaataatgaacttatgattttaattaattamgttttcatgtggaagttgttcatctagagtaactaattttaaagaattggatctttttatttggtaatgcctttagcactctgtgaaatataaattaatgtaaaattaaaattaatttattatgactatccatttttcatggtcttttctattattgtgctgtagcaagtactaattctaatgtagctagataattaattttctattgtcatagctccagatggtcctcctgaaaatgttcatgtagtagcaacatcaccttttagcatcagcataagctggagtgaacctgctgtcattactggaccaacatgttatctgattgatgtcaaatcggtaaggcatgtcttaccttctgtaaaagccagtataaaatggttaataatacaagatttggaaccagactatttgaatttgaattttggctctgttagacagtaggaaaattactttacttgtttgtgtttcaatgtctacatctgtaaagattaa

SEQ ID NO: 420562 - DNA, 203 bp, Homo sapiens
attagcataaaacaacatataacatgatcagttcagaagttggtaaatgaaactgaaaagttggatttctaaataatcctacattctcaagtctttccacttgaatatcattctttccaccctatttcctccacttcttacccccktttaagttctatggccatattttatttccaggagacacaggggaaatggtctttcta

SEQ ID NO: 420563 - DNA, 557 bp, Homo sapiens
tggcagaagacatgaacagacatttcaccacaaaggagacattgttggtaaaacaaacaaacaaacaaaaaatgacaacataagttttcaataccattagccattcggaaaatgcaaattaaagccacaataaggtattattgtctatgtactagaacagataagrtaataatttaaaatatggcgatgatacccaatgctggcaagggatgcagaaagactggacctctcatacattgctagtaggaatgtaaaatggaatagccacaatggaaaataattttgcagccacttataaaactaaacatgaaattactgtgtgacccagtagtcacactcttgggcactgatcacagagaattgaaaaattatgctcacacaaacatctgtcaccaagattgattgcagttttattagtaataatgaaaactggaaacaacccaatgtttttccatgattaaacaaactctgctacatccacaaaatggaacactactcggcaataaaaagaagaatgtactattaatacatgtagtatccaccttgatggacctcaa

SEQ ID NO: 420564 - DNA, 530 bp, Homo sapiens
tgtttccgtggtgctcaatataaatttaaaatatcctaacccatggttggtcctatacagctgattctaaaattttataagagaaatataccataagtgagtaatagaatacttccttttttttttttttgagatgggatttcacgattgttgcccaggctggagtrcaatggtgcaaactcggctcattgcaacctctgcctcctgggttcaagcgattctcctgcctcagcctcctgagtagctgggattacaggtgtctgccactatgcctggctaatttttgtacttttagtagagacgggattttgccatgttggccaggctggtctcgaactcctgacctcaggggatctacccgcctcgacctcccaaagtgctgggattacaggcatgagccaccgcgcctggccatgtaatacttttttaaatcaggaaaacaattaatagtaaatgatatgtattaccttctcaacatatcttctcatatgtgtaggacaaatcagtttaaaagaagcattaaatttgaa

SEQ ID NO: 420565 - DNA, 583 bp, Homo sapiens
tctgtgaaaattacctaattcttagaactctttgagacagctggggaaaaagggggaaatgaactagcagtcacttttaacgggctgatttatatttttaatgaaacaatatctataattttcttttaagaagattagttgtgacatttggagagcatgagtcattgcataagccccctatgttcccatcatcccatctttaccatgtggcggacactgaaatatcattggtctaattcatcaacagcttacctgctgtgtcacacatgtagtatacatgacatatcttgcctttgtgtgcacactgaatagtttttatttrggacctatttaatgatggcttagaaatgtacttttccttttctcaactgcaccatacctttaaaagcacctcttcttaattttttttttgtttacttctgtcaatgtttattgaatgagcaaaagatcccgttctagtcatttcttcttatcagctctggatgcacttcctggtatgttagtgaatctttaaatcgagattgtagaccactgactactaaattaatcatttctgcataaatttatggctacctgacactgt

SEQ ID NO: 420566 - DNA, 460 bp, Homo sapiens
aggggaggtctgaagaagaccaccttttcctgacacagtaggtgaataattctgatcaggttgcaccagaggcggcccagtgtaacattactatcaaaacaatcaacctggtaattgggtattgattatcaaggccagagtccttcatggccttgcttgcttaaaatggacatgaaatgtgacacatgaaacgactggaggtcttgcaatgttgtgacaactgctagtaacataccgaaaattcttcttgaaactttaggttgttgtttgtgcaaagctcttcaacatgttgcaggaaggatttcttgcttattggcctccargtaaagaaaggtataaaatagggtcatgttagattgtatttgttcgcgttagcattggcactggcttcacttttaacaagttaaagaacaatggacatccccaaaatcacaaacaacacagctttttaaagtcactc

SEQ ID NO: 420567 - DNA, 539 bp, Homo sapiens
aacctaatggagaagctgcccagacttgccatttsgtgggggtgggaatgtgggaggtggttcaaacttattaggctacatcacttcagctggagctctgtctcgatggggatgctaaaatccagcaaccaagacttataccagtaaagtgctcaatgaagatgttctctgatagaattcagtcatatatgaggtactcatttttcctactcaattatttaattgctttaagtctcattttaaaaagtctttttaatatcttgaaagtttacgtaatggttattatgtgcaactaactataattctattccactttattttcatgtaacattattgaaaagagctcataaaccagattccacactcaaaaactcaaattcctttcatactgtatcatttgtttccatacccaacaaaattgtatcttccaccaaccagcctggctgcctaaatgagacttgtgggatgctatcaaaggatagcaatgacaagtgaatgacaagacagaagcttgtcattctgcctcttcagggtgggat

SEQ ID NO: 420568 - DNA, 539 bp, Homo sapiens
aacctaatggagaagctgcccagacttgccatttggtkggggtgggaatgtgggaggtggttcaaacttattaggctacatcacttcagctggagctctgtctcgatggggatgctaaaatccagcaaccaagacttataccagtaaagtgctcaatgaagatgttctctgatagaattcagtcatatatgaggtactcatttttcctactcaattatttaattgctttaagtctcattttaaaaagtctttttaatatcttgaaagtttacgtaatggttattatgtgcaactaactataattctattccactttattttcatgtaacattattgaaaagagctcataaaccagattccacactcaaaaactcaaattcctttcatactgtatcatttgtttccatacccaacaaaattgtatcttccaccaaccagcctggctgcctaaatgagacttgtgggatgctatcaaaggatagcaatgacaagtgaatgacaagacagaagcttgtcattctgcctcttcagggtgggat

SEQ ID NO: 420569 - DNA, 539 bp, Homo sapiens
aacctaatggagaagctgcccagacttgccatttggtgggggtgggaatgtgggaggtggttcaaacttattaggctacatcacttcagctggagctctgtctcgatggggatgctaaaatccagcaaccaagacttataccagtaaagtgctcaatgaagatgttctctgatagaattcagtcatatatgaggtactcatttttcctactcaattatttaattgctttaagtctcattttaaaaagtctttttaatatcttgaaagtttacrtaatggttattatgtgcaactaactataattctattccactttattttcatgtaacattattgaaaagagctcataaaccagattccacactcaaaaactcaaattcctttcatactgtatcatttgtttccatacccaacaaaattgtatcttccaccaaccagcctggctgcctaaatgagacttgtgggatgctatcaaaggatagcaatgacaagtgaatgacaagacagaagcttgtcattctgcctcttcagggtgggat

SEQ ID NO: 420570 - DNA, 588 bp, Homo sapiens
tagttcaatggcaagttaactggatttgaagccagaaaatctggcattgtccacccccaattagatttatgacagtggagaatattagtttaatattgtaagccttggtttccttatctgggagatggagaaaataatgaaatctagttacagagctgtgtgaatcataaagtcaaatacaaaactctaattggttcataaaagattttattttactcacgagacttttaaagtactctgaaattatttttagccgtagcaaaataacttcttcataattttttctcttttattctctatgattccagaaagaaaattacccttaaaatatattttttctaatgaataaaataatcctgttatgtcgttcaagctcaagtattttcagttgtattgacttggactctttagtcaaaacataaaaacttattgagaataaaaaatttccaaaaatttttaatattcttaatccagagtcatatttgtttttcaatataaataacattgaatatttatccaattcagtcagtctaacacatagttwttgagccctaattatgtgttagttactgtattaggcactgaaaa

SEQ ID NO: 420571 - DNA, 610 bp, Homo sapiens
ctttcccattttaagaaaaaagaaagaaacatctctacctataagaattaggtatatatagccgggcgcggtggcgggcgcctgtagtcccagctactcgggaggctgaggcaggagaatggcgtgaacccgggaagcrgagcttgcagtgagccgagattgcgccactgcagtccgcagtccggcctgtgcgacagagcgagactccgtccccaaaaaaaaaaaaaaaaaaaaaaaaaaaaaaaagaattaggtatatagaatattttacatactatgctcatatgtacaaaatgagtagttggaagtaaatgtgagaataaacagtatgcagtggatgaaacatatattctagtttgaaaactcagaagtgcacatttaaagagaaaatctataaacctgactgctttacattagtggaaaaagtagtctgaattatgttacaatttgcaggtatatacatatttattactttaagaacttgcacaatatgtaaagaagagctttgctttacatgagtaacattttactaagtgatgtctaaatcatcatgaattctcagttagctagagcagcaataatgacattttattgtaggagaggaatatcc

SEQ ID NO: 420572 - DNA, 586 bp, Homo sapiens
aatctctactcatattttatgttttttaaagtttaactaaaaaaaataaaataaatatagtttagagaaaacaataccttagtgccaaaatcttaaaacctttggtaaagaaagggctaagagcagtttaggaattctttttcttgttttactggggacgccaagggaaagaaagaaagatgacttgggcaatttacctgtaagcttgcaaatgtcagaccccttggaaaacactataattttatctcttagtgggagataccattaccaagtttttatgatccacttttagcagactgttgtaactggcctggttagtattgtttatagacttagggacatggatttctgaaaaatgttacataaactaygtaactgagtctaattggaaatgtctcatgaaagaagcaactcccttctgcatgaaaggtgctctcacaagcactacttagagaactcatagttggaacccagagtcagaacgtgtcctaatgaaagaagaaaggattcaaggaggagtgtggatggtcccaaactttgttttggctgtgtgaaattattagtagcatttgccactgggcaagat

SEQ ID NO: 420573 - DNA, 586 bp, Homo sapiens
aatctctactcatattttatgttttttaaagtttaactaaaaaaaataaaataaatatagtttagagaaaacaataccttagtgccaaaatcttaaaacctttggtaaagaaagggctaagagcagtttaggaattctttttcttgttttactggggacgccaagggaaagaaagaaagatgacttgggcaatttacctgtaagcttgcaaatgtcagaccccttggaaaacactataattttatctcttagtgggagataccattaccaagtttttatgatccacttttagcagactgttgtaactggcctggttagtattgtttatagacttagggacatggatttctgaaaaatgttacataaactatgtaactgagtctaattggaaatgtctcatgaaagaagcaactcccttctgcatraaaggtgctctcacaagcactacttagagaactcatagttggaacccagagtcagaacgtgtcctaatgaaagaagaaaggattcaaggaggagtgtggatggtcccaaactttgttttggctgtgtgaaattattagtagcatttgccactgggcaagat

SEQ ID NO: 420574 - DNA, 532 bp, Homo sapiens
ggatttaccagcaagtatgaatgttaaaatgatagctaatatacatttctacttttaatttattcagtgcagttatgatactgctacaatactcatattgttgtgccatctataaggtttaaaaataattaacatgaagatgatgttctataattgttttattggtttttttattgtgtgcaaatctaatattgcctcactattgactccctatataaacaaactattttccaattccttacagtagacaaatatgcttattcaataagagaaatgaatatattgaaaacaattttgawtaataatatcttgtatcttaagacacaacttcaaatattgtggcataaaaattgaatctaataatgtgcctttctagtggactttactatcaaaataaaaattcttagagttaaccttctatggtttggagatagcgctatcataaactttgttactttgttgtgtttttttaagactctttccccagtctacggacacaacatatttaatctgagttgtatgtgatgtgtgg

SEQ ID NO: 420575 - DNA, 575 bp, Homo sapiens
aaaatcccattccatttttgctggacactatggctcaagtcttcaatcccagcaygtttggaggctgaggcagaaggactgtgttagcccaggaatttgagactagactgagcaatatagcaagacccctgtctctacaaaaaaaaaaaaaaagaaaaaaaaattaaaagcagccaggtgtggtggtacatgtctgtagtcccagctccttgggaggctgagatgggaggatcacttcagcccaggagtttaatgctgtagtgagctgtgattgcactactgaaccccactctgggtgacagagcaagaccctgtctctaaaaaataaataaataaaagtaaaatgaaataaaatccaattccaggtaagcattattactctcttacaactgataaaacaaactaggcctaaaagagtaaaatagcttgtctagggtcccttggtcccctgctcctccctggagtgaggagaagtgtggttcccagatggcctgcctccagtggctgcactgaggggtggcttgaaaaggatttagaccacacaaaaatctccatcacatccctctgagtcaccc

SEQ ID NO: 420576 - DNA, 591 bp, Homo sapiens
ctgggcgacgacaaagtgagaatgtctaaaaaaaacagaaatattacagacgtatgtatatatatagtgtgtgtatatgtgtgtgtatctatctatctctcacatctcctgacatatatttatagaacttttatatatatatacatatatatgtgtgtgtatatataataaagccaaaaaagttatcttatggaaatcttaggaattatatacctgtctaattatataaacacatacatacacacaattatatatagtatatataacatatttatatataactatatgcacaagaagaaactttatatatatttatatatacatatgaagatgaagatatatatctcacatctcctgccataaacttatactagttagatatatatrtgtgtgtgtgtgcataaaattaagaaagagaaataaagatatactgagaaaatatcagaaattatatatataaacatatataagcacatatatacacacaatgatatgaagttataaagtatatagtatatataccttatttatatgtgtttatatataacaaatatgcacaaaattatatatgtaaatatcagaaaataaata

SEQ ID NO: 420577 - DNA, 603 bp, Homo sapiens
taagggagcagagagctagtagaagattggtcctgagagatcagcataatagaaaaaaaggaaacagatgagagaagcattgattctgagttatatggtccatctgtaaacagatttgcacctgtctattaagataggaagaagcccagtcacagtggctcacagctgtaatcacagcactttgggasgctgaggtaggaggatcgcttgagcccaggagttggagaccagtttgggcagcatagcaaggcctcatctcaaaaaataattaaattttttttttcctaaaataaaatagaataaataacatagtgagaagatgaacagaaaacaccatcaagcagtataatttttctgaagtaaaattataaggtagaaggggaaaaaaactggagatcaaagtccatgaatgtggacaacatgataacaccatgtggataacatgagactcttggtaaaggctggatgttaagagtaggggaaagttagcaatagaaaagctttcagaaatgctgcagtaccagtacaggcactaagtggctccattcctatttgaattcaggaaatattctctcaccctaactgcttgacagaaaaataagt

SEQ ID NO: 420578 - DNA, 589 bp, Homo sapiens
taatgatgaccttacgaagtgaagcaggtatgaaaaatagtaagagatgaaaacatacaatggtgaagaggatatatttgaggttaggaagcctgttagaaaaaaaaaaagaacatgtagggaatggggtaattagtcatacctactcaggttggcttctgaatttctacattgtgtttctccctggccagtatccttcggtgctctttaattaatgttaaattgtacccaaaagaatgtggttaagcaagctcaaagaacctcctgcagatgctgggaacgtcattggctggcctccatgtatctgmaaagagatcagctggtgaatgaaaacgctcactaccctagaatcctggcactttgagaggccaaggtgagcaaatcacttgagcccaggagttcaagaccaacctgggcaacataacaagaccccgtctctacaaaaaacataaaaagtagccagggatggaggtgcatgcctttagtcccagcttctcagggggctgaggcaggaggatcacttaagcccggaggcagtagctgcagtgaactgagatcatgccactgcactctagcctaggtggcagag

SEQ ID NO: 420579 - DNA, 589 bp, Homo sapiens
taatgatgaccttacgaagtgaagcaggtatgaaaaatagtaagagatgaaaacatacaatggtgaagaggatatatttgaggttaggaagcctgttagaaaaaaaaaaagaacatgtagggaatggggtaattagtcatacctactcaggttggcttctgaatttctacattgtgtttctccctggccagtatccttcggtgctctttaattaatgttaaattgtacccaaaagaatgtggttaagcaagctcaaagaacctcctgcagatgctgggaacgtcattggctggcctccatgtatctgaaaagagatcagctggtgaatgaaaacgctcactaccctagaatcctggcactttgagaggccaaggtgagcaaatcacttgagcccaggagttcaagaccaacctgggcaacataacaagaccccgtctctacaaaaaacataaaaagtagccagggatggaggtgcatgcctttagtcccagcttctcagggggctgaggcaggaggatcacttaagcccggaggcagtagctgcagtgaactgasatcatgccactgcactctagcctaggtggcagag

SEQ ID NO: 420580 - DNA, 524 bp, Homo sapiens
atagcatatacatacaagggttattattcagccatagaaggaaggaaatcctaacacaggctacaacatggaggaaccttgaggccattatcctcagtgaaataagccaggcacaaaatgacaaatactgtttaattcaacttttgtgagatcgcaagagtagtcaaattcatagagacagaaagaagaattgttcctggaccaaactgagggtcgggctgcttattcttgtggcccagtaatgagatgcagatgaactgggtaggaggagagtttttatttctgtaaccggttacagggagaaggcctggaaattatcgccagaccaactcaaagttacaaagttttccagagcttctataccttctaatcaatatgtctacatgtaagtgtgcattcatctaaagacataagtgatgaacttctaatctagaactaargtctgagtcctggagaccttcctctggagtctcagtaaattgacttaatccaaatggatccaggtgcctggggtgattaccctt

SEQ ID NO: 420581 - DNA, 406 bp, Homo sapiens
ccttaccattccattctgaggcttcaaagccattaatgtcacataagctgcttcctggtagaacaactaactgccctttcagtaacatctaggaaacttcagaatgtagagaacagatccagatctagaacaaaaatctgttctctccccaacagagcaaaatatacatagatagatttttttgtttrtttgcttgttttagacagagtttcgctgtgtcatcaggctggagtgcagtggcacgatctcagctcactgcaacctctgcctccctggttcaaggactactcctgcctcagcctcccgagtagctgggactacaggcacgcgccaccacgcccagctaatttttgtatttttagtagagacagggtttcaccatattagccaggatggtctcgatcac

SEQ ID NO: 420582 - DNA, 542 bp, Homo sapiens
ttatgaaattatctatgaggtagtggggaattcaacacggaaaacactagtattgttatgattctcaacaatagatgagaattaaacaaagcctagggtcatcttcattctatttatcacttaatgtattgtattaaatgtattgtatcactaatacaatatccatggatattaaatattacaaactcatgcacaccttcaggagatgtagttcttatgctgaaacaacttacattctacagacatgcttagaatgtctataagggttagggaaaagcctttagaggacgtagctctgctggttaatgtcaacaataataaaataaatgaatagcatggagatggagcctccattcaatgtagtcttacattaaaaaagtttagtttcttataaagactcaatagatattaytttgctattacatatacacagcttttggacaatagaaccttgtttttttttgatagatcaaaaagtaatagtatggagtggtttgtaataccagccttaaacagtgattctgggtaatgtatggaatact

SEQ ID NO: 420583 - DNA, 487 bp, Homo sapiens
aacaataagttaattcttgtgtgcatttattacaaacactactgtgagaagtaatggctaaagtaaaaaagagggcagaaaaaaacatctgatgctataatgcgtctaaataaagaatgtgaaacataaagttttgttctacatcttcactggagattttaaagggcaaggagacctagctccttgagatgtataactatttgctgacaagttggagtgtcattagccagtgttctaraaagtgaataatataatcccccccccccagctctacattgatacatttcttagctaggagacaaatgttagtttgtatttcgtagaccaaactattttaacatctccattttcatttgtctgtatagacaaaaatgtttggcctacaaagacacagccgtgaatattgaatgacccagttcagtatccattacctgaatgttgttgtgtccccactgtatgcaggggagatgtggtaggcatcgggatg

SEQ ID NO: 420584 - DNA, 632 bp, Homo sapiens
taatataatcccccccccccagctctacattgatacatttcttagctaggagacaaatgttagtttgtatttcgtagaccaaactattttaacatctccattttcatttgtctgtatagacaaaaatgtttggcctacaaagacacagccgtgaatattgaatgacccagttcagtatccattacctgaatgttgttgtgtccccactgtatgcaggggagatgtggtaggcatcgggatggatgatgacgatgatgataattaaatgagtgaacagacaaacaaacggcaggcatatttyctatcctcttagtgtttacagttttgctgcagaggaatgattttatgaaataacataagtaatttagctgagattatttaagcatgagtttttggaacattttcccccagaatcaaaaaagtagggtcagtgccaaagcagccagttccaaagcgatgctctaaaaccttagaagtttccttggagtaacaaaaaatttccaggaagtgaagcagtttataaatagtttcagatctttgtggaaatacacagagaaactggcagaaaatgaatccatggagattttgacaagacccctctaagcaagatctaaagacaacatcagatggag

SEQ ID NO: 420585 - DNA, 649 bp, Homo sapiens
tgactcttttataaccaatattttggcaaacactgaagtattcaaaaataggcaaacaatttcaagaaaaaattgtcaactactcaatatcagagagtatttgttaaataatacaagtaaatcctttcttcamccttcatatcatttaataagacaaggtactgtggcatgggacagtcttggtagtcatgttgatagtgtatacaaaagcaataaacattggctttttatacagcataaatattcagcttagcaattttagtaattgcattgttcactcaaaggaaaatttctattgtctctctgtatatgtttgccttccttctgtgccataattctacaggagaaactcttagaaacaacacaaggcttaagtattggaatcaagaattttattttgctcattatttctctttttgttaattccccaagtattccggttatttattttaatgtattttcaccagaaccctttgatgttagagggcattctctcacttctgagcatttaataatatagtttgataaatattaaaatatatttttattccaaataagtttttggggtgccttaaatataatcaaagttaaaattccattttatcttattatgaagctgacatttgcaactttgtttttcaattttaaa

SEQ ID NO: 420586 - DNA, 649 bp, Homo sapiens
tgactcttttataaccaatattttggcaaacactgaagtattcaaaaataggcaaacaatttcaagaaaaaattgtcaactactcaatatcagagagtatttgttaaataatacaagtaaatcctttcttcaaccttcatatcatttaataagacaaggtactgtggcatgggacagtcttggtagtcatgttgatagtgtatacaaaagcaataaacattggctttttatacagcataaatattcagcttagcaattttagtaattgcattgttcactcaaaggaaaatttctattgtctctctgtatatgtttgccttccttctgtgccataattctacaggagaaactcttagaaacaacacaaggcttaagtattggaatcaagaattttattttgctcattatttctctttttgttaattccccaagtattccggwtatttattttaatgtattttcaccagaaccctttgatgttagagggcattctctcacttctgagcatttaataatatagtttgataaatattaaaatatatttttattccaaataagtttttggggtgccttaaatataatcaaagttaaaattccattttatcttattatgaagctgacatttgcaactttgtttttcaattttaaa

SEQ ID NO: 420587 - DNA, 641 bp, Homo sapiens
ctaatagtttaagatgaattcttttaattttgaaagttatcaatttatgccaagagtcacaatagctgtggatgtccaaactcctggacccatactctcaggcactctttaaagctgaacactcttgatatggtttggctgtgtccccacccaaatctcatcttgaactgtagctcccataattcccacgtgttgtgggagggacctggtgggagataattaaatcatggaggtggttcctccatactgttcttgtggtagtgaataagcctcacaggatctgatggttttataaggggtttctgctttcacttggctctcattccctcttgcctgccaccatgtaagacatgcttttcaccttccaccrtgattgtgaagcctccccagccatgtggaactgtgagtccgttaaacctcttttttcttaattaattactcaatctcgggtatgtctttattagctgcatgaaaatggactaatacaactctaccccttagtacccaaacaaaacacgctaccagtcagaggcccatttgatttttctgttatttaaccttgtcctagagatagcttaaattagttatgtctctgaataccactccatttctacaacccctacccccatgttttctcactg

SEQ ID NO: 420588 - DNA, 525 bp, Homo sapiens
ttgctctgttgcccaggttggagtgtagtggcgtgatcttggctcactgcaccctctgcctccctgsttcaagtggttctcctgcctcagcctcctgagtagctgggattacaggcgcctgcccctacacctggctaatttttgtatttttagtagagatggggtttcaccatgctggccaggctggtcttaaactcctgacctcaaatgatctgcctgtcttggcctcccaaagtgttgggattacaggcgtgagccaccacgcccagccagaaagtgacattctttacttaccacagatcaggaaccttgtaatggaacaatttaaacaagataccaggctagtctttccaaggggctttttattggctctataaagttgacttcaattcctaaaagcaatctgataatatctgaaaatatgctattccagtcaaagccttggaaaaataaccagtgtctccaattgtgttccattataaaagaaaacacattcttactgaatttatgcaaataactagattg

SEQ ID NO: 420589 - DNA, 521 bp, Homo sapiens
ttaattattctttaagcacttggtagtattttccagtggaaccatttagcctagagatttcttttttggaagttttaagttatggattcaatttctttaatggttatagcgctattcacttcttcatcataatcaagatttggcagtttgtggtgttcatggaattgttacattttttctaagttgttgaatttatgagcattactttgtagtattcctttatcagtttttaaatggctgcagtatctgttgtggtattttctgtttcattgtttatattgctaactttttcttctcttttttaaaaatatattcagtcttgctagaggtttgccaattttattaatttttttgaacaagcagcttttgatttcattgattttctctattgtttttctgttttcaattttattcatttctgttcatatatttacygttttccttttgcttgctttgggtttagtttgcaattttctttttctagttttttgaggtagcatcttaggttattaaattgagat

SEQ ID NO: 420590 - DNA, 514 bp, Homo sapiens
ttagaataattaagaatatttgcaaaaaggatttcttacaacacttagtgaggaccaaaaatgtaccaggttctgtgaaacctaagtgtaaactgaggaattttgactcctgccctacaaaaatttacaatccaggcagtaaagctgaacagtctagcctgaaaatctrttttaaaactgttttcccccagtccgaagatataaccttgaagcttactgcaaaccccccttttttttcttctccttagtcttaaaatatggccttggagtgtactttctttgaaacaccatgtccctccctttcctgccatacactccctcacctcgtgcacatttatctaactgtatgcttgtatctaattatgtgcttacttagaagttccaaggggctaatcttaaaacagacaaagcatagagacccagctgccaaattccagagattacctcaaggcagttagtcatcaacctggccagtgctgagatgacaccagcctgtgctccagatggcccaagg

SEQ ID NO: 420591 - DNA, 514 bp, Homo sapiens
ttagaataattaagaatatttgcaaaaaggatttcttacaacacttagtgaggaccaaaaatgtaccaggttctgtgaaacctaagtgtaaactgaggaattttgactcctgccctacaaaaatttacaatccaggcagtaaagctgaacagtctagcctgaaaatctgttttaaaactgttttcccccagtccgaagatataaccttgaagcttactgcaaaccccccttttttttcttctccttagtcttaaaatatggccttggagtgtactttctttgaaacaccatgtccctccctttcctgccatacactccctcacctcgtgcacatttatctaactgtatgcttgtatctaattatgtgcttacttagaagttccaaggggctaatcttaaaacagacaaagcatagagacccagctgccaaattccagagattacctcaaggcagttagtcatcaaccyggccagtgctgagatgacaccagcctgtgctccagatggcccaagg

SEQ ID NO: 420592 - DNA, 605 bp, Homo sapiens
ctttttgagttttcagtgttcttacactgattgtttctcatttttgtgggcttrtctacttttaatcattgaggttgctgacttttggattttttttttaaacagtttggccactcttctgtagggctactgcagtttgcctgaggtccactcaagtccctagttgcctcagattttccagttcttagaggtatcatcagtgaaggctgtgaaacagcaatgattgcagcctgccccctcctctgggagctccatcccagagagctacagacctgttgcagcctgaatgtatctgtaagagttggctggaagccccagttgggaggtcccaccctgtgaggaggaataggattggggacccacttaaagaagcagtctggccatgttttggtagagcagctgtgctgtgcttggggatcctttctgcccctggttggtttagactctccaaagcccataggctggaatggctgagttccccaaactacaaagatggtggcccacccctcccctgagtacttcatctcaaggagaattcaaatttcttttgactaaagaacaccagcaggggtggcttgaggccccagttcagaggttgtacccat

SEQ ID NO: 420593 - DNA, 605 bp, Homo sapiens
ctttttgagttttcagtgttcttacactgattgtttctcatttttgtgggcttatctacttttaatcrttgaggttgctgacttttggattttttttttaaacagtttggccactcttctgtagggctactgcagtttgcctgaggtccactcaagtccctagttgcctcagattttccagttcttagaggtatcatcagtgaaggctgtgaaacagcaatgattgcagcctgccccctcctctgggagctccatcccagagagctacagacctgttgcagcctgaatgtatctgtaagagttggctggaagccccagttgggaggtcccaccctgtgaggaggaataggattggggacccacttaaagaagcagtctggccatgttttggtagagcagctgtgctgtgcttggggatcctttctgcccctggttggtttagactctccaaagcccataggctggaatggctgagttccccaaactacaaagatggtggcccacccctcccctgagtacttcatctcaaggagaattcaaatttcttttgactaaagaacaccagcaggggtggcttgaggccccagttcagaggttgtacccat

SEQ ID NO: 420594 - DNA, 605 bp, Homo sapiens
ctttttgagttttcagtgttcttacactgattgtttctcatttttgtgggcttatctacttttaatcattgaggttgctgacttttggattttttttttaaacagtttggccactcttctgtagggctactgcagtttgcctgaggtccactcaagtccctagttgcctcagattttccagttcttagaggtatcatcagtgaaggctgtgaaacagcaatgattgcagcctgccccctcctctgggagctccatcccagagagctacagacctgttgcagcctgaatgtatctgtaagagttggctggaagccccagttgggaggtcccaccctgtgaggaggaatagrattggggacccacttaaagaagcagtctggccatgttttggtagagcagctgtgctgtgcttggggatcctttctgcccctggttggtttagactctccaaagcccataggctggaatggctgagttccccaaactacaaagatggtggcccacccctcccctgagtacttcatctcaaggagaattcaaatttcttttgactaaagaacaccagcaggggtggcttgaggccccagttcagaggttgtacccat

SEQ ID NO: 420595 - DNA, 613 bp, Homo sapiens
acccccagccatggcaatccaaaatgtttacagactttgcctaatgtttcctgggaagacaaaattgctccttaatgttccctgggaagacaaaattgctggtttaaagacagctcatataaacttgcccrgttccaaacctgtatcaccgcacctgtcattgtcacattgagaacatctttgattgattataatatgacacaagtagttatgaatagagaaaggaagttttcttaaaatgactccttcttaggaggagtgatcaaatgcaaaacctctaggacaacagccaagacaccttccattgcatgagtttttattcacaaaaaaaattttctaggactctcagcaccccatgaaggacatggaaagcaagaggtttgaggtacaaaaggtgggtgtgcatgtgtgtttcttttaatctctatctcctgttttagtatatagaatctaataagctctttttatttttctttccttttttcttccttcttttcttcttaatgatctcttcttatgtgttttctctatatgcctttaactttctcccaaaaaacaatcttggaagataaaattggtgattaaaaaaatgtctggaaggaaacacaggaaa

SEQ ID NO: 420596 - DNA, 648 bp, Homo sapiens
catcagtttttggatacaggctgccccctgggaaaggggttgtgactttggctgaggaaattctcagagagggctgagagtgtctgccagtagccagacatgtatccttctgttctgaagggaggtctgagtgtcaaggcagagcatccrtgacacctgttcaggaagcaggagtgtctatgagcagctgggaatacatagaataggctctgtctgtaggggaggatcagaggtccttagcagaggtccatggttgcaggtgaataagcaattacagggcactgggcaccttaaaaggaactagaatcatataacgtggcctggatttattgaacttcatcagtacattcatcaactcatatatagtattgctaacccatacagtagcctcaaaagtaagtactgttaacttcactttacagaagaaggcttaaatagaaaagtgcttgctcatggccagataggtgatagatgcctgcagcagactccaacaccaagtctctttctgaagctcctgctcttttgactctgttccctgaacagactctggaaatttagtcacacaaattttcaaagccaggacaaatccagtagtagcttcagaatggctgagcacaggctgcaggaaaccatcccagggtgccaggc

SEQ ID NO: 420597 - DNA, 554 bp, Homo sapiens
tcctgctcttttgactctgttccctgaacagactctggaaatttagtcacacaaattttcaaagccaggacaaatccagtagtagcttcagaatggctgagcacaggctgcaggaaaccatcccagggtgccaggcttgaggtgatatgtgttcctaatgatgagtgagccaaggccccaagaggagcttagcccacagatgggcagagctggggagaagcgatggcagacagtggaggcaaaaccttggtgtttccagctcagaatgaggtagccggatgactgaaatataatgatttgttattrgagaatcagggttgccaattaaactcatactacattgagctgtgcaaagggcttgtagctctattttctacagaagatattttatctcctttgagaacctctttctgtctaattagtgagaggggaataaaatatctaaatttaatcattctgattcaataatttaaatggtctcttaaggtaaatcagtttcttttagatcaaatcctaatctttcagattgttacttcctcactcatattttcttc

SEQ ID NO: 420598 - DNA, 579 bp, Homo sapiens
attgcttaagaccaggagtttgagaccagcctgggyaacatagcaagactctgtagaaaaataaaacactggccagatgtggtggtggtggtgcgctgttagtcctggctacttggaaggccaaggtaggaggatcacttgagctgagtttgatgttgcagcgagctatgattgaaccactgcactctagcctgggtgacagagtaaggccctgtctctaaaaaaataaaataaaataagaagggaccatttcttagtgtctttatttctccaatgcttagctcagttcctggcctgtaatactaagctaataaagttgaatgagcatggtagtgtgaaaagaagttgaggattgaatagatatggaaagcataggaaagagaagcatgaaagatagtttcatgaaagaaagaaagacgtctcctttgggtagctggaaagatttttatgttattaattgaaacaggatatttaagataatgatacgaatctgctggggaaaagggaagttggtcaatttggtctgctcatgtaatatgtacaatataataaggtgaccatagaatagtaatctccaac

SEQ ID NO: 420599 - DNA, 638 bp, Homo sapiens
ttagtgtctttatttctccaatgcttagctcagttcctggcctgtaatactaagctaataaagttgaatgagcatggtagtgtgaaaagaagttgaggattgaatagatatggaaarcataggaaagagaagcatgaaagatagtttcatgaaagaaagaaagacgtctcctttgggtagctggaaagatttttatgttattaattgaaacaggatatttaagataatgatacgaatctgctggggaaaagggaagttggtcaatttggtctgctcatgtaatatgtacaatataataaggtgaccatagaatagtaatctccaacctgctttaaacattatgtgtctagtagaatagttagaaatttaggtttcatggaccaaaacaatttaaagaggctctgttagcctttgtaattgtaaaataaatagatcctaagttcctcttcaatgcatgtatttatgaaaatgaaaggaaagaatgaggctgacttcctcactcagactccaggtttccctccattactttttgacattgctcagggagaagcagaaattgaccctaaactttacaagcagctgatctgcagcaagcgagtgaactttataagcttagctgaaatgggatgctatgtaca

SEQ ID NO: 420600 - DNA, 638 bp, Homo sapiens
ttagtgtctttatttctccaatgcttagctcagttcctggcctgtaatactaagctaataaagttgaatgagcatggtagtgtgaaaagaagttgaggattgaatagatatggaaagcataggaaagagaagcatgaaagatagtttcatgaaagaaagaaagacgtctcctttgggtagctggaaagatttttatgttattaattgaaacaggatatttaagataatgatacgaatctgctggggaaaagggaagttggtcaatttggtctgctcatgtaatatgtacaatayaataaggtgaccatagaatagtaatctccaacctgctttaaacattatgtgtctagtagaatagttagaaatttaggtttcatggaccaaaacaatttaaagaggctctgttagcctttgtaattgtaaaataaatagatcctaagttcctcttcaatgcatgtatttatgaaaatgaaaggaaagaatgaggctgacttcctcactcagactccaggtttccctccattactttttgacattgctcagggagaagcagaaattgaccctaaactttacaagcagctgatctgcagcaagcgagtgaactttataagcttagctgaaatgggatgctatgtaca

SEQ ID NO: 420601 - DNA, 425 bp, Homo sapiens
ttaacttttttactttacacacttctgtatatttttcatttacagtaagtatttattttccttttattattttaaaagcaaaaaaagaaagatataatttattaaaatacagcagggtatccattgggttaaagccatcagggccattaacgctttgcaayttctggctttaaagaagcctgtttggtttcacttaaactattaacagcctgtagaatttgtgatcaacacatgttaggaagcactagtgtagaaagataaataacaagaatatgattaaagaaaatggattaatgctgaccatatagacagattaggtaggtagatagatgcatacgtacatagatcgatacacagatatagttagaaattctatcagtaactgtacttcaaattattaaactaatttttcaatataaaattag

SEQ ID NO: 420602 - DNA, 514 bp, Homo sapiens
cagtgtgtgtacaaatgagaagaagctagattttactatagtagcaaatcaagcacacacacacatacacacagcaccytaaaacactactggttccttataaaacaaaggtttatttttcactttatattccacattggttggcagggagtcggtactccagaatcacccagagataaagctgacaagggcttcacaatcttctgtcaaaaacatctggaaatgaagccttcttggtggcctcaacagggtaagagtgaaatgggagacttgctcatgggtttgtcactgtctcagcctagaagtgacacatgtcatttcttacatttctgtgccagaaatattcagatgaccttgcctaagaacaagggggctgagaaatcctctcttccccatggctaaaagagtaggggaatgatattagtagtatctgtctttgagattgaaaaattccccatcttcaatctctgctcataaatttcacttcgacttcttgttctaagtaaaattggct

SEQ ID NO: 420603 - DNA, 514 bp, Homo sapiens
cagtgtgtgtacaaatgagaagaagctagattttactatagtagcaaatcaagcacacacacacatacacacagcaccctaaaacactactggttccttataaaacaaaggtttatttttcactttatattccacattggttggcagggagtcggtactccagaatcacccagagataaagctgacaagggcttcacaatcttctgtcaaaaacatctggaaatgaagccttcttggtggcctcaacagggtaagagtgaaatgggagacttgctcatgggtttgtcactgtctcagcctagaagtgacacatgtcatttcttacatttctgtgccagaaatattcagatgaccttgcytaagaacaagggggctgagaaatcctctcttccccatggctaaaagagtaggggaatgatattagtagtatctgtctttgagattgaaaaattccccatcttcaatctctgctcataaatttcacttcgacttcttgttctaagtaaaattggct

SEQ ID NO: 420604 - DNA, 562 bp, Homo sapiens
cacacaagacatataagtcagttaacaaaaatatttcctaaatgaaagaatgcagatggctgactgggttgagctttggagtcactcagatcaatatttaaatctcagttgaggtacttagcaaataaaagacagcctcagcctcaatacgctcattatttaaattgatagagtcctcacaagggagttttaaagatctcatgataatttacttaaagtaattagattgcctggcacagccagttttcaataaagcatggccgttattatcaaagttgctaatcattgaaatggcaataccaaaattggctgtaattttattttcactagtttttgattgtttgtaaaaagagagatctgtatgtgtgtttagagataacctattctagagatttaggaacctatccaacaaccrctttgtcttttgtgctgctacagcagaatgactgagactgggtaatttataatgcacagaaatgtattggctcacagtcctggaggatgggaagtccaaggtcaagatgccaatatttggcaaggacttcttgctgcatccacacat

SEQ ID NO: 420605 - DNA, 532 bp, Homo sapiens
atcaattttttaactatataatcattttgagattagtttacattaagctgggtgtggtggctcatgcctgtaatcctagcactttgggaggccaaggcaggtggattacttgagcccaggagatcgagaccagcctggacaacatggcaaaaccctgtctctacaaaaggtacaaaaaattagtctggtgtggtggcccatgcctgtagtcccagctactcaggaggctaaggtgggaggatcacctgaacctgggaaggttgaggctgcaatgagccatgatcataccactgcactccagcctaggtgacaaagtgagaccctgcctcaaattcttttaaaaaatgactagtttacattaacacaataatattcaccttggtttaatgagtgcccayggcatgttttaatgtaatatatttattatacttttgccaattgaagaatcacaaggttcataaatttggaaaggagagctttatttctcataaagacccataatctgcaggctgcccatcctgctggctgggaa

SEQ ID NO: 420606 - DNA, 605 bp, Homo sapiens
tgacccttaagttaaactgagcccaaaattagtagaaggaggcaaagaataaatatcagaacataaataaataaaatagagactagaaaaatcatgagaaaaaaactaatgaaatgagttgctttttaaaaagataaataaaatcaacaaacctatagctgataaattgagaaaaaaagagagagactcacatccataaaatgagaatgaaaaaggagacattacaacttatactgtagaaacacaaaggatcacaagagactgttataaacacaattatatgccaacaaattggataagctaggagaaatggataaattcctggacatagacaacctaccaagatttaattatgaagaaataaaaaaattgaacagcccagtaatgagtcaagagattaaatcagtaataaaaaatcatccatcagagaagtccagcagctgttggcttcacwgctgaattctaccaagcatgtaaagaagaacaccaattattttcattcttccaaaaattgaagacgaaggaatacttccaaagtcattttacgaggccagaattaccctcacacccaaataagacaaggacgccagataaaaagaaactac

SEQ ID NO: 420607 - DNA, 558 bp, Homo sapiens
agcccaactcttcttcatgcccctattcttgagaccctgggcaattgcctttgacaccatgattcctcttttttgtcccaaggtgaaactcttccaaggaatccccattcttgtaggaagctctggatttcctgatctctccaaggactggcctggaagggacagagaaatgcgaatgccctttraaactactcacagcgtatagttgagtggtttccaaagaccccctctatgctgccaagccctaagcatgctctcgtatctgttgttgggagataataaaaccttaaatgagaagagcaagaaccaggatccctgggagaagtaacgtctaatccttaaactcatggacatgtcaggaagcacctgtctggatatttatcatgctcaataatggataaagacacctgaacagtgaatgaatgaaaggattttcaggctaagtatttctgccctggaagggttcttcttttgtttcaggcatagtgatctgccctgagaagagagcttgggtcaccttctggtcaccaggtgttgcttggcaagagccccatatat

SEQ ID NO: 420608 - DNA, 604 bp, Homo sapiens
cactggaaaacctagattcataaaacaagttcttatagatgtatgaagagacttaaataaccacacaataattgtaagacttcaacaccctgcagacaatgttagaaagatcatcaaggcagaaaactaacaaagatattcagkatctagacttgaaacatgaccaaatggacctaatagacctctatagaacactccacccagcaacaacaacagaatatacattattctcatcagcacatagcacatactcaaagattgatcacacccttacccataaaacaattctcaatgagttcaaaaaaccccaaatcataccaaccacagtgcaataaaatagaaatcaataccaagaagatctctcaaaaccatacaattacatgaaaattacctgctcctgaatgacttttcagtaaaaaatgaaattaaagcagaaatcaagaaattatttgaaacaaatgaaaactgggacacacgtaaagtgctgttaagaggaaagtttataacactaaatccttacatcaaaaagtcagaaagctctcaaattcacaacctaacatcacatctggaagaactaaaaaacaagagtaacccaaccccagag

SEQ ID NO: 420609 - DNA, 604 bp, Homo sapiens
cactggaaaacctagattcataaaacaagttcttatagatgtatgaagagacttaaataaccacacaataattgtaagacttcaacaccctgcagacaatgttagaaagatcatcaaggcagaaaactaacaaagatattcaggatctagacttgaaacatgaccaaatggacctaatagacctctatagaacactccacccagcaacaacaacagaatatacattattctcatcagcacatagcacatactcaaagattgatcacacccttacccataaaacaattctcaatgagttcaaaaaaccccaaatcataccaaccacagtgcrataaaatagaaatcaataccaagaagatctctcaaaaccatacaattacatgaaaattacctgctcctgaatgacttttcagtaaaaaatgaaattaaagcagaaatcaagaaattatttgaaacaaatgaaaactgggacacacgtaaagtgctgttaagaggaaagtttataacactaaatccttacatcaaaaagtcagaaagctctcaaattcacaacctaacatcacatctggaagaactaaaaaacaagagtaacccaaccccagag

SEQ ID NO: 420610 - DNA, 570 bp, Homo sapiens
ctgctacttgaaataagggagaacaggttcttttgatgcaagatataatcaatttatgatcttgggagatcaaggagcaaggggtcagcgagtctggacacattccagaggctacaaggggttttacgccctgagccctgggttctctccaagccacaaggggtgttatgccctgggcttagattgtagtgtggcagggcagccttccaccctttggcacagagcttggtgttccataggccacaaggggttttagaccctggacccaggacatgttccaagactcgtttacattatgtcagacaagcgagccctgcctcagatcttctgccaacatgtctctcttttttgttctgcaaaactgccacagctatcattgcttgttctcggcttgttcttggccccctggactcaccctatgtactcttaatgtgtcttgtctaattcctttgactccgscggacttcatagcccccatgacctggtgttgggtttgatcactcggtggctttctctccagaggtggcttctgcatctgtagactgaaacgagacagcacaagcacataat

SEQ ID NO: 420611 - DNA, 634 bp, Homo sapiens
ttgtgtttcattgtaactatgaggaataatgcaaaagtcagatgtattccaatcacattgcatttgaattctagtttctaaacttatgatgcgatcccccattcaagttactgtctgacagagatcattaatttgattaactatcttttgatctgtttggacctgagagttccataatttcatataattattttgccatttatcaacaaattaaacagtttgcgcagatgagtgtaaagccgcaccagctactgcagcagtagtggtaactgcaatgaggccaattacagcaaatataagagcaattataaatctttttgaatgagataagagttttttaaggatctcagttataatatgaatggatggtgatgcctcccatggtctatttagagacacagggatccaaacttctgtggctctaattaacaagatagtttgatttttatcaaaggttgagttaatgcaagtaaacaagtgacattcgtggcagstgataaaacaggtattcatgtcaagagtaatatttcctattgctaacataaaaggtggcaggacacaactttgaatccaaaggtcctgttagaaagaaaagagaggacatatttatctttacctccttcccctttatact

SEQ ID NO: 420612 - DNA, 595 bp, Homo sapiens
ctgctgaaaaaatgcagccatggctttgctgcaataccctgcaccattatcagttttgattttttctgggattcccataactgcaaagcaagagaaaagatgttttttaacatgagctgtagcttcctcttttgacatgtggcccagataaaatgtgaataagtatctcctgaaacatgaacaaaggacaattttccaaaagcaggaatgtgtgttacatccatctgccagatggaatttggrgataaacctttagggttaactcctgctcctttatgtggcagatgcaggacttgacaggcaaagcagtgttttacagtctccttagcctgcttccaggatgagccatatctttttctgaggcctacagctttaagatgggttaaggaatggaatgtttgtgcatcagcaaaagccacagaaaccagtgcatctgccctttgattaagtttagtcaagggccagacgggttagtgtgtgctcttacatgagtaatatagaaaggggaatgtctttgttgtaaagaacgaaataaaagattaagttgttcatcagtcacattgcgaattaaagcacattcaatattttgtgtggc

SEQ ID NO: 420613 - DNA, 595 bp, Homo sapiens
ctgctgaaaaaatgcagccatggctttgctgcaataccctgcaccattatcagttttgattttttctgggattcccataactgcaaagcaagagaaaagatgttttttaacatgagctgtagcttcctcttttgacatgtggcccagataaaatgtgaataagtatctcctgaaacatgaacaaaggacaattttccaaaagcaggaatgtgtgttacatccatctgccagatggaatttggggataaacctttagggttaactcctgctcctttatgtggcagatgcaggacttgacaggcaaagcagtgttttacagtctccttagcctgcttccaggatgagccatatctttttctgaggcctacagctttaagatgggttaaggaatggaatgtttgtgcatcagcaaaagccacagaaaccagtgcatctgccctttgattaagtttagtcaagggccagacgggttagtgtgtgctcttacatgartaatatagaaaggggaatgtctttgttgtaaagaacgaaataaaagattaagttgttcatcagtcacattgcgaattaaagcacattcaatattttgtgtggc

SEQ ID NO: 420614 - DNA, 374 bp, Homo sapiens
acagtgacaccttttaaatttaagctagaccttccaagcaatagaccaactgttcatgagggtaaagggcccccaactcccatggggwccttctttggcagctccccaggaagtaaggagacaggcattgtgctgcagagatctacggcagcactgcctgctgtggcaggggacaattgttgtacgtttgtaaggcactgactgtgccagatattcctcggttcgttgaggggcctgaggcaggctcctcttcccatttcctgaaagaggttgcccatctttactaaatttagaatgatactgatttgcccagtgattgccttcttacactgggggcatacaccggaacttttctgttgatttatggcaatagt

SEQ ID NO: 420615 - DNA, 584 bp, Homo sapiens
tacatacttatactacacacacatgcacacagcacacacatgcatgcacaaaacatgcataccacatacaccacagtacacatgcacaccacacacactacacagatacacaacaaacacactacacacaccacatgcgcatgcatgcacaccacacacagcacaacgtacacacacaggcacacaaccctacactacacacacaccacacatgcagacacaccacaaacagcacacacaccagagtatacacatcaccggcaccacacaaacaacacacacactatatacacactacacacacatgcatggcacacactacacacacacaccacaaatacacacacaccaacayacacacaagcatgcacacatacacacacacacacactgcaagcaacattttaatctatttgagtgtatttcatcccagtagtgatcagttccatccctgattcaatctggttaatttgtttttttctcatggtaattcatggaaattgagtttcatatgtgtggcaagagtacacactatgtatttttttattagtccatttccacatggctataaagatactacctga

SEQ ID NO: 420616 - DNA, 583 bp, Homo sapiens
gtttttgggtctgtcatactataaatatcaagtaggtcaagctggttgattgtgtcattcaaatttaatatatgcctactaattttttctggttgctttatcagttactcagaatggagtgttaaaaatcttaaagtacggtcaatgaatttgtctttcaattattgcatcatctattttgaagctctgttaataggtacagcatacatttttagggtcattttgtgttgtttataaattgacaccttaattrttattaaatgatcatttttacccctagtaatgctctttgtcttgaggtttattttgtctgatattattcatgccaaaccagctctctaacacttagtgtttgcatggtatctaaaaagtgtttcccgccttttttagtttaatctttatgtgttgtgtatttaaactgtgtttcttataaacagcatatagttaatcttgctttttttggtttaatttgtcaatctgtgctttgcacatggagagtttaggccatttatatttaatgtaattatggatatggtcaggtttaagtctatcttggcttttattttctatttgtatcctccat

SEQ ID NO: 420617 - DNA, 583 bp, Homo sapiens
gtttttgggtctgtcatactataaatatcaagtaggtcaagctggttgattgtgtcattcaaatttaatatatgcctactaattttttctggttgctttatcagttactcagaatggagtgttaaaaatcttaaagtacggtcaatgaatttgtctttcaattattgcatcatctattttgaagctctgttaataggtacagcatacatttttagggtcattttgtgttgtttataaattgacaccttaattgttattaaatgatcatttttacccctagtaatgctctttgtcttgaggtttattttgtctgatattattcatgccaaaccagctctctaacacttagtgtttgcatggtatctaaaaagtgtttcccgccttttttagtttaatctttatgtgttgtgtatttaaactgtgtttcttataaacagcatatagttaatcttgctttttttggtttaatttgtcaatctgtgctttgcacatggagagtttaggccatttatatttaatgtaattatggatatggtcaggtttaagtctatcttgrcttttattttctatttgtatcctccat

SEQ ID NO: 420618 - DNA, 443 bp, Homo sapiens
tgtgtcctctcctgacggattccaaggacagggacacagccaggccttaagactctgctgaaaccagagcctggggtgtggttcatgakccagaagcatcaccatcacctgggagtttgttacaagtttagaatcacataacctacctggacctgctgaatctgaatctacattttcacaagatcccagctgattcctatgcacattaacctttgagatccattctggtggggaatcctgaagtcttctctgtgtggctcttccctgtgggactcagtctcctctctccctgtagactgcgttgttctgttctcttgtgaacaatgcagaaaccatggctatcctctgcacctgcatttacaccccagagcaagaggtggttctttttctcagttccaagtccatattcctgggagaggtctctaattgggccatatttgatt

SEQ ID NO: 420619 - DNA, 443 bp, Homo sapiens
tgtgtcctctcctgacggattccaaggacagggacacagccaggccttaagactctgctgaaaccagagcctggggtgtggttcatgatccagaagcatcascatcacctgggagtttgttacaagtttagaatcacataacctacctggacctgctgaatctgaatctacattttcacaagatcccagctgattcctatgcacattaacctttgagatccattctggtggggaatcctgaagtcttctctgtgtggctcttccctgtgggactcagtctcctctctccctgtagactgcgttgttctgttctcttgtgaacaatgcagaaaccatggctatcctctgcacctgcatttacaccccagagcaagaggtggttctttttctcagttccaagtccatattcctgggagaggtctctaattgggccatatttgatt

SEQ ID NO: 420620 - DNA, 513 bp, Homo sapiens
gacaggaacagctcccgcaagtgcacctgcctggctcaaggagacagggaaaatgttccaggacttgagctcagatggaggaggggatcctaactctcacaggtaaggggccggtggagactggcctcccagcagcctttctggaaaggaattgtaagtattccaaatgtctcctcctctggtaagtcatcccagccttccccagctgasctagtggcccctccgttcatcctgcttggtttcaacatttactacaccgccccaggctgatgtgtttccaaagcttctcccaccagatacagcaagaccctctgagagcaaaggccatgtcttgttgatctctgtatcccagcatcttgtggaccccacaggagaccggatgcgagcaagcgcacagtagcccccgagacgtcctaagggagcactcggcagtgtctcacagggcatggcgaggtttttttttttttcctcaatgggaaattagttttcagcctaggtttcaagctggaagtg

SEQ ID NO: 420621 - DNA, 513 bp, Homo sapiens
gacaggaacagctcccgcaagtgcacctgcctggctcaaggagacagggaaaatgttccaggacttgagctcagatggaggaggggatcctaactctcacaggtaaggggccggtggagactggcctcccagcagcctttctggaaaggaattgtaagtattccaaatgtctcctcctctggtaagtcatcccagccttccccagctgagctagtggcccctccgttcatcctgcttggtttcaacatttactacaccgccccaggctgatgtgtttccaaagcttctcccaccagatacagcaagaccctctgagagcaaaggccatgtcttgttgatctctgtatcccagcatcttgtggaccccacaggagaccggaygcgagcaagcgcacagtagcccccgagacgtcctaagggagcactcggcagtgtctcacagggcatggcgaggtttttttttttttcctcaatgggaaattagttttcagcctaggtttcaagctggaagtg

SEQ ID NO: 420622 - DNA, 564 bp, Homo sapiens
agtaggtagtatgtagtgagtttttgttaattttcacctattactattagtcataaatgttattccaatgcctagtaatcactatgtattcaataaacatttgttggatgcatggatggatgcatggggaacaggatggatgggattcaacagatgggtgggtagatgagtggatgcatgggtgagtgggcgggtggaaragtagattattgagtggaaagacaggtggatgggtggatggatacatgggtggatggataggtgggtggatggatggacagaagggtgggtgggtgaacagtgggtgagtgagtggtacagagggtgactgagtggaagggtgggtggatgggttgatgggtgggtaggtggggggatggatggatggatggatgggcaggtagatggatcgatgggttggtggggagtggatgggtgaatgagtgcatgattgagtggaaggatgggttgatgggggggagggggtggatgggaggatgaatgggtgggtgagtgcattattgagtgaaagagtgggtggatgggctgacaggtgggtggaag

SEQ ID NO: 420623 - DNA, 564 bp, Homo sapiens
agtaggtagtatgtagtgagtttttgttaattttcacctattactattagtcataaatgttattccaatgcctagtaatcactatgtattcaataaacatttgttggatgcatggatggatgcatggggaacaggatggatgggattcaacagatgggtgggtagatgagtggatgcatgggtgagtgggcgggtggaagagtagattattgagtggaaagacaggtggatgggtggatggatacatgggtggatggataggtgggtggatggatggacagaagggtgggtgggtgaacagtgggtgagtgagtggtacagagggtgaytgagtggaagggtgggtggatgggttgatgggtgggtaggtggggggatggatggatggatggatgggcaggtagatggatcgatgggttggtggggagtggatgggtgaatgagtgcatgattgagtggaaggatgggttgatgggggggagggggtggatgggaggatgaatgggtgggtgagtgcattattgagtgaaagagtgggtggatgggctgacaggtgggtggaag

SEQ ID NO: 420624 - DNA, 530 bp, Homo sapiens
gctccctcgttttccctctcctgacaatttatgtaatgacgatgatgatttaaatgtgacattttctgagtgctgaagatgtgccaggcaagtgctcagtcattctcaccacagctctataagacttttttattccctgtcttataactgggcataccgagactggagaggtagatttgcacaacgtcacacacatagtaaggrtccgctgtaggatcgaaactcccctctgcctccagagcccaggagctccacggaggtgatgcaggctgccatacttctctgtgcgcttgtctgtctccttcaccaggtagtgggctgctggaaggcaaagagcctttcaggttccaagtctcagcacagatactgaaagggattgttgacaatcccccacaccatgttattccatgagcatgggggaagcaagtttccctggtagattcctaggggcataattagcagggtttcttccacacaatatggttggggagcttctggagggtgaacctatcctaaaatatctcctcacc

SEQ ID NO: 420625 - DNA, 578 bp, Homo sapiens
atgcatggacctagggcaaaatgaagatgccctcaccctaaaatggatcattatttcaagatggcaaaagcagagcattaaaccaagcttaggaccctactaaacaagggcttcttagtcactgctcacgttgtgtgtccatgaagctgggccatggctcaaataaaaaaactcasggaatatctcagttcttttccccaccccacatccaatccatccccaagtcctgtcagctccaactctaaagatatcctcaatccaatcacttttttccaactccattatagccacgacattctaccccccatgatctctctcctggactagtataattgggccagatggattccctgtttctctcttgcctctcaccaacctattcttcaaacaggatccagtattactcaatataaatcagaccatgccattccctatcccaaaattttccaatggtcttccatcaggtttaaagcaaaatctgaacttctcaccatgagctaaaatgtcctgcacaatctggtccctgctaccctctccagcctcctctcctcctactccccccttactcatcctgcacc

SEQ ID NO: 420626 - DNA, 517 bp, Homo sapiens
cattctgcatcttgaaagacagatgaactccgagccaaaaaagcacaatgatttggagttcagactctrcagccacacctcctagaggttaattccttgctatggtaccttgaggaagtcacttaacctctctgagcctccattttctcacctaccaaattggactaataataattcctacatcccagactgattgggaggattaaaggaaacaagaaatgcttgacccagtacctggctcacagaatccatatatggcaggtataattaccatcaccatgatcaccacccccaaagagtcggcagtctgagaacatcttttgataggatccattcacttatgcacacaaggaatatttactgaacacccacgaggtaccaggtggttatgctggcttctgaagatacagtcatgggacaaacgcagtctctgccctcagaaagcttatgatctactgggagaaatccttcccacccccacaccgtgccactccacacacaaaaaaccaacattaat

SEQ ID NO: 420627 - DNA, 517 bp, Homo sapiens
cattctgcatcttgaaagacagatgaactccgagccaaaaaagcacaatgatttggagttcagactctgcagccacacctcctagaggttaattccttgctatggtaccttgaggaagtcacttaacctctctgagcctccattttctcacctaccaaatyggactaataataattcctacatcccagactgattgggaggattaaaggaaacaagaaatgcttgacccagtacctggctcacagaatccatatatggcaggtataattaccatcaccatgatcaccacccccaaagagtcggcagtctgagaacatcttttgataggatccattcacttatgcacacaaggaatatttactgaacacccacgaggtaccaggtggttatgctggcttctgaagatacagtcatgggacaaacgcagtctctgccctcagaaagcttatgatctactgggagaaatccttcccacccccacaccgtgccactccacacacaaaaaaccaacattaat

SEQ ID NO: 420628 - DNA, 645 bp, Homo sapiens
gccaggctcagtggctcatgcctgtaatcccagcacttcgggaggccaaggcaagtggatgacataagcccaggaatttragtttgagaccagcctgggcaatatagtgagaccccatctctacaaaaaaaaaaatacaaaaattacacaggtgtagtggcacacacctgtggtcccggctactagggaggctgaggcaggaggatcacttgagccctggaggtagcggttgcagtgagtgctgattgcatcactacactccaaccttgatgacagtgagaccctgtctcaataagaaataaaaataaataatcttttttacaaccatggaggtggatattattattattcccttttaacatatgaggaagatgaacctctgagaagttcaacaacttgtccaaggtcacccagctagtaaaggatggagctgggactcgcatctcaatgatctgcctcaagcccatgctggtaacctctcaaagacacttaccttccagaactttctggggaatcactataagatcaagctgactgcttaggaccagcaagaaccatggtgcattgtgtaataatttcagggttgacattaacaaaaagccttacccccttcattctctcttcttcagataccagtcaccaccc

SEQ ID NO: 420629 - DNA, 645 bp, Homo sapiens
gccaggctcagtggctcatgcctgtaatcccagcacttcgggaggccaaggcaagtggatgacataagcccaggaatttgagtttgagaccagcctgggcaatatagtgagaccccatctctacaaaaaaaaaaatacaaaaattacacaggtgtagtggcacacacctgtggtcccrgctactagggaggctgaggcaggaggatcacttgagccctggaggtagcggttgcagtgagtgctgattgcatcactacactccaaccttgatgacagtgagaccctgtctcaataagaaataaaaataaataatcttttttacaaccatggaggtggatattattattattcccttttaacatatgaggaagatgaacctctgagaagttcaacaacttgtccaaggtcacccagctagtaaaggatggagctgggactcgcatctcaatgatctgcctcaagcccatgctggtaacctctcaaagacacttaccttccagaactttctggggaatcactataagatcaagctgactgcttaggaccagcaagaaccatggtgcattgtgtaataatttcagggttgacattaacaaaaagccttacccccttcattctctcttcttcagataccagtcaccaccc

SEQ ID NO: 420630 - DNA, 645 bp, Homo sapiens
gccaggctcagtggctcatgcctgtaatcccagcacttcgggaggccaaggcaagtggatgacataagcccaggaatttgagtttgagaccagcctgggcaatatagtgagaccccatctctacaaaaaaaaaaatacaaaaattacacaggtgtagtggcacacacctgtggtcccggctactagggaggctgaggcaggaggatcacttgagccctggaggtagcggttgcagtgagtgctgattgcatcactacactccaaccttgatgacagtgagaccctgtctcaataagaaataaaaataaataatcttttttacaaccatggaggtggatattattattattcccttttaacatatgaggaagatgaasctctgagaagttcaacaacttgtccaaggtcacccagctagtaaaggatggagctgggactcgcatctcaatgatctgcctcaagcccatgctggtaacctctcaaagacacttaccttccagaactttctggggaatcactataagatcaagctgactgcttaggaccagcaagaaccatggtgcattgtgtaataatttcagggttgacattaacaaaaagccttacccccttcattctctcttcttcagataccagtcaccaccc

SEQ ID NO: 420631 - DNA, 476 bp, Homo sapiens
caaaagcatatattttattgataaatgtttttgtaccgtggcttattccaaagaggacttaaaatggctaagaaaatagcgcattggaaatagctttgtcagaattaaccattttgtggattcaattcacagtgatttcttctggtggccgtgtctgtgcccccaactccctcacttcttcaggtaacagatgcacccaaccccactcttagctgtagaaggactcaagttgagtccatcgtagtgtctcaaacccccagtctaagggtagagaagtaacccaagaragccaattacaactctttcctgggagttttcaaacaagagctaggacagggaagtccattttctttctggcaacaaagccatagggataaatggccaggagatttctgccaagattctcaccgtgtacaaaaattccatctacagtaggaggaaagaagccaggttatagagatgagagggagagagaa

SEQ ID NO: 420632 - DNA, 449 bp, Homo sapiens
gccctcttcagggaggtgatgcaagggcatctgagatctttggaagcccaattccagcctctctttggggtgggctgagagtgggaactagactctcttttccaagtgccatgtttatcttgttcatcattatattatctccaatgcctggcacayagcaggcactaaagactgacacatagtaggtgctattagtgtctgtataatgggactcttgaggttgaagctattagcagaaacctgccaagcaaaaggatggaaaaccgaccaccaaaaaaaaaaaaaaattgaaagcaatcgtggctttgagctctaaacacacaaggcaccagcccaagtttgggcaattttaatacaacagccatttcacctccaaacaagctggcactggaaacctccctctgcctcttaaagagaacgagtttctctttctctaagtgggcagcatt

SEQ ID NO: 420633 - DNA, 606 bp, Homo sapiens
acatggtgaaaccccgcctctactaaaaatacaaaaattagccaggcatggtggagtgtacctgtagtcccatctgctcagggggctgagggcacaagcattgcttgaacccaggaggcggaggttgcagtgagtcaagattaagacactgtactctagcctgggcaataaagcaagactgtctcaaaagaaaaagaaaaaaaaacccttatgtgtgggccttgtaacagaattaatgtttatatggacaatatgtacatgggtgtatgttaagagcatgagtcatccacaagattttagcaaagtccatttggaaagctcaatgctttgggcttccacttgctttgctgcctctgtcctcagaaggaggcttcatccttccatgtaaccagcaaatcctttatgcagagatgtacacaacacactcctctccttggctatgacaccttgcaaggctcctctcrgtggcccctggtgctcatttcagagtagttcaaattaaggtgatcagctttcatgccaatcactctacaaatcattcctattatgaccaatttttctaaatgctttattgaattattacttaaagaaatgtgcacatagaag

SEQ ID NO: 420634 - DNA, 522 bp, Homo sapiens
ggtcattttcacaatattagttattcyaacccacgagcatgagatgcttttccatttgtttgtgtccttctcaatttattttatcagtgttttgtggttttcattgtcgaggttttttgtttttgtttttgtttttgttttcccatccttgggtaagtttattcctaggtattttatttttgtagctattgtaaatagaatttcttccttgatttcttttttagctagtttgttagtggtatatagaaacattactgatttttgtgtgttgattttgtgtcctgaagctttactgaattatacgtccgtttttaaaaaaatttttttttattttttattttttgagatagagtctcactctgttgcccaggctggagtgcagtggtgcaatcttggctcactgcaacctccgcctctcgggttcaagcgattctcctgcttcagcctcccaagtagctgggattacaggcacctaccaccatgcctggctaattgttgtatttttagtagagacagggtttc

SEQ ID NO: 420635 - DNA, 522 bp, Homo sapiens
ggtcattttcacaatattagttattctaacscacgagcatgagatgcttttccatttgtttgtgtccttctcaatttattttatcagtgttttgtggttttcattgtcgaggttttttgtttttgtttttgtttttgttttcccatccttgggtaagtttattcctaggtattttatttttgtagctattgtaaatagaatttcttccttgatttcttttttagctagtttgttagtggtatatagaaacattactgatttttgtgtgttgattttgtgtcctgaagctttactgaattatacgtccgtttttaaaaaaatttttttttattttttattttttgagatagagtctcactctgttgcccaggctggagtgcagtggtgcaatcttggctcactgcaacctccgcctctcgggttcaagcgattctcctgcttcagcctcccaagtagctgggattacaggcacctaccaccatgcctggctaattgttgtatttttagtagagacagggtttc

SEQ ID NO: 420636 - DNA, 522 bp, Homo sapiens
ggtcattttcacaatattagttattctaacccacgagcatgagatgcttttccatttgtttgtgtccttctcaatttattttatcagtgttttgtggttttcattgtcgaggttttttgtttttgtttttgtttttgttttcccatcyttgggtaagtttattcctaggtattttatttttgtagctattgtaaatagaatttcttccttgatttcttttttagctagtttgttagtggtatatagaaacattactgatttttgtgtgttgattttgtgtcctgaagctttactgaattatacgtccgtttttaaaaaaatttttttttattttttattttttgagatagagtctcactctgttgcccaggctggagtgcagtggtgcaatcttggctcactgcaacctccgcctctcgggttcaagcgattctcctgcttcagcctcccaagtagctgggattacaggcacctaccaccatgcctggctaattgttgtatttttagtagagacagggtttc

SEQ ID NO: 420637 - DNA, 558 bp, Homo sapiens
gcagcttaaatctaatgtttctttgttgattttatatctagatgaactgtccaatgctgagagtaggatattgaagtgctcaactatcattatattggtctctatctctccgtctagatttcataatatttgctatgtgtgtctgtatgctcttatgttggttgcatgcatatttagaattgttatattttgttgctgaattgatycctttattaccacataatgaccttctttgtcctttttacagtttttgacttagtctgttttatctgatgtaagtttaactactcatgattacttttgatttctgtttgtgtggtatatctttttcaatcccttcactttcagtctgtgtgtgtctttacaagtgaagtgagtttcttgtagatgttgttggatcattttttatccgttaagcctgtctctgtcttttaggtaggtaatttaacccatattcgaagttattattgataggtgaggacttattcctgtcattttgttcattgttttctggttattttgtatatccttttgatatggtttggctgtgtccccact

SEQ ID NO: 420638 - DNA, 558 bp, Homo sapiens
gcagcttaaatctaatgtttctttgttgattttatatctagatgaactgtccaatgctgagagtaggatattgaagtgctcaactatcattatattggtctctatctctccgtctagatttcataatatttgctatgtgtgtctgtatgctcttatgttggttgcatgcatatttagaattgttatattttgttgctgaattgatccctttattaccacataatgaccttctttgtcctttttacagtttttgacttagtctgttttatctgatgtaagtttaactactcatgattacttttgatttctgtttgtgtggtatatctttttcaatcccttcactttcagtctgtgtgtgtctttacaagtgaagtgagtttcttgtagatgttgttggatcattttttatccgttaagcctgtctctrtcttttaggtaggtaatttaacccatattcgaagttattattgataggtgaggacttattcctgtcattttgttcattgttttctggttattttgtatatccttttgatatggtttggctgtgtccccact

SEQ ID NO: 420639 - DNA, 611 bp, Homo sapiens
ctgatgatagcctgtctgcgtgggccaatccctgggcctccaggtggcttctttggttgctggcagtggcagtactgggccaggtgggcaggtgcaccattgggctcctgggtggtgtgtgtggcaktctgatctctagttctccaggtgatgtgtgcaggttctcgtggtgggtaagctggcgtttcctcaggcctctcagtagtaagtgtgagcactagctctggaggcaggggagtcagtctccaggcccccagatggtacattcaggcaccagcatattcctatgcatttctagataaaagtatttttcagaaaacctgagcatatgtcctattaatacaacttaccctcacagctctgcatgagaagaagggggaattccctcagtagaacagtcagaatggaatcacagacttgttttgagccagtcactcgtaagggggattaggctaaaatgataagctcagaatctaaaccttagactagggaatggcaaactttttccataaagaggcaaacggtaatattttaggcttttggtctagataacctctgttgcagtgaagcagtggtaccatcgtagcctaaaagcatatgtagacaaggca

SEQ ID NO: 420640 - DNA, 611 bp, Homo sapiens
ctgatgatagcctgtctgcgtgggccaatccctgggcctccaggtggcttctttggttgctggcagtggcagtactgggccaggtgggcaggtgcaccattgggctcctgggtggtgtgtgtggcattctgatctctagttctccaggtgatgtgtgcaggttctcgtggtgggtargctggcgtttcctcaggcctctcagtagtaagtgtgagcactagctctggaggcaggggagtcagtctccaggcccccagatggtacattcaggcaccagcatattcctatgcatttctagataaaagtatttttcagaaaacctgagcatatgtcctattaatacaacttaccctcacagctctgcatgagaagaagggggaattccctcagtagaacagtcagaatggaatcacagacttgttttgagccagtcactcgtaagggggattaggctaaaatgataagctcagaatctaaaccttagactagggaatggcaaactttttccataaagaggcaaacggtaatattttaggcttttggtctagataacctctgttgcagtgaagcagtggtaccatcgtagcctaaaagcatatgtagacaaggca

SEQ ID NO: 420641 - DNA, 611 bp, Homo sapiens
ctgatgatagcctgtctgcgtgggccaatccctgggcctccaggtggcttctttggttgctggcagtggcagtactgggccaggtgggcaggtgcaccattgggctcctgggtggtgtgtgtggcattctgatctctagttctccaggtgatgtgtgcaggttctcgtggtgggtaagctggcgtttcctcaggcctctcagtagtaagtgtgagcactagctctggaggcaggggagtcagtctccaggcccccagatggtacattcaggcaccagcatattcctatgcatttctagataaaagtatttttcagaaaacctgagcatatgtcctattaatacaacttaccctcacagctctgcatgagaagaagggggaattccctcagtagaacagtcagaatggaatcacagacttgttttgagccagtcactcgtaagggggattaggctaaaatgataagctcagaatctaaaccttagactagggaatggcaaactttttccataaagaggcaaayggtaatattttaggcttttggtctagataacctctgttgcagtgaagcagtggtaccatcgtagcctaaaagcatatgtagacaaggca

SEQ ID NO: 420642 - DNA, 408 bp, Homo sapiens
cttgcctcagtgtggcattgcaccttctataatgtgatggccaagtttgtctttgctcaactgtgtgcctgtgtgtctagtgcccagcacactgcccagaacatgggcagtctccagtgaataggtggagatggttggcrtggagcagcttgaggccagaggcttctgaatactctcctccattgctatgagaacaccccctccacaacgataaacgtgcttgatttctgactctgccatgtaccaataactgggggacattgggcacattacttagccacgttgctgagcctcatttttctcatctgtaaaaactagaataagaatacctactgtgattgttgattttgggtgtcaacttgactaattaggggatacccagatagctggtgaagcactttgtattct

SEQ ID NO: 420643 - DNA, 599 bp, Homo sapiens
tgtttaccccttcctacattattttgaagacaatcccaaacatcgcttactgcatttacaaatcttagtrtgccttatccctttttaatcattgtataatgttccacgataaatagaccacaatttgtttatcctgttccctactgatggtccattttccagctgtgtttaatatgggtaaagatggaacttcttagctgtaaatccagaactgaatttaagatttttttttattcctcaaggagacctttgtgctgaggacaccaactatctagacttgagtgaaatgaaagcctgcttcattgctgctgtctgccacttccagacccagtgggaagaaagagatgggtctctgcaccaggcaggaggggatgggatttgctgtccatgggttggggtggggtggtcatctccacagcctgaaaggccccagaaggagggcaagtcagactgtctggtcagggaggtacagttgttttacaggagggtttcagcaagcataagggccacagaacaggctggaatgaagacttcctttcctaggggtgttgtgacaatgaccacaccttgatggcttaaaacaatagaaatatattctc

SEQ ID NO: 420644 - DNA, 599 bp, Homo sapiens
tgtttaccccttcctacattattttgaagacaatcccaaacatcgcttactgcatttacaaatcttagtgtgccttatccctttttaatcattgtataatrttccacgataaatagaccacaatttgtttatcctgttccctactgatggtccattttccagctgtgtttaatatgggtaaagatggaacttcttagctgtaaatccagaactgaatttaagatttttttttattcctcaaggagacctttgtgctgaggacaccaactatctagacttgagtgaaatgaaagcctgcttcattgctgctgtctgccacttccagacccagtgggaagaaagagatgggtctctgcaccaggcaggaggggatgggatttgctgtccatgggttggggtggggtggtcatctccacagcctgaaaggccccagaaggagggcaagtcagactgtctggtcagggaggtacagttgttttacaggagggtttcagcaagcataagggccacagaacaggctggaatgaagacttcctttcctaggggtgttgtgacaatgaccacaccttgatggcttaaaacaatagaaatatattctc

SEQ ID NO: 420645 - DNA, 599 bp, Homo sapiens
tgtttaccccttcctacattattttgaagacaatcccaaacatcgcttactgcatttacaaatcttagtgtgccttatccctttttaatcattgtataatgttccacgataaatagaccacaatttgtttatcctgttccctactgatggtccattttccagctgtgtttaatatgggtaaagatggaacttcytagctgtaaatccagaactgaatttaagatttttttttattcctcaaggagacctttgtgctgaggacaccaactatctagacttgagtgaaatgaaagcctgcttcattgctgctgtctgccacttccagacccagtgggaagaaagagatgggtctctgcaccaggcaggaggggatgggatttgctgtccatgggttggggtggggtggtcatctccacagcctgaaaggccccagaaggagggcaagtcagactgtctggtcagggaggtacagttgttttacaggagggtttcagcaagcataagggccacagaacaggctggaatgaagacttcctttcctaggggtgttgtgacaatgaccacaccttgatggcttaaaacaatagaaatatattctc

SEQ ID NO: 420646 - DNA, 495 bp, Homo sapiens
atctgggttctgagcagcctacgcattgtttcaaaagaaaaatttatattagcacattctaattaaaacccatcaaatcaagattggtgtgttggagctgaaccctacgtagtaccacaaaagacgttactaggggcacctgagccaggtaagcattcccactggctcttccataagcaatccacctctccgttctttcttccaacagattttcagtgcctcacttatactaggaaacaaaaacagctagagctgttatgaattcaactttacttctcatctacatgaggtaggttycctatctcataacagagctatctgccaagggaatgttcctcatttctagttcacaaagaattttacatccctttccattaaatatctaattgacaatccctctgagtgcttcacagactattcagttttctcatggactattcggttgagtgttacattgattatttcattgaggattccacagactattcaactgag

SEQ ID NO: 420647 - DNA, 495 bp, Homo sapiens
atctgggttctgagcagcctacgcattgtttcaaaagaaaaatttatattagcacattctaattaaaacccatcaaatcaagattggtgtgttggagctgaaccctacgtagtaccacaaaagacgttactaggggcacctgagccaggtaagcattcccactggctcttccataagcaatccacctctccgttctttcttccaacagattttcagtgcctcacttatactaggaaacaaaaacagctagagctgttatgaattcaactttacttctcatctacatgaggtaggtttcctatctcataacagagctatctgccaagggaatgttcctcatttctagttcacaaagaattttacatccctttccattaaatatctaattgacaatccctctgagtgcttcacagactattcarttttctcatggactattcggttgagtgttacattgattatttcattgaggattccacagactattcaactgag

SEQ ID NO: 420648 - DNA, 526 bp, Homo sapiens
gcctggctgggctgggcacggtggtttttacctgtaattccagcacttttgggggctgaggcaggcatatcacttgagaccaggtgtttgagaccagcctggccaacaagttgaaatcctttctctactaaaaatacaaaaaktagccaggcgtggtggtgcacacctgtaatcccagttacttgggaagccaggtgtggtggtgcacacctgtaaccccagctacttgggaggctgaggcacaagaatcacttgaatctggggggtggatggaggttgcaggtagccaagatctggccactgcacttcaaactgggcaacagagtaagactctgtctcaaaataaataaataaataaataaataaataaataaataaataaagacttgcctggctgaactaaatctcttgcttcctaagtccactgagacttcctctgatatatccattcagagcccaccactggatagttcatcctcaatgcatatttagtgggctttccaatgggcaaatataataatagtca

SEQ ID NO: 420649 - DNA, 598 bp, Homo sapiens
gactaaatattacaagggcagtaagaataactaacacattgggcaccttcttttgcacatagtccctgacctaagcattttgcatctatcaggtgtactcacaacagctacttgagttattatctccattttgcagataaggagaccaaagcagtgacagagctagcaagtgtcagagccaggattcaaacactagaatctccacttccaaagcctcaaagcccataytcttaaccatctatactggctcccagcaagaaggggcattccatgaaacatttccagtatttgtaaaagtgtaaacaattgtatatttgttctaggtaaaataactttagccacctaaaaaaaaaatcaatgtcatttactttgtgctggaattacaccagtgattctcagctggaagagattttgctctcctctctacaaaacatttggcaatgtctggagaaggaatgagggtatccctgacaatgaatgagtagaagctatgcaagctgccaaacatcccacagcacacaggacatccccccacaacaaagaatgatcgagccccaaatttcaatagtgccaaggttgagaaacactgaattatatc

SEQ ID NO: 420650 - DNA, 598 bp, Homo sapiens
gactaaatattacaagggcagtaagaataactaacacattgggcaccttcttttgcacatagtccctgacctaagcattttgcatctatcaggtgtactcacaacagctacttgagttattatctccattttgcagataaggagaccaaagcagtgacagagctagcaagtgtcagagccaggattcaaacactagaatctccacttccaaagcctcaaagcccatatwcttaaccatctatactggctcccagcaagaaggggcattccatgaaacatttccagtatttgtaaaagtgtaaacaattgtatatttgttctaggtaaaataactttagccacctaaaaaaaaaatcaatgtcatttactttgtgctggaattacaccagtgattctcagctggaagagattttgctctcctctctacaaaacatttggcaatgtctggagaaggaatgagggtatccctgacaatgaatgagtagaagctatgcaagctgccaaacatcccacagcacacaggacatccccccacaacaaagaatgatcgagccccaaatttcaatagtgccaaggttgagaaacactgaattatatc

SEQ ID NO: 420651 - DNA, 532 bp, Homo sapiens
tgtgagttgttttaagtctctgcgtttgtggtcatttgttatgcaacaatagaaaactaatagaactatattagtaaggcatttctttacacccttaaatttctcctattaacacagagccttccagaaacacggacattttcctcggctctgaaccccataagatgagaagttgtggaaccacgattctgtccaagcagccctagatttatgaatggttccaacttccattaggttgcaggaaggggctagggtatctctgttcatgtttagaagtccatttgtttccattccttgtcagcagtttgcataagtgagtggttttatttcttgtgagagaggagggaaaatgcatgagttaccccagcagtggaagatttgtcaaataaagcttttaataatgggtctgtttgacagttttatagttcttcaacttcccggccatttgaaggtggtaggttttcaataaaaatkaagtccttttccaagagaaactcggtcccctgttattttaaaacaactagtccagggt

SEQ ID NO: 420652 - DNA, 494 bp, Homo sapiens
ctctgtacagttttcttgattcatcctaagtgtccattcaagcctcgttgttctattattatacttattactcttatgattattgggtatgtcatttaccatcacaaaattttattaagcccagaaaccagaaattcagattaagtgggagctcttgctctgccacagcccattctctctgccccatcagagaaaacatccagcattccatgggtcccytgtgggtcccagtgttcccatacaatcagtgcccttgcagatggcatctgtgaatgtccaatgctgctccagacccaggggaaacagccaaaggctctgaggataaagattcagggatgggaaaagttggggaggagaccatcacctttcattataagtcctttgtataatttggatttttgcaatgtgccactactactttgattgaaaatgttcttttattataaatgcaaaaataaatggcataaagggcatcaactttaaggccctaaaga

SEQ ID NO: 420653 - DNA, 461 bp, Homo sapiens
aaaaaaaaaaaaaaaaaaaaaggcattttatttratgctgaatacaaaatgttttactgtctctcttctttatgaggcctctgggcctctctcagcagccttttcacctctgtccctagccctcgccagcactttgtctctgctttgctgccctcaccattataagagtcacaaacagttttctttaccagatcagcttaattctcatttttcataacctcatccacatcttaatttccttctttcttctggacgtttctcccttctctgtctgctcctcttctgccttttgtagcagaaatttattatcccacttggttcctttattttattttattttttctagctaccaccgaaagcgtgacctgcattttccaaagcaaggcagacagttttgaaccacaaccgacataggttaagctctgctaaactctatgacatgaggattataaattaaaggt

SEQ ID NO: 420654 - DNA, 565 bp, Homo sapiens
tcttactacatgcaaactcctgggacccattcttcaaggttctgattcagtgggtcagcgaagagatctgcatttttagcaagttctcccaagtgactccaaagaaagctttctgcagaatacacactgatgtaggagatttttcagggcagagtakaagtttcacctgaccctcaggcgccagaataactcataggatctacatccctaagaggaggcaccagtacaattttcaccattctctgactcagtaagtggatttgatgggtgtatgtgatgatataggtgccccagattaataggacatcaggactttgggttgggcccatggattcttgcatcatcatttatatttgcaccatgacgcatttcttcaaatgatgcttgaggtatgattctaatacacggggaaggagctcagacagaatcccattcccttcaaagcaagacaactttgaacggctgtgtatctacctaatggcttctctttgttttattcaagagtctactaactgggtaaggcgacttcctacacacagacatgcctccaggcttggactcagtt

SEQ ID NO: 420655 - DNA, 473 bp, Homo sapiens
agtatatgatagctaaagctgtccccctgtggggatgttgaattaattataatacatctatttgaaggggtattgtrcagtcattaaaatattatgttgtaatatgtaatgcttttaaaatatcttttaaagcttttaattgcaaggagaaacgctcatgatgcaggattaagcaaaacaagaaaatgaagattgcaattctagcacaatctcggtcatgtaaaataataagatataattaaaattactaccaataacaataataatatgtgagaataggccaaagacttaatagtggttgtctgtacgtggtgaaattatggatgatttttgttcctgcttccttgttactgtagtttcaaatctttggaaagtcatcatatattacttttacagtcaggaaaaggtgagcataaaattatgtgtgggagaaaaggctggaagaaaatatagaaatatattagcagtggtta

SEQ ID NO: 420656 - DNA, 473 bp, Homo sapiens
agtatatgatagctaaagctgtccccctgtggggatgttgaattaattataatacatctatttgaaggggtattgtacagtcattaaaatattatgttgtaatatgtaatgcttttaaaatatcttttaaagcttttaattrcaaggagaaacgctcatgatgcaggattaagcaaaacaagaaaatgaagattgcaattctagcacaatctcggtcatgtaaaataataagatataattaaaattactaccaataacaataataatatgtgagaataggccaaagacttaatagtggttgtctgtacgtggtgaaattatggatgatttttgttcctgcttccttgttactgtagtttcaaatctttggaaagtcatcatatattacttttacagtcaggaaaaggtgagcataaaattatgtgtgggagaaaaggctggaagaaaatatagaaatatattagcagtggtta

SEQ ID NO: 420657 - DNA, 473 bp, Homo sapiens
agtatatgatagctaaagctgtccccctgtggggatgttgaattaattataatacatctatttgaaggggtattgtacagtcattaaaatattatgttgtaatatgtaatgcttttaaaatatcttttaaagcttttaattgcaaggagaaaygctcatgatgcaggattaagcaaaacaagaaaatgaagattgcaattctagcacaatctcggtcatgtaaaataataagatataattaaaattactaccaataacaataataatatgtgagaataggccaaagacttaatagtggttgtctgtacgtggtgaaattatggatgatttttgttcctgcttccttgttactgtagtttcaaatctttggaaagtcatcatatattacttttacagtcaggaaaaggtgagcataaaattatgtgtgggagaaaaggctggaagaaaatatagaaatatattagcagtggtta

SEQ ID NO: 420658 - DNA, 491 bp, Homo sapiens
tgacttccagctctgttgctggctatgtaagtgagcttgagcaagtttcatacattttctgtgcctccatttcctcatctgtgaaatatggataagagtagaacacacgccactgtgaataaatctaaaactttgaatagtgcctggaacagagcaagcacttcaacaaattctaaggattataataattacttatcttactgtaattatctgtgtctatgactgtccctctaccagatatcagaggatataactagtcagcagtttatctcttgaattcaagttgcaggcatcttgtattaggcagcccaagactcgtgtctaccaacatastgattctagtacacaaaaatgcctttcttgatagatccaacagaaatattgcaagaaaggctatgactggcccagcttgggtcacatgcacatccttgtgcctgcaggtatggaccttcccatctaatgggatgagttccctaaaggaaagagaaatt

SEQ ID NO: 420659 - DNA, 473 bp, Homo sapiens
tcaacccacagcaatcttgtttcatatatgccccactcacttcatacttycccccactggattattttgaagcaaattcaagcattattttatctacaaatattttaatatctgtctctaaaacataaggattcattcattttgggaattttaatatctgaatttgtagaagagacttttccatgtggtttcaaggtaaaggaagtactctgcaaggagaaggcaatatctttgtgtactacaatggatgccaagcatggttgctattcttcttttgtagggattaagtgcaattccctattttacaattacacaaaccttagtgtttctagcagctctttctaacttcatcttcgctttcttttacctccttggccctattttttcatttcaataaactttcattactaaaaagtcaggaaaaccataagctatattaacagaaaagagtgtgaagatttcagaaagtgtat

SEQ ID NO: 420660 - DNA, 473 bp, Homo sapiens
tcaacccacagcaatcttgtttcatatatgccccactcacttcatactttcccccactggattattttgaagcaaattcaagcattattttatctacaaatattttaatatctgtctctaaaacataaggattcattcattttgggaattttaatatctgaatttgtagaagagacttttccatgtggtttcaaggtaaaggaagtactctgcaaggagaaggcaatatctttgtgtactacaatggatgccaagcatggttgctattcttcttttgtagggattaagtgcaattccctattttacaattacacaaaccttagtgtttctagcagctctttctaacttcatcttcgctttcttttacctccttggccctattttttcatttcaataaactttcattactaaaaagtcaggaaaaccataasctatattaacagaaaagagtgtgaagatttcagaaagtgtat

SEQ ID NO: 420661 - DNA, 616 bp, Homo sapiens
aaaaccataagctatattaacagaaaagagtgtgaagatttcagaaagtgtattttcaccataatttacctaattagttgtttcatttctgagcaccccatttaagtggtgctacaaagaactaggtgctatatgaaagaaggaaaccaggattgtatgttggttaattttacatgtcaacttgactggactaagaratgcccagatagctggtaaaacattattcctgggtgtgtccatgagggtgtttctgaaagtgattagcacttgacttagtggactgagtcaagaagatctgccctcaccaatgtggtcagggattatccaaaccactgagaccctaaaagaacaaaaaatgacttgttttgcccagttatatgtataccaggatcctagattgaatcctgagccagaaaaaaatgtggcttttgttgttattgttgttttgcaataaagaatattattatgacgattgatgaaattacacaaagttttagattaaataatagtattatatcaatgttaattgtttttgataattatactgattttgatcattatactgtgattaggcaagaaaatattcttgttaataggacactgaagtatttaacat

SEQ ID NO: 420662 - DNA, 591 bp, Homo sapiens
acttcgactgataccaatgagtgatagtaaccaaaacagcattgtgctggcataaaaatagacgcagaaaccaatggaacagaatagaccacccagaaataagaccatatatctacagttagctcatttttgacaaaggtgccttcaataaatggtcctgggaaaactggatatctgtatgcagaagaatgaaactagacctctatctcgcaccatatacaaaaaatcaaatctaaaatggattaaacacttaaatttaagaactcaaaactatgaaaactactaaaagaaaatattgaagaaactctccaggacattggtctgggcaakgatttcttggtcactactctacaagcacagacaaataaagcaaaaatggacagatgtaattataacaagtttaaaagcctctgcacagcaaaggaaacaatcaacaaagtgaagagatgacctacagcatgggagaaaatattttcaaactcttcatctgacaagggattaataaacagaatgtataagtaactcagacacccaataggaaaacatctaacaatttgatcaaaaatcaaacaatctgattttttaaattag

SEQ ID NO: 420663 - DNA, 561 bp, Homo sapiens
aatattctggcaggaacattccagaggcagtaccttcagagattacccttaaggatacaaccttacaagactcttatatcttgttcatgcaatggagagaaagtgttctaaaatttttttctaatatatatgtgtgtgtgtgtgtgtgtgtgtgtgtgtgtgttttgaaatatatatctcaaaataaagaatatatatagaatatatatattagactatatatatagaacatatattagaatatatcctgtatatgttctacatgtataatctaatatatattctatatatatcaaaaacactaatttcactataagacaatatctaacctttatatatacatatcaggaacactaatctcactaagaaggcaatatctaacctttatatrtacatatcaggaacactaatttcactaagaaggcaatatctaacctttatatatacatatcaggaacactaatttcactaataaggcaatatctaacctttgttacactaatcaggaaagcctttggtgttgatgggagatacagatatcgaaagcatttgtaccatagc

SEQ ID NO: 420664 - DNA, 560 bp, Homo sapiens
taaatatttcttattttcttttagcaaacatacgggaacctttattttatatttcacttataaatttaaaggaggaaaataggaaattagtatgccatcaaaaaaggtgagttttcacttaaacctacttaaattatagttttatgtttaagtcaatgacatatactccactgagcaaatcatgagttggtttctgaccccatcagatagtaagaaatgtgatatgaagactgagatggctaaggagtcacattctgtgagatgaaacacaatgattttgcttccacacagcagtagaatgacacacagtgatgagaagctttccatgagcgtgctaraagcagtgtccaacatctggtagaactcacaaattttccagggacagttacgtgtgccagttaatctaaaatcagttatcaccttgtcaactaagtaaaaatgacccaaatgccctaaattctttcactgctgtgggttctctgaaacagttaaccgaaacctcaatttaatttaacaaccctctcaataagcatagtagtcaaattcagtcctatgatcat

SEQ ID NO: 420665 - DNA, 529 bp, Homo sapiens
aagaatgagcaccacatttttcttatcttattttatatgattatatcattgaacttgatgttcttatatatgtatttaatatatatcacaatcaatccaaatacatcctgtaggaatatatcataagcaaaatcactgacaaacatttgagatggagaaatataaatacctctcaaaatgtcaccagttagacaaagtataaaataataaaacacatgtgtatttatattttcatataaaatatagatgttactgattaaaacatatttattgacccttttctcagctgctgctaaggttcttgatccttacagagaacttggcattgtgtagaggaggggayctcacttcatgcctgatgccacaggctcctcattcacctgcaataagaccaactccaatctcactcctgggctcattctttctgattatgaggtgatcgtcacagaaaataaaatggacaccctcaataaacaactggtataggcattggaactttctggcgagacttgtttgcaagccttcccaa

SEQ ID NO: 420666 - DNA, 526 bp, Homo sapiens
tttatggtcaccaaatgggctaaccttccaatctcagtatttgtatctgaaaaataagagagttggatcagattactactaagatcacttctggtaataacrtatctatgatccttaactttaggatagtgcaaattttccacaaatattaatttttttccaactaatagagagctgcacattaaaaagaatacttaaaatacaggtatttggaaaagctagagaaatatgcataatagagaaaataactggtatatctgagagactaaggggaaaagaatccaggggaagcagggagagagagagactacacagagtgtatagaataaacagatttctgcttggccccaaatcagggagctgtgcttcttcaaagccaacagaggagccttgtgcccataaagaacgaaagagtgtagcatgatcgcttgactgaggatagaaacagggctaaattgagaaagaaataagacttggggaaagtcagacaagaaaaacccatgttcaagactggaaattggaaacc

SEQ ID NO: 420667 - DNA, 526 bp, Homo sapiens
tttatggtcaccaaatgggctaaccttccaatctcagtatttgtatctgaaaaataagagagttggatcagattactactaagatcacttctggtaataacgtatctatgatccttaactttaggatagtgcaaattttccacaaatattaatttttttccaactaatagagagctgcacattaaaaagaatacttaaaatacaggtatttggaaaagctagagaaatatgcataatagagaaaakaactggtatatctgagagactaaggggaaaagaatccaggggaagcagggagagagagagactacacagagtgtatagaataaacagatttctgcttggccccaaatcagggagctgtgcttcttcaaagccaacagaggagccttgtgcccataaagaacgaaagagtgtagcatgatcgcttgactgaggatagaaacagggctaaattgagaaagaaataagacttggggaaagtcagacaagaaaaacccatgttcaagactggaaattggaaacc

SEQ ID NO: 420668 - DNA, 631 bp, Homo sapiens
ttaggacacagacacacaggagtagtttaggaacagagatttaataggcagaagagaaaagaaagagaaacagctctctctatagagaaagggatctctgagtagaaaggactgggtggtagtggcaaatgcaccagattatatagtccagtttkaggaggtggtgtctgatttacacagggctcacagattggttcaatcaggtatgacgtttacatagtgcctggggaaggctggggccccaccctaagtctattatgcaaatgaatgctccttggccggttcggtcttttctgctctttcctgtacacatggctggcagagaagggaagatggtgctgccatcttgaacatgtctagttcctagttcctgtcagcattcacccctgcaagctcccagcttgcttgtctatgtctgcagctcgactttataggctgctctttgttagatgatttggggctacttttcattaaaaagaaaggccttgccgaggactcccatacctttactatctgcctaagtgatttcttcttaactcctatatcattatctaccactgctgggcatgattcccccttcctcgtgttattcaactgaactggggtccaggtgcctggcacaataaggcca

SEQ ID NO: 420669 - DNA, 631 bp, Homo sapiens
ttaggacacagacacacaggagtagtttaggaacagagatttaataggcagaagagaaaagaaagagaaacagctctctctatagagaaagggatctctgagtagaaaggactgggtggtagtggcaaatgcaccagattatatagtccagtttgwggaggtggtgtctgatttacacagggctcacagattggttcaatcaggtatgacgtttacatagtgcctggggaaggctggggccccaccctaagtctattatgcaaatgaatgctccttggccggttcggtcttttctgctctttcctgtacacatggctggcagagaagggaagatggtgctgccatcttgaacatgtctagttcctagttcctgtcagcattcacccctgcaagctcccagcttgcttgtctatgtctgcagctcgactttataggctgctctttgttagatgatttggggctacttttcattaaaaagaaaggccttgccgaggactcccatacctttactatctgcctaagtgatttcttcttaactcctatatcattatctaccactgctgggcatgattcccccttcctcgtgttattcaactgaactggggtccaggtgcctggcacaataaggcca

SEQ ID NO: 420670 - DNA, 564 bp, Homo sapiens
aagtgtccaaactgcattagctttggggccctacaaaacctgtttggcctgggcaagggtagcagctttctaaataatcttcctcacttcactcacttctattcaaacccatattactcacaggttccaaacaatcttcctaaggaaacagtcagtggtctgtgaaaaaatctttactgtctccccatcataaaagttacctaaattcttcatcctgataagtaaggatctcagtctaattttcatttttactgtcaacaactacctattttagtttcagttttctctgccatgataactatttgcaacaaaactacttgctgttatagaggcatcacttttggtcatttctctcatcattttccctttattatcatttttatttttcaaaatcatttttatttgctacccattcattaagagctatctcaaatgttgtttctctcataaacttttttccctgctctcagagcatgatagcttctcctaccttctgcatgtttatagcatttttactccattctcastgtttttgtgtttcaccactgtgtattgtacttttaa

SEQ ID NO: 420671 - DNA, 476 bp, Homo sapiens
atttcatgtacatttcccacgatgaaccagagataccatttcatttttaaaagtcttctgyaaggaaatagctaaattatatttgattttatttaactatttccataatgtgtaattccttaactaatgcattatttcatttcgaaaactttacaagattagaacaatggtttgtctcatttcttaaaaatcggcatgtttttggtgctgctttctgagggcatgagtgaaattgagaaggccgaagcttagtccttttttctgggtataatgctccttttatgtgcattgtggctgttgatagctgagctgatcctgtctgtagtgttctttcttagtctgtcagccgctgaccaatgtctttgcttccactaagtatcttgtcctgcaacctgcattgtagatggtctgcctgctgcagaggtttctcaaattaggttatgtaatcaactgaattctgtacacccaaaaaagat

SEQ ID NO: 420672 - DNA, 476 bp, Homo sapiens
atttcatgtacatttcccacgatgaaccagagataccatttcatttttaaaagtcttctgcaaggaaatagctaaattatatttgattttatttaactatttccataatgtgtaattccttaactaatgcattatttcatttcgaaaactttacaagattagaacaatggyttgtctcatttcttaaaaatcggcatgtttttggtgctgctttctgagggcatgagtgaaattgagaaggccgaagcttagtccttttttctgggtataatgctccttttatgtgcattgtggctgttgatagctgagctgatcctgtctgtagtgttctttcttagtctgtcagccgctgaccaatgtctttgcttccactaagtatcttgtcctgcaacctgcattgtagatggtctgcctgctgcagaggtttctcaaattaggttatgtaatcaactgaattctgtacacccaaaaaagat

SEQ ID NO: 420673 - DNA, 476 bp, Homo sapiens
atttcatgtacatttcccacgatgaaccagagataccatttcatttttaaaagtcttctgcaaggaaatagctaaattatatttgattttatttaactatttccataatgtgtaattccttaactaatgcattatttcatttcgaaaactttacaagattagaacaatggtttgtctcatttcttaaaaatcggcatgtttttggtgctgctttctgagggcatgagtgaaattgagaaggccraagcttagtccttttttctgggtataatgctccttttatgtgcattgtggctgttgatagctgagctgatcctgtctgtagtgttctttcttagtctgtcagccgctgaccaatgtctttgcttccactaagtatcttgtcctgcaacctgcattgtagatggtctgcctgctgcagaggtttctcaaattaggttatgtaatcaactgaattctgtacacccaaaaaagat

SEQ ID NO: 420674 - DNA, 570 bp, Homo sapiens
tttctgggtataatgctccttttatgtgcattgtggctgttgatagctgagctgatcctgtctgtagtgytctttcttagtctgtcagccgctgaccaatgtctttgcttccactaagtatcttgtcctgcaacctgcattgtagatggtctgcctgctgcagaggtttctcaaattaggttatgtaatcaactgaattctgtacacccaaaaaagatttgctgcagtcctcactccccaaatctcagaatgtagccttatttggagacagggtctttacagaggtaatcaagttaaaatgaggtcattagggtaggtctccatccaacatgactgctgtcctttaaaaaagaggatatttgtgaaacagagacagacatttacagagaaaagaggatgtgaagacacagaaagaatgccgtctacatgcaaagaatgcggaggctgccagaagctaagagggaggcacagccctcagaatgaaccaaccctgcagaaaccttaatctcagccttctgccctccaggactgtgggacaatacatttctgtcatgtaagccacttagtttg

SEQ ID NO: 420675 - DNA, 662 bp, Homo sapiens
ttaaacaacaacaacaacaaaaaccctcctagatgcaatactttggcatacatggaacacaatggcatttgagcaaagaaggttttaaaataattgttttgcttttgtacctayctttttaaaaataagataatatagcacaaaagagctttagcacttttgatatggtttggctgtgtccccacccaaatctcatcttgaattacaactcccatagttcccacgtgttgtgggagggacccagtgggagataattgaatcatcagggcggtttcccccatactgttctcgtggtagtgaataagtctcacgagagctgatgattttacaaggggtctcccctttcacttggctctctttctttcattctttcttgcccactgccatgtaagaagtccctttgctcttccttcatcttcctccatgattatgtagctccccggccatgtggaactgtaaatccattaaacctctttttctttataaattacccagcctcaggtatgtctttattagcagcatgagaacggactgagacaactttggagccaggcagtcctgagttttgttttcacccataacacccagtagttatgtaaatctgaacaaatttcttaagcttgttttatctccattttctaagctggtggtgattataacta

SEQ ID NO: 420676 - DNA, 662 bp, Homo sapiens
ttaaacaacaacaacaacaaaaaccctcctagatgcaatactttggcatacatggaacacaatggcatttgagcaaagaaggttttaaaataattgttttgcttttgtacctacctttttaaaaataagataatatagcacaaaagagctttagcacttttgatatggtttggctgtgtccccacccaaatctcatcttgaattacaactcccatagttcccacgtgttgtgggagkgacccagtgggagataattgaatcatcagggcggtttcccccatactgttctcgtggtagtgaataagtctcacgagagctgatgattttacaaggggtctcccctttcacttggctctctttctttcattctttcttgcccactgccatgtaagaagtccctttgctcttccttcatcttcctccatgattatgtagctccccggccatgtggaactgtaaatccattaaacctctttttctttataaattacccagcctcaggtatgtctttattagcagcatgagaacggactgagacaactttggagccaggcagtcctgagttttgttttcacccataacacccagtagttatgtaaatctgaacaaatttcttaagcttgttttatctccattttctaagctggtggtgattataacta

SEQ ID NO: 420677 - DNA, 536 bp, Homo sapiens
attttttaaacaggtacttttatgttgcttgtataattttgtgtaaactctcartaattgaaagttgagtaatctgtacaaggatcattgaatactactttgagattgactacatacaaaatcttccattatgttgagtgtcattttctaacaagcttatttaagttttaggttttcaaagtggctttctccatgagctccaaaagttagaaatgaacttctgtcatctacttttattcttttttatatataacctttgaatcacaagaatgattgtggaaaggtataagaaagctgtagctttcaataaccactgcaaacagtaggaaattgagtttttccagtgtttagtaactcgagcaatgatcaaacactgaaatatcccgttctagttattttgctcttcagaattcaattaatgtctttcaaagacattggaaagcttttgagataaaatgactagaaaatgaaaagcttttgagataaaatgactagattccccaaactgtgttgtttctcatcactctcatgagaaa

SEQ ID NO: 420678 - DNA, 536 bp, Homo sapiens
attttttaaacaggtacttttatgttgcttgtataattttgtgtaaactctcagtaattgaaagttgagtaatctgtacaaggatcattgaatactactttgagattgactacatacaaaatcttccattatgttgagtgtcattttctaacaagcttatttaagttttaggttttcaaagtggctttctccatgagctcyaaaagttagaaatgaacttctgtcatctacttttattcttttttatatataacctttgaatcacaagaatgattgtggaaaggtataagaaagctgtagctttcaataaccactgcaaacagtaggaaattgagtttttccagtgtttagtaactcgagcaatgatcaaacactgaaatatcccgttctagttattttgctcttcagaattcaattaatgtctttcaaagacattggaaagcttttgagataaaatgactagaaaatgaaaagcttttgagataaaatgactagattccccaaactgtgttgtttctcatcactctcatgagaaa

SEQ ID NO: 420679 - DNA, 536 bp, Homo sapiens
attttttaaacaggtacttttatgttgcttgtataattttgtgtaaactctcagtaattgaaagttgagtaatctgtacaaggatcattgaatactactttgagattgactacatacaaaatcttccattatgttgagtgtcattttctaacaagcttatttaagttttaggttttcaaagtggctttctccatgagctccaaaagttagaaatgaacttctgtcatctacttttattcttttttatatataacctttgaatcacaagaatgattgtggaaaggtataagaaagctgtagctttcaataaccactgcaaacagtaggaaattgagtttttccagtgtttagtaactcgagcaatratcaaacactgaaatatcccgttctagttattttgctcttcagaattcaattaatgtctttcaaagacattggaaagcttttgagataaaatgactagaaaatgaaaagcttttgagataaaatgactagattccccaaactgtgttgtttctcatcactctcatgagaaa

SEQ ID NO: 420680 - DNA, 587 bp, Homo sapiens
gaaggtgatcaagaagttccaggaatgcttcagatcagcctgtcagggggtacatggctatccataagtcatgtgcccaatctaagtggacggggacagaaagacacaggatgacctccccagtaaggggtcttgcgaccagaagaggatgaagaagatcagataactactatggtgttcaggaaaagaagayagatacctatacaggggaaatgagtgatctaaatgtacccaaaatactgaatatttaggagacatattaggtgttgccagacaacaattacaatcactcctaagagtcaattctcactcagcctctaatgaagaaccatcaccaatgactttatcaaaccattttataactggagttcattatatagcagctattcctgctatgcctattgacagactaaattacacttatgcaagccacttcatctcccaggtttagatttatgctaaaacaggagaaggaagtaccacggtgtaataatacctgccccaacctgggtgggagagtgtcaggcttataattagattacatttgcaaacagttccagagttccccagggagaagggttataaat

SEQ ID NO: 420681 - DNA, 587 bp, Homo sapiens
gaaggtgatcaagaagttccaggaatgcttcagatcagcctgtcagggggtacatggctatccataagtcatgtgcccaatctaagtggacggggacagaaagacacaggatgacctccccagtaaggggtcttgcgaccagaagaggatgaagaagatcagataactactatggtgttcaggaaaagaagatagatacctatacaggggaaatgagtgatctaaaygtacccaaaatactgaatatttaggagacatattaggtgttgccagacaacaattacaatcactcctaagagtcaattctcactcagcctctaatgaagaaccatcaccaatgactttatcaaaccattttataactggagttcattatatagcagctattcctgctatgcctattgacagactaaattacacttatgcaagccacttcatctcccaggtttagatttatgctaaaacaggagaaggaagtaccacggtgtaataatacctgccccaacctgggtgggagagtgtcaggcttataattagattacatttgcaaacagttccagagttccccagggagaagggttataaat

SEQ ID NO: 420682 - DNA, 597 bp, Homo sapiens
ttcgtactctagcaggatcccctgttttatgtcctcccaaaattcatgggttgaaacctaatgtgrtagtgttaggaagtggggcctttggaaggtgattaggccatgagggtggagcctcctgaatgggattagttcccttataaaacgaggccccagagagctgccttgcccccctccaccatgtgaggatacagcaagaaggtgccaactatgaaccaggaagaggccctcaccagatactgaatctgctagtgccttgatcttggacttcccagtctccagaactgtatgcaataaatttctgttgtttataagccactcaggatatagtattctgttacagcagcccaagtggactgagacagtactctttgtcatgtgtggccactgaagtctctgcttgattagcttattggcctgctattgattgaacagatttccttaaacacctggaatcagtcagtctcccaatccttgccaagggcctgtgtgtgcatgctgggacatgccttccacattcagccaggcagctgacaactctgccttcgccttcacttcctgctgacacagaagctcagggtccatcagaagtgg

SEQ ID NO: 420683 - DNA, 583 bp, Homo sapiens
tgagttaatggatggagagaggcagacccactctcaatctgggtgggcaacatcgaatcagttgccagcatagctagaataaagcargcagaaggtgttggaaagagcagacttgctgagtcttccagccttcatctttctcccctactggatgcttcctgccctctaacatcagactccaagttgttcagccttgggaatcttggcttaaaccagtgatttgccaggaactctgaggccttcagcaacagactaaaggctacactgtcagcttccctgcttttgaggtttggagagtccaactagcttccttgtgcctcagcttgcagatggcttattttgagacttcaccttgtgattgtgagtcaatactccttaataaattcccctttatatatacatgtatcctgttagtgctgtccctctagagaaccctggctaatacagattttggtcccaggattggttttagaggaagagaattttaaggatggatttctttagttggtttgggggtttctggagttggctgcttaatacgattagacccaaaaatgctaaggactctacttctaatagtatg

SEQ ID NO: 420684 - DNA, 635 bp, Homo sapiens
tcctgccctctaacatcagactccaagttgttcagccttgggaatcttggcttaaaccagtgatttgccaggaactctgaggccttcagcaacagactaaaggctacactgtcagcttccctgcttttgaggtttggagagtccaactagcttccttgtgcctcagcttgcagatggcttattttgagacttcaccttgtgattgtgagtcaatactccttaataaattcccctttatatatacatgtatcctgttagtgctgtccctctagagaaccctggctaatacagattttggtcccaggattggttttagaggaasagaattttaaggatggatttctttagttggtttgggggtttctggagttggctgcttaatacgattagacccaaaaatgctaaggactctacttctaatagtatggagaacactcatagtccttggcataaactgtttagagatttaggcaaaataaatgcatttgatattcctgattcactactcatgaaaggcaaggagtttagtgactctgtacatacttttgaccatattggagaaccaagaaatgtaatgaagttggctggttgttcctaagttcactggacaaagtgatgaaagaaaaggatgagct

SEQ ID NO: 420685 - DNA, 376 bp, Homo sapiens
attctcctcagaaatcccccaacaccccaactctcctgtttgcttctaggcccatgactagacttaagtcccaggaggcccctagaggtgatgctcagatgtgttacccacaaggagatgtgccacactccaaaagaactccttgagttttctgatttctataagmagaaatctggagaataggcatgggaatggatattaagggtgtgggataatggtggaaggaacataaagttgaatttattgatatgggcccacaaaagagggatcctgcatttaatattccagctcagggagttaaaaaaaaaaggttataatagtttatttgcttggttagctgaaaaatggatcaaaagatggtccactatgagtgacc

SEQ ID NO: 420686 - DNA, 376 bp, Homo sapiens
attctcctcagaaatcccccaacaccccaactctcctgtttgcttctaggcccatgactagacttaagtcccaggaggcccctagaggtgatgctcagatgtgttacccacaaggagatgtgccacactccaaaagaactccttgagttttctgatttctataagaagaaatctggagaataggcatgggaatggatattaagrgtgtgggataatggtggaaggaacataaagttgaatttattgatatgggcccacaaaagagggatcctgcatttaatattccagctcagggagttaaaaaaaaaaggttataatagtttatttgcttggttagctgaaaaatggatcaaaagatggtccactatgagtgacc

SEQ ID NO: 420687 - DNA, 376 bp, Homo sapiens
attctcctcagaaatcccccaacaccccaactctcctgtttgcttctaggcccatgactagacttaagtcccaggaggcccctagaggtgatgctcagatgtgttacccacaaggagatgtgccacactccaaaagaactccttgagttttctgatttctataagaagaaatctggagaataggcatgggaatggatattaagggtgtgggataatggtggaaggaacataaagttgaatttattgatatgggcccacaaaagagggatcctgcatttaatattccagctcagggagttaaaaaaaaaaggttataatagtttatttgcttggttagctgaaaamtggatcaaaagatggtccactatgagtgacc

SEQ ID NO: 420688 - DNA, 515 bp, Homo sapiens
aaattagcaagacacaccaatacaacttcacttcctatttgattaccatggtgtatgcttggactgaagtacttaccaccatctaatttttgtttttgtttatttttgtgtgcctaccctctctttgctgtaagggctgtgagattcaggactttgttgtattcgctgctattacctcagtgcctagaagagtgattggcacaaagtaggaactcagtgttgaataaacgattgaatgggttataaacattaattccttaataaaaagacctttttcycctttctttatgtagcagtccaactgatccttgaaacatgtaaagcatatcacatcactcaccactacacttaggccacttatatgcacaaatgtttaaatgccttattaactacttttaatcatattggccttaattctatttcctcaccattccaaggtttttttgtttgtttgtttttgttttgatctcagggccttttttttttctgaaacacactgctagattttccatggt

SEQ ID NO: 420689 - DNA, 610 bp, Homo sapiens
aacctagctctaggcttagcatcagctggttggttgagtcaacctcaataaaagatgactgtttctagaaaaattgggaaagtaagagtcagacaaacctgtatcagttcatgttttagccactgtaggtaaattacataatcttttcaactctctccacatcgtatccaagtgatcataatatgtgtgttgtaagggctagaaatatgtttaatatgcataacrtaacataccatttgtaatgtattagatgcaaaataagctctataggcgtgttattaagatattgagtcataaaatggtacggaaatccatttattaatgtttaataggattgttcttttcaaaacataatataatggtgaaaatggaaatgtatttagatgtaaagaaagttatgcagaagttttcttaaaatatcagcaaaacgtgatcaatactagttgctagtaatatgtgtacatatttgacctgtgtatgagaatgagtcccagatcaaatgtaattagtaacagttgataatgaaaatattattttaaaacagggagatttttcagataagaaatgtcagaaatgaatatattactgtaaacacaacaacataattgta

SEQ ID NO: 420690 - DNA, 610 bp, Homo sapiens
aacctagctctaggcttagcatcagctggttggttgagtcaacctcaataaaagatgactgtttctagaaaaattgggaaagtaagagtcagacaaacctgtatcagttcatgttttagccactgtaggtaaattacataatcttttcaactctctccacatcgtatccaagtgatcataatatgtgtgttgtaagggctagaaatatgtttaatatgcataacataacataccwtttgtaatgtattagatgcaaaataagctctataggcgtgttattaagatattgagtcataaaatggtacggaaatccatttattaatgtttaataggattgttcttttcaaaacataatataatggtgaaaatggaaatgtatttagatgtaaagaaagttatgcagaagttttcttaaaatatcagcaaaacgtgatcaatactagttgctagtaatatgtgtacatatttgacctgtgtatgagaatgagtcccagatcaaatgtaattagtaacagttgataatgaaaatattattttaaaacagggagatttttcagataagaaatgtcagaaatgaatatattactgtaaacacaacaacataattgta

SEQ ID NO: 420691 - DNA, 567 bp, Homo sapiens
tttcataaattgtgcctttggtgttgtatctaaaaagtcatcactatacrcaaggttatatagattttctactgtgttatcttccaagagttttatagttttacatattacatttatatctgtgctgcattctgagttaactttatgaagggtgtaaggtctccgtcttgattattgtgtgcatgtggatgtccacttgtttcagcaccatttattgaaaaggctgttttcttccattgtattacctttgctccttcatcaaagatcagttgactatgtttatgtgggtctatttctgagctctccgttctgttcactaatgtacttatctattcttttgtcaatatcaaatgatcttgattattgtagctttgtattaagtcttgaaactgagtagcgttagtcctccaattttgttatttcctttgattttgtgtcggctaatctgggccttttgcttctccatgtaatgacccattagaatcagtttgctgatatccacaatatatgtttctgggattttgattgggattgcattgaatctacagatcaaattgggagaattgg

SEQ ID NO: 420692 - DNA, 517 bp, Homo sapiens
ctttccttccctttcagtttccaccactaggttatgtgctcaacagatttttagttcccagccatgcttatatttaaaactcagtgtgatggttaatgttatgtgtcaacattgctaggctatggtgcccagatgtttggtcaaatagcagatgttgccatgaagatatttttaaaatgtgattaacatttaaatcagtagactttgagtaaagaagattaccctccataataagagtgagtgaacctcattcaatcagttgaaggctttgagagaaaaagactgaggtcctctgaggatgaaggaattctgcctccaaactgcctttagacttgaagtgcaccaagaattctttccagggtctccagcctgccaacctgccataaagatttcaracttgctagctcccacagccttatgaactaaagccttacagtctccccctctctctctcttcttaccccgccaccaacacacacacatacacatattgtatttgttctgtatctttggagaa

SEQ ID NO: 420693 - DNA, 619 bp, Homo sapiens
ctcagctccgcctactgcatgctcaatattcttttttcttttctttgatatggagtcttactctgttgcccagcctggagtgcagtggcgtgatcttggctcactgcaacctctgcctcccacgttcaagcaattctcctgcctcagcctcctgagtagctgttattgcaggtgtctgccaccatgcctggctaattttcaatgttcttttgcccagataattcatactcatcaatgagattttgrcttaaaagtcagtttctcagtcctctaattgaaataagttgctttttgctcagagcactggtttcctttctttcatagacagcattagtttctaagcatgagtttatttctttgttgtttgctttctcttcttattggccaataaatggtgagtgctgtttctcttttgcccatattttatcaataagaagttctagtatagtaaatagtggatgatgaatgataattttgttgtaatgtccccctcaaatttcatttctttctacaaatccaacacaatattgggcatgtttacatgcataagtcattgttccctgatggatcatcccttttaccttttctcttcataaagttcatcttatctcaggaggat

SEQ ID NO: 420694 - DNA, 619 bp, Homo sapiens
ctcagctccgcctactgcatgctcaatattcttttttcttttctttgatatggagtcttactctgttgcccagcctggagtgcagtggcgtgatcttggctcactgcaacctctgcctcccacgttcaagcaattctcctgcctcagcctcctgagtagctgttattgcaggtgtctgccaccatgcctggctaattttcaatgttcttttgcccagataattcatactcatcaatgagattttggcttaaaagtcagtttctcagtcctctaattgaaataagttgctttttgctcagagcactggtttcctttctttcatagacagcattagtttctaagcatgagtttatttctttgttgtttgctttctcttcttattggccaataaatggtgagtgctgtttctcttttgcccatattttatcaataagaagttctagtatagtaaatagtggatgatgaatgataattttgttgtaatgtccccctcaaatttcatttctytctacaaatccaacacaatattgggcatgtttacatgcataagtcattgttccctgatggatcatcccttttaccttttctcttcataaagttcatcttatctcaggaggat

SEQ ID NO: 420695 - DNA, 619 bp, Homo sapiens
ctcagctccgcctactgcatgctcaatattcttttttcttttctttgatatggagtcttactctgttgcccagcctggagtgcagtggcgtgatcttggctcactgcaacctctgcctcccacgttcaagcaattctcctgcctcagcctcctgagtagctgttattgcaggtgtctgccaccatgcctggctaattttcaatgttcttttgcccagataattcatactcatcaatgagattttggcttaaaagtcagtttctcagtcctctaattgaaataagttgctttttgctcagagcactggtttcctttctttcatagacagcattagtttctaagcatgagtttatttctttgttgtttgctttctcttcttattggccaataaatggtgagtgctgtttctcttttgcccatattttatcaataagaagttctagtatagtaaatagtggatgatgaatgataattttgttgtaatgtccccctcaaatttcatttctttctacaaatccaacacaatattgggcatgtttacatgcataagtcattgttccctgatgratcatcccttttaccttttctcttcataaagttcatcttatctcaggaggat

SEQ ID NO: 420696 - DNA, 626 bp, Homo sapiens
actcacactaattatgaactgttcatctcagtagcccaaactgcaaagtcaattgattagtttctgctacctatgaaatcattaagattcaaaarcttatatggaggagagttaaaacatgtaactaaaagtgaaaattctctccaaccctaagaatctcctagaaccagtggtgaaagaaaagcaaatgagtaaggtcagtcttcatcttttagttggcatagagagctaaatctacctagtatatttggcaaactgacaattgtcaggaagttttctgctttagatttaagaattataatttaaatgaatggcaactataggaaaacaaaaatatatgaagtcccatcctcattatcctgttttaatatctatctggacaaaatgataacatttgctgccactgacaaaaaagaagaaagggagagaaaaaatatgtgtaccttttatatactactgtaatttgtgctgattgtaatgtatataaatgtaattaagatatatgtgtatatgtgtgcgtttaattgagctaaaaatgtattaatttgcttcagtaaagagactgaatttggaacagtgcctgcaaggcccttctttcctttaataggtcagggaggcaagtttaa

SEQ ID NO: 420697 - DNA, 626 bp, Homo sapiens
actcacactaattatgaactgttcatctcagtagcccaaactgcaaagtcaattgattagtttctgctacctatgaaatcattaagattcaaaaacttatatggaggagagttaaaacatgtaactaaaagtgaaaattctctccaaccctaagaatctcctagaaccagtggtgaaagaaaagcaaatgagtaaggtcagtcttcatcttttagttggcatagagagctaaatctacctagtatatttggcaaactgacaattgtcargaagttttctgctttagatttaagaattataatttaaatgaatggcaactataggaaaacaaaaatatatgaagtcccatcctcattatcctgttttaatatctatctggacaaaatgataacatttgctgccactgacaaaaaagaagaaagggagagaaaaaatatgtgtaccttttatatactactgtaatttgtgctgattgtaatgtatataaatgtaattaagatatatgtgtatatgtgtgcgtttaattgagctaaaaatgtattaatttgcttcagtaaagagactgaatttggaacagtgcctgcaaggcccttctttcctttaataggtcagggaggcaagtttaa

SEQ ID NO: 420698 - DNA, 626 bp, Homo sapiens
actcacactaattatgaactgttcatctcagtagcccaaactgcaaagtcaattgattagtttctgctacctatgaaatcattaagattcaaaaacttatatggaggagagttaaaacatgtaactaaaagtgaaaattctctccaaccctaagaatctcctagaaccagtggtgaaagaaaagcaaatgagtaaggtcagtcttcatcttttagttggcatagagagctaaatctacctagtatatttggcaaactgacaattgtcaggaagttttctgctttagatttaagaattataatttaaatgaatggcaactataggaaaacaaaaatatatgaagtcccatcctcattatcctgttttaatatctatctggacaaaatgataacatttgctgccactgacaaaaaagaagaaagggagagaaaaaatatgtgtaccttttatatactactgtaatttgtgctgattgtaatgtatataaatrtaattaagatatatgtgtatatgtgtgcgtttaattgagctaaaaatgtattaatttgcttcagtaaagagactgaatttggaacagtgcctgcaaggcccttctttcctttaataggtcagggaggcaagtttaa

SEQ ID NO: 420699 - DNA, 551 bp, Homo sapiens
tataaatgaaatggtgactctccatgttaaattcctttacagccactttgatgaataccatacatatcaatacttaaagtatttaatgtgataaatgagcttgcttcatgcttgttagcttatctgatctatgtgagattgacgatagcgttatttgcctgagttaatgtatgtctaaatgatatttatattttgttttaataacatgggtggagaagccagtctcatacaggtttgttgaaytgaatggaaggtgaaatttaaagtgatttcagtccatctcagagtatttatttttaacttttatccagaagaaagcaaattattttgattttcaaaattcatcttcaatcactatcagtaagcaatttcaataacatatcctataaaattataattaactttaaactatcttataatcaaagagaacaattcctgattcaaagattttccatatgtgtatcttattcttttggaaaattcaaatcgaatgtctctataaaattcttaagttgttcattgataagtctattagtctgttctcacactgt

SEQ ID NO: 420700 - DNA, 551 bp, Homo sapiens
tataaatgaaatggtgactctccatgttaaattcctttacagccactttgatgaataccatacatatcaatacttaaagtatttaatgtgataaatgagcttgcttcatgcttgttagcttatctgatctatgtgagattgacgatagcgttatttgcctgagttaatgtatgtctaaatgatatttatattttgttttaataacatgggtggagaagccagtctcatacaggtttgttgaactgaatggaaggtgaaatttaaagtgatttcagtccatctcagartatttatttttaacttttatccagaagaaagcaaattattttgattttcaaaattcatcttcaatcactatcagtaagcaatttcaataacatatcctataaaattataattaactttaaactatcttataatcaaagagaacaattcctgattcaaagattttccatatgtgtatcttattcttttggaaaattcaaatcgaatgtctctataaaattcttaagttgttcattgataagtctattagtctgttctcacactgt

SEQ ID NO: 420701 - DNA, 551 bp, Homo sapiens
tataaatgaaatggtgactctccatgttaaattcctttacagccactttgatgaataccatacatatcaatacttaaagtatttaatgtgataaatgagcttgcttcatgcttgttagcttatctgatctatgtgagattgacgatagcgttatttgcctgagttaatgtatgtctaaatgatatttatattttgttttaataacatgggtggagaagccagtctcatacaggtttgttgaactgaatggaaggtgaaatttaaagtgatttcagtccatctcagagtatttatttttaacttttatccagaagaaagcaaattattttgattttcaaaattcatcttcaatcactatcagtaagcaatttcaataacatatcctataaaattataattaactttaaactatcttataatcaaagagaacaattcctgattcaaagattttccatatgtgtatcttattcttttggaaaattcaaatcgaatgtctctataaaattcttaagttgttcawtgataagtctattagtctgttctcacactgt

SEQ ID NO: 420702 - DNA, 606 bp, Homo sapiens
acctctgctctttcctgctttcattacaatcttcagattttacctatgagaattttcagaattcatcccttctatagtaaccttcttttcagaggttgcttctgaagagcccacactaagttagtcttctttagctcctctcagttttttttttttttaatttaaggaaggatttgcttttacttcctcttttcaataaggaacgttaagaatagctgtggaaaaatactgcaaattgacccaacaaaaactctcagcctcctactctgtcttgctgtacactgaagattctaaagttaaagaatatatttcctagtatgccagtcacaaaaagacaaacacaatatgattccttttatataaagtatctaaagtagtcaaatttatagaaacagaaagtagaatgagggttaccaggtactggggaaagaaggaagaggagagtgtttaatgggtataaagtctcagttttataagatgaaaaagtactggagatctgtttcacaacaacrttaatatatttaaattcacagaagtatacacttaaaatggttaagattattttctaaaataataataaagtaattatatattcacaaacttgga

SEQ ID NO: 420703 - DNA, 196 bp, Homo sapiens
tataatgtagcccaagcatgaaaacaaaattatgaatttaataatgttgacagtagcacaaaaatggcatgaaaatatattagggtgaacaaactgtattctgttagttaaatatttgmagacaaccaagccaatttgctccttaaaaagacatgtagaactttagaggacaaaataatcagtaattatatgagta

SEQ ID NO: 420704 - DNA, 618 bp, Homo sapiens
aatgcccatcaatgacacattggataaataaaatgtggtacatatataccatagaatactatgcagccatraaaaataatgagatcatgtcttaagtgggaaaacaggtggagctggaggctattatccttagcaaactaatgtaagaacagaaaatcaaatacagcatgttctcacttataagtgggagctaaatcataagaatttatgaacacaaagaaggaaacaacagacactaggatctacttgaagggggagagtgggagaagggagaagagcagagaagataaatattgggtactagacttaatacttggatgatgaaatatcatgtaccacgaacccccatggcacgtgtttacctatgtaacaaacctgcacatgaacctccaaacctaatataaaagttaaaaaaaaagaaaataaagttttcttctaaaacagcaacacgttttatttacatattatctttggctacttataggctataaaggcagtgataagtagttgcatctgactgcttagccaaccaaccctaaaatatttacttacatgaaccctacagaaaaaaaatggtcaatgcctggttaaaacaaatactatacttcactggctatt

SEQ ID NO: 420705 - DNA, 618 bp, Homo sapiens
aatgcccatcaatgacacattggataaataaaatgtggtacatatataccatagaatactatgcagccatgaaaaataatgagatcatgtcttaagtgggaaaacaggtggagctggaggctattatccttagcaaactaatgtaagaacagaaaatcaaatacagcatgttctcacttataagtgggagctaaatcataagaatttatgaacacaaagaaggaaacaacagacactaggatctacttgaagggggagagtgggagaagggagaagagcagagaagataaatattgggtactrgacttaatacttggatgatgaaatatcatgtaccacgaacccccatggcacgtgtttacctatgtaacaaacctgcacatgaacctccaaacctaatataaaagttaaaaaaaaagaaaataaagttttcttctaaaacagcaacacgttttatttacatattatctttggctacttataggctataaaggcagtgataagtagttgcatctgactgcttagccaaccaaccctaaaatatttacttacatgaaccctacagaaaaaaaatggtcaatgcctggttaaaacaaatactatacttcactggctatt

SEQ ID NO: 420706 - DNA, 618 bp, Homo sapiens
aatgcccatcaatgacacattggataaataaaatgtggtacatatataccatagaatactatgcagccatgaaaaataatgagatcatgtcttaagtgggaaaacaggtggagctggaggctattatccttagcaaactaatgtaagaacagaaaatcaaatacagcatgttctcacttataagtgggagctaaatcataagaatttatgaacacaaagaaggaaacaacagacactaggatctacttgaagggggagagtgggagaagggagaagagcagagaagataaatattgggtactagacttaatacttggatgatgaaatatcatgtaccacgaacccccatggcacgtgtttacctatgtaacaaacctgcacatgaacctccaaacctaawataaaagttaaaaaaaaagaaaataaagttttcttctaaaacagcaacacgttttatttacatattatctttggctacttataggctataaaggcagtgataagtagttgcatctgactgcttagccaaccaaccctaaaatatttacttacatgaaccctacagaaaaaaaatggtcaatgcctggttaaaacaaatactatacttcactggctatt

SEQ ID NO: 420707 - DNA, 618 bp, Homo sapiens
aatgcccatcaatgacacattggataaataaaatgtggtacatatataccatagaatactatgcagccatgaaaaataatgagatcatgtcttaagtgggaaaacaggtggagctggaggctattatccttagcaaactaatgtaagaacagaaaatcaaatacagcatgttctcacttataagtgggagctaaatcataagaatttatgaacacaaagaaggaaacaacagacactaggatctacttgaagggggagagtgggagaagggagaagagcagagaagataaatattgggtactagacttaatacttggatgatgaaatatcatgtaccacgaacccccatggcacgtgtttacctatgtaacaaacctgcacatgaacctccaaacctaatataaaagttaaaaaaaaagaaaataaagttttcttctaaaacagcaacacgttttatttacatattatctttggctacttataggctataaaggcagtgataagtagttgcatctgactgcttagccaaccaascctaaaatatttacttacatgaaccctacagaaaaaaaatggtcaatgcctggttaaaacaaatactatacttcactggctatt

SEQ ID NO: 420708 - DNA, 616 bp, Homo sapiens
ggaacctgcccagggcttgtctgggcatgccacagcagactggagccccacctgtgcactatgggaagtgggtggaacatggggaattcctgccttatgcaagggaggcatctattctcttcagcttttgtggtgacctgggagtcaatctgtgaggtggagggcctgttagcaggactgcatttcactttgctgagttttattttcctttttttcccttttcacccaataaaatcctgctgtactcacccttcaatgtgtccccatgcctaaattttcctggtcgtgtgacaagctcctagttttaactgaactaaggagcaaaattctgcaacattatttaatattcattaaaattccatgaagtgctatttaatgtatatgaaaactaaggcttaaccattcataagttaccccaagttttacaagtagtaagaagagtaaaagggattaagagacagccttatagccttttctaacactaaagcatctgctcttatatattargaaattatatttgcatttcagttgtggtcatttgggatagtatgttcttcacttgcaaataactattattaaattcaatgtgtgaaagattagcaaacttaaaaaaggc

SEQ ID NO: 420709 - DNA, 590 bp, Homo sapiens
aaagaatcagaataatcaacacaataatgaagccaaaacgcacagctgaaggatcgacactactcaacatcaagacttactatatatccacagtattaaaggcagtgcaatattgctgaaaaaaatagacaaatagattaatggaacagagtagatagccccgaaatagacccacaaagacagagtcaactgactgtgccaaaactgctcttttggcaaaagaacaatggtaatataatggtaaaaagagtcttttaaaaaatagtattggaaactagaacttttcattgcaaaaaagtgaatctagacagagaccttacacctttcacaaaaattaactcaaaatgaattatagacataggtgtaaaatgcagaactataaaacttgttgaagataacatagaatatcaagatgacattgaatatgggaatgactttttagatacaaccctaaaggcacaatccaygaaagtactaatggacaagctgaacttcattgaaattaaaaccttccactctgataagccattgttaggagaaaaagaagacaagccacagactggaaagaaatatttgcagaaataatatct

SEQ ID NO: 420710 - DNA, 523 bp, Homo sapiens
aaaatgtgaaacacagtttaacactcaatgacatgttattttaaaatttttgacgcatttagaatgaagtgttaaaaaatagtaactttactrataccactttatataatggtatacaaaattggcactattaagccctcttccccccaaaatgtaattattgctaactttcaaattattttggtttgataaattcagaaattctgagaatgatattctagggcacccactaaaagcataaatgattgattatcttgattatcattatggaggacattatttcccaaatcagagttatcctagctcctatgtttcagaggctgatacttcagatgaaggtgaaagaacagccagccatctataaatgtcagtataaaagtgctgaataacatttgtgtccatcattgtacttccctgaaggtgggtgtttatgagaagtggccagaggataaaagtaaggtgtggaattgaacaaccccccattggtaacttacatcctgaaacaagagatttgattaccctt

SEQ ID NO: 420711 - DNA, 523 bp, Homo sapiens
aaaatgtgaaacacagtttaacactcaatgacatgttattttaaaatttttgacgcatttagaatgaagtgttaaaaaatagtaactttactaataccactttatataatggtatacaaaattggcactattaagccctcttccccccaaaatgtaattattgctaactttcaaattattttggtttgataaattcagaaattctgagaatgatattctagggcacccactaaaagcataaatgattgattatcttgattatcattatggaggacattatttcccaaatcagagttatcctagctcctatgtttcagaggctgatacttcagatgaaggtgaaagaacagccagccatctataaatgtcagtataaaagtgctgaataacatttgtgtccatcattgtacttccctgaaggtggrtgtttatgagaagtggccagaggataaaagtaaggtgtggaattgaacaaccccccattggtaacttacatcctgaaacaagagatttgattaccctt

SEQ ID NO: 420712 - DNA, 541 bp, Homo sapiens
tttaggcctcttttcatttttaactctctccctgggaagtctcctctacacctatgcttcagctatatatcaatgcctcttaatgtatctccagcgtgggggtcatgtttgagcaccaggtatcaccttctggtttgtctcagagatattttatactcaaaccgaagttatgacatccccatgaaaactttctttcatctagtttcatctattttcctcacagtgaacggtaacaccactgaagtgcccaaatcagaaactggtatcttctcttcttccctcctctctttaattcttttagtagtaaaatctgctgtattatccattaatggatttctcttgggatttatgtktagaaaatgtgctcatggatgagaacagataaaccacgcttctgattaaatgatggagcataattgctaaattgtgagtcagggttagagatcgaggatgacatcatgaagctgaagagtatctgagttatgtttcattatggagaaaaatgtccaagactttttccagctgcatgcttacataattg

SEQ ID NO: 420713 - DNA, 484 bp, Homo sapiens
aaaatcacttgttattctggaaattatgcccacacttgtttcttacgctttgatatatcttgataactagactaatgttttagtaatgctaataatggaatattgccttttcttagtgcctgagaatgactctgtatttaatacctaatctttgattcctaattcccattaaaataattctctaaatttgcttacctatatccctgagtataaactgattttagattctccatcttcagattaagtttgtgatatctctcttaatttttacagctcttcaatattgccattctagatttccacggcattctagtaatgttgcttattaacatattattctttcttctgggttgaataarccagaataaacaatgaatagagcctgtcctatttctttggtagtgcttccatctattagaatcctagcaggggagaggaatttatccattgatctgaacagcaaattggagtatttaaagtagat

SEQ ID NO: 420714 - DNA, 277 bp, Homo sapiens
agtagtaagtttctcattactgrttcatttattcactcactcattaattcattcaaagtatatttcttgaaggcctgctacctatattctagacatattacaggaacttgagaaaatagtaatgaataaaattaccttcatagaacttaaactgtagtgtttgaaatggacagcaaaaacaataaaaataaaatacacatgatattagtgaaaatttctaaggaatatataaaatattgctagaataagaacaaaagctcagatagagcaactgtgg

SEQ ID NO: 420715 - DNA, 495 bp, Homo sapiens
ttgtgacttaaaaatgaaaaggaaatkctcataggatgctcaaaggaaccatagtttttttgcaaatgaaaacaaagataaaactatgaaaaattcgaatttttgagttgcctgttaatctagtataaaatgtgtatttccattcaaaatatcctctcggattctatcctattcttttggaggaaaataaagaagggaaaagaaaaatgatcctgggagaagctggtagataaagggaattctatcatatagccacaatgaacaaaactgagtagcgtctgaggaattggaagaattcaaacaacttaaatagattaaaatttaatattttaaattaaattttaaaggggattgaaaaccttcctatgtaactggcaaatatacattcttatccagataacattttctgattttctgtgtgtgtgtgtgtgtgtgtgtttaacctctctgcagttatttgtttttatttggaggcttctgaaaaaactgtgcttt

SEQ ID NO: 420716 - DNA, 565 bp, Homo sapiens
agacacaaaaccagtataaagagctgttggagaaagagaaatagaaatgaatgatgttttgaaacttggatggcaattgcagtattaaaaaacactgggttctgggtatatacttaaggaaataaaatgattttatgatagattagaatacaaaaaagaatgagttagtcatgacttcaggttttagggttatctgtgttttcagaagaagagccatacatcattttggaaattttttttttaaggtaataattaaatgtccaagtaatatattaggtgaggttgagatggaaatacaaatttggaaattttcattgaatgaatggaaacaggaagagaatagatacatactaaaacatgtggaaggactaaaccttctagagttaggaggttgagagatgttaagagaaaagaaaagaaaatagacaagcatggatcaatgagrcaaaaagaaaatcaagaaaatgaggtgttctgaatgccagtttatgaaagtatttctcggaagagaaagagatcaattccatcaaataatggtgataaatcaaaacgattcaaggattaa

SEQ ID NO: 420717 - DNA, 624 bp, Homo sapiens
gtgttgttttaaaatagattagctaaaatatatggaatatataaattataaccattaaaatatttataaaataagtataattgataaactaaaagataatataaagtgggattatataaaaggtttcattaaatttggagaaagcatgaaaataaataaataaataagtaaaacctctagtaatgaatagaaaacataaacattgttaacattgcttcatacatatcaataatccctttaaatatgaattgtctaaaaatatcaataaaataacaaagattgtcagagtggattaaaaaacaagactcaactatagtatgctgtttaccacaaccccacttttaacatacagactcaggtagactaaaagtaaagggctggagaaagatatagcaagttgaaactaattttttaaatgcttgaatagcgtgaaccctgaaagagacagtccctcaatccctcaagagktattctgagtggctaactgggcctaaaatcaaatgacaggcaaatgaccatttgttgacaagaggttacacacatgctctgagttcctagagaacccacatgcctccttatctttgggactttcttagctagctgtttctatttatgccacctgaa

SEQ ID NO: 420718 - DNA, 644 bp, Homo sapiens
atttcaaatttgttgaggtttattttatgtcacagaataatgttgaccttggtgtctgttttggggtccattttttcagacaagaaaaccattgtcattcaaattagcatcccwatacaggtaatgtgtttctgatcactgtctgcttttaagatcctttgttttagttttagaagtttaattatgatgtgtattggcatataattttgggggttcattctatttgaaattctcagtttattggatttgtatgtgaatatcttggaatcctgttcttattttcctctttttctgtaactcagaaaatacaaatgttgtctttgttagtacccaacaggtcccttagttgtgttaatttttaaagataattttctttctgttttttatattttattaaatatataaataaattctcaattttctttattgtactccctgtcatcaccacactcctattgagcctatctggtgagtttttaaatggatctcactgtatatctcagttttattatttccattggttctactttacaacttctaatcctttgcagaattttctagtacttcatctattaaaagaaaatttgtagctgatttcagaagcatttttatgactgtggctttaaaatcccaacagttaatta

SEQ ID NO: 420719 - DNA, 644 bp, Homo sapiens
atttcaaatttgttgaggtttattttatgtcacagaataatgttgaccttggtgtctgttttggggtccattttttcagacaagaaaaccattgtcattcaaattagcatccctatacaggtaatgtgtttctgatcactgtctgcttttaagatcctttgttttagttttagaagtttaattatgatgtgtattggcatataattttgggggttcattctatttgaaattctcagtttattggatttgtatgtgaatatcttggaatcctgttcttattttcctctttttctgtaactcagaaaatacaaatgttgtctttgttagtacccaacaggtcccttagttgtgytaatttttaaagataattttctttctgttttttatattttattaaatatataaataaattctcaattttctttattgtactccctgtcatcaccacactcctattgagcctatctggtgagtttttaaatggatctcactgtatatctcagttttattatttccattggttctactttacaacttctaatcctttgcagaattttctagtacttcatctattaaaagaaaatttgtagctgatttcagaagcatttttatgactgtggctttaaaatcccaacagttaatta

SEQ ID NO: 420720 - DNA, 573 bp, Homo sapiens
tcggctcactgcaacctccacctcctggattcaggtgattctsgtacctcagcctcccaactagctgggattacaggcacgcaccaccatacccggctaattttttgtatttttagtagagacggggtttcaccacgttgcccaggctggtctggaactcctgagctcaggcggtcagtctgtctcagcctcccaaagtgctaggattacaggcttgagccaccgcacccacccaaaaatctagccctattctaatcattccttacttcctcactaccatctttgtcttagccaccattaattcttgactggactcttgcaatagtctcctgtaatctcctacagcagactagttagatactatgcatagtttacaaaatatacattctccccttctttattactaaaagaacattatttagtatgaaaatatatccagataaaattatcatctctacaatttcaattgcagctgcagggagccatgtgatccagttcaaatcaataaaatgtgagaggaagttgtcatgtagagtaacagaaattttttgtgaaagataatacccttttcac

SEQ ID NO: 420721 - DNA, 530 bp, Homo sapiens
aaatcccagagataagagtagagcactctcttaagaagtgctgccacacccatgcttttgacagcagagaataatattacaattaaagggaaaaagagaaacaatattgacagtgacagttttagtttaaaagcaactttaaaaagtaaggctgtgaatatggtaagttttggtaacacatacaccaatgtattttttatattttcatttaaatagtgaaataagtcaaattttttacatatgttaaaaataaatactctaaaagaaaattagtttatttttattatttagtcatacaaaaaataaaagtgactattagaataatgtattagatttgatgaaatatggtaagtcatttaaattatctcccaaattctatttatacatattattagtttcagtttgcacatgaaaaaaaaattgattcttagagaagctaggtaccatataaaagtcacacaactcattctatgcctgagagtatccataaraattgttttgttgaaatgctggctgtctttcacagtgtg

SEQ ID NO: 420722 - DNA, 569 bp, Homo sapiens
taatacttattctttttatgtagctctcccaaatattgtgtgaaattattataatggtgaataatgaataaataaatgtgattaagatgtagagagaataaggagaacataaataattttttccactttgagtttcctgtggtgatggagatcctgagaaactagacagttttccttcctgttattcatcacccaaagtttcagcttctagacaaattaacataaggaaattaaaactacacactaaaactacaatgagatgccacttcacagctattcaaatggctaaaattttaacaagacttaccatacaatgtgttggtgaggatgtgaagcccctgcaattctttgaatttkcaggtgggaatgtaaaatggtactaccaatttggaaaacgatgtgttagtgtcttggtcactttgagctgctataacaaagtaccgtagactagggggctataaaaaaaattatttttcacagatctagaggccaaaagtccaagatcagggtctagcatggttgggtccatgtgaaagccctcttctgggtagcagacagtcactttccta

SEQ ID NO: 420723 - DNA, 597 bp, Homo sapiens
gtcggtgaccagatgcccacaatataaaatgcccatctcatcacattctatacattttgttattgagtagggggagggagtgtctaatctgtaattgaaccattctatcttatattckttggacatacattacatttgtgaaatgtcatctgcttagaaaaatgcaagtcttccgtcttctttctctacatcctttagaagctgttgccttcaagctacttttcattcagagttcacgtttgctaaaattggaataaactcaaatagctttaaaaagagagggagagacactcatcagaatgcattttgtcaaccctcctggtttttctctctttcctttcagagagggtggcctcttcaaatgcacactttgcttttgacagctctgcagtgattgggtgcagcaggatatagtgcctgacacataaaatccactgattcaactatgcaatatttatttcatagccaacataaataaaaataaaatatttccttgaacattcttgctcacacactgcctggcttcattgccagcaacttttcagattcttctattagaaaactttcatttgctttctattatacgatatatcatat

SEQ ID NO: 420724 - DNA, 597 bp, Homo sapiens
gtcggtgaccagatgcccacaatataaaatgcccatctcatcacattctatacattttgttattgagtagggggagggagtgtctaatctgtaattgaaccattctatcttatattcgttggacatacattacatttgtgaaatgtcatctgcttagaaaaatgcaagtcttccgtcttctttctctacatcctttagaagctgttgccttcaagctacttttcattcagagttcacgtttgctaaaattggaataaactcaaatagctttaaaaagagagggagagacactcatcagaatgcattttgtcaaccctcctggtttttctctctttcctttcagagagggtggcctcttcaaatgcacactttgyttttgacagctctgcagtgattgggtgcagcaggatatagtgcctgacacataaaatccactgattcaactatgcaatatttatttcatagccaacataaataaaaataaaatatttccttgaacattcttgctcacacactgcctggcttcattgccagcaacttttcagattcttctattagaaaactttcatttgctttctattatacgatatatcatat

SEQ ID NO: 420725 - DNA, 524 bp, Homo sapiens
ggtgtccctgaccatgttccactgaagcaattcccaggccaaaccctctggggtctgcacaagctggagtcctgtacctgctacatatctaaacagctcttcttgtcagctcaagtcttcttggggaccacggggtctcctgtagctaggattctgggaggctgtggtgagagtgggccactccttccctgttcaagtcacctcttctgcaggagctkctggggaccaggaacaagtcccattgcttggcagctctgtgaagtgttcccagtttcctctcttcagcttaggatctgtgtcctctttccgtccactctaaatgtcttctctccaaagatctgcttggggtgtgccagtcttcccaatggcctggtttgatcttgatcagtgcgagctattcctcctagttgtgtctagtcagccatcttgcacaaatttttaaaaatagaaatgatatgtctgctctcagaccacaatggaattaaactggaaatcaataacaggaagataggtggaaaaattcc

SEQ ID NO: 420726 - DNA, 472 bp, Homo sapiens
gctttggtgataggtgggtgtccctgaccatgttccactgaagcaattcccaggccaaaccctctggggtctgcacaagctggagtcctgtacctgctacatatctaaacagctcttcttgtcagctcaagtcttcttggggaccacggggtctcctgtagctaggattctgggaggctgtggtgagagtgggccactccttccctgttcaagtcacctcttctgcaggagctgctggggaccaggaacaagtcccattgcttggcagctctgtgaagtgttcccagtttcctctcttcagcttaggatctgtgtcctctttccgtccactctaaatgtcttctctccaaagatctgcttggggtgtgccagtcttcccaatggcctggtttgatcttgatcagtgcgagctattcctcctagttgtgtctagtcagccrtcttgcacaaatttttaaaaatagaaatgata

SEQ ID NO: 420727 - DNA, 566 bp, Homo sapiens
tttaataacaaaagcaaacaaagatattttaaaaaactacaaaccaatcccatcataagcataggtgcaaaaatcctcatacaaagccaatcaaatgtaacattctataaaaaaaaaaaaataggcaccaagaccasttggaatttatcccagatattcaaggttgggtcaacatttgaaaagtaactaatacaattcatcacacaaaaggctgaagaaaaaaacataatcatatcagtagatgcagaaaaagcatttgaaacaatctaacatttacccatgatacaaactctcagcaaactaaggaggagaacattctcaacttgataaagaatatctacaaaaaacctatagctaacaacatatgtaatgataagaaactagaagatttcctactaagattagaataaggactctgtatgtttgggagaaaataagggaagagaacaagagtctctgcctggtgatccagtgaattctcttggattttgtacaagaccaacaagatgataactctatgagtctgcaagaaccacagcattactaggtgtgggatgtccccttaa

SEQ ID NO: 420728 - DNA, 468 bp, Homo sapiens
acatttgaaaagtaactaatacaattcatcacacaaaaggctgaagaaaaaaacataatcatatcagtagatgcagaaaaagcatttgaaacaatctaacatttacccatgatacaaactctcagcaaactaaggaggagaacattctcaacttgataaagaatatctacaaaaaacctatagctaacaacatatgtaatgataagaaactagaagatttcctactaagattagaataaggactctgtatgtttgggagaaaataagggaagagaacaagagtctctgcctggtgatccagtgaattctcttggattttgtacaagaccaacaagatgataactctatgagtctgcaagaaccacagcattactaggtrtgggatgtccccttaagcagatacagcttagattaaaaacatccaactcctttcaaatatctggaaaacttagtctaaagaaaaatggc

SEQ ID NO: 420729 - DNA, 595 bp, Homo sapiens
tcagtcttactgcaacaatggtcatgacctggggaaaataaatcatggtcagagtaggcratggcagctgtgaaaaagtagaacagtgtaaaaatgaagtcatagaatagtggttctaaaacttgtatatccatcacctgataaactttcaaaagcacagtttctttggtcccaaatcaacccagtaagtctggttaagaaagtttagttaggtgcaggaaccagcattcttaacaagaatatcacgtgattctgatgcaggggtgtctattagagctgtgggccttactgacctcattcgatctctgtgcaataattcatgtaccaaggctctgaccaccagagatcccgattatctatggctggagtggagcctgtatctgtgtctaaacaacgtctcaggtgattctgatatataccaaacattaagtgccacatccatttgcagtgaactagaaagagaactgacctgagaaaagtctctggtattttgaaaaggaggctcatgtgaattcaatcctttgggcaagtgacttattctttctatgactgagtaaatcttaccgggaaaatgtatataaacatgctgctctcc

SEQ ID NO: 420730 - DNA, 595 bp, Homo sapiens
tcagtcttactgcaacaatggtcatgacctggggaaaataaatcatggtcagagtaggcaatggcagctgtgaaaaagtagaacagtgtaaaaatgaagtcatagaatagtggttctaaaacttgtatatccatcacctgataaactttcaaaagcacagtttctttggtcccaaatcaacccagtaagtctggttaagaaagtttagttaggtgcaggaaccagcattcttaacaagaatatcacgtgattctgatgcaggggtgtctattagagctgtgggccttactgacctcattcgatctctgtgcaataattcatgtaccaaggctctgaccaccagagatcccgattatctatggctggagtggagcctgtatctgtgtctaaacaacgyctcaggtgattctgatatataccaaacattaagtgccacatccatttgcagtgaactagaaagagaactgacctgagaaaagtctctggtattttgaaaaggaggctcatgtgaattcaatcctttgggcaagtgacttattctttctatgactgagtaaatcttaccgggaaaatgtatataaacatgctgctctcc

SEQ ID NO: 420731 - DNA, 468 bp, Homo sapiens
aggatttatttttattactcttgtcacaattggctaaataattactataaggcaaacaagtgtgtgaagtattggggtggagctgtgttttctaagcatttgctgaacacttaataccagtgccaatgctcacaagtttaatacctactggacgtactaacagaggaaactcatttattcctttgtaatcatatatctttaaataatgtataagtcttagtccaatcaggagattaaaaccacacagcaatttgaaaaggaaaggggtaatataaagaattattaaatataatragggattggagtaacaaggggttggctagtaagaagtaaaagaactctaatgagtagaggaatggaatatataagcaagagtcagtatcctaggaatggaatatataagcaagagtcagtatcctaggaccgagataattgtccatggaatagttcccattaccccaggcctga

SEQ ID NO: 420732 - DNA, 472 bp, Homo sapiens
taaactgcctggctatgcattccaggaatgtcccaacacagaaccaatctgcaaaggcatggaaagttgtttttgttsttgttgtggctgttgtttttaataccaaacgttaaaggaaacatctgcaaatcaccagctgaccacaaggctaatagaacacagacttcagtggtcatacatagcaaaaacaataaagacttaatttttaaaaatacattttgagatttaaaaaactgagtaaacttgttgtctgtagaactgcactacgaggcatactgaaataagttctttgatctgaaaaaaatgacatatatagaaactttctacaggagtaaatagagaatatagaaatgtatttatgtaggtaaataaaacataaaagacaccgtttctatttttaagttttttaaagataaatgactgcataatgaaaaattttaaatgttgtttactaggggttataatatatata

SEQ ID NO: 420733 - DNA, 566 bp, Homo sapiens
tttacaactccatctaagacatgtgtatgagaaataagcatttatttaattccaagtgcatgaccatgaagaatacaatgactgctagtacagtttggtgttactgccttgcttcatgctaaggcaccagcagttttattcaccatagcttttgccccattgatgcaaatgtcagaacagtagtaataataataataataatgtctttctgttattatggaaataatcttaacattgttgatttcctacaagtgtcttgggtatgtgaagtccacacattgagaatcactgcctcaaacacatattatgattaagatgtattctgtatcatacataacttaagtgagtctttataaaagtaatatctgtatgaggatttgtagggtgggcagtatagtgtgcattaaagaaatcctttgcatgrtaaacccaattctcttcctttctttttgctttggctattctgcttagaaaactgaatttcagttttcttatgtttaaataattatatacgtgtgtgtgtatatatacatatatgtatgtgtgtgtatatatgtatatatgtg

SEQ ID NO: 420734 - DNA, 526 bp, Homo sapiens
tattagccagcaagcacattaagggaacygcaactagtttaatgtaactaggtcatagagacctagccgagcttgatgacacatgggtcaagaggagtctcacacttactctacagagaacagggagctaggaaatgacacagtgaaatttgtgtctggaaagatgattgtgactttggaggcaaacatataaacaggagaatattaggaaattcaggtgagggattataagaggctaaagtacggacagtgtattagatatgagaatgtcagtttccagagctgcttgagagatataattaatatgatcagttaccagttacatgacagatgtgtgtggttaagtcaagaccaatctcaagtactattcacttctctatattttatattcttatacattaaaattttacagtacataaatgaggtaaaaaacaaaatacccccaagtagaactgacaaaatactgatttaattaagtgaaatagtttcagagatggtaatggataaatacattacaagtttatgg

SEQ ID NO: 420735 - DNA, 526 bp, Homo sapiens
tattagccagcaagcacattaagggaactgcaactagtttaatgtaactaggtcatagagacctagcygagcttgatgacacatgggtcaagaggagtctcacacttactctacagagaacagggagctaggaaatgacacagtgaaatttgtgtctggaaagatgattgtgactttggaggcaaacatataaacaggagaatattaggaaattcaggtgagggattataagaggctaaagtacggacagtgtattagatatgagaatgtcagtttccagagctgcttgagagatataattaatatgatcagttaccagttacatgacagatgtgtgtggttaagtcaagaccaatctcaagtactattcacttctctatattttatattcttatacattaaaattttacagtacataaatgaggtaaaaaacaaaatacccccaagtagaactgacaaaatactgatttaattaagtgaaatagtttcagagatggtaatggataaatacattacaagtttatgg

SEQ ID NO: 420736 - DNA, 526 bp, Homo sapiens
tattagccagcaagcacattaagggaactgcaactagtttaatgtaactaggtcatagagacctagccgagcttgatgacacatgggtcaagaggagtctcacacttactctacagagaacagggagctaggaaatgacacagtgaaatttgtgtctggaaagatgattgtgactttggaggcaaacatataaacaggagaatattaggaaattcaggtgagggattataagaggctaaagtacggacagtgtattagatatgagaatgtcagtttccagagctgcttgagagatataattaatatgatcagttaccagttacatgacagatgtgtgtggttaagtcaagaccaatctcaagtactattcacttctctayattttatattcttatacattaaaattttacagtacataaatgaggtaaaaaacaaaatacccccaagtagaactgacaaaatactgatttaattaagtgaaatagtttcagagatggtaatggataaatacattacaagtttatgg

SEQ ID NO: 420737 - DNA, 563 bp, Homo sapiens
tccacgttcttttgaaaagcttcagaaaataaaggcgacggcaagggaagcaggttaatattcactatatggcttaagtagaaagctggtcctttaaagctccttagataactcatccctcccagggtgagtctgtgctgcagctatatgtcccattcccagtgggcacaatttaacatgatgtagcactccttaaaaaattwaaaaaaaccctccttctaaatatgattaggtctgcaccatgctgctctcccagataaaagacatctgtttcaaacaactgataacagaatcatttttcttcaagaggtcgagagagatttaattactaagcaaatcacaaaatgccatagtatacaacttcaattccaaaaccagcagattttgttcagaagatatagacagtagcagatgacaaatacattaagcaagtgttttttattgaaaatagttttgctaaagaatctggaggtgaatgtcaatttactaaacctcacctgaagggcaggtactgaaaaacattgtcagaggatttttatagaatttaagaaatgcatcctagg

SEQ ID NO: 420738 - DNA, 633 bp, Homo sapiens
agattttcaacctgttttaagtttagaaaccagagtattgtaactcagatttagtggtgacgttaagggattcttccacattttcatagtttgagtttttgtacttattttatttaaattatgaattgcaaaactccaaatgtatgttcattgagaaagcatgatatttctcttccttcatcaaaatgtgtaaaacaacagtcaaatagtataaatgatcacattttcttagctactgtagttcataaaatcattaccagaaccatsgtaatgccttacctacaaacaagctggaactggatagagtctccattaacttcaacattgggtaataatacagtggctctgaggatcgttttggagtgggggtacgggacagtagttggcacttggaagagttgctgaaccattccgagcttcaatttcttaatataccaacctcataagattgcactgaaggtggaacaagataacatttgtaattgtgatacgcgagtagccaggtagccaccccactacacacatccccaacaaacatttgttgagaacctactgtgtggctgccactaggcaataggataaaaaatgaatcagctcataataggtgagatataagtaggaaggaaataattg

SEQ ID NO: 420739 - DNA, 633 bp, Homo sapiens
agattttcaacctgttttaagtttagaaaccagagtattgtaactcagatttagtggtgacgttaagggattcttccacattttcatagtttgagtttttgtacttattttatttaaattatgaattgcaaaactccaaatgtatgttcattgagaaagcatgatatttctcttccttcatcaaaatgtgtaaaacaacagtcaaatagtataaatgatcacattttcttagctactgtagttcataaaatcattaccagaaccatcgtaatgcyttacctacaaacaagctggaactggatagagtctccattaacttcaacattgggtaataatacagtggctctgaggatcgttttggagtgggggtacgggacagtagttggcacttggaagagttgctgaaccattccgagcttcaatttcttaatataccaacctcataagattgcactgaaggtggaacaagataacatttgtaattgtgatacgcgagtagccaggtagccaccccactacacacatccccaacaaacatttgttgagaacctactgtgtggctgccactaggcaataggataaaaaatgaatcagctcataataggtgagatataagtaggaaggaaataattg

SEQ ID NO: 420740 - DNA, 633 bp, Homo sapiens
agattttcaacctgttttaagtttagaaaccagagtattgtaactcagatttagtggtgacgttaagggattcttccacattttcatagtttgagtttttgtacttattttatttaaattatgaattgcaaaactccaaatgtatgttcattgagaaagcatgatatttctcttccttcatcaaaatgtgtaaaacaacagtcaaatagtataaatgatcacattttcttagctactgtagttcataaaatcattaccagaaccatcgtaatgccttacytacaaacaagctggaactggatagagtctccattaacttcaacattgggtaataatacagtggctctgaggatcgttttggagtgggggtacgggacagtagttggcacttggaagagttgctgaaccattccgagcttcaatttcttaatataccaacctcataagattgcactgaaggtggaacaagataacatttgtaattgtgatacgcgagtagccaggtagccaccccactacacacatccccaacaaacatttgttgagaacctactgtgtggctgccactaggcaataggataaaaaatgaatcagctcataataggtgagatataagtaggaaggaaataattg

SEQ ID NO: 420741 - DNA, 633 bp, Homo sapiens
agattttcaacctgttttaagtttagaaaccagagtattgtaactcagatttagtggtgacgttaagggattcttccacattttcatagtttgagtttttgtacttattttatttaaattatgaattgcaaaactccaaatgtatgttcattgagaaagcatgatatttctcttccttcatcaaaatgtgtaaaacaacagtcaaatagtataaatgatcacattttcttagctactgtagttcataaaatcattaccagaaccatcgtaatgccttacctacaaacaagctggaactggatagagtctccattaacttcaacattgggtaataatacagtggctctgaggatcgttttggagtgggggtacgggacagtagttggcacttggaagagttgctgaaccattccgagcttcaatttcttaatataccaacctcataagattgcactgaaggtggaacaagataacatttgtaattgtgatacgcgagtagccaggtagccaccccactacacacatccccaacaaacatttgttgagaacytactgtgtggctgccactaggcaataggataaaaaatgaatcagctcataataggtgagatataagtaggaaggaaataattg

SEQ ID NO: 420742 - DNA, 621 bp, Homo sapiens
gatctcataaattgagtagtttattattattttgaattcattctttttctagtcttatgactgtaagttccttcagaatggaatttgttccatttgtttgttctagtgcaagaacagtacctcatacttagtaggcattggataactcttatttgtatgaaaaaccaggcaggtttgacactcttgtttgtgacttacatgtgccctttcttcctaatgtggttattccttcttgttgattccatcccttcttgcttttttctgctttgatgcaccttttgttgatttctgtagtaatggtaagcatcagttggtaacctcagactttaaaatttaacctgtgtgtttgcaacatctgcttacaaccattgcattctgcccatgaaatcacttaaattaaagatcttactgtggtgccaaatagtttgtaaaattaaaaacaataattgattaattaagtgaaacattrttccaggtgctctaccaagaaaaccatgtaggtccagctgccaacttagaggtgatgtctgtctgtcatttctgactcctcatgaagcatacattctagggggaggagatgcaataaacaggtgaataagtcatactgtatattacaatatg

SEQ ID NO: 420743 - DNA, 600 bp, Homo sapiens
cttgacttcagttcagctctggctgctcctatgaatgaaactgccacgtgggttggccaggtgtatgattttaaggaagaatgccatgtttcttcttgctgctgcctaagtctcatttgactgatggattttaaaacctttgggattatatgaggtaagatattggaaagtgctgtggaatgaattccactgtcacttgatttccttgtccagctgtttgggatttacagttttctctgcctttcactttgaaaagctcattaaaagtggtcccctcccagctggctgagggacaattattaacaaactatgtggcacatttatcacttggcaactggatataagagatcagtgctgagattaaagcatgcaaaactgttacatatagacagtcacctcattgtgaattttgagggttctgcttgttttaaatggattgtgttgttaagtacaggttctacctacaagaaaatgcttttgaaaattgccktaggttgagtctaaatagatttcatggccggttatctgtccctggaataatcatggttttgacaaattttaaagttcttctctcagggagtgagatgtgaaaagcagatt

SEQ ID NO: 420744 - DNA, 425 bp, Homo sapiens
tggtcatgatttttatgacactgtatccagtatcttatccccctcagtctctgaactcaaaatagctagaggattgccataattaggttagggtacagtggtaatagtcaaacataaatgaatgaatgaacaaatgactagataaatgggaaattctagaaattctacacccctccattgaactttctttcaagatacaaagtagaagyagaaactttatgaacagcaaatcctaagtcccacaacacaaaagtttgcaaaatgctttagaaacaaaggaaatatctccctttagcttccattattttttatcacatgttaagtcaagaggactactgagtgttatggagagattaggatctgaggaatgctggactcgtttgaagtaagctaatcaatgaaacaagtccttctcttaattccat

SEQ ID NO: 420745 - DNA, 623 bp, Homo sapiens
tagcatagacaaactgctggaaaccaagataaagagaaaaatcttgaaagtagccaaaggaggggaaaaaagacatgtaacatacaggggaacaaagacacaatgataacttacatgagaaagacacagaagcttcttgaaataaactgatgaagagttatcayttttcaaaagggatttatttcctaattctgctttcctagtgacaaccttggattaattccagacttaggactctgacctatacttcttcctctagaaagtaaaatataacaacatcaagattttgtgggtttggtcacttggagataagattcattgcggttggaattccttagttccttcctgattaaatttagacagggaaataaagcaagtgtgtgtatgggaatcaactttttaagtgattctagcagtttaaagattaagttattcgtacacaaaataaatcatcttatatgagaaagtaaaactgattatttcccaaataaatatcataaaaggattttttaaactacaatttggtatttgtagtctcatattaagtcttctattaagattataaaataaaagctaaaatggtaaaaaatgagaaagtctaaagagaagttatatgaagtgca

SEQ ID NO: 420746 - DNA, 406 bp, Homo sapiens
ttttggagttatttaacatagacataaaaacatttccaaatctagaatatgtttggatatgtctgatatgtctgttcatgtttcctatatattctcttattatcttaaaaggataattttctggaaatccaagaatcatgtacaggaaaaaaattaatcttttaaaaatagttttcacacccatctctgtgtgtggaatattatggggaagaaagaacttgaaaaaaaatttaaagtttttctgtttaaattattttagcttggtgtgtcatttttttwaaaaaaaaagaattagttttttaaaagactactctttataattacattgtaggttaatataattatcaacttttccagggaagaaaaggataatctcctgaggcccaagcaaaaatggtaacattga

SEQ ID NO: 420747 - DNA, 619 bp, Homo sapiens
ctgtaaataaaaatagacttatttagagtgcattagttttatctgactcttttcactatcattttttcctttcatttttcacagtgccagtgacaactgtatctgttgtccttgagaatgtctcacattcaggatttgtttttttttttgctcactggtattgtcttttaacttgttccactgactcccttatttcttataaattggaggttaaccaaaagggtcttgaatatcatcaagttaatgtttttccccaaggatgcttctttggtggtgctgtgtacttcatgttgcattccatcaaaagttacacaagagtctgactgccccattcttcgtgatgctaagattgattagtgggttcaagttgtggcagcgtaatgtcttcgttagaatgtttctcattgatttttttgtctaatgttttcaaatatattattttcttatgcattgaaaaattatgaattttgtaattatcttatttcttctgtacttatttcctggaattcttatgtaaaaagcacttctcctcatggctygttagtacctttgaaatactgttcattctggaaaagcaaaatgatgcttaattctttaattttcaatgacagttttcaga

SEQ ID NO: 420748 - DNA, 533 bp, Homo sapiens
tcatcatctcaagaagtaacctgatattcttcagctagcactttcccattcctcccattcttcttcctctgttccacactcacccccgccctaagcaaccagatgtttcccaagagatttacattctggttttgtgtctttcattttaaatgcattgtgtttctataaaagtttcccctgtgatcatttgcagcaactcatggtctgctgttcctgcccattrgcgtgaatattggtcattgaacaaagtctaggggatcatcatgtgcagtttagggccagtaggaggaagttagatttggcagtgtgcagaggttactccagtcttggataaccagatgtttattgtcttatatgatggaatatccttcagcataacacaaatgtaacacttctttaatgatctttcttgacatagatatgtgttgattgacacacctggacagattgaggtattcacctggtcagcttctgggacaattatcactgaagcccttgtgagtattctaggacttgctactgagagtagctag

SEQ ID NO: 420749 - DNA, 602 bp, Homo sapiens
ctcccaaaacgttaggattacaggtgtgagccactgtgcctggccccagacattgagacatattcatgatgatacgagaaaccctactcaattttatagcttgtatagtattctactgtatgactatatcacaatttatccattctgataatggataattattgtgtattagagtaggctaacaaagagacccaagaatgtataatgtctcaaataacagacatttatttcttgctcacttaatagtctcagatacatgttcctggttggcaagtggctctccttcaacaaggtgattcagggggtcaagatatcttccattttgtgttcttccatctcctagggccccatcatcatctgcatttagccagaagaagggtaaagaaagcttggaggtacacccactcaaaagttctaacctgcaagtggcattcatcactccactcacattccatgggagaggagttagctgscttctccttcactagagagagtggagggaagggggataactaggaaatatacagtctagccatttgttctataatcccataatttgcaaaggtgaaagtagatctctgatacttgttttcagtatttct

SEQ ID NO: 420750 - DNA, 602 bp, Homo sapiens
ctcccaaaacgttaggattacaggtgtgagccactgtgcctggccccagacattgagacatattcatgatgatacgagaaaccctactcaattttatagcttgtatagtattctactgtatgactatatcacaatttatccattctgataatggataattattgtgtattagagtaggctaacaaagagacccaagaatgtataatgtctcaaataacagacatttatttcttgctcacttaatagtctcagatacatgttcctggttggcaagtggctctccttcaacaaggtgattcagggggtcaagatatcttccattttgtgttcttccatctcctagggccccatcatcatctgcatttagccagaagaagggtaaagaaagcttggaggtacacccactcaaaagttctaacctgcaagtggcattcatcactccactcacattccatgggagaggagttagctggcttctccttcactagagagagtggagggaagggggataactrggaaatatacagtctagccatttgttctataatcccataatttgcaaaggtgaaagtagatctctgatacttgttttcagtatttct

SEQ ID NO: 420751 - DNA, 561 bp, Homo sapiens
tttagtgatttacaaggtaactgtcatattaaaggttctgagaattcctgccataagggaatctgtttaactttcttgaacaccgtgtttctcaatgtcatttggctttgaatgcctcccagttttttttttttttttttttttttttttggaaacagggtcttgttctatcgcccaggctggagtgcagtggaataatcatggctcactgcagcctcaacttcctcggttcctacaaacctctcacctcagccccccaggtagctgggactacaggcacacaccaccatgcccagctaatttttgtattttttgtagagatggggttttgccatgttgcccaggctagtcttgaactcctggactcaagagatccatcagccatggcctgccaaagtgcttggattacaggcatgaaccacgtacctggcctcctccctcttttttttwaaaaatttttaacagctgggatgatccctcagagccagtggaatatacctcgagacatactgctctagaattagagtctctggaatagtctgtggcagtggttctctaact

SEQ ID NO: 420752 - DNA, 602 bp, Homo sapiens
tatataatcaaattatgaaaggaataatgattaaaatcaacagcgaatccaagaaacttgaaactaacatacatgctagttttaggagaaaccttaaagacatagcagatgggctttggttaccattgctatggaggagtcaatagaagttagtggaagaaaccatacgtgtagactagttagttcagccaatttatgctgagcaccaagtatgctgctactatggggataaagaagagtgaggccggttctttactccaggaagttttcagtctttggaggaaagatatcacacaactctctatgccaatgacaataatgggcttcgtatggagcactgctgtgcacttatctcctgcttgcctagggctttatttacttatatgatctttartcctcttatcagtcctctaaggtagattttattatcgccaatttacagatgaggaagcaacgcttttttcccttgcatgttaccatgctgcctttcagcacaatctgttcaatgccttgccaaagatacagactgaagtctgctgggtgaaggtcagatcttgactgtgctatatacctgtggaatcttgaggaaattttaaaatttg

SEQ ID NO: 420753 - DNA, 594 bp, Homo sapiens
gcctttgttttaaatctattctaagggggattaatgtatttgtatatacatgaagccttcttgggaaagaatcttagaagtgtattttttaaaaattcaagcctgaaaagtagatgtttaacttcaggttcatgacatattttttttcctgttcatctgtctcaatttgatttatttcctggtgtaaagacaaatgcactttggttttgttactttgatgtagataacttgtgttcaagttgtcttttggctctgtgtgcttacatttactttttataaagccgttggtatatggagaacatctaaattttggagcattaaagttgaaaggcctttcaaagacacatagtcagaaacacatcatagaacagcaggaatcttttgtactcatgctcctgacagttagggatctagttttaactgttgtcaagtttagacacctagtgatttaraaatgagcctggtccactgttggacagtcactagaaactagttcattatctgaaatctttccctttttaattgcttaggtcttagtgttctgccatctagagcattaaatgaaaatggtttgaatccaatgatactataagc

SEQ ID NO: 420754 - DNA, 600 bp, Homo sapiens
aaactttagtagcagctgcttcctctgccagttatagctacctaagttgggttgaatttctttgtgctttgagatgggtctcccagttgtgaggagtatttggttttgatacttttgttttggatgacagcgatgagtgttcgctaacttttatccatatgtcatcttatgtttgcattcctgggtggaagaataatagttcaatgtctattcataatactatacgatttcttaactcccctgattggagcccacacatatgtcctatgtccttccttgctatggtttgaatgtttgaatgtttgtgtccccaccaaaattcatatgttgaaacttaatccccagtgtgatcatgttaggaggtggagcctttgggagtgattaggtcatgaaggctcaggcctcatgaatgggatttgtgcccttatgaaagaggcccaagggagcttgtttgccccctctgccacatgagggcacagcaagaaggtgccatccgtgaggaacaggccttcaccagatatcaaatctgctggcaccttgrtcttggacttgccagtctccagaactgtgagcaataaatctctgttgtttataagttaa

SEQ ID NO: 420755 - DNA, 577 bp, Homo sapiens
attaaatttatttagataatcagctactaaaataaactagtcatgaggaaggacctgttttcattgaatttttcaataatagtgcatttcctggcacataaaaggcattcaataaattgatgaaataataagtaataaagtttaacaaggatctactgataaagttttacttataatgcaccctagcaagtttttatatatagactattttaaaaaagattaatcaagacattaaacctaaagggagattttttwaaatggtttgggaagaaaagcacagtaatatgtatttttaagattaatattgtacaagtatttttattatgtttgaaggtttttggcttatttattagcagaggaggaactctttaaagagtttcttttcctctttcaggccaccagcactatgtagtgaatcattgaaatgattcttcctttttattctcatgttactatcaaaacctggcacaatggaggcatataataaatcttaaagaacaataagtacctctacttcttagaaaaaagaaaaatcttaccttctgaaacttcttatttttaaaaatgttaatataga

SEQ ID NO: 420756 - DNA, 594 bp, Homo sapiens
ggtagaagtctgaacaactttttgttttttttaaaagaaggtcttggcttggctcttttttttttttttttttgagctggagccttgctctgtcacccagactagagtgcagtggtgcgatcttggctcactgcaacctctgcctcctgggctcaagtgattctcgtgcctcagcctcctgagtagctgggattacaggcacacaccaccacgcccagctcattttcgtatttttagtagagacagggtttcaccgtgttggctaggctgctctccaactcctgacctcaggcgattcacctgcctctgsgtcccaaaatgctaagattacaggcgtgcagtcatgcctggtttacctcttgaatatatatatatttatatctagattttcttctataaacattaattcaactattcttattttaggaaatgtagaaattatatgaccaaaaatgcatatattataagggaatatattagagagatttgcagaaaaatgcaaggcccttcatctgattgaaaatctacgttgaagacatttgagaagaagcagattggttgcattagtttttacataggtgttcacctggtcat

SEQ ID NO: 420757 - DNA, 594 bp, Homo sapiens
ggtagaagtctgaacaactttttgttttttttaaaagaaggtcttggcttggctcttttttttttttttttttgagctggagccttgctctgtcacccagactagagtgcagtggtgcgatcttggctcactgcaacctctgcctcctgggctcaagtgattctcgtgcctcagcctcctgagtagctgggattacaggcacacaccaccacgcccagctcattttcgtatttttagtagagacagggtttcaccgtgttggctaggctgctctccaactcctgacctcaggcgattcacctgcctctgcstcccaaaatgctaagattacaggcgtgcagtcatgcctggtttacctcttgaatatatatatatttatatctagattttcttctataaacattaattcaactattcttattttaggaaatgtagaaattatatgaccaaaaatgcatatattataagggaatatattagagagatttgcagaaaaatgcaaggcccttcatctgattgaaaatctacgttgaagacatttgagaagaagcagattggttgcattagtttttacataggtgttcacctggtcat

SEQ ID NO: 420758 - DNA, 561 bp, Homo sapiens
aaaaaaacctctctgatcaaaatattcactaccaaaaatatagttttaaaaagaatatggaattacatttttctctttgcaaaatatctgttaacttcaatatgtaaatgttatgtatattaaagtcacaatgtaaaactgtataggaattataaaagtgaattgagaacaaaggagaaagcctggggttggaacactgagaaactttgtagggtcttaatgaaaagtttctagagagagaagagtagactttattgatgttgttcttgcttaatataagaccttaggttttcatccctttatgtaggstattcctcctgctagagaagatagagtgggctagctgagatttctggagatctgtttagacttctgatctaatgtgttatttctgctaatctgagagtaacattactgactcataggaaacaatttaattgtctctaatgataatatctgactgagcctataactcttaagagccaactagttttactaaaataattttcatttatatcataacatacttaaatttctttcgttttaggatcaaaatgtgac

SEQ ID NO: 420759 - DNA, 650 bp, Homo sapiens
taaacttactatttgaggttgtccatgaacaattgcatgaatgtaggggtgaatgtacctcacacatgctattacatttcattctcaccacaactttgggaagtagatattatcatccccacgtgacagatggggacacagtatacacagattgagtaacatccaagattatacaattagtggcagagcagctctaactccaaagtccatttattttccagcatattattaagattgtaaagcactgcttttcaaagttaaatgtttgtagtgatcatctggtttttgtttttattttttaatgcatactctgaatcaggtggtctaggatgggtctgagatgtcacatttctaacaaattcctaggtaagtgatgacaatgctgtgggtccacagaccacactttgagtaacatgagtatattgcctttattcttgagttttcaggattatagatgcaccatttgttaaaagttatttacatacttatttgcakcaatttcttttgcatttacttattgtttgaaaaattcaaaattatgatgtatgtcattgatcaccatttgtaatttctaatcaagtgaaatattctgtgggatagataattgcggatactttttgtgagttaatgatatgttctcataatgaaac

SEQ ID NO: 420760 - DNA, 558 bp, Homo sapiens
gggataacttcatgatcttaaaatgattgcttatgatcaaacacagtgctatatatgcatatacccatccatatatccagctatccttccacycatccattcatcatctatttattcattcatttaacaaatgtttattgagtagttttgtacaatgcactgcagtgatacactaaggacacagagatgaagggtgctcaagtgtttattctcaaagagcttacaaagaaatgaaagcaggtaaataaaatttataaatctgggtcttaaatgctataatagaaatcagctcgtggtgctacaatagcaagactgacattactttgagataagacattgttccataggtatatttatttatgtaatccttccagcaatgctctgaggtaggtactattatcaggtccattttacagaggaggaaatggtgatagaccataagtaacttgcccaaaattctgcagatagaaataaacaggattagaatgtaagcctaatttactagctccaaaacctgttttcctgactcaagaacccacaggtgtcatagctaaccta

SEQ ID NO: 420761 - DNA, 607 bp, Homo sapiens
atcctttcacctaaaccttgtacacagtaagtcacagcaataagaaaatgtggatgacacagtatgattcagaataggagttggataagaaaaccccctatagcatatacctcccaacagggggtatcagtaaaatgacttctatattcagcatacttatttggctgttkcagtgtatttgtccagaaaattatgctagttgtaaggaaatggagatataaaatatattttaactccaaataggaccatgaatgtttgtttatgttttgttaaatatgttagcagtgatcctcttgccaaaaacaagatgttttattttactaatattattagtaaatatgtatttttctggttttaaaaacatgtacattattgtaaaagaaacccaaaagacatatagttctgtacaacctggtaggttggagaattttctgtaaaaaatatgtaaccatagcacccttgtcattagcaatcaagcaatcctgattttttaaaaaaaagcaattagcctttaagaaaagcataaagctaattaaaaatgacaacttagtcatctaagcaaacaacagctcagaatcagtccccaccacctactacaaactgatat

SEQ ID NO: 420762 - DNA, 538 bp, Homo sapiens
acagctattctacatatgaataatatatcctgacaaaatagttggagttgctttaagagtgtccttcaatagctatgagagttttgaaatttagttagattttcaggtttacttggggtgatattcaaaatatttaaccactgataacagcacatgtaacaaccaatccaaacagatgccacccttggacctggggcacagtcctgcagtctccctgctgtgctgatatratctttccgttgctggatcataaagatatccagatgatttctaaggagaagcccttggagctagagtgtagggataatgcctgaggactaattaaccagttatataagtaggtcaatatttttaaaattaatacaactagacatggataaatgatttgttcagactaacatttatacaatttggaatatgtccatgaagaaaataaatacaaattgtcttactttcacaaataaagaaaagaaaaaaacaggaaaaaagattattactagggcctctaccaggatcctaagtataaataagtttcata

SEQ ID NO: 420763 - DNA, 399 bp, Homo sapiens
aaagtatatttgttaatttaactgtattagttaattttcaaatggtctccatttttctcttgatctactagaggcatcaataacagaacagtgttagtcctctataaaaaactgtttctgtacatttttaacattatgtatttgattccattttcttagcctataaagatttgtggtgaccttttcactactttatttgaaagtatactttttctgtataaatggctttttgtaattggattgcttttcctgcaatatgcttttggtttaaattaatattttcatctctacaattgaacaaatggacaactttttctgggtaaaaataaaagatatctgaagagacwggaaagatcaaagtccatcatgatacatttagagcagagtaactgcccttgt

SEQ ID NO: 420764 - DNA, 585 bp, Homo sapiens
aaactactgcttctttcatatccttcattcaggcaccgcactgcttataaatttttattttggactcaagaatctcattatgaggtcagtattttcctcctatttttattccagtgaaatttagctgatgctaaggcaatgaattgattatgtcctaaaagagaatgttgccagagggcagtttctcaagacattgctaagtgcacttggctgttgagtaattaggcttcctgttctcagagcatcagaacaagcaaatgagagttgccttaaggtttccttgtttagaacatcacttattttkgccatttcagaatcaggtaaaatcctttctggtaaaacttaaacagtcaggcaaattcgtttattctattagagtatcatttaaatgaaaatatccctagaaatttcatttttcctcattttttctccatttgacaagaacagaaaaaggagctggtatctaaccactcataagttaattgcaaatgaaaaagaggacttggaactgaagtatcaagaaggaggctgggtcttttcccaaatccctagttttactaagaatctgtcaaatagggaaatccc

SEQ ID NO: 420765 - DNA, 530 bp, Homo sapiens
tgtgttcatacaaattaaggtaatatcaaatcggctgtttcaaaatgttcttttttaccccttatcattctgacacacatccctaagagggatcattttaaaaaatatataagaatattaaaataatttcattttaattctggtagtaagatggtagcaggttagatctgagtcttctctcctctcttggactctacgcagtaaggaaaacagcaacaacaaaattcgtgaactccatttccagggaaatagcaagataaatttcaaattgtgtaagtgttgattaaagcagctgaggctgacaaagcctttcagaaatccctgcggaaagaggcaacagaagcagcagtagactatgaaaaatggggtggcatgytgggggttatagctagtggtagggaaacttagcaagtgccagaaaaaaaatgtacaccttctatataggaactatgtattctttggtgatagtggccatgaggacactacagagcatgggaatgaatgtaaaagcactgatgtagtggattagg

SEQ ID NO: 420766 - DNA, 618 bp, Homo sapiens
aaagagcagaaagcaaaactatatgtagaggattatgcaattttataggaaaatgaagcactaattaatatataggtacagtttttttaaaaagatagaaaaaacttaaaaaacatcagtaatgttgtcacctatagttaatgggaatacatttttattttattctatatattttagggatactcactaatatttccatatattttgttaaaattataaaaatctattttaaataagcaaataagtaaattgtcaaactaaggatctgccatctttcacagtgaagctttctactctcccttctataattatgagttggattccacaaagagtgatgattaaacaagctcaaccaacattgacaccctaagaagacatatctggagcaaaatcctgaagcataattcattctctatatttctggaatacttattattcctgaggtgtccacagatgtctggttaaagaggaattgtctagttacacatcattttrgataccttttagattcttcaaaatcgaaaggcaaaaccttgttcctggggccatcatctagccaagtgacatttcctactagatactgaactctgaatacatatcactccacacaacatggag

SEQ ID NO: 420767 - DNA, 632 bp, Homo sapiens
aatatttgcatggatcactcccttacttattttaggtaccttcttttgatcatatcatcagaagacctcattgactactcaatataaagataaaaatccttctccctcttctaacccaaataagattcacagatgtagggtcctgggtgggaggaagggtgcccagttatatttgaatttcagatggacaacaaatatgccattttttatataagaatgctccaaataatgttttggacatacttacactaaaaaaattacctggatttatttggaattcagatttaactgggtgtcctgtattttacctggcaagtctaaacccaccccaatgttcccttttctccttctattttagctttttccacaggatacattgctacctgacttgtcacgtatttattagttattttatctgtcttctgagctagactgagggcaggaacaccatygtattctagcaccaagaacaatgcctagcatgcaaagatttgttgcataagtggaatgaatgagtgaatgaatgttgttacactactatgtagagcttggggatgtggtctgcttgctctaggattatcctcttcctctgctactccatcctggccagaaaagggcaggttctgaaggcc

SEQ ID NO: 420768 - DNA, 556 bp, Homo sapiens
ttctagggaaaagagaaggttttgtcccttcagtttccataaatgagaagcaactgtcacccaccmaaactccataccaatggagcattccccaaaaggtaagtagaaatgacaataggagggggagggtagaggttgagttgaacaacaacaacaaaatgacaaaggtcattatgagacaaaagatagaaaactgtggcaatctggtaaatacagataaatttgggtaagagataaaagcaaatacttattcattggcagtaacaacaagaggattatcggtaacttaggtaagtgcagtacgagtagagtgctggaaaccagtagtgctagaaaccagggaagaataagttgaggtgtgagagttgagtgagagagtagaaataaggtagacaactcttttaagaattttagtttgcagtaaaacaaaacttaatttgttttatgttttggaaaattcagaatggtagggaaaacaattcactcttaggtagggattttttaattctgatggtcagggtaggagttttaaagcttgcaggaccatagatggata

SEQ ID NO: 420769 - DNA, 556 bp, Homo sapiens
ttctagggaaaagagaaggttttgtcccttcagtttccataaatgagaagcaactgtcacccacccaaactccataccaatggagcattccccaaaaggtaagtagaaatgacaataggagggggagggtagaggttgagttgaacaacaacaacaaaatgacaaaggtcwttatgagacaaaagatagaaaactgtggcaatctggtaaatacagataaatttgggtaagagataaaagcaaatacttattcattggcagtaacaacaagaggattatcggtaacttaggtaagtgcagtacgagtagagtgctggaaaccagtagtgctagaaaccagggaagaataagttgaggtgtgagagttgagtgagagagtagaaataaggtagacaactcttttaagaattttagtttgcagtaaaacaaaacttaatttgttttatgttttggaaaattcagaatggtagggaaaacaattcactcttaggtagggattttttaattctgatggtcagggtaggagttttaaagcttgcaggaccatagatggata

SEQ ID NO: 420770 - DNA, 556 bp, Homo sapiens
ttctagggaaaagagaaggttttgtcccttcagtttccataaatgagaagcaactgtcacccacccaaactccataccaatggagcattccccaaaaggtaagtagaaatgacaataggagggggagggtagaggttgagttgaacaacaacaacaaaatgacaaaggtcattatgagacaaaagatagaaaactgtggcaatctggtaaatacagataaatttgggtaagagataaaagcaaatacttattcattggcagtarcaacaagaggattatcggtaacttaggtaagtgcagtacgagtagagtgctggaaaccagtagtgctagaaaccagggaagaataagttgaggtgtgagagttgagtgagagagtagaaataaggtagacaactcttttaagaattttagtttgcagtaaaacaaaacttaatttgttttatgttttggaaaattcagaatggtagggaaaacaattcactcttaggtagggattttttaattctgatggtcagggtaggagttttaaagcttgcaggaccatagatggata

SEQ ID NO: 420771 - DNA, 609 bp, Homo sapiens
gggaactactgtttatttttcttccttgaaaatcacgtgatattgatgtgattccaagcaaatagtatgaacaatattctgaatctagctactgagttctgtattctattctggatttgttaagtttctgagtaaaggagtatttattttatcatctagaaaaatgctttaaattaggtttcatgctcaaaaagacagaaataattggctcagttctttacaaagagttaaattttgagattatggtaagcatatgatgcatactgccatattatgccactagcttgtttttttttgttattggcaaaagtgaaattagattcagtaatgcatacagtgtgatgcctkcggcttacacaaacttagtaaagtctaaaaatctatcagaaggagctgttggcaaggccgtgctcatctaagtgtgcatatttacttttctacttcttatataatggatcctttaaataaaagtcactatgtagttcatcttattaaggacatcaaataagtcattgtctgaacgggaaatcaaattcaagatttgtttctttaaagtgattttattctgtcttacaaatacatgttatttcaaaaggagatattaataaa

SEQ ID NO: 420772 - DNA, 496 bp, Homo sapiens
tatggaaaaattttgctgacccctattctggagaatcataagttaagggtattattataaataatttaacytctgttcccattttttgtagtctacaaagctagcttgtttcttcaaacaacacaatcatctccaaggatgcagaaaaagcatttgatattgacaaaattcaatatccatccctgactaaaactctccagcaaactagtaagagaactaccttaacctgataaaagacatctacaaaaaacctatagctaatatcatttttaattattaaaaactgaatgatttccccctaagttcaggaagaagtaaaatatgtttgctttcaccatttcaattcaccactgtactgaagattctaaccagtgcagtaaggcaagaaaaagaaaagccatctacattatatcaaaaagacacccgcactcatatgtttatcacagcacaattcataatagctaagtcatggaagtggcctaagtgtccatcaatg

SEQ ID NO: 420773 - DNA, 496 bp, Homo sapiens
tatggaaaaattttgctgacccctattctggagaatcataagttaagggtattattataaataatttaacttctgttcccattttttgtagtctacaaagctagcttgtttcttcaaacmacacaatcatctccaaggatgcagaaaaagcatttgatattgacaaaattcaatatccatccctgactaaaactctccagcaaactagtaagagaactaccttaacctgataaaagacatctacaaaaaacctatagctaatatcatttttaattattaaaaactgaatgatttccccctaagttcaggaagaagtaaaatatgtttgctttcaccatttcaattcaccactgtactgaagattctaaccagtgcagtaaggcaagaaaaagaaaagccatctacattatatcaaaaagacacccgcactcatatgtttatcacagcacaattcataatagctaagtcatggaagtggcctaagtgtccatcaatg

SEQ ID NO: 420774 - DNA, 622 bp, Homo sapiens
gtgcttcaatgaaatattttctcaggaaaatagaagctagttcaaatgccattaattcatgtgacttcaatgatctttgttaaataaaactagtctctaaattctcttcagtaatttaatttttaaagtcatgttattgatagcaacaggagacagacaaattcctaggcagacagggacgggttgctggtarggctcgaccttcaacctgaggactgagcagctagttctggatagagtccacgactggagtgaaaacttctgtccccatcttatccactttctctcaattggttccttctggatgatgccttttaaccaatcaaatggtgctctctccaagcccacctgtggaccaatcagcatgcattcccccattctaagcccataaaaaccacagactcagcctcataaacagctacctgctttcttggtcacgtctcacagctgagacctttccttctgtagctcaataaaattcttctctgccttactcgctctccagtgtttgcataccttagtcttcttggaacccgagaacttgctaagctgcagggagcaggagtgaaaaagagctataaccctccctcctgcttgcaaaacaacaggtgagaagaagcca

SEQ ID NO: 420775 - DNA, 622 bp, Homo sapiens
gtgcttcaatgaaatattttctcaggaaaatagaagctagttcaaatgccattaattcatgtgacttcaatgatctttgttaaataaaactagtctctaaattctcttcagtaatttaatttttaaagtcatgttattgatagcaacaggagacagacaaattcctaggcagacagggacgggttgctggtaaggctcgaccttcaacctgaggactgagcagctagttctggatagagtccacgactggagtgaaaacttctgtccccatcttatccactttctctcaattggttccttckggatgatgccttttaaccaatcaaatggtgctctctccaagcccacctgtggaccaatcagcatgcattcccccattctaagcccataaaaaccacagactcagcctcataaacagctacctgctttcttggtcacgtctcacagctgagacctttccttctgtagctcaataaaattcttctctgccttactcgctctccagtgtttgcataccttagtcttcttggaacccgagaacttgctaagctgcagggagcaggagtgaaaaagagctataaccctccctcctgcttgcaaaacaacaggtgagaagaagcca

SEQ ID NO: 420776 - DNA, 577 bp, Homo sapiens
tcctggcaccatccaagtctcatcctaccataatttcattttagttttctccagagtctcccttaaattcttctaactaccatcaataagctaacagcttcaggagtacagatcttcactcagtgtgaaccccaagtggtttgtccttaggaatgaagtcttaccctactgcaatttcactctcagtaggcttctggcttaycacatcctacagatttctaatgctatgtgccttagtctccccgcccctccttctttctgttttctagtaatcgaaagtcaagactgcctcccaacatttgattactctgtgttctccaaagtctatactccaaatatatcctgcaagtacaaaagcctcaaaaacttcatccctttctactaccccctttgtccttagctggctcctttaggcactacttgcatgggtactgagtgctgacacgaaatctggaacttcctcgtgccgttccgggaaagccacctgatgaaaattgagaacatttgaaatataattcattagattataagtgacctatgacatgattttgtttattctaggaaggccttgcccagg

SEQ ID NO: 420777 - DNA, 539 bp, Homo sapiens
aaatattatacaaaattcgaagaaaaaagaaaagagtttctgtttcagtcacaaattagggttattgtgatgtgtatttatgatgaccrttgaacaaatgtgaagaatactgtgaattctatgactttatcaaaatcagccacatccaggagcttgcagttgttgaccaaatgaatgatgacatagagtagttcagatctatcatgtgctcttctatctaatcagtcaatatttccttggccctcaagccaacattcattttttatgtataaccttcttcatgattttgaaattttgatagggtaactgctaatgagttcacaaatgtagcactttaaaaggaaaataaatggagagtgaaaacaacttggctacgtataattgtgggttttaatttttctgtttttaaaataaaaaatggcattgatagtttcaatagcccaagtttttattccagaagatgttgcaataactgttgtcactagattatatacatgtcattttattaagtagattttttttcgtgaaagtaaatcagt

SEQ ID NO: 420778 - DNA, 566 bp, Homo sapiens
cattattctaaatgattttctgttttttattcatttaattctcatggccccagtattccacccrcattattacaaattatgaaactgaggcactgagagtttacattatttgcccaggaacatatagttacacaaaactattttgtgtcatgaaagaaataatacagttggaaatgtctgagaaaaagcttgacatttagtacccctgttacaatcttcaataattaaggttttaatgtttatctgtttggtgtgggtccgtaagaacgaggtgggacaaagaatataacttcagcataacttcaaaattttggctttgatagaacttggaagtgatacaaatgttttgcaaaacatggagaagatagctttcctcctcaaagagcaacgtttataatcttggtttcgccttcttgatggagttgttgatttatttatttatttattttttgtcactgctttctgggaatccccttccttgcctactactctctcaaagggagcatctttacagcacatagaactctgaagactagaaggcacagggacttggcagattgtgctag

SEQ ID NO: 420779 - DNA, 529 bp, Homo sapiens
gaactcaaaatattttaaaattctgatgttccattaaatacccaaccctttttggtatcgattgtagtcctgagtcagattcagagcttgtagaactctaggtaaatcctttagttttacaccaaattatctcctggcaaaagatgatgactgaagacaggatgcagagtgtgttctgattcatttttggaaagcaccacttgygtctttttcctgcacaaggtccccatcatctgtagaataaagtttggagaccttggagctggaccctctttctctggccccaacctgcctgcccagcctctaagtccaacaactgggctcaaccagatccataacctgtcctctgaatgggccagagatggccatcaccctgccctaatcccatctgttcatcaagcaccatcacaaatctcatttcatctccctgaggcatctgtgagtgcttcctatgtttaaactgcacatttggcactaactggccttaaattacctgctgctcatgacttctcatgtaaaacaattttat

SEQ ID NO: 420780 - DNA, 538 bp, Homo sapiens
tataatgccaaccttatagggatgggtttagactcagtgagacaacctatgtaacacactggcacaagaaatgttcaaaacaagctaattctcttccttctttcccatcaagttctctatttcctcctcttcctcttctcagccttcattcaccaaaatgggtcctgctaactcacatgatggtacaatgctcaaaataatatgtgcatcataaagatgggctcagtgttggatgatgaatggatgaattaattaataagactaaatgaaatgtaaggattgctccgtcacccacgcctgttccctgttccacatttggtctctacaaggatggcctcacccagccttgggaagcctcctgaccactgtctggagccctgactcttctttgrccatttttctaagaaacgcttagcaaggcccctacactgggcttcagttttcttgatagtgaaatccaggatgtatgtaaggaaggatagttggctccatgctcaaggatggtgtgtccttcagaaggaactggcaggatttctat

SEQ ID NO: 420781 - DNA, 589 bp, Homo sapiens
gagacatctggtgagggaggaagaagggcttaggctttggattcagataggctgtgttctcattctggatgtctctgctggccagctgtgagacataaggtagattgtacaacctctctaagcctcagtttttaaaatgtgaacaattggagactgtaagacataccacctagactttctgtgagaattagacgatgacctaggcaaagtgcttagtacaacattcagcattagagatgcacaatgactacagtttaaaacgtgtgtaactttgcattcaagttttcactgtgggaagcagatatccaatctcaaaatttatgtcctccatttcataaaggagggactcaggggtcatttctcaataaaagggacctgtactttcccaattcagtggacatacattagtctccagtggtttccatacacaaaattttgttttgattttcagtgatttcagayggatgggcctagagagggaacgctttctaaagtggattctgtgggaagagaggatttgccatcctgtgtcagacccatgatttatcttgccagaattctgttgctcccagcagccttcaaggcatgg

SEQ ID NO: 420782 - DNA, 594 bp, Homo sapiens
ccctgggcctgtgtgaggacaagctgttgtgtgaaataacctaggctatgggaccacgctctatgatctttcctttcctttccttccccctctggcctatccctctgtccttcttcagggggcctcccaggtagaagctctgagcttgggctttgcaaacatgccctgctgcctcgtaggccactctcctcccatggcccagaagctccagaatggcaagaattggctcagccctgtccctgttgtaaccatgcaccgtgctgggcacgtgctctgctgggtgattattactgrctgggtgtggccttggcctctgcctccatgagtctgcctggacccataggcactacctcagtattgctctgagactggggttgagaatgaggggtcaagtttctcagtggggagacttgtgttccagctgctgtctcctccagcctgtaattttatttagaggtggtgggggagtcatcgccacgtgtgagccactggtgatttcattagtctgagtggccattgggcaggcccttactgagtaaccttttagggacagtgggagttatgtggcaataaactcaggagttgagcagggtg

SEQ ID NO: 420783 - DNA, 358 bp, Homo sapiens
tatcatcagccctagccctggcagccactctctcttcttccagctgccccgtcataaggagtaggagatgatgaccatcttggaggagggagatgctgtatcctggagaggccactggggtaggaatcggccatctgctgccgcttcaagttgtgctaccgattagtcacatcacttcacatctgtgctgcaccctcaccctcactgckaaactggtgacaataaagattgtggggaagagcacatgagatgtatatgtgaaagccctttgtaaactgtcaggagtggcatagatttattactgttactggttgtggaaatgtatgtagagaggacaggcagaaatgcctttaaaatc

SEQ ID NO: 420784 - DNA, 631 bp, Homo sapiens
caattatcctctaagaggtctttgatcttgccactgtcctgttagaaacctccagtggctctccattttccctgaaataatggcagaacctccttgcctgatctctgttcagaggtccacaccatctttacctccttcctcactccttgctccccagcaggacaggtcctatccctgcccacatggccctcacaccagttcctctgctccagacatctcctccctgcactgcactcccacacccacatcctcaagcccttccctgcattcaaaaccaacttaaatactgycttctctgtgaagccctcctgctctccccaccctggtgtaattcccccttcctctgagctcgcacactgctgtatctgcacctttatgaagcattgacctccttctactttattccacaccaaggtacacacacttcatcttcacactggacaataagtaacttgaatgcagcgttcatgtcgatttctcttagaatgccccatagacctatatgtaatagctttacaggaaacaaaaataggtgtgtatcaaggttggaatgagagatgcctctcagaggtccccaccccagtgccagagtggagcgggctgagggtccttgtgctgtccatcccctctt

SEQ ID NO: 420785 - DNA, 636 bp, Homo sapiens
taattagtccactattatagtcatctaggcaatgatggtgacagtaggagtggtggggaaaaacgactggggaaaacttcgcagaggaaattttaataggagtgggtgggtgaataaaggaaaggagaaagggggagtaacgaggtctatgcctacttgttaatactggcagaattggcggtgtgtgtgtgtgtgtgtgtgtgtgtgtgtgtgtgtgtgtgwgagagagagagagagagagagaaaggccacctcagtctcttatctgattcaattttctttgtttaaatgtctgcagaggctcctaaaaaactttcattttcatttagttgtgtaaattaacttggctttaggtactatgaaaagagattcagtgtctaataaatcgggtagtgtgatgagcggtgcttactatttctaaaataaatcataattttgcttattaaatagttcatggatgaaccagtaggaccactttgtgatttcaatgttttatactttaaaattgttctcttaggcttctcaattcagattgccccccaagacattaactagatttggcttttcagttatttggcaccatcactatctcctttatcagttcaaatcatagctcaggatattttattttccata

SEQ ID NO: 420786 - DNA, 629 bp, Homo sapiens
ttggggatgcagtggggttagctgagcccgggaggggcaaccagggaagcccagttggctcacagagatgatttccctctgcttaattccctgctctcagccactgggagcccatgggacatctaccaggcaagaggctgaccttgggagcattaattatattcctgaattgaaattagggcttcagtcacaagctttctcttcatcagccattgtattctrccacataatggaaaagaaatttaaaaattttcaaaattaagattctaccattcaggcagacaactctcaaacaatgaaaagaactcctaggcatcatccttctccatccaattggctaatggtagacgaaaattttaaactcaaactttgtttcgtatcacaatggtctgtatttcttccaagaaaaagaaaatggtttcccatgacagtatccattaatcaaaatcgatagccataaaagcaattttttgtttttgagttaagggaggagaaaccatctggaaagagaaacctgactcctcagaaaggaaacaccctcagccttgcatccaaactaaattatcccgtcaccaggaaagcaaggccttttttaaaaaacaataatatcatataaccatttagccact

SEQ ID NO: 420787 - DNA, 555 bp, Homo sapiens
aaagaaaatgtcaaacatttaccaaaaaatagtcctgtccagaaatttgccatgaaaagcttggaattaaatggaaaaatgttaaagatccttgaaataattagttgctgattcaatggttcctgctagatataaacaacaaatcacttttgatggaaacaggctattcttagaatttaagtaagcagtgcttggtgactgtgtttaactaactaacatttcacctcatgaacaacataatggamttctaaataattcccttatgcctcttttttccatttgtttaaatctaaattctaactaagatttcattaccggataattttgcagtacaaaattttcttcatcacattttcaaacctttatattttagttaaacatacataagttttggtttcattaaataaaaagacaagtgattatttcactacaaattcatttcagatgattatctttaattcgatgaaaggcaatgtttataaagttgccattctttgtgcacaggtaattcagtgtgaataaatgtcagggaacctcatctccttggcaactatg

SEQ ID NO: 420788 - DNA, 549 bp, Homo sapiens
tggctcagtcattttctgatgtcctttaaatgacttctcagttgctacatattggtcactttctcagagtctcccttggcaaagcaaacattttattgacacggaatgtagttgaygcagaagtttgaccaggtgttgtgcacattggttttgaaaaatgagcctgatgacatagtttgtggaaagatgaattcactcatgggattctactccaagaaatctgattcttagatatcatatgaaacaaaaacttgaatccattatccctatttacttttaggcatattcatatacatatactcttttccctaaagctcttgacttaaccatggttccactgtcagtaaaatattttgattcttacatatttttaagtacctcaataagattaggagtttaaagctaaactttatttaaaggccaaacatatctacctgtctgactttctaattttgtatctacattgcccccagaaatagaaaatctttattccattttaatagcaacacataaatgcccacaaaattttataagatctgttcatagttc

SEQ ID NO: 420789 - DNA, 562 bp, Homo sapiens
attctatatcaatatttttcactgtgaataaatagagacaatagatatttctatctaagacaagataaacttaacctatcaaaaatatagtgaataaatggtcttgttattttaaataaattactcttgtcattggcagtcaaattatgcttataactaagaaatatgggaatcagttttactaktacctttggacactcgtgttgatctaaaagcagcactgttcattagcaaaagtaatagaatgggatcaaagtgtcatccctaattagatcatgttaaacctcttaaaaattacctgtctacctccacaagcacggtggtttatttctcataaacctttgcactacatatgtattttcacttatactgttaaccggataaaaacaaaagcagatacaaacttccctgaaaatctggtttaactggagaactccgtttcattttaaaatcaggccagagtctaaattttgcagatatttagatatatgcactaagcacagaagccagcccacttgattttagtaggtagcagtctccagcaggtgactcagggctgagc

SEQ ID NO: 420790 - DNA, 622 bp, Homo sapiens
ttaaaaaggaaaaggaagaatgtttaccctagagggattcaaatcctggtgacttcaggcagttggtttttctactctgttatacatccattaaattttgctcagcaactggcagattcctggaaattcaggtcacctgatttccaaaaatagtcatccactatgattccagatgattctatggtgaagtgattatgcatcttgttttgcctgggatagaccctgtttaccyctgttgtccagccacaatcattggtagtgccccttttgctctcaaatcccagcttagatgataaattatgtggttaccctattcattgatcagccaattcataaacattcttaattatttctgttaaagtgatttaaccatataaactacatcaattctgaaatatgggaggtcaaatcatatctctggaaaggggtaatttcattaagttaaaaataagacaaaagataggatggacacagctccaattagtgagtccaccaatgaagccagaatttctcaagacacattcaacagttctgaaaagtgcaaataagattttacatgcaaactataacacaggtcaaggactctttattgtgccagaaaccattctgcaaacgtcacttg

SEQ ID NO: 420791 - DNA, 593 bp, Homo sapiens
ctgatcctccttcactagaaggctggggataaggcagaggcaacactagcacaagtatgcattccctgatcccatcatgaaacactgaagcatgccaccacgagctgaggctctattttaagtacctgagatagttaataaaacagaacatcctgccttgaaggagtttctgttcacatggttgcatcaacacagaccatgacatttgcaaaggaacatctcttgggtcatcgggaaggcagctggtcctgtagctcatatgccttcaagttagtttaaaactatttcaatctattccaatttgtctagttgtttcatgatctaacaakaattattagaaccttcagcaatgcctggcttggaattccaactgtcctctttaagaacaagcaagcagctttttgtggcttcatttcctcaagcttgagctctgcaacagcatgggagtcaagagttcagggcggtcacaggagatctttggcctttgaggcagggcctagagaggctgagatggggaagtggcgcctgactcttcccacccacattcacaaatatgtaagtgttctactaagtactgtggcagtgacaatgat

SEQ ID NO: 420792 - DNA, 567 bp, Homo sapiens
tgtgcttggcgaatcttcagtgagtgatgtgggtacagtgtcgccctcactaattgggccatggcaccctttgtgtcaggagggaactaaagctcagaagaacaaacattggcaaaggctgctctaggaaccctagcagggccagcaacccgcttstctgtgggtcaaccctccccttgtgtaaacacagacccaccgatggagtctgagtcaatgatctttgagggggctccaattttctcagccccaaataggacatcattcctggatcccctaggcttcaggggccctaccagtccactacttacatcagtgcttttgacaactcttcattgtgccttttcacttcccatgttaaactttctgatttgtttgttttcaccttatcttctcatttacaagcctaggagtctccacaggggaccatataagctggttttggccagtgtgctactacattgtaacaattgaaacctcctgagcatttagggtgcaggagctgaagatgagaaaaagaaagacttctcatagaaaaagaacaaatgtgcgggctattctggtcctttc

SEQ ID NO: 420793 - DNA, 599 bp, Homo sapiens
ggagtgcagtggcgggatctcggctcaccgcaagctctgcctcttgggttcccaccattctcccacctcagcctcctgagtagctaggactacaggcgcccaccaccacacccagctaattttttgcrtgtgtttttagtagagacagggtttcaccatgttagccaggatggtctcgagctcctgatcttgtgatccacctgccttggcctcccaaagtgctgggattacaggtgtgagccaccatgcccagctgttaatattatatgtatgcttgaaaagaaagtatattctgcatctcttggataacagactagataaaagtccattagatcacatgttgatggtgctgttcaaatataatataatgctattggctttaaaaaatctacttgttttatcatttgctaaaaatgaggtgttgaagtctccagtaatgactgtgaacttgtctatttctccctttagttttgtcaatttgttttatgtactttgaggctctgttatcagatgtaaatttaaatttacacatttaaatttttttgaataaattcaaccttttattatcataaaatatttctctttatcttggacattga

SEQ ID NO: 420794 - DNA, 599 bp, Homo sapiens
ggagtgcagtggcgggatctcggctcaccgcaagctctgcctcttgggttcccaccattctcccacctcagcctcctgagtagctaggactacaggcgcccaccaccacacccagctaattttttgcgtgtgtttttagtagagacagggtttcaccatgttagccaggwtggtctcgagctcctgatcttgtgatccacctgccttggcctcccaaagtgctgggattacaggtgtgagccaccatgcccagctgttaatattatatgtatgcttgaaaagaaagtatattctgcatctcttggataacagactagataaaagtccattagatcacatgttgatggtgctgttcaaatataatataatgctattggctttaaaaaatctacttgttttatcatttgctaaaaatgaggtgttgaagtctccagtaatgactgtgaacttgtctatttctccctttagttttgtcaatttgttttatgtactttgaggctctgttatcagatgtaaatttaaatttacacatttaaatttttttgaataaattcaaccttttattatcataaaatatttctctttatcttggacattga

SEQ ID NO: 420795 - DNA, 599 bp, Homo sapiens
ggagtgcagtggcgggatctcggctcaccgcaagctctgcctcttgggttcccaccattctcccacctcagcctcctgagtagctaggactacaggcgcccaccaccacacccagctaattttttgcgtgtgtttttagtagagacagggtttcaccatgttagccaggatggtctcgagctcctgatcttgtgatccacctgccttggcctcccaaagtgctgggattacaggtgtgagccaccrtgcccagctgttaatattatatgtatgcttgaaaagaaagtatattctgcatctcttggataacagactagataaaagtccattagatcacatgttgatggtgctgttcaaatataatataatgctattggctttaaaaaatctacttgttttatcatttgctaaaaatgaggtgttgaagtctccagtaatgactgtgaacttgtctatttctccctttagttttgtcaatttgttttatgtactttgaggctctgttatcagatgtaaatttaaatttacacatttaaatttttttgaataaattcaaccttttattatcataaaatatttctctttatcttggacattga

SEQ ID NO: 420796 - DNA, 599 bp, Homo sapiens
ggagtgcagtggcgggatctcggctcaccgcaagctctgcctcttgggttcccaccattctcccacctcagcctcctgagtagctaggactacaggcgcccaccaccacacccagctaattttttgcgtgtgtttttagtagagacagggtttcaccatgttagccaggatggtctcgagctcctgatcttgtgatccacctgccttggcctcccaaagtgctgggattacaggtgtgagccaccatgcccagctgttaatattatatgtatgcttgaaaagaaagtatattctgcatctcttggataacagactagataaaagtccattagatcacatgttgatggtgctgttcaaatataatataatgctattggctttaaaaaatctacttgttttatcatttgctaaaaatgaggtgttgaagtctccagtaatgactgtgaacttgtctatttctccctttagttttgtcaatttgttttatgtactttgaggctctgttatcagatgtaaatttraatttacacatttaaatttttttgaataaattcaaccttttattatcataaaatatttctctttatcttggacattga

SEQ ID NO: 420797 - DNA, 582 bp, Homo sapiens
ttgatctttaaattttggtagtgtttttaaagataaaatacttttgtgtctttgcccagctttgacagacttttatatttacaaaatacattcagatatttcatagattagaaaacaacctttgtgacattactagcttttgggttcagaaaatcaccatagccttagagtgcctttataagaactacatgaggtgcaagaaacatcaacatgatatacagtcagagagattgagttctgtaccttcactataaaaattataaaaccgaggtttaaagaaagccacagsgaaattagcaactaaggcacttacacaagcttgaccagccttctgactctcaacttcaccttgctttcatcagtactccgtccagcaatctttcttgcttctatccaggtttttttaaagtctagaattaaatttaaaactctgctgcaggatgcttgccaacgtaacctgggtctatagctgagcagatttttatgcctgtgaagtggtagcacaactttgactttataaattgatccaataaatctgaatttcaaagtaaatagagattctgaggaattaaaaaggtcata

SEQ ID NO: 420798 - DNA, 582 bp, Homo sapiens
ttgatctttaaattttggtagtgtttttaaagataaaatacttttgtgtctttgcccagctttgacagacttttatatttacaaaatacattcagatatttcatagattagaaaacaacctttgtgacattactagcttttgggttcagaaaatcaccatagccttagagtgcctttataagaactacatgaggtgcaagaaacatcaacatgatatacagtcagagagattgagttctgtaccttcactataaaaattataaaaccgaggtttaaagaaagccacagcsaaattagcaactaaggcacttacacaagcttgaccagccttctgactctcaacttcaccttgctttcatcagtactccgtccagcaatctttcttgcttctatccaggtttttttaaagtctagaattaaatttaaaactctgctgcaggatgcttgccaacgtaacctgggtctatagctgagcagatttttatgcctgtgaagtggtagcacaactttgactttataaattgatccaataaatctgaatttcaaagtaaatagagattctgaggaattaaaaaggtcata

SEQ ID NO: 420799 - DNA, 584 bp, Homo sapiens
tgctcctttttataatgcacagtaatggacattgctggttgactatccagcatctatccacccctccttccctcccaagagaactctgattttgtttttattcatggagctcaagggaggccagttctacctaaaactccaaggataatcctacttcttttgattgggatgctggtttgcccagtggaatgcaaaaggaagagttctggggtatggaatggggtgtttttgagaaaggtacccctcgctattgagagagaactatagggagataagctctatcctcttcctgatggtgttgccatatccagataggtcaccgagagccactgtagccatttaagggtgagattcacactgagaataataaaacagagaattagaaataactcaggcttcctgacatctgtgagctgctgaatcaaccaaccctgccctccctttgacatactgtaaactgagatcataawtgcctatttttttctctattgatcaagtcttttgttccttatagccaaaaacatccaaactgatgtataaagtcctcccgtatggcttgattttctaaagtacatgcaagtatt

SEQ ID NO: 420800 - DNA, 497 bp, Homo sapiens
ctttactaaattcattgtacaattctaacactttcttggcggggtctttagaattttctacatacaagagcatgttgttagtaaacagacaatttcacttcattcttttctagttggatgccttttatttttttcctcttgtctaattgctgtggctaagwcttctagtattacactgtgtcacaaagaagtggagaaagtaggaattcttgtcttgttcttgaccttaaaggagaagccttcaaattttcagtatcgaatatgatgttagctatgggcttatacatgacctttattgcacagaggaacattccttctatacctaatttgttgagactttttatcatggaatgatgttgaattttggcaaatgcttcttctgcatctattgagaagatcatatgccttttgttcttcattcttttaatatgatgagtaacatttattgatttgcatatattcaaccaacttcacattccagggataaaacccacgta

SEQ ID NO: 420801 - DNA, 658 bp, Homo sapiens
tctcaattggactttgcccacttccrtctaatttgtcttgttcccctaattggctttgcagaattgctatgtgagcttcaaattgctgagcttcctctctgcactccagcgtatccttagagggtcattgaataaattacttttttttccagtgttctaaatagtgccctagtgccctgaaagagttaattcacctcagagaggtgagctgttattcacccaagaaccaggattgttactgacccaaagggagctgtaataatctgggcatatggccaattagccacatgctggcttagcagacattcagtagttgcccaaccattgttcataccccattggaagtgactcagccatggggaacatgtgactgttcaactgaatcccaggtctccccaaaaggagaaattagaagtagatctgcctaagaatgctattaatacctgacttgtggaggttggtttttcttcacacttagctgtaggaactcctaagtatacaagttggttcttcaatgaccctgcctaaacaagatattagattcccaaaggagcatctcagggattttgactgaagatatgtattccgtgtttcaaatcctcgtagaagacataattatagggtgttattccatcttctagagctgtccaatagaaat

SEQ ID NO: 420802 - DNA, 581 bp, Homo sapiens
ccaaacatcaagtgcatgatgtatcctggaaggtgctatgagcctaaaaatagcctgggtaggtttattttctgtgttgaccttaaaatcttttcatatacctcttggaaaatggactcagtgtagacacttcatggtttgtgttctgctcttcagctgtttggggagactggtcagagtcacgtcttcacacaaggttctttcaaagctggagggcagctcagctacagtraagaactgtccttgaatttcagctggatacctttcagattttcagttatttccttgatctagggatagactggtgcatttgtgagaatttgggttgcagaaatgtcctatgtttcttattttggggtttagcatttctgtgcagacagcttttttgctgttcttggtcctcagcaatgacaatggctccgaggagattactatttttcccccctgctggcactagatcagaataaaaaaaaataaaaaaacactgtttagcagcaatgcttagtgtccttagtattattttttttctgtggttagaaaagtgactcccaggtagataatacctatctctactctcagtc

SEQ ID NO: 420803 - DNA, 581 bp, Homo sapiens
ccaaacatcaagtgcatgatgtatcctggaaggtgctatgagcctaaaaatagcctgggtaggtttattttctgtgttgaccttaaaatcttttcatatacctcttggaaaatggactcagtgtagacacttcatggtttgtgttctgctcttcagctgtttggggagactggtcagagtcacgtcttcacacaaggttctttcaaagctggagggcagctcagctacagtgaagaactgtccttgaatttcagctggatacctttcagattttcagttatttccttgatctagggayagactggtgcatttgtgagaatttgggttgcagaaatgtcctatgtttcttattttggggtttagcatttctgtgcagacagcttttttgctgttcttggtcctcagcaatgacaatggctccgaggagattactatttttcccccctgctggcactagatcagaataaaaaaaaataaaaaaacactgtttagcagcaatgcttagtgtccttagtattattttttttctgtggttagaaaagtgactcccaggtagataatacctatctctactctcagtc

SEQ ID NO: 420804 - DNA, 613 bp, Homo sapiens
cttcctgtttcccttcacgcgagcatgtcctctaattaaatctttgtacattaatcctgtcttggcatcttgttcttggatatctcagcctaacacaaaatgtaataagattagaattattgccaatagcatacacagaaatagcaaataggtgaattttaaaactaattgctaaataattttttaatcaaaagagaaaactgaaagtacaattatacagttgcaaacaataccatgcgatgaaacttataatcaaagttgtgtttagaaaaacatttgtarcttaaatgcttctattaaccaaatagaaatgaaaatatacctaccaaaactaagaactcaagaacatagaaaaaataaacacgcctaagcacagtaggttgaaggaattaatagggattaaagcagacatcaatagaatagaaaacaaaaatactatatgtgataattattttcttaccagaggtggcttttctcctcaattaattttaaaaataagaaaatatgtgtagaaagtttgaaggaaaaatgctgagtagtcatagataaataaggtttataaaaataattataattgaatattacatggcacacaatgttgaaaaacatgatc

SEQ ID NO: 420805 - DNA, 475 bp, Homo sapiens
ttttaatgacatgaaatagatatcctcctatttccccattgttgcttctaagccatttttccttcatcactgggcgtctcagttccttggcatgccccctctaaagagcttttcctccgtaactgtgctaccttgaaaaatcccagttacaagcatccccacttctaacctccaatctgttactctagcacttgcgttttaataacaccttgactacatcaggaactttaatccattcacgtcgctgttggtcacctccatgttcccatgtccttccttataggctcagcttagattctgggtctataaaaataggcactctttttccctcaatacgtttgcctctgcaaatgcaaatgttcccttgcktggtacctacattcaaaatctcaagggccagtcacacattgtcaagtaattatattgtacctcttcaataaattgcattcccttagtctctgaaatgagtagttca

SEQ ID NO: 420806 - DNA, 640 bp, Homo sapiens
ttttataggtatttgtacaccatctgtttctgcattggttgagggttactccyaagactattaacactctagcaattcagtctgcttggtgagtgggccaagaacaccgaggccagaaaaaaaataaaaataaaaccctcaggcagagtttgctatgaaaagcccttagcatatataagatcagggagtactgaaggaatatggtgatgtgggtgaggtgtggacactgttccctgcacatggaaaataccaaccaggaggcctcaaaagatgatatttacctaagaattcacaccgtgtctatagtgtattcatcattctcatagatcctaaagcagggtatcaggtgccttacataaatacttctgaaacctaaatatctagggagtagaaaatctactattttataactattttttgaagtaatagcagaattcaaccttctttaaaattattttttaatttttggtgaatactttatcacctctttggctatgccaaaggttaaaccaaatgccataccataatggtgacatatgagacaaactttcttattgtgatcagaattgtacctcagaagagcttgttttgattttgcctgtaaaccagaccttacactagctgtagagaaagagtgttt

SEQ ID NO: 420807 - DNA, 640 bp, Homo sapiens
ttttataggtatttgtacaccatctgtttctgcattggttgagggttactcccaagactattaacactcyagcaattcagtctgcttggtgagtgggccaagaacaccgaggccagaaaaaaaataaaaataaaaccctcaggcagagtttgctatgaaaagcccttagcatatataagatcagggagtactgaaggaatatggtgatgtgggtgaggtgtggacactgttccctgcacatggaaaataccaaccaggaggcctcaaaagatgatatttacctaagaattcacaccgtgtctatagtgtattcatcattctcatagatcctaaagcagggtatcaggtgccttacataaatacttctgaaacctaaatatctagggagtagaaaatctactattttataactattttttgaagtaatagcagaattcaaccttctttaaaattattttttaatttttggtgaatactttatcacctctttggctatgccaaaggttaaaccaaatgccataccataatggtgacatatgagacaaactttcttattgtgatcagaattgtacctcagaagagcttgttttgattttgcctgtaaaccagaccttacactagctgtagagaaagagtgttt

SEQ ID NO: 420808 - DNA, 640 bp, Homo sapiens
ttttataggtatttgtacaccatctgtttctgcattggttgagggttactcccaagactattaacactctagcaattcagtctgcttggtgagtgggccaagaacaccgaggccagaaaaaaaataaaaataaaaccctcaggcagagtttgctatgaaaagcccttagcatatataagatcagggagtactgaaggaatatggtgatgtgggtgaggtgtggacactgttccctgcacatggaaaataccaaccaggaggcctcaaaagatgatatttacctaagaattcacaccgtgtctatagtgwattcatcattctcatagatcctaaagcagggtatcaggtgccttacataaatacttctgaaacctaaatatctagggagtagaaaatctactattttataactattttttgaagtaatagcagaattcaaccttctttaaaattattttttaatttttggtgaatactttatcacctctttggctatgccaaaggttaaaccaaatgccataccataatggtgacatatgagacaaactttcttattgtgatcagaattgtacctcagaagagcttgttttgattttgcctgtaaaccagaccttacactagctgtagagaaagagtgttt

SEQ ID NO: 420809 - DNA, 533 bp, Homo sapiens
ggtatcaggtgccttacataaatacttctgaaacctaaatatctagggagtagaaaatctactattttataactattttttgaagtaatagcagaattcaaccttctttaaaattattttttaatttttggtgaatactttatcacctctttggctatgccaaaggttaaaccaaatgccataccataatggtgacatatgagacaaactttcttattgtgatcagaattgtacctcagaagagcttgttttgattttgcctgtaaaccagaccttacactagctgtagagaaagagtgttttgattctatcattggatgatgcaagaaaattgactgtgaggtrcagactataggtaagaaggttctagtgtccctgttatagaatttatatgtttatagatgcccaggtccctgcattttcacagcaagtgagggctcataatgttacaggtcctatggtggggcctactctgaagattgagggaaccacaatacctatattagtttgccaggcctgctgtaaccaagtac

SEQ ID NO: 420810 - DNA, 507 bp, Homo sapiens
tgtggcccatttaccctttgctcagacaaaatatcttgggtttagggctatgcccaaataaataaatcaataaatcaatctgtgactttgaacataaagaaatataacctttcaaagtgcagatctttttcagatgaattaaaaaggcttattcatctggtacattcaatctttaccttaatgatctcaacccccatattatagcagaggggcatctcagtcatggattttatgtgtttgtgcgcacgtgtgtgtgtgtgtgtagccttggcattgtgaaaatgcctaaattctgattgaatagcttgtccttaaactcccaaactgcttcaaccatcatcaagtgagagatgcccagtcattttctaggagccagggagtctgctggcttcyagtttcaagtctctgtcaatagagatgagctcattaataactcacatgggataagagtaattattgacgattcctaggtaaaatatctctgaattatggcttaagatgctttag

SEQ ID NO: 420811 - DNA, 654 bp, Homo sapiens
atcagaacctttgagggtgaagcccagcccagcagttcatgttttaaccagcccttggggtgagtttgagaaccactgccataaacactaatgatcctttccaatatatgagcttagattttgatgacatttggtcacaattctgctattcacttccatcatatctcctctgatcctgagaaatgttggcactgagaatagtrcagggcaaagagacacgtacagcattattagctggggctttcactgaaaaccccagggtctctttctattgtccccatatggttggagtcacaagagtgggagagatggccaagctctctgcagaggatcctggcagcagcctgaaccctcttgctacttccatcaaaggaaaaaaaaatcaaatatttacccccacgagcttataatattacagagaactccaccatcctgccctgcaaaatatcctgggatttgactaatactagagctgcttttctagtccttgagtgactaggaaggaagaaccaaaagcttgactcccctgcagcagtgagtctctggctttggtttgcacaggaaaccatagggtcacgtaaaatacacatattcgggtctgagaggttctaatgaagatgatctaaggtgtggagcccagaaatcaacatttta

SEQ ID NO: 420812 - DNA, 286 bp, Homo sapiens
tgacttcttgcctcagaatccctggagatcttgttaaataagaagactcctgggcccagctccagatctaatgaatcagaatayctgggcagtgctggagttgaagagtttcctttttaagaagctgtccaggtgcagctgaaaacagctactgatgctatccatgatccattcactcctctcctggtaactatactttgatttccatctgggggaattattcttctggttccaaccatttttgcttttggcagagcatctgacctgtcactggtgcccttgttgt

SEQ ID NO: 420813 - DNA, 286 bp, Homo sapiens
tgacttcttgcctcagaatccctggagatcttgttaaataagaagactcctgggcccagctccagatctaatgaatcagaatacctgggcagtgctggagttgaagagtttsctttttaagaagctgtccaggtgcagctgaaaacagctactgatgctatccatgatccattcactcctctcctggtaactatactttgatttccatctgggggaattattcttctggttccaaccatttttgcttttggcagagcatctgacctgtcactggtgcccttgttgt

SEQ ID NO: 420814 - DNA, 673 bp, Homo sapiens
gatttctcatggcctggtatgagtctatgaagctccctctggttattccagtttatgctattttcttttttaagcagatattacatttcttgcttatagtataatagatagcatttcagttttagtatattmttaattgatttatgtgttttacagtcagatttaatatttaataaacactgaatatacaagtttcatattatctaataagatcatattaaattctagacatttagtgtaataaaataaatttttagagagcaacaaaaatagtatcttatatttgtaaaattattttcatactcaaaactttttcacatatattatttcatttggttcttaagtaatcttgtgatgtatgcaaattggataattttatttctatgtaaaaatatacacagagcttatggtgattgtatgaagtgacaaaacttccaaaatttgtatgtggtagagctgaggttaattaacagttcttctggcatataatattcagggagaaatatacctagccccaatttgtagagtggattactgagccaatgttataatgttaccattaaacttgacttttgtacatttaaaaggtcatttttttaaccataaaaaaatgggtaagagttttatgtggctctaagaagaaaatgtttataggggtccttgctcagtttac

SEQ ID NO: 420815 - DNA, 627 bp, Homo sapiens
tattatcactgactatagttgctgtgtttgccttatttttaatagcaaaaaatgcaattagttttgcagcaacctaaatagttactgtgcttgattctaaatgcttgggggaaatggaaaggattgtaaaggcagtagcaactaatggtagtaacaaggtcagcataaaatttccaacaaaaagaaagcagaaatagatttgtacatttttaaaccttcaatcagcaaatatttgctgaacatctactatgtgtttttcactgttctaagtgcattacataarttaaccatttaaatcctctcaagagccttatgagatgagcattatcattattttcattttacatatggggaaactgaggcacggaattcacatggctacaaactgacaagagcagtatttgatctcagggagccactccaggctttcaagtttaacaatttcccattgctgcctctcaagcatctctatctctttagggtaagaaagtatttcatgacacagcaaagagatctgaagtaatagaagtcactagttgaaagtttcttctaccttaaaataatgcccaaaagattagaatactcataaaattcatgtgtatgtattttctacgcaaatactatttt

SEQ ID NO: 420816 - DNA, 577 bp, Homo sapiens
catatcgcaagtgaatagggcttatctaggggattacaagaagttttacctctgaaaagtctactaatgtaatataatcacttacacattgaaggagaaatcattcatataattttttcaattaatttaaaaaagcttttaataaaaattwtcttcatgatttaaaaaattagctaactaagtatagaaaggagttccttcacctaagaaggttatcaaaaatctataacaagtatatttctcaaaagtattctcgctgaagtgagacaagaatgttcactacctttgagtctattgcattacaatagacttgcggtctggtcacatcaatacaagtgagctcagtaagttttctcatacaaccacaatctgcaaaaatcaagtgttcccctatatcagtaaatcaatagtaactaattatataatgtaatagaacaaaaatcatattcaccataggagacaacatctctccaaatatctctctctgtctgcacatgcatgcacacactacacacacaaaatgtaatataaatggaagttattgtacatacatttatttatctatactgatcaagat

SEQ ID NO: 420817 - DNA, 591 bp, Homo sapiens
cagtacgtgaaaaatgttgttcttatatatcaaacacttaagatattcaataatcgtattttgagagaacatcagaaagtaaaagctaattttgttaagaagtctatgacagtctcagaagcaatgaaaattcttatgtatccatttatgtgtgactattaagttaaaataaaagaatttgtttaatactaaactttgtttacatgatgaaattaaatttagaaagaataaataaatactaagaaacacatgtaattctcatcagtaatcataatcaaatgggctcatattattgccattaattataaattaagagttggtgatggtctcataaacattgatgcttgcaygttcattgtctggagctgtaacttggaaatgatattctgttgatccttataaagccagggttttataagacaaaagcatatcatatggctagatagaagatagcacgttgggccctgcacatgattcttgttccgacctctgtaggatgtgtgaagtcctgggactgatcgatgggagtgggtgatccacagtccactgtggcctgtttcctatcagggtggaagctctggaagggcatat

SEQ ID NO: 420818 - DNA, 476 bp, Homo sapiens
aatatgatcatattttccaaattgagatacaaaaaaagaaaaatctaggataaaaatccaagaagaagaaaggggcaggatgccaagactggaaacaggagctgtagagacaaccagaagaaggattttggaacgatccagaactccatcagctgcttggagtttaaatcctcaacatttgcaaagcaacggatagctggcttcatccatcacattcaggctgaaactggtaggttatcactgtgattgttcactgggaaataaaaacagagattgttcactgggaataaaacaggaaataaaacagggaaatgaaatgtgaagatcaagatatatcagctcccaaatgtgggttttccacctgyttcccagtaactgtgggcagatacttgtgaatattcagaaaaccactcagaaagcctggagaagggcatcttcaactaactagggcaatactgtgactaacacagtagggt

SEQ ID NO: 420819 - DNA, 530 bp, Homo sapiens
caatatagccataggataaatccctcctgataatttatgtctattttctttctccactcactagaatgtcagcctatgatattytgttcagtacccaaaacagtgcctagaaagagtagtttcacaatagtcattgagtgaatggtatttttattataacacacattctcttaccacttcctctttcacactttttctctttcttcctcccattcctctacattccttacattacttttcttgtgtttgattttcaatcttctattaagttccagatttttcagtcatgtcaacaagaaacatgtttctaagcaagaggtgttttttacttaaaaccaaaaaattgaaacatgaggaacttttctataatctgtgtgtatccaatgccaaacaatcagttgatttcatggaaagtgaactggttatgtggcatgacgcagaacaaattctactccaacataagcacacatatgcacacatacctacccccttccagctgcttgttttttttttatgtttttaacaaagtg

SEQ ID NO: 420820 - DNA, 530 bp, Homo sapiens
caatatagccataggataaatccctcctgataatttatgtctattttctttctccactcactagaatgtcagcctatgatattttgttcagtacccaaaacagtgcctagaaagagtagtttcacaatagtcattgagtgaatggtatttttattataacacacattctcttaccacttcctctttcacactttttctctttcttcctcccattcctctacattccttacattacttttcttgtgtttgattttcaatcttctattaagttccagatttttcagtcatgtcaacaagaaacatgtttctaagcaagaggtgttttttacttaaaaccaaaaaattgaaacatgaggaacttttctataatctgtgtgtatccaatgccaaacaatcagttgatttcatggaaagtgaactggttatgtggcatgacgcagaacaaattcyactccaacataagcacacatatgcacacatacctacccccttccagctgcttgttttttttttatgtttttaacaaagtg

SEQ ID NO: 420821 - DNA, 586 bp, Homo sapiens
ccacattaccgtggcaatagatactccccaagtctaacctcacacgagactgcagcaccacacaacactgtgatggcagccttcgagacctggaagcatattggttagactgctgtctgtgttctctggaaaaattcctcaaatttttctatatggtattaacaactttatgaacctcatagacctgtcattcacatttttctgataatgtttaagtgatattttaatagtgatgtactaatggaaaaaatgcaattagaacttgggtcatcaaagtcctagttcaaggattttcttgttctacccaaatgtattcctctggtgctcacaggaactcaaatgttgcatataawcttctggtgatatagaaaggctctaactgaccttcatacaggattcagtatgtaagtgtggatgtgggggtgtgcaggtctgttttttgtgatttgtgagaatttgatttttacatcaacatttttatccatcagctcacatctctatttccaatttagagcaacttggcagtaagaaggatcaaagataatcatttcatatgaggaaatagagggttattcagctattagca

SEQ ID NO: 420822 - DNA, 547 bp, Homo sapiens
ggtatttctatgagtcacactttatatcttctccttatgtctctggtaggagactcaaggtaaatcttggagaatgcatttacctagttagaaaacatagctatcagtttgtatgtgccaygttatctctggtaccatattgctaaatcagattgctcagggagcctggtttacatttggaaaatatattagtctgttttcatgctgctggtgaagacatacccaagactaagtaatttataaagaaaaagaggtttcatgaactcacagttccacatggctggtgaagcctcacaatcatggcagaaggcaaaaggcatgtcttatacagcagcaggcaaacagagaatgagagccaagtgaaagggtttccccttataaaaccatcaggtctcatgaggcttattcactaccaggaggacagtatgggggaaaccacccccattattcaattatctcccaccaggtccctcccacaacacgtgggaattatgggagctacaattaaagatgagatttaggtggggacgcagccaaaccatatgag

SEQ ID NO: 420823 - DNA, 588 bp, Homo sapiens
gaataagcagtttctttttgcattttgaaaaacagaataataataagccaatgcagtttaccaattcctcaaaattgcttccattattttttataagtaacatcactgcaaattatgttttcataatctaccaaattattctttacttatttctttccctgtacctcaaagttattgccactttggaccaatctaaacaattcatctcctaccttggtatttacactcttcaagtgatcayacctggttttcttgtctctcctccccactctgctgcccgtcttgtttgggtgagcaatacataattggttcttttaatctatcctcataagtcaattgcaccagccccttaatcatttttgttgtgcttctctgaaatctgtccaatttgtcaacatcgttctggtgctgggacattcagaaatgcatgcaagattctggtactgcctcatcaatgctttatacagaaaaaagatgatcacctctctttttctcttggtgagaagtctctgggcatgcagcttcaaaagcatataagattttttttgctataagtttatacaaaatatttccaggtaatttttttct

SEQ ID NO: 420824 - DNA, 588 bp, Homo sapiens
gaataagcagtttctttttgcattttgaaaaacagaataataataagccaatgcagtttaccaattcctcaaaattgcttccattattttttataagtaacatcactgcaaattatgttttcataatctaccaaattattctttacttatttctttccctgtacctcaaagttattgccactttggaccaatctaaacaattcatctcctaccttggtatttacactcttcaagtgatcatacctggttttcttgtctctcctccccactctgctgcccgtcttgtttgggtgagcaatacataattggttcttttaatctatcctcataagtcaattgcaccagccccttaatcatttttgttgtgcttctctgaaatctgtccaatttgtcaacatcgttctggtgctgggacattcagaaatgcatgcaagattctggtactgcctcatcaatgctttatacagaaaaaagatgatcacytctctttttctcttggtgagaagtctctgggcatgcagcttcaaaagcatataagattttttttgctataagtttatacaaaatatttccaggtaatttttttct

SEQ ID NO: 420825 - DNA, 649 bp, Homo sapiens
gtttctttttttgaagcatgtagccttgaatgtttgttctaccctttttttttttttcacatcattactctggtgctgcttgatgtaacttgattagctccctccccagtcatgattggtaattaaaataggcattaaaattagtcacttagcaattttgctgttcaattggcaattaaattacttaattgcaattaaagtcctaattttaattggcaaaatgatagatgtagatttaagataatatgtataaatactttaataagtgtctatataaggattacttaattactcaacttcaagtttatgctgttaactttaraacttttaagtgagcaatgaaatttatattacatctattcaaaggatatggtaattagatttattacttatcactataagggtccttgctttaagttacttttgtagtgttaaaattgtaggcttgataattgcagaattctgatgagaaaaagggcatatatgtctctgttgcaatattatcaataccttcatttttaaaattaaattgagacattccatccaccaattagtctgaggaaaaaatcaaaagtggttattttatcattaaagatagaacaaaaactagccagcttgtgatttacatataaaaacttgcaaaatgtat

SEQ ID NO: 420826 - DNA, 587 bp, Homo sapiens
cacatgttgaaatcctaacccctaagacactggcattaggatgtgggtcatttgggagatgattaggtcatgagggtgagcccacatgaaaaggatcatacccttataaaataaatcccaaagaactcccttttccttataccatgtaaggacacagtgaaaggacagccatctgtgaaccaggaagaagctgggaccagacacacaatataaccatgccctgttattgaacttcttagcctccagaactgtgagaaacaaatttctgttattcataagccacctcmtatgtggcattccgttatagcagcctaaatggaccaagaccatacaaaaccaaagaaaaaatgcatgacacaaaattgtgctctataaaatatcaggttttgtatgggaggtgtttaaagacaaggcaggctagaattgagaaacatgcagaaagaaagcagtatcagccatcactgatattttcactctctattctcctaacaatcattaccttcctgataatgagtattctatccattactggtggaaaaatttcaaaggaaatttatatgtaatgtgaaaatatagaaaatatctga

SEQ ID NO: 420827 - DNA, 432 bp, Homo sapiens
tttataaatccaaataaatccacaaggtagagaaaaacataatttatgtgttagtcagtagaattgggacttcagtattgtttggaaaacaactcaggttcatgatgcaatgaaggatgcatcactaaggtttggcaaagaaaatatccttggttaaaatctcttccttagaaacccmaaaaatcacactatattcctcagatagtatggattataattacacgaaaaccaaaaatgtaatacataggaacctgactaattaaaaattcagatgtgtttttattttctattattggtagattttttttaaaaaaaagattccttttgtcctgtattaaatttgaattaaatttgaaaatcacaaagttcataaattttttttttttttgagatgcagtctcgctctgttgtccaggctggagtgcagtggtg

SEQ ID NO: 420828 - DNA, 552 bp, Homo sapiens
tttttgtcagatttgtcaaagattagatagtggcaggtatacagtcttatttctgggttctctattctgttccattggtctgtgtgtctgtttttgtactggtaccatgctmttttgattactgtagccctgtagtatagtttgaggtagggtaacgtgatgcctccagctttgttctttttgcttaggattgaattggctatttggggtctattttgcaagcccaagagttcttaacagaaaagtaattatatacagaaatgatcaaccattaggaaattatgcattgttgatgggcacaaggtttatgacaggcagaaatttgcaaatgaactaagtagagttttacattacttttattttattttattgagaagttaaaaaattatctgcagaaaacaaaatcaatcaaattcctctgttcatggtatgctatcctcttttctctttgttcaccttttatcttcttgttattttcaagccacccctgaccactcaactgcatttggatatatgtattttttcagattacacatatatatgtatatatat

SEQ ID NO: 420829 - DNA, 489 bp, Homo sapiens
acagacatcttatctgggaaatcttgtcaagttcatccagtgctacatatctgtcctatgtgctctgatagcgctaatcaatcttattgcartcacttctttgcttgtttcttctgtaatattgtaaatgcctttaagggtggagactattctttctgaatctttagcagctcgtatcaggcctggcacataattggtcctcagtaaatatttgctaaattaatgcatgaattgttggtgtagttgtcaaatcttaggtttcctcctcttcctttctgttattatgcttcttttcttcttcatgccctatcaatatttaaatactttatagaattagcaacttaagttcttccagctgtttttcgtaattaatttttaaaaatattcttctccacctttgccctctactttgaatatcttttgatgatatattttcctactagagtgtggtaccaagaactaaattgtgatacgataggtgacttatga

SEQ ID NO: 420830 - DNA, 235 bp, Homo sapiens
gtatgtttatattcttcattttagaggtgaggaaactaaagcactgtgagagtaagtaatttgccccaaatcacccagccaacaagtgttgaagccaggatttgacactgacacttggtagttagggaccagagctattgctcccttttttagtttgtttgtttttwaaaattaattaattaaaaaagcaggatcttgctctgtcactcaggctagagtgcagtggcatgatctc

SEQ ID NO: 420831 - DNA, 489 bp, Homo sapiens
acagacatcttatctgggaaatcttgtcaagttcatccagtgctacatatctgtcctatgtgctctgatagcgctaatcaatcttattgcagtcacttctttgcttgtttcttctgtaatattgtaaatgcctttaagggtggagactattctttctgaatctttagcagctcgtatcaggcctggcacataattggtcctcagtaaatatttgctaaattaatgcatgaattgttggtgtagttgtcaaatcttaggtttcctcctcttcctttctgttattatgcttcttttcttcttcatgccctatcaatatttaaatactttatagaattagcaacttaagttcttccagctgtttttcrtaattaatttttaaaaatattcttctccacctttgccctctactttgaatatcttttgatgatatattttcctactagagtgtggtaccaagaactaaattgtgatacgataggtgacttatga

SEQ ID NO: 420832 - DNA, 571 bp, Homo sapiens
attcaatcaggatggcgaaataaagagatcacttaatttgaccatagggaattctgttccacttggttagctcagacacggttctctgtcctaaccaatttcattctgaacagggaagacagctcctagcacatgcaaatgaccctcttccaactccggctccagcaacttcgggcgggggccagccgggtcggctgaatgcgagggggatgcgaccctggcctcccagtctttctgcttccctttctcagacacccggaagtccccgccgcagcccatggtctcctgcagggcagcttcggcgsaccccggagagctgggcagtcccgggagagctggggctgggctactggcaccaaggcagagggcacactccgaggtcccgggcactaggggctccctacctgcctactccgctcccgccattgctcaccttaaagaagcctttgcagccctcacaggtgcgcacgtcgtagtgttggcaggccgcgttgtccccacacacagcgcacagccctcgttggagggagccccgcacggggtgagggcacctgcgtgtcgagcagctgag

SEQ ID NO: 420833 - DNA, 675 bp, Homo sapiens
tctactatatccctggtactaagctacatgctaaagggcacacacatttctctgaccacaaaatcaaagaattagacatatcatctgggaacaatcacaaatcaagaccaatcctagacaaaatttcacaaaggtgaagtttctttgggtcctgtacatttttctcttagttccttgccttcaattttgtaccttctctaccttcccccaacagagacaagctggactaagtactccctcaggaaattcttctcaacaactcccccttgggcagcatttctcaaaatgcctttccaaagcactccttggccaagtgatttggtgaaactcagcaaactgcatcttcctcctggagatcaatatttagccttaacatatttaagaytgaaaaatgttacagtaaaagttttgtttaatcctgcatttgccaaacatacttgctcatagaactactggtcaccccatcccaacataatcaatctctcttagctcctagtggaactagtattttggagattattatttgggatgtgctttaggacacaaccatttatcttttcaataaatgtgttagaggatcttttaattcatttttacattgacatatcaaattgtactatttatcccatataacatgacaaagtatagctacaccgtgaaatgaggaaacctggc

SEQ ID NO: 420834 - DNA, 368 bp, Homo sapiens
gaaaaatatctgggccaggcacagtggctcacatctgtaataacagcaccttgggaggctgagggggtgaacgacttgagagcaagagttcctgacctacctaagcaacttaacaagacctatttctacaaaaataaaaataaaaaatatagccagscatggtagcattcacctgtagtcccagatactcagaaggctccagtgggaagactgcttgaacccagcagttgaaggctacagtgagccattatcatgccactctactgcagcctaggtgacaaagtaagaccctgtctcaaaaaacagaaaagaaaaatatctgggaaatccatatatatttggaaaataaataacacacttctaaataa

SEQ ID NO: 420835 - DNA, 368 bp, Homo sapiens
gaaaaatatctgggccaggcacagtggctcacatctgtaataacagcaccttgggaggctgagggggtgaacgacttgagagcaagagttcctgacctacctaagcaacttaacaagacctatttctacaaaaataaaaataaaaaatatagccaggcatggtagcattcacctgtagtcccagatactcagaaggctccagtgggaagactgcttgaacccagcagttgaaggctacagtgagccattatcatgccactctactgcagcctaggtgacaaagtaagaccctgtctcaaaaaacagaaaagaaaaatatctgggaaatccatatatatttggaaawtaaataacacacttctaaataa

SEQ ID NO: 420836 - DNA, 570 bp, Homo sapiens
cctgaggcaacccttcccagcttacacctcattttaggagcatttcccacaatagacactttctcccaaaagcaagaagaaaatcagatcgttctgaaataaycaggaaaagcttttggagacttaaccattgtcagatctccctcagtgattattataaactaaattacagaaaatccaggctgaaatttttcataaagcaatttaaaatatttaatcggatgctgaatgcttctcagaagaaaactgatctcttttcgctggttagataatgtcctctttttcttcagcccaaaagaggtaaatgagtatatgaaatataaatacagaaatacataactaaaagtgaaagctattagtaacttggaaccctcagaagccaagctaccttgaatatatctatgctaggattactatctccttccatcctgagatagtgataattttgcagtattaatatagggaaacctttagccagaaaggcaacaatgtatgacccagcattggaagagaagcctcccaggaatacaggaacagccttcattcccagcttgaattgtttcttaatgg

SEQ ID NO: 420837 - DNA, 551 bp, Homo sapiens
tttgtaatagtattagtattagtagtagtagtartagtagtagtagtagtagtagtagtagtagcagcagcagcagcggcaacaactatcctacaaggtatgaaaaggtatcttgttttggtttctatttagattttccctaatgattagggcatttttatgtacttgttgaccatttgtgtatcatctttggagaaatatatattcaagacctttgcccattttttaattgggttgtttggtttttattgttgttgagttgtagcagttctttatatagtttagatattaacccttcattagatatgtgatttgcaaatattttctctcatttcataggttggtttttactgtattgattgtgtcctttgatatacacaagttttttgttttgatgtagtctaatgtatatgcttttggtgtcatattaaagttgtcattaccaaatctaatgtcattaaacttctcccctatgactataatttcttctaagagttttatagttttaactcatgtttaggtcttgaatccattttgagttaatttttgta

SEQ ID NO: 420838 - DNA, 551 bp, Homo sapiens
tttgtaatagtattagtattagtagtagtagtagtagtagtagtagtagtagtagtagtagtagyagcagcagcagcggcaacaactatcctacaaggtatgaaaaggtatcttgttttggtttctatttagattttccctaatgattagggcatttttatgtacttgttgaccatttgtgtatcatctttggagaaatatatattcaagacctttgcccattttttaattgggttgtttggtttttattgttgttgagttgtagcagttctttatatagtttagatattaacccttcattagatatgtgatttgcaaatattttctctcatttcataggttggtttttactgtattgattgtgtcctttgatatacacaagttttttgttttgatgtagtctaatgtatatgcttttggtgtcatattaaagttgtcattaccaaatctaatgtcattaaacttctcccctatgactataatttcttctaagagttttatagttttaactcatgtttaggtcttgaatccattttgagttaatttttgta

SEQ ID NO: 420839 - DNA, 551 bp, Homo sapiens
tttgtaatagtattagtattagtagtagtagtagtagtagtagtagtagtagtagtagtagtagcagcagcagcagcrgcaacaactatcctacaaggtatgaaaaggtatcttgttttggtttctatttagattttccctaatgattagggcatttttatgtacttgttgaccatttgtgtatcatctttggagaaatatatattcaagacctttgcccattttttaattgggttgtttggtttttattgttgttgagttgtagcagttctttatatagtttagatattaacccttcattagatatgtgatttgcaaatattttctctcatttcataggttggtttttactgtattgattgtgtcctttgatatacacaagttttttgttttgatgtagtctaatgtatatgcttttggtgtcatattaaagttgtcattaccaaatctaatgtcattaaacttctcccctatgactataatttcttctaagagttttatagttttaactcatgtttaggtcttgaatccattttgagttaatttttgta

SEQ ID NO: 420840 - DNA, 551 bp, Homo sapiens
tttgtaatagtattagtattagtagtagtagtagtagtagtagtagtagtagtagtagtagtagcagcagcagcagcggcaacaactatcctacaaggtatgaaaaggtatcttgttttggtttctatttagattttccctaatgattagggcatttttatgtacttgttgaccatttgtgtatcatctttggagaaatatatattcaagacctttgcccattttttaattgggttgtttggtttttattgttgttgagttgtagcagttctttatatagtttagatattaacccttcattagatatgtgatttgcaaatattttctctcatttcataggttggtttttactgtattgattgtgtcctttgatatacacaagttttttgttttgatgtagtctaatgtatatgcttttggtgtcatattaaagwtgtcattaccaaatctaatgtcattaaacttctcccctatgactataatttcttctaagagttttatagttttaactcatgtttaggtcttgaatccattttgagttaatttttgta

SEQ ID NO: 420841 - DNA, 552 bp, Homo sapiens
tttttttttttttttttttttttttttgagatggagtctcgctctgtcccgtcccccaggctggaatgcaatggcacaactcggctcactgcaacytccgcctcccaggttcaagcgattctcctgcctcagcgtcctgagtagctgggattacaggcgcacacaaccacacccagctaattttttttgtattttttttagtagagatggtgttggccaggctggtctcgaactcttgaccttgtgatctgcccaactcggcctcccaaagtgctgggaatacaggcgtgagccactgtgcccagcttaaacttcaattctctaagcattatatcattcctgaagaatgctgaataaaggaggtttagaacaggatgcaaacagatatcatggttcatgataccagtgaacagaaacttgtgagtctgcttagcagatttgcaagttattagcttgtaaaacatgctaaatttattaaattaaaatgaatactctctgcaaccacaatgaggttttgcactctttctttaagttcttctaacgtaaatatat

SEQ ID NO: 420842 - DNA, 552 bp, Homo sapiens
tttttttttttttttttttttttttttgagatggagtctcgctctgtcccgtcccccaggctggaatgcaatggcacaactcggctcactgcaacttccgcctcccaggttcaagcgattctcctgcctcagcgtcctgagtagctgggattacaggcgcacacaaccacacccagctaattttttttgtattttttttagtagagatggtgttggccaggctggtctcgaactcttgaccttgtgatctgcccaactcggcctcccaaagtgctgggaatacaggcgtgagccactgtgcccagcttaaacttcaattctctaagcattatatcattcctgaagaatgctgaataaaggaggtttagaacaggatgcaaacagatatcatggttcatgataccagtgaacagaaacttgygagtctgcttagcagatttgcaagttattagcttgtaaaacatgctaaatttattaaattaaaatgaatactctctgcaaccacaatgaggttttgcactctttctttaagttcttctaacgtaaatatat

SEQ ID NO: 420843 - DNA, 498 bp, Homo sapiens
actttgtcaatcttcctggtactcaatatctttcctgaactgggagaatagcataaatacctggcaattcaatctcctaggcttagaggccttcatcatagaaaaaaggatttcctgaccttctgggcataattcattctcccatatctatgtctgtctctctagctgtctttcacacattgggcactccaacagataagttcgaatgagtcaaaacttgtgaagtaagtctcttttttttttttttttttttttttttttagagataggatctccctccatttctatgattgcactactgcctaggtggagtggagtggtgtgatcatagctcactgcagccttgaactcctgagttcaagaratcctttcacttcagcctcccaagcagctaggactacagttgtgggccaccatgcctggctaatttatatatatatattttttttgtaaagaggggaggtgggggttggaaggtgtcttgctttgttgtccagg

SEQ ID NO: 420844 - DNA, 565 bp, Homo sapiens
tatcttgcataaaatatcaacaacctggtctatcactgactagaaatgaccattagtaccataggtttgaccacagccatgttggacacctgaaaaggtatcctattgattttaacatawgaaaaaaatcacaaaattgaaattaatatgtttgatttaatgtttgtaaaatataacattttgtcagctagccaatagcaatgcaactcttatatggttacatatacattatcttccatgagagctgtgtgtacactttaatatggtccattcaacgtggtctgggggctttcacaagcaaaggaagacatacaaatggtcaataaacacatgaaaagatgcttagcttcactagcatcagcgaaatgcaagtgaaggccccaatgagatattattcacactcactaggagggttagaataaaaaagaaaataacaaatgttggtgaggatacagagaaattggagccttcataaagtgctggtaggattgtcatatggaacagtcactttggaaacagtctggcaagtcctcaaaaggctaaacatagagttactatgtgaccc

SEQ ID NO: 420845 - DNA, 565 bp, Homo sapiens
tatcttgcataaaatatcaacaacctggtctatcactgactagaaatgaccattagtaccataggtttgaccacagccatgttggacacctgaaaaggtatcctattgattttaacatatgaaaaaaatcacaaaattgaaattaatatgtttgatttaatgtttgtaaaatataacattttgtcagctagccaatagcaatgcaactcttatatggttacatatacattatcttccatgagagctgtgtgtacactttaatatggtccattcaacgtggtctgggggctttcacaagcaaaggaagacatacaaatggtcaataarcacatgaaaagatgcttagcttcactagcatcagcgaaatgcaagtgaaggccccaatgagatattattcacactcactaggagggttagaataaaaaagaaaataacaaatgttggtgaggatacagagaaattggagccttcataaagtgctggtaggattgtcatatggaacagtcactttggaaacagtctggcaagtcctcaaaaggctaaacatagagttactatgtgaccc

SEQ ID NO: 420846 - DNA, 595 bp, Homo sapiens
aaaggacttgagtgttgtgatataagctgattgtgctttaggggcaccctaggcccagtaacacggtggttcttgcagactcatagaggtactgcattgatgctttggaccagatccttgagaattccctgggttaccaggcacagactcttgttctcttcccttatttctcccaaacttacagtctttctcttgttctgagccacttagagctggagactgagtgacacaagcacccctgtggccaccaccactatgactgtactggggtcagacctgaagccagtgtagtgctgggtctcaccaaggctgctgtaatcactccctgtctattgcctgtgttttctcaaggccctgggctctacaatcagcaggtggcaaagcagccaggccttgtccttcccttcaggktgatgaagtccccattttctcaggtaggtccagtagtgctgtctgggagtcaaggactagagtaaaaaactgtagaagtctacccggtgatctatgatattgcagttgagctggaactcaaaccacaagacacagtttttcctcctcttccctcctctttccaaaggcacaggagccttgccct

SEQ ID NO: 420847 - DNA, 583 bp, Homo sapiens
tcatactctacatttgtcactaattggtcaagggctgcttcagaggaaagtaaatttscaggcacttctgactgtatttgagtacaggtaagtgtctaatattgtctgctacaaattatagctctagtttaaaatggagtcattttcctaagcaacattttataaaaagagccataaacattgaatttaactaactaaaaatgatagctctatatttagtaaacctttctaaagcgtgtttaaaccacatgtccaagtaaccacataaatgtgtctttcagaggatgcctgtcattgtgtgccatacaaagttctttctaattcctgctttatttcttctgtaataaatcagcgttcaccttcattaaggtcatggtattcataagacgttctctctgaggagaattttattttgcaggggaattaggacaacttagtaggttttgaaaaacagagatttctgtttggttgtcctattctcattgctgatttccctgcagaaaagaggcagctaagattgctcactggctcttcagattgccttggaaacagcctttccgtttccttgagcttccatcccatt

SEQ ID NO: 420848 - DNA, 590 bp, Homo sapiens
ttaaccatcttgctcacactgcagctcagttcaggaaaggaaacaaattaatttcttttccaactgccattagtaagacaaatggtgattctaagaaagtacaacgttatccaaaggaaattaactattgaaaagctcagatactagtaatggattcaaacagcgctgtgaaattcttctaacaccaagtcttggagtagctagagttcatgaatcaccaaaactatcgggatgtactgaactgtatgaaagccactgggggcaatgaagagctccagttaaaaaccttggtccagaaaactggtgttttaaactctgttgcaattcagagacatcatggagagaagagatgaactaataagcaggatacttttatgggagctcatgagtaaaaatacacgtcttacaatgggwaagttcacattagtcattttcattcaataatgtaagttggaaaaccaagggcctcagaaaacgaatcttgtttctggcagcagatgaaaacaaatgccccaaaatgtgcttgtccccatctgctgccagaagtgacaataatatgaccaagtatggtggccatttagtttggttca

SEQ ID NO: 420849 - DNA, 488 bp, Homo sapiens
ataccaagggtgttcaagggttttttggaacatctgaagtaattttatgtcctatatacttataaaaccatctgaacacctgacactgtttatgtctacttgttcataagacacgaatcttgaggggggcgtgtatctcactcttttccatagctcaagtgcctgacgctcaggtgtcatttattacatgaataaacacatgttttaatcaatccatctctaacccatatagaaagttagaatcctgaacaagtttccagtgaatmaacaacttcattcatggattgtcaatggttattgtcttccatgtcaaagagatgcccttccacagtagaataccttgttctttcctgaaattttttcttcttacttttaacttgcgcctgtttaaaactggcacatcaaatcaaactggatcatggaaggccattcctatcactttaactctatgttaaattcatttcctgactacaagattggtcactgca

SEQ ID NO: 420850 - DNA, 488 bp, Homo sapiens
acttacaatctagctaacttttgaaaacgtcagtaacaataaacattttcaataagacattgagacaatagcttttcagaacacaacttttgtctttaaaaaatcttctcccctcttctctgcagtttaaactcaactcaagaacaactatctgtaggacgctttcccagtgtgtacagagtcatctgccaccatgcccagactccagcacctgggaggctcctctttggatgatttattggagtggaaagaagtcaaaactctgtacaaacaaacctgagttagaatcctggttctgccaccctaagtctatgtgactttgagaaatcaatttctctcagcctcaactctctcacctgtaaaactggcaagataatgtttaccatacaaarttattaagagacaaactaacattttgacataaccagcacaaacatttttataacttcatgttccttcatgttgagatgtgtttcctcaagccactg

SEQ ID NO: 420851 - DNA, 568 bp, Homo sapiens
ccttctccaaaactgaggagaatgctttaacacacagtttcacaaactcctcttagaccaatcatagcttcttagcaagctgaggactcgtgggactttgtgctgtagcactcatttctacacattaggaggagacaactctagaacataccattcctcttttggtcatgatctggggtcaacctgagagagaccacttaataaatcttctcatgctttctttacatttgtaaaatattctcccccaagtatatctaaaacacaatgctatagacctattatcacattgtccagatatagaatattccagagyacaaacctgaaaatgttggctaaaacattttactactactccttagtttatgttggccactaagacaccatgtgattttagtgtatacaaagacaccaacacccacataaataatatcagtaatgggaactctcctggaaggtgaacacttttaatatctcatggcgcaccgtgccagacaacaaagtttcctccacctatatttggaccttctcaggatatgtaatattctcttggagtccccacagaagcaca

SEQ ID NO: 420852 - DNA, 572 bp, Homo sapiens
gtacagacagccatggaaagcattttgactctctgaagcaatatttactaggctggatgttaattagtctcttgttttgttttgttgtacaatcagcatttattcccttccctcctctgctctcccctgtatcacacaggggcaggatcgtagaactatacttctcagattctctcgcctgcagagggttgcgtgtgatttacattctgtcagcgggatgcattcgcataaggtttgaaaagaggaaaggaaacagaggacattttcttcttcctccagcagtggcaacagataaatgaactttgcacaaatgagtttttttgacagcctctgctttcccctgccattcagtcatcacaggmtgtgaaaaaaactgtgaagtcagcagcaattttctgcaggttcctgacccttaggtgacagcactctgactctggaccaccagagtgcggcaaaattgaaaattgatggctgatcccctgactttcactcttacaggctttgcaatggcttgtaagcaccaaaatccctgaatcaaattatataaaatttctgttttcctgactgaacca

SEQ ID NO: 420853 - DNA, 587 bp, Homo sapiens
gtcactctgtccattcaagttaaatgaaagctgtagtgcatagccatcaggaatggggaatatcacctctctctctccctgaagctcaccctgtttctaccataaaccatacaccctttggaaagatacacagttcaaggaatatatacatacatacacacatacacacacatacacatacacacacacacacgagtgtttcttactaactagattgaagcccttctactatgattacaagggttaaaccctaaaaccgattcaattgtttttcagatgagtctttataagacttgtcaaagactgatgatcagaagcaagtggatttccagagatgtgacacaagcagaatagcctgggggttctggagacagtgtgggctgtgagtgaggggtggctattcacttgacttctgtaaagaamctgacaacaatctggtaccctgagcactggtattttagggggtatgaggagacagataacacccttggaatggacaaaggtgggtccacaatgagcactggcaggatggagagtggcaaggctttctcaagcacctttgcatgtgtgatcagtagacggggctg

SEQ ID NO: 420854 - DNA, 646 bp, Homo sapiens
gggggctgtctcctgcaaagccacagacaggggtggaactgtccaagactataggaacccacctattacatcagggtgacctggatataaaacrtggagtcaaaggaggtaattttggagctttaaaatttgactgtcccactggatttcagacttgcatggggcctttagctccttcattttggccaatttctttcatttggaatgggtatgtttacccgatgcctgtaattctgttttatgtaggaagtcactaacttgcttttgattttacaggctcataggcagaagaaacttgccttgctttagatgagactttggactggacttctgagttaatgctgaaatgaattaagactttgggagactgatggcaaggcatgattagttttgggataagaggacatgagtttgggaggggcaggagcagaatcatacgatttggctatgtccccacccaaatcttatcctgaattgtagctcccataattcccacatgttgtggagggactcaatgagaggtaattgagttatgggggcaggttttttgcatgccgttctcatgatagtgaataagtctcaagagatctaatggttttataaagagcagttcccctgaacatgcactattgcctgctgccatgta

SEQ ID NO: 420855 - DNA, 646 bp, Homo sapiens
gggggctgtctcctgcaaagccacagacaggggtggaactgtccaagactataggaacccacctattacatcagggtgacctggatataaaacatggagtcaaaggaggtaattttggagctttaaaatttgactgtcccactggatttcagacttgcatggggcctttagctccttcattttggccaatttctttcatttggaatgggtatgtttacccgatgcctgtaattctgttttatgtaggaagtcactaacttgcttttgattttacaggctcataggcagaagaaacttgccttgctttagatgagactttggactggacttctgagttaatgctgaaatgaattaagactttgggagactgatggcaaggcatgattagttttgggataagaggacatgagtttgggaggggcaggagcagaatcatacgatttggctatgtccccacccaaatcttatcctgaattgtagctcccatmattcccacatgttgtggagggactcaatgagaggtaattgagttatgggggcaggttttttgcatgccgttctcatgatagtgaataagtctcaagagatctaatggttttataaagagcagttcccctgaacatgcactattgcctgctgccatgta

SEQ ID NO: 420856 - DNA, 432 bp, Homo sapiens
tcctttgttcataaaattggcttaagcatttgtgaaggcttgaggcgtcatttgcctcttgccagtatcaaatgaggtattggattgtgtccgaacaatctgcagtttctataaatacttgataagatctactttctctatttaaaatagaaaatcatttggactctgctagaagagaaaatgttctttttattcaagtaagaaacaagtatcttccctgcttattcagttttctacattctactacttttaacattaaaatgarctcatatcatgcataaggaccctgtggattccaacgtcatcttttacaaataaagacacagatctgcagagcttaaatgacttgtaggggtcacatagtgacctagatccaaagtttttgaccctcagtaaaaatataaaaatttctacacaatattgctctatcac

SEQ ID NO: 420857 - DNA, 602 bp, Homo sapiens
tcataggaatactaaggcagtaactaactgcatgggagataggaygaggcttcacaattgataggacagaaagcacgtcttgaagaaagagatggaagtttctagatagaaaaagcaaagagggtacataggagcccaccatattccagaagtagcaagtcattcagtggcatgaaactagataaggatgtcagggccaacagtgagatccagaattttggattttatctggctggcaatggggagaatttgttactttttaaacaagggagtgttagattagatttgaaattgtatgatagctctggtagtagtgaagacaatagacaggagaaggaagatattaagtagcaaagtcagttaagagatgagaatgagctattcattggatatatgctatatggcatgcactgtagtaggcccttttgcactatctcagtactctcacagtattacaagacagagaagaataaaatgtctctccaaaccatttgtgatcgcattcttagcttttctttggatccccatacaaaaagcacaggaagtagcattctgtaaatattttttggtttgacctgatttgcaagtattagtctatttct

SEQ ID NO: 420858 - DNA, 534 bp, Homo sapiens
ttgattcaatagctcaaagacatgatcaaagatgtggattgtttccatctctttgctctgccatcttttggcagccccttcatgaactcatgttggttgctgtcggtttagatagtaaattcaagcacaatacatgcaggtgaaaggggtctgtgcatttttttttttttttttttttttttttttttggtgaggaagcctttttttagaagtaacccatctaatttcctctcatatattgttggttgtgtttggatctcctacccatgcttaaacagatattgataagtatgcagttaccaagtatggttttgctgagtggctctcaaaaatagtcctcggaacagcagtattagtattaccctagaacttttcaraaatgcaagaattagaaactcagagagtaagttctagtcatcagtgttttcacaagccctccaggtaattctcatgtacacttaatttttttttaaacttttaagtatacattcaaggtagaaacaaagtgtaaatttgtgagatttattgacaatt

SEQ ID NO: 420859 - DNA, 613 bp, Homo sapiens
aagtgacaaacttacaatgttaagacagtcaaccgtgaatatggtatttttccaattattcagatcttcttgacacccttcgtcagggtagaaatttaaaaggcagagtaaaatttaaaaggtaggacgagcatggtgggcctaccatgggctgatgcccataatcccagcactttgggaggttgaggcaggcagatcacttgaggccaggagtttgagaccagcctggccaatatmgcaaaactttctctctactaaaaatacaaaaaattagctgggcatggtggtgcatgcctataatcccagctactcggaggtgtaggcacctccaccttctggttctgcttgaacccagaaggcagaatgagattgtgccactgcattgtagcctggggaacagagcaagactgtctcaaaaaaaaaatgaattgaaaaggcactacctaagtaaccaaaaaaaatgtgattaagaatacattcctataaaataatttttacttgtctaataaaataacaacactcattatctccaaggaatagtaatgtctgggcccataaataagttaggatgatcatccaacagccagttaaaagaaactgacggtgtggctga

SEQ ID NO: 420860 - DNA, 613 bp, Homo sapiens
aagtgacaaacttacaatgttaagacagtcaaccgtgaatatggtatttttccaattattcagatcttcttgacacccttcgtcagggtagaaatttaaaaggcagagtaaaatttaaaaggtaggacgagcatggtgggcctaccatgggctgatgcccataatcccagcactttgggaggttgaggcaggcagatcacttgaggccaggagtttgagaccagcctggccaatatagcaaaactttctctctactaaaaatacaaaaaattagctgggcatggtggtgcatgcctataatcccagctactcggaggtgkaggcacctccaccttctggttctgcttgaacccagaaggcagaatgagattgtgccactgcattgtagcctggggaacagagcaagactgtctcaaaaaaaaaatgaattgaaaaggcactacctaagtaaccaaaaaaaatgtgattaagaatacattcctataaaataatttttacttgtctaataaaataacaacactcattatctccaaggaatagtaatgtctgggcccataaataagttaggatgatcatccaacagccagttaaaagaaactgacggtgtggctga

SEQ ID NO: 420861 - DNA, 521 bp, Homo sapiens
gggagaagctattgtaaataaagctctgtgaagtgctgagccatactttcatttccctatactcatgaagtggggcacgtatccactgagccctttcggcgtgaggacagcgtgttttgcctgagctcactctagtaagcaaagaactgcttgtgtcctttgatctggtaggcaagtgctatagtggaaaacctagtgataagtaggcacagaataagttataaattttcccaaagatgtcattactgccttccacaaagtttgagggtctacatgaaaatcagacaagtccatctccatcttcaatcccttacaggtgaggaaagtgaggctcraaagataaggccatttgttacatagatgggaaataatggagctgggatttaaactccaattgttctggcttctaaccttaagccctttccatgcaacctttaatatcatcactactggccatagaaaacaactttaaactttgaaaacagctcttcctggccttgcccaaaagcaaagcagcttcc

SEQ ID NO: 420862 - DNA, 426 bp, Homo sapiens
gtgggtttcagttcttgctttttcgtgaataggattataggacaaaatcctaaaaattagatcccttgaactacttatctgtgaatacacagaaatggatacctattctttttatgaaatgaatataaccatttgtcttagattgggataaaggtaaatataagtgaaacatatggttttagcgtaaataatatactatagaaacaaaatatttgataccatagcttagcttcagtgttttgcaactgcgtaaagaaagtccagagaagtatttttttcttttcaaccagttgtagcaaygagaaaactttcaccaagtcattatctagtaggatccaggtagactactcttctttggttgtttaatgatttcaatgagggcatgtgcatgttgtgtgtgagtggaagcagtgtatagtttgaaaa

SEQ ID NO: 420863 - DNA, 635 bp, Homo sapiens
tgtgtgtcaaagtatgtgtcacattttattctatttctttatttggactccagcaaagacttcccagaacaagtgatgcttgagctggccttggaaggttgttcaagaattagatggatggggcttgagggggaattgcaggcagaggtaatatggtatgcaagaacaaggccttttgcaaatcttcagtttctgtattgatgaagttgagggagggcttgrgaatgagggaaggtaagcccagagaaaaggaggcatgggtgataaaggtcttgaatatgccctgctgagttgcctgaacttaatgaggaaaggagacattttaaatgtggaaatataaattgtcaccatcatatttgatttttagaagcattattcctattttaaaagaaaaaagtacatattactctgataatgctgggaagaagggtttgaacaataacatacatgagaaaaaataaagacctaaagaaactagggaagtgaaaatggagcagtatggtcagaagtagtaggttttttggtttgtttttctaagtagaattgagaggaagtaagtgcttattgaatttgggtaggagagtagatggaggcatataaaataaacagaaaagttttggacattagtgacaata

SEQ ID NO: 420864 - DNA, 333 bp, Homo sapiens
ctattgcatatgctttaaagggtctgtgaactacaaatgtatttgaccctacaatcttaactctgcgctcagaatcttaattctaaaaatattctacaaatatctgcacattaaatggttctacaaggtaattcactgaagaatgttttgtaataatagcaaagggttagaaaagaaggtctgtaatagctgactttatactatgaaaaatcatccaatrgaactctgtgcagctattttaaaaattcagaagctatgtgcatatttacaattcatcaagatgtagtaataagtggaaaaagaacggtgtagaataaagtgtatggcactctg

SEQ ID NO: 420865 - DNA, 532 bp, Homo sapiens
agtaccaaccccttgtgtatccatccatgtggttttatcagcatgtatacatctattcatttttcttttcatgcaaataataccctatataaacattgtttcataccttccttcgtcacttaaaaatcagacttggaaatctttctgtatcagyatgtataaagctacttctttttatagcagcttcataaagtcctattgtacagctgtacccaaattatttagtcattcccacactgtagaacatttaggttgtttcccaaagctacaataattatcttctcattagtttttttctttttttaacctactcttttgtgggctctttttgtaacttttattttaagttcaggggtacatgcacaggtttgttacacagggaaacttgtgttacagggttttgttctacatcttatttcatcaccaaggtcttaagccaagtacttattagttatttttcctgatcccctccctcctgccaccctccaccctccaatgggccccagtgtgtgttgttcccacctatgtgtcc

SEQ ID NO: 420866 - DNA, 604 bp, Homo sapiens
cagaaatttatatcatgtaaacctaatacattgagatattaaagcattaaaattctaacaaaaaataatgaaatatcagaaatattctgaaattaaaattgagtcatatatctatgtgtacatgcttgtgtatgtacatgaatgtgtgtgtgtgtatatatatatatacctgtaaatgagcaagtttgcatatttttatatttgtgtatatatatatacacatatatatrtatatatatatatacacatatatatatatatatacacacacacacattcagtgaaagtgtgtatatatatccaccatatatccatttggaaaaaaaatcttattgtggggtataaatacaaatgtgaatattttatagcttacagtctaaaagagtgtattttataatttataacatataacatactgaaacacaataaattatagtatactaaaattatatattaaatatctattagatactacggtattatatgttatacagaggtgattatttctatttatatttgtatatatacagaaaaatagactacttagtacaaatatacattcaacaatatttcatgaataagtgttctaaatggaaaccaaatt

SEQ ID NO: 420867 - DNA, 516 bp, Homo sapiens
attaagcacattcatgttgtacacgatcaccaccatccatcttcagaacattttcatcattccaaacaaaaactcggtaactattaaacaatgactccacactcctctctycccctatcacccagtaaccactattctactttctctatgaatgtgactattctaggtacctcatgtaagtggaaccctatagcatttgtcttttcatgtctggcttatttcacttagcataatgttttcaaggtgttcatccgggtcgtagcatatatcagaattttattcatttttaaggctgtgtagtattttattgtgcatttatacacattttgtttatctgttcatctgttgatagacatttgggttgttttcactttttggctactgtgattagtgctgctatgaacattggtgtacagataactacatgcgtcccttctattaattgtttaggatgtataccctaaagtagaattgctggatcatgtgatatttctgtttaattttttgaggaaccac

SEQ ID NO: 420868 - DNA, 572 bp, Homo sapiens
  misc_feature (1)...(572): n = A,T,C or G
tcttttcacatggactggggaggataaaatattactatccctgtgtgaggtccaagaatttttaacctgctacttaagattacagtcatgtcagtcatgtgccagataacacttcagtcaaggacagactgcatatatgatgtggtcccacagattataatactgtatttttactgtaacttttctatgtntaggtatgattagacacaaaaataccactgtgttacaattgtctcagtacagtaacatgttgtacaggtttatagcctagaagcaataggctataccataaagactaagtatgtagtagactataccatctaggtttgtgtaagtactstctctatgatgttaaaattgcctagtgacacatttctcggtacatatctccattgttaggcaatgcatgactgtagttctttctctggcttagggtatttttgttttcacacaattgcagaatgctgtcaagcaaaaacttgaggtctctttctacagatctctggtatactctctgttcagctcccttgtcttaggtgtcctgtcccaaataaacaaattctagctccctc

SEQ ID NO: 420869 - DNA, 331 bp, Homo sapiens
gcacgcacacactccacacaaaaygaatttttaaaaaatttattttcacagtcgctcctaccagctctgaaattcagaacccatatgactgatggcatattcagataatcgggtcccaggtctggaaaagcagccttttccccacgtttctttccccacctaggacctcctctgattcttcactgcatcttcgaaagaaaatgtattatttgcttgcctggaagacgctgcaattcaattgattttatatatacatatatataaagggaacagaaaacatagcctagataccggtcttgagcgtcaccgccccactcgcggttgtgagcaa

SEQ ID NO: 420870 - DNA, 331 bp, Homo sapiens
gcacgcacacactccacacaaaatgaatttttaaaaaatttattttcacagtcgctcctaccagctctgaaattcagaacccatatgactgatggcatattcagataatcgggtcccaggtctggaaaagcagccttttccccacgtttctttccccacctaggacctcctctgattcttcactgcatcttcgaaagaaaatgtattatttgcttgcctggaagacgctgcaattcaattgattttatatatacatatatataaagggaacagaaaacatagcctagataccggtcttgagcktcaccgccccactcgcggttgtgagcaa

SEQ ID NO: 420871 - DNA, 562 bp, Homo sapiens
aaaaagaagtaaatgtagatattcaaatccatgcagatgagtaaaacagggaaaaatgagaaaaatgtttcatgataataaaatattatgtcaggcacagctggtcacccctgcaatcccatcactttgggaggccgaggctggaggattgcttgatccaggagttctagatcagcctgggcaataaaaggaaaatctgtttctacaaaaaaattaaaatttatatttcatatattgatttaagctctactaaatgactattctttcaagtctaatagacagtgtatcttttagggctcagagtaaagataatttattraggacattttgaataggatgaattaaatgctttattggtaagtgatgcctttatctgagtgattccttctaggtaaatattatgggaccaatctttgtaaatgatctttgcatggaacaaaatattataaagttgaagtgatgaatttgtttccctcttaacaaaatatgtattcttgttaccccatttacaaacttggctcatggtaattcaggtaggaaaaagggaagtggcctactcagg

SEQ ID NO: 420872 - DNA, 562 bp, Homo sapiens
aaaaagaagtaaatgtagatattcaaatccatgcagatgagtaaaacagggaaaaatgagaaaaatgtttcatgataataaaatattatgtcaggcacagctggtcacccctgcaatcccatcactttgggaggccgaggctggaggattgcttgatccaggagttctagatcagcctgggcaataaaaggaaaatctgtttctacaaaaaaattaaaatttatatttcatatattgatttaagctctactaaatgactattctttcaagtctaatagacagtgtatcttttagggctcagagtaaagataatttattgaggacattttgaataggatkaattaaatgctttattggtaagtgatgcctttatctgagtgattccttctaggtaaatattatgggaccaatctttgtaaatgatctttgcatggaacaaaatattataaagttgaagtgatgaatttgtttccctcttaacaaaatatgtattcttgttaccccatttacaaacttggctcatggtaattcaggtaggaaaaagggaagtggcctactcagg

SEQ ID NO: 420873 - DNA, 562 bp, Homo sapiens
aaaaagaagtaaatgtagatattcaaatccatgcagatgagtaaaacagggaaaaatgagaaaaatgtttcatgataataaaatattatgtcaggcacagctggtcacccctgcaatcccatcactttgggaggccgaggctggaggattgcttgatccaggagttctagatcagcctgggcaataaaaggaaaatctgtttctacaaaaaaattaaaatttatatttcatatattgatttaagctctactaaatgactattctttcaagtctaatagacagtgtatcttttagggctcagagtaaagataatttattgaggacattttgaataggatgaattaaatgctttattggtaagtgatgcctttatctgagtgattccttctaggtaaatattatgggaccaatctttgtaaaygatctttgcatggaacaaaatattataaagttgaagtgatgaatttgtttccctcttaacaaaatatgtattcttgttaccccatttacaaacttggctcatggtaattcaggtaggaaaaagggaagtggcctactcagg

SEQ ID NO: 420874 - DNA, 558 bp, Homo sapiens
ctagtgaccatgtttccaaaatttagaaggtcaacggcagtcttactccagtgtccacactaacacagctggaagtccttgagtctctaaacactctgcacatttccccaaaccttatataatgtcagctgtggctttgttccaggaacttatctctcacaaatacagttctctcttgctggcaaacagaacgtttagatttttggcatccaatatttagttcaatttactgtaagttcayaagtttgcaatcctttcattggctcaactcttgtttatgtttagttatgagtttgtacctgtgagtgactgacagtgacaaagctgtgagattatcaaattcaatcttttcaattcctgggtcaattactaatatccattttttatttgtgtagaagtaaactcaaaaatgtcaaaatgcaagtaagttttgtgataaattttatgaacaatggatgtgcattaaacaaagaaaaactccttttgaagctctttgtgcagcatacaattgtttagctaatattgaaaatggtgaaaacttggatgtaagccagcaaa

SEQ ID NO: 420875 - DNA, 544 bp, Homo sapiens
gtaggttttaagaatcacatcattctttatatgagattattttaatccttgcttgctttttgtcctcttatgtatattgatattgaaagcctgcctgcctgttttcagtgctaaaatatttatgaaattgctttcaatgacatgattagactttacatattccatagtcaaattaaggttgacattaaaactgagaagctttggagaaacagttatagttttaattaatcgtcagcatttcaactggtttacctgatagccttatggatttctaaagacattttaaaaacatatctgtttctctatgagtaagtggcatatatctgtgagttggctacctggaattacatataagatccatgtcagatgtgactaaaggttttgactcttgtgttaagtttgattaactgattttggaggrgatttttggatcgctatttaaaacaattatgaagccaggttcagcctatataagaactagttctgggatcaattaatgatgtctggcgtaggcatggggtcaaataataatacttatagatta

SEQ ID NO: 420876 - DNA, 627 bp, Homo sapiens
gattatccagccctaaatgtctatagtactaaggttaagaaatcctgctaaatagcaacaaatcacaaaatgcccttagtgagaatcacctgctattataagagtcagacatataagcataaaattttattatacctgatcattagtacagactgagtatcccttatccaaaatacttgagaccagacgtgtttcagattttgaactttggaatattcgcattataattacctgatcagcatccctaatctgaaaatccgatttctgaaatgctccaacaagcatttcctttgagcgttatgttggtgctcaaraagttttggactttggtgcattttggattttcagattagggacactcaacctgtattttcattttatacaatttcaacaccactacatatttttctcttaaaattctacctttaattcatctataaaatatccaaacagatggtctggttcactgcatatccttagaatccaacataaaagggccttgacatatattgaataaaacttaaaaaattaaaatgtcccatagaaccaaatttttagaaaaacaaaatttccaacagcctgatcataagcatacctcttcttggctaccttaagtactttttttaa

SEQ ID NO: 420877 - DNA, 591 bp, Homo sapiens
atcgaccccatcctgctcgcaataccaggagaaaagcctacctgtgagtcagtgcctcctggaatccctagaatcatggcaccatgcagtctgtgtttgcatgcatttttgataaattttaactttttataatagatttgtgtatattttatggtagtaaattataaaacagactagtactggaacaggaattaaaagaaattaaagactktataagcaaaaactcagttgtatgtaagaaaacccaattccccgaggaagagaaagagctggagtcctttaaaattaactgcctgtttttctctctgtggctagtgagccttatctcaccccttcccaggcattgtgaagactctcgagctgtgcagcttcaaggtcactagacagataatctcaagtcgtaaaacatgttgttccttgaaaagtaagaaataatgtaatgcacgtcttaattaaataactgtctttgtttctcacttctgtaatatgcttccccctgcacagatctccccccgccccacgaaatgcttaaaaggtagcttgactctttgttcagggctcagtcctttggatgttaatccaactgggttg

SEQ ID NO: 420878 - DNA, 591 bp, Homo sapiens
atcgaccccatcctgctcgcaataccaggagaaaagcctacctgtgagtcagtgcctcctggaatccctagaatcatggcaccatgcagtctgtgtttgcatgcatttttgataaattttaactttttataatagatttgtgtatattttatggtagtaaattataaaacagactagtactggaacaggaattaaaagaaattaaagactgtataagcaaaaactcagttgtatgtaagaaaacccaattccccgaggaagagaaagagctggagtcctttaaaattaactgcctgtttttctctctgtgrctagtgagccttatctcaccccttcccaggcattgtgaagactctcgagctgtgcagcttcaaggtcactagacagataatctcaagtcgtaaaacatgttgttccttgaaaagtaagaaataatgtaatgcacgtcttaattaaataactgtctttgtttctcacttctgtaatatgcttccccctgcacagatctccccccgccccacgaaatgcttaaaaggtagcttgactctttgttcagggctcagtcctttggatgttaatccaactgggttg

SEQ ID NO: 420879 - DNA, 639 bp, Homo sapiens
ttttgaacaatgagtgttttaattttagctaacgaaatattctaaatacataaacatgagtggtgagataaatcttcaaacttacaaaacacatcagcatggcctataattgtgcagtccaatgtaggagtcaattgtcacatgtggctatttacatttaaattaaaaagaaattaaagcaaaaatttagtttttcagtcacatcagccacatttcaagtgctcaatatccctatgtagctrgtagacagttccatcattgaagaaagttctactggacaataactcaaagagaaaaagccacaacggtaacaatgacagggaaaacaccttgttaaatataatttgaataacatataaacatatgtatggaaaaaacaattttgcaaagaagctgaggattcgatataaatggaatcttttaaaagcaaggtacaaattccaattatggtcagaaacaattgttcaagagcaactaccatggttcctgaaatgtgaattttcctaaatactcaaatgaaaatgattgtgttctacatacacaccattctgtgtcttatttcctaatcagagtgaaagcactttcactaaaattaaccacacactttaagctgggtaaactgaccatcaagaaaattct

SEQ ID NO: 420880 - DNA, 597 bp, Homo sapiens
gcttcattcaagcatctgcagaaactttgatccagttacaaaacagacatgtattaaatttgtctttaataagtgacaaggttgggttcgaatctttgggatcatttaacaattcttgtctcctctttaaaagaaatgaaaagctattactccaaccaccacaagatttagtagtgagctacacatctgccgtggaaaataaagagcagctgtacttgattctctgtgtggtttataaacatttgtctgcagaaagatatttcagatgcagtttaatatgaaaataagcccscgttttcccctcacacttaagaacagcacccctcaactctccacattcatttgccaccccactttaacaaaagcaaccacagcaactaaacttggattgatcaaaaaaaaatgtccattttgttatttaacatttttaaccctctgtaaaagtgtttttattgccaaggtatattccattacttcagatgagttatttgaaaattatagatgactgaggaaagtgcattatttaactcattttatgggtaaaaatttattattctttacatttcaagccttaaaggaaaataagtccttgctagt

SEQ ID NO: 420881 - DNA, 494 bp, Homo sapiens
aagaactctagaacttactaaagggaagccagtcacagaccaaatagccctgcaggtctcagagcagctgtgctgtccccagggctctgttcaattccatgcgatcctgaagaagatattcaaaactacctgctactactcgagaagactaaaagataacctctgtatcactctttcctaccttccagaaccaaagaggggttaagagccacaacatccccagagaaataaaaaaagggggaaggggaggcgagtttccttagggagtttgaccscacacactctgagattgacatagctctaagaaatgcgttctcccattctaccctcgttccgttctttcagtgaccttctgtccctactgcctcagggaaggcaagagaaaagccaccgcctcaccaccacccccaacccccaccaccggagaaggtgcctttctcagttgagagccgcagagggagggaaaaaaaaggttgctcctccccaacccaccc

SEQ ID NO: 420882 - DNA, 518 bp, Homo sapiens
agctgttttcttgctgccattaaaaaataatgaaaggaaggaagacaaggagaaaaaaaattaaggagatttgaaaacaaatgtcatagggtgttaggccattatgtggttcctaaaatatggctattctataatctaaataacttacttcattgtccaaactaactgctttgataccatctattcattcttaacacagtcagtatcaaaaattaacattcccacttaattgagctctgaaagacaactccacataatttaaaacttcttgaggactkcaatcttgataacctacagaaaatgacactgaagaagctatgatatctaaatgacatttagggttcacttgcaagttgtttaaggtatactccttttaattttaggatttttctttacaagaattttttggtaattttcgttaattacattttcattcctagagagcagattatatactcaatgaagggagggaccactgaatcctcaagcagctaacataatacaaggaacatggtagg

SEQ ID NO: 420883 - DNA, 219 bp, Homo sapiens
acacacttagttgtgctgactgaggtcctgcttgccctctccgtttgtttgcttctttcacatcattatcrtgagcgatcaatagctgttcaatacactgcactaagaaatcccaagagtaagcagtaagacgatgcagtcttgtaggccacgttggagaaagacgaagtataatcctcgcagaagccacatacgcagcagctactaaaggtgcatact

SEQ ID NO: 420884 - DNA, 219 bp, Homo sapiens
acacacttagttgtgctgactgaggtcctgcttgccctctccgtttgtttgcttctttcacatcattatcatgagcgatcaatagctgytcaatacactgcactaagaaatcccaagagtaagcagtaagacgatgcagtcttgtaggccacgttggagaaagacgaagtataatcctcgcagaagccacatacgcagcagctactaaaggtgcatact

SEQ ID NO: 420885 - DNA, 553 bp, Homo sapiens
agttaactggcccaacctattcctttaattcagcccatcccttggtttcccataagggataattttagttaatcaaatatttataggcttatggctctgaaggctgtgagacccctgatttcccacttcacacctcaatatttctgtgtgtgtgtctttaattcctctagcgctgctgggttagggtgtgtstctttaattcctctagcgccgctgggttagggtctccctgactgagctggcacccaacgtggggctcgaatccaggttgaagggttgccagagtgacagttggagaatgtggaaatagctggaggacacccgagtactcttaaagcaatccccatggtgagtaagaaggggagctcagaagtgtcagggtaacaatgggacaagtgtggggtctggttcgttccgtgttggaactttttcacactgataatgaggaggaaggagagtatagtgaagtaacggaagaggttacagaacatgtttatttaccagctaaagctaaagcagcaaaggaaggagaggttcatctctacccttttgc

SEQ ID NO: 420886 - DNA, 598 bp, Homo sapiens
cattttataaaaatggataagtgggagttggccagcaaagatcaaagtgcagcaaagaaacaaaaagtgataatactgggaatgaaatttgatggtgacataaatggagttataaaagtagcagctgaccgtggaaataytggtactgcggctgataccttagacacccaatcagagaattagtgaaggcaaacttatcaacagaaatgaaggatttaaaaaaagaattaaggtgtcccagaggaagtggccccagtggtaaacaactttgcattaaaggaactctcagagatatttcccaagattgaaagcacaaagaatagaacattggaagctgattcaatcttactcagcagtatgacagttcaccaaaatgttcactctgttgttcacatagttgtacaaacaggagaaggcaagcactgctaaaactactcttgatacatatttcacaaagaaagattttagttcccaatatttcaattacttaaaatttcagtgtatgaaatattttcttatttttaaatttttctatacatttataattgacagtaagtttttaaagttctgacttttaaagttcatgaaacaatcataa

SEQ ID NO: 420887 - DNA, 579 bp, Homo sapiens
aatattcccatggaagaaacctgcacatgtaccccctagaatctactaataaaataaaataaatgtttactgatattatattaagtcaggttctcaaatattagcatacaccagaatcccctggagagcttgttgaaacacagattcttgggccccatctccagagtttctgattcaatagaattgggaaagrgtctgagaatctgcatttctaaccagttccacattgatgccaatgctgctagtccagagaccaagtttgaaaaccactagattaggtgccaggaactctgacatctcaggaaaagcccagcaaggggggaaatcattcctgttttacagaaagaatgtatgtcgagcaaaagggacaaaatggtttgccgaagtggccaccactaagtgacagagctggggatttaaattcctcttttctgacagcaactccaggctctctgtctccatctggcttccttcccatttgaaggagaagcatgccaggaatggttgtgctcttaacttccgaagaagtccacatattccaggtctctacattgatttaatccattcttctcatagtct

SEQ ID NO: 420888 - DNA, 616 bp, Homo sapiens
caccaggtggagttaactgaatcttggaggctgttttcctgatgcttcagcatccattctctctcctgccaccctgtgaagaggtgccttccgacatgattgtaagtttcatttttatatacaaagcatgtcagagcactgacttttaggagttcataatattgatttagctctaggtcaattagacaatgtcttccaaaaccatttcttttttcccacaaagagcaagtagttggtaagtttcctaggtccttacacgttctataatattttgcttctaccctcaacataaataaaaacttagccaagtttaaaatctgtggatctaaacatcttaggcctccccagccaygcagaactgtgagtcaattaaacctcttttctttataaattacccagtctcaggtatgtctttatagcaccatgagaacaaactaatacacccactttgctctgtcatacccctgggcagcccatttggctctgtactgcatatccttgctacccaggaacccaggacagctcaggagagccaaatctcagggtgtttccctgtctgatactctgcaaccagattcatgtgactgcaccccaagatggtgctggggaaacatga

SEQ ID NO: 420889 - DNA, 586 bp, Homo sapiens
tctcggtttggtatctctgttcaattgaagctggctttccgctggcagctcttgtttggtcctctcctgatttcaggacgttctgttaactctcttcttcagccaattcccaagtgtcatccatcaacagtttgaactcaggcaggcatgtgaagctagcacccagcaaagtggtttggaaagtgatgatgttaggcagagtgtgggtaactttcaaaccaaaccagctgaattcagtcaagcaaccaagcagtttgtaactggttggttgtggtccaactgtaggaagagttgatatctttcaaagccatctgtgtatatagacacagtgttactttccataagctgacatccttatcatcattcctcttaatcagcacattaatacttcttaccctttaggtttttttcatgcttgatggtatatttcattagggaactgatttattcaagacacaatattcctctggtaaacctgatttcatctataaaasaggttctttgaacaagatagaattttacaagcacaagcaatttcagttgcaatgtccttctaagtctgggaactggaaatataatttgcagt

SEQ ID NO: 420890 - DNA, 609 bp, Homo sapiens
tccaactgtaggaagagttgatatctttcaaagccatctgtgtatatagacacagtgttactttccataagctgacatccttatcatcattcctcttaatcagcacattaatacttcttaccctttaggtttttttcatgcttgatggtatatttcattagggaactgatttattcaagacacaatattcctctggtaaacctgatttcatctataaaagaggttctttgarcaagatagaattttacaagcacaagcaatttcagttgcaatgtccttctaagtctgggaactggaaatataatttgcagtgagctccatcttcttcaatttgtcctcctccttttcttcctcctctctctttcattttccttcaggctctcagcacatcacattgttaatctagattccagaggctaagcattgctaggaatggggaaagaacatgaatcacctctttccctcctttttctgctccaattttaaatatgtgaatcataactctaggaaaatatgctgggcaaaaaaaggaaatatgtagggaaagaggggggaaacacacacgtggtccaatttccagccagcttctgcaaggcagccaacagacag

SEQ ID NO: 420891 - DNA, 548 bp, Homo sapiens
aaataattataattaatgcaatgttagacatgtccattcacttatccccttcctgtcttaatgacgactgactcctaaacctttttaacctcagttcctttcctaggagccactttattttgtcacttgccagcyagacattgcaactctgtatctcacaataccttaaacattattctatcctaaatatgactcattacctcctatactgagcagctcttcctgaacctcctcctgactttccagttttgaagtggtagcactcatctcttagtcactcagcctctaactggttaacaagtaatctttgattcctgtctccctcatatctgggtagtcatcgaggcctcttgattctgcctgaacttttcactcacccttcctctttctcctctccccctatttcgcttctttctgttgcccccagcctagatcaggccagcatttctaattaacaagctggattattattattattttttttacctctcatctctctgctatgctgccagccagcctgcctgcctcactggccttacatcctagta

SEQ ID NO: 420892 - DNA, 533 bp, Homo sapiens
gctcttaaaaccagcattctaattacccaagtcctaatcccaataattaaaatggaaacatttaaaagttatgtaaagacttttgaatctacagttattgmcttgcatgagactgattttttaaaaaggcttaacaagctctccttaggcatttgccacaattattttgccttgcaccaaaaaagcaaaaaaaatcaaattgtgaattattttgatggcatcttaaatatcatatagagtacccagacattgtacaaatcatctactttcattgagaataaagttattcatcccttggaaccatagaaacacttaagagtttattttatagatactgagattagggctggcacaatattatttttttaatttgcataccttccattttacagcatagaaactgatataaaatatgacttgctcatggtcagcataagtgagttggaaggttaaaagctcccaggatgaaagaacatactgtcttcagaatctttaaattcagagtatccactgaggacttagaatataaaatg

SEQ ID NO: 420893 - DNA, 533 bp, Homo sapiens
gctcttaaaaccagcattctaattacccaagtcctaatcccaataattaaaatggaaacatttaaaagttatgtaaagacttttgaatctacagttattgccttgcatgagactgattttttaaaaaggcttaacaagctctccttaggcatttgccacaattattttgccttgcaccaaaaaagcaaaaaaaatcaaattgtgaattattttgatggcatcttaaatatcatatagagtacccagacattgtacaaatcatctactttcattgagaataaagttattcatcccttggaaccatagmaacacttaagagtttattttatagatactgagattagggctggcacaatattatttttttaatttgcataccttccattttacagcatagaaactgatataaaatatgacttgctcatggtcagcataagtgagttggaaggttaaaagctcccaggatgaaagaacatactgtcttcagaatctttaaattcagagtatccactgaggacttagaatataaaatg

SEQ ID NO: 420894 - DNA, 589 bp, Homo sapiens
aatccacagatttctccacctctgggtcctgcattattttgggataaaaatacctattgaacagattaacatgcagtcaacagagagggtatttgaagaaactgagatcatgtgatgtagcatttacaggtaatgagtgaagaatccagagaggagaatgttgtgcctctacagcctccccagagttacagccggagagctgaagaggaaggggaagagctaggagatgctttgtcatcagcttagactccayactggcccattacaagtgacacagaatttgagtcttttccagacaggtggatatatttccttgctcagaagatctgttactgaacattatcatttagaatttatttgactataaatgtcctcacctagaaatgtcttcctttagcaaagggtagattgagcaatggacaagcaagttggaatttcctgcctggatcattttgtgggtggggtggaagtcatggcccatttatgtatttgtaatctagcactggtcttaagcactgtgggaggaaagtattcttcgatgtattggcttcataataaaactagaaagggaatctttggacttaaaaag

SEQ ID NO: 420895 - DNA, 589 bp, Homo sapiens
aatccacagatttctccacctctgggtcctgcattattttgggataaaaatacctattgaacagattaacatgcagtcaacagagagggtatttgaagaaactgagatcatgtgatgtagcatttacaggtaatgagtgaagaatccagagaggagaatgttgtgcctctacagcctccccagagttacagccggagagctgaagaggaaggggaagagctaggagatgctttgtcatcagcttagactccatactggcccattacaagtgacacagaatttgagtcttttccagacaggtggatatatttccttgctcagaagatctgttactgaacattatcatttagaatttatttgactataaatgtcctcacctagaaatgtcttcctttagcaaagggtagattgagcaatggacaagcaagttggaatttcctgcctggatcattttgygggtggggtggaagtcatggcccatttatgtatttgtaatctagcactggtcttaagcactgtgggaggaaagtattcttcgatgtattggcttcataataaaactagaaagggaatctttggacttaaaaag

SEQ ID NO: 420896 - DNA, 566 bp, Homo sapiens
ttttgtcatccacaattgttatactttgattcttttcaaaaggtgcttttaaaatcaactataagactctgtcgggtgctgttaaatgcaggttcccccaaaatttggaaataatgtcattgaaataaagaaaaaaactttccaggactctcatggagagcccaatataaagtaaaacagaagttaattgcatgaactgacttaatagaagactacgataatcttgttatgatgttttgcttaaaacattgctaattatttttgttttgtatttcagagtcaagaaaacatattttcttttgagccatttacaacatttaatagttgagtaaagtatactaccgtgagaaaaaatagaacatatctatatgtctctacatgatttctccagaattttgaaaaaattgtgagtattcttagtttatggcaatatagttatttgcrtaagttcaataagaatctgttttcttttgtaacacaacagaattggagacactggttattttaccaagactttgaatcaaatggcatgttttcagactgctttaagaaattgaagttgacct

SEQ ID NO: 420897 - DNA, 591 bp, Homo sapiens
gttgtcatctctctccttatatcacccatgtgtactttcactttgtctcttcatttcattagaacctatattaaccatagttattttaaattccctgcccgataattcccccttattccccatcctcttcctgtttacagcattttgtttgtaactttagtcccttaaacmttatttatcatactccccctcccttagatgagataaaaaaggtggagggaactacagttccgagggattacctatccccagctgttataaaggttcagaattatccattggcaaagtattttctcctaaagaatagacatttttacagagaaggctctggatatgcctattccccaatgcactgagcatcttcattcctacctccacacaaggaagagagaattcttcagagatcctaacaaagaaaacctggtgaggtttctagaggaaaggatgaaaatgtgggaggtcttcctaagactacagcctccaagagttttctcatttttgtgctagctcacactcaacctcaagtaaatcaaaattagtatttaaatgttcccagcagttatggcttcaatggctgttctaaataaagta

SEQ ID NO: 420898 - DNA, 624 bp, Homo sapiens
ggtgttacactaatttacattcccaacaagagtgtacaagggttccctttcctacacatcctcaccagtatttgttattgcctgtctttggggtataagctattttaaccatggtgagatgatatctcattgtagttttgagttgcatttatttctctgatgataaatgatgttaaacacctaatcatatttctgtttgccatttgtatatcttcttttcagaaatgtctattcaaatatttgccmatttttagttggattattagattttttttcttacagagctgtttcagctccttatgtattttggtaattaaccccttgttcgatgggtagtttgcaaatattttcttccattctgtgagaataatccatgtgctgaagaaaacgtgtattctgcaagtactggatagaatattctgtaaatatctgttagatctgtttgttctataatgcagattaagtccaatatttctttgttgattttgtgtcaggaagattttttcaatgctgaaagttagatgttaaagactattggagcatatatattttaaattttttatatattctagctttatcagaccttacttgtttgtttcttcttacagtttttgtcttaaaatc

SEQ ID NO: 420899 - DNA, 572 bp, Homo sapiens
ttcacttccatcattcacaacacataatacatatacatcatacagacgaagaaaaggagaccctggaaattggaatatattttctttgtttgcacatatagaaaacttgggggctagtcctaattctctctttttctagccagcattgctttatccacacaattcagtcctctcagataatgagagatcaacatgaagaaaattggaagaaagtaacaaaacatgacatagatttggaatgtatgtgttatctaktaacaaaataatgctataagacaaccataatgctcagtaacacacaataataaacattattcaaatctataggtgggttacttatgccggacttagctggcctgattttctgatctgactgggcaccctcaggcatctgtggtctgtttctgaggaaagacggctattggctgaggcactcagcacttctcatagtctattatcttcaaggtagcttgggcttgggctcacagaatggtaggaatccaagagagagagagagcagaggcattcacatttcttgaggcttaggcttatccctgctaccgtatcacctc

SEQ ID NO: 420900 - DNA, 572 bp, Homo sapiens
ttcacttccatcattcacaacacataatacatatacatcatacagacgaagaaaaggagaccctggaaattggaatatattttctttgtttgcacatatagaaaacttgggggctagtcctaattctctctttttctagccagcattgctttatccacacaattcagtcctctcagataatgagagatcaacatgaagaaaattggaagaaagtaacaaaacatgacatagatttggaatgtatgtgttatctagtaacaaaataatgctataagacaaccataatgctcagtaacacacaataataaacattattcaaatctataggtgggttacttatgccggacttagctggccwgattttctgatctgactgggcaccctcaggcatctgtggtctgtttctgaggaaagacggctattggctgaggcactcagcacttctcatagtctattatcttcaaggtagcttgggcttgggctcacagaatggtaggaatccaagagagagagagagcagaggcattcacatttcttgaggcttaggcttatccctgctaccgtatcacctc

SEQ ID NO: 420901 - DNA, 671 bp, Homo sapiens
ccatcaaacacctaatttactcatcaccaaactctgaattgycaggatgcgttataaatggaaaaagctccaacgtgggaagagttgataggtgaaggaaactgcaggcttgggatttgaactaatgctctctccatccctatttcagtaagaaaaggcagtgtcttgccaaagaaaagtcacagtaaaagggaaaatgaaaccgctatgtttttgttatattctaaatgatgtcatgacctagaaaatgttatcctttcataaataccattgtcaaatatcaaaatgttagtggtataatagtagaaattaaaaatctagttagatcaagatactaatttagtagtgaggtcccacttcctacttcagatttggcttcaattcaaaagaagtcagaaaagaatatttttagtgctgttgtaatagcattacagttctctatttttgttttgcctctgtttcaaaaattatatctatgcaatttattttataaataacaaaaatggccataaattttaccctcttatgcaaacttacttttgcaatgtaactttttgtatctcctccaacttgcaattcttccatcaagaagtagaatctatcttccaccctttgatttgtggcttatccatatgacttgctttgaccaatggaatattaacaagtgtgat

SEQ ID NO: 420902 - DNA, 671 bp, Homo sapiens
ccatcaaacacctaatttactcatcaccaaactctgaattgtcaggatgcgttataaatggaaaaagctccaacgtgggaagagttgataggtgaaggaaactgcaggcttgggatttgaactaatgctctctccatccctatttcagtaagaaaaggcagtgtcttgccaaagaaaagtcacagtaaaagggaaaatgaaaccgctatgtttttgttayattctaaatgatgtcatgacctagaaaatgttatcctttcataaataccattgtcaaatatcaaaatgttagtggtataatagtagaaattaaaaatctagttagatcaagatactaatttagtagtgaggtcccacttcctacttcagatttggcttcaattcaaaagaagtcagaaaagaatatttttagtgctgttgtaatagcattacagttctctatttttgttttgcctctgtttcaaaaattatatctatgcaatttattttataaataacaaaaatggccataaattttaccctcttatgcaaacttacttttgcaatgtaactttttgtatctcctccaacttgcaattcttccatcaagaagtagaatctatcttccaccctttgatttgtggcttatccatatgacttgctttgaccaatggaatattaacaagtgtgat

SEQ ID NO: 420903 - DNA, 418 bp, Homo sapiens
ttcccagcttccactctctcttatgtttctcaccccaaacctttcaatctattttccccctttcaatctattttccccctgcttacctatgtccatctttatgagaaatgaagtatgttattttcaaacccaaaagtatccatccttgcaggcacatgcaattaaagtggggtaggygcattcctatcatgactttccagactttcagctgtaagatggggatgcatttatactgttcagagaatctcactgtgctgagaacctatattcttctcttgggaatcaaatcacttcccttcctttttcctcactaacctcaattcccagttactcagtgtttattgatctcagctagatgtagatagaaaagcaaagttcaggtcataggtctctgctagagagcttttgcagttttgaa

SEQ ID NO: 420904 - DNA, 418 bp, Homo sapiens
ttcccagcttccactctctcttatgtttctcaccccaaacctttcaatctattttccccctttcaatctattttccccctgcttacctatgtccatctttatgagaaatgaagtatgttattttcaaacccaaaagtatccatccttgcaggcacatgcaattaaagtggggtaggcgcattcctatcatgactttccagactttcagctgtaagatggggatgcatttatactgttcagagaatctcactgtgctgagaacctatattcttctcttgggaatcaaatcacttcccttcctttttcctcactaacctcaattcccagttactcagtgtttattgatctcagctagatgtagayagaaaagcaaagttcaggtcataggtctctgctagagagcttttgcagttttgaa

SEQ ID NO: 420905 - DNA, 575 bp, Homo sapiens
aactctcatgtcttgcaaaatggtcaatctctatcaaggaaaattccctttgatctataatctcacttttagaaatccaccctgacaataggccttccagaatacaaaacaacatattatgatgaattgttataattttgtgttgcctcggcattcattttgaatacaagttaaactttctgataccagaagcggggcttagtcatttttgacacaatttccagttctacaccacacttacatgactcaaccyagccaaaaaacttagatccatctctcccgcttcttttaaaaggacagtcaggctttgcgtgcggaatgtaaagtgacccacaccatattcacttacatataccgctagttgccatgtgctcttctccctctctgtctgactcttcattcctgcctgcctgtgagctggggacagaggactgccctcttgactcattgtgcctccctgcccaggatctgtaagtgaaaatctttgaacttgtttcttattgtggtagtatattaaatttgcgtcttccatctgaaaaaccaggggcttccccaggctgggttttttcctggaa

SEQ ID NO: 420906 - DNA, 575 bp, Homo sapiens
aactctcatgtcttgcaaaatggtcaatctctatcaaggaaaattccctttgatctataatctcacttttagaaatccaccctgacaataggccttccagaatacaaaacaacatattatgatgaattgttataattttgtgttgcctcggcattcattttgaatacaagttaaactttctgataccagaagcggggcttagtcatttttgacacaatttccagttctacaccacacttacatgactcaacctagccaaaaaacttagatccatctctcccgcttcttttaaaaggacagtcaggctttgcgtgcggaatgtaaagtgacccacaccatattcacttacatatacckctagttgccatgtgctcttctccctctctgtctgactcttcattcctgcctgcctgtgagctggggacagaggactgccctcttgactcattgtgcctccctgcccaggatctgtaagtgaaaatctttgaacttgtttcttattgtggtagtatattaaatttgcgtcttccatctgaaaaaccaggggcttccccaggctgggttttttcctggaa

SEQ ID NO: 420907 - DNA, 584 bp, Homo sapiens
aagtagaacggagtatgttagaggctgggaataatgggaggaatgaaggaatagagaaagatttgttaaggatacagggttataagctagatagcggtaatacattctagtgttccataccactgtaggwtgattatagttagctatattacgtaatttcaaatagctagaaggaagatattcaatgttccaaacacaaataaatgatacatgtttaagatgatggatatgctaattaccctgatctaatcactttacattatatgtattgaaagatcactatgtaccccatgtaaaattagtatttgtcaattataaaagtaaaataaaaaagaaagaaggcaagcatgaaggaaaaagtaaaaaaaaaaaaagttgtgatatatatattttttagttctattgatgaatgcagtatttttaagcattgctccaaagttactactagatttataactttacttcaaagataagatgaataatattgatttcattcacaggccttctctgtctctgccctactcaagagggccttatctcaactctacataaatctatgaaactggagaaatgccagttcttcc

SEQ ID NO: 420908 - DNA, 604 bp, Homo sapiens
tacataaatctatgaaactggagaaatgccagttcttccactctatgagctttccatacttctctttcatatttctcctgcctgctatgtcagtaaattttatgtttatttttataaactaatttagaacataaatgactcaaactattatatcactaggcaaatccacattaaaatataaaagctcctagaaaaacaaaggtccagaatggttttccaatttacattgagtaagtggggaagatacctgtagagaaaaataatctttgtcaatagaccctgaagtcacaccagaggtgacagaaggtgctgcatgataagcctaaatcagatatagtgcracttacatcaacataagcattttttgtctttcccataaaattgacttagggagatgggctacatggataagttgagagtaacagggaacttttatgtaaaatatatttttttaaatataagtgttacttaaacatgcttcaaatctcatactccagagagaaaagtgggtttttgtaaatacaaacattatattaaagtatactatgcatgtagaaaataatacagatcaaagtgtatacactggtaattttttttttatttt

SEQ ID NO: 420909 - DNA, 604 bp, Homo sapiens
tacataaatctatgaaactggagaaatgccagttcttccactctatgagctttccatacttctctttcatatttctcctgcctgctatgtcagtaaattttatgtttatttttataaactaatttagaacataaatgactcaaactattatatcactaggcaaatccacattaaaatataaaagctcctagaaaaacaaaggtccagaatggttttccaatttacattgagtaagtggggaagatacctgtagagaaaaataatctttgtcaatagaccctgaagtcacaccagaggtgacagaaggtgctgcatgataagcctaaatcagatatagtgcgacttacatcaacataagcattttttgtctttcccataaaattgacttagggagatgggctacatggataagttgagagtaacagggaayttttatgtaaaatatatttttttaaatataagtgttacttaaacatgcttcaaatctcatactccagagagaaaagtgggtttttgtaaatacaaacattatattaaagtatactatgcatgtagaaaataatacagatcaaagtgtatacactggtaattttttttttatttt

SEQ ID NO: 420910 - DNA, 592 bp, Homo sapiens
cagactttcttattggagcctcctggaaatgacctccagttttaatctgaacaaacttctttttgcacatgtcattcagggacttccttgcattgaatttctgggttagttctactatttcttgtttattatttgtcttgactacatgattattattcagttttcttgggtgcatatatccttaaataacattctcagaacgagaataaaatgcaggttttctgagaactttgaagttgatagtttagatgaatacagaattgcggtttcaaaattactttgctcataattgattctgtatatttttattaacacataatatttatacataattatgaggtacatgtactattttgttacacgcatagcatatgtaatgaccaagtcagggtatttaagatatccattatctcacgtatttattgtttctatatgttgggaacrttttaagtcctctcttctagctattctgaaatatgaaatatattgttgttaactatagtatacttactctactatcaaacattagatcttattccttctatctaactgtaagtttgtacccattgagtagcctctcttttccatccct

SEQ ID NO: 420911 - DNA, 571 bp, Homo sapiens
ctgacactttatgaaaaatttatggaacaatattccaaataaatcagcagtttacaagtggatgactcatttttagaaggaatgagatgatgttgaagatgaagcctgtagtagcagaccacatacatcaatttgtgaggaaaaaaatcattttgttcatatcctaattgaagggtactgataattaacagcagaaatagtagccagcacgatagacatctcaattggttcagcttacacaattctgactggaaaattaaagttgaccaaagtttccatttgatgggtgccaaaaccattgcacccaratcagctgcagagaagagcagagttttcaatggaaattttaaagtgggataaatatgctaaagtatttatttgaagatttgttaatagtagatgaaatatggctttatgagtatgatcctgaaaacaaagcacaatcaaaagaatggccttcaagaggtggaagtggtccagtcaaagtaaaagcagaccagtcaaaagcaaatgtcatggcaacagtttcttgggatgctcaagccattttgcttgctcactttctgggggg

SEQ ID NO: 420912 - DNA, 508 bp, Homo sapiens
  misc_feature (1)...(508): n = A,T,C or G
tctctgcggtccccnagctgccagcctccagtttctccaagaatgggaatcttccaggattcctctcttaaaattcacaatgtgttttctattgtacagaaaaaataagaagtccctgagacaaataaatcaagaatatttaatattttgtctgatttgaatgtgactttaaaaatccaggaacaacaaacacagattagtatcttaaattactttccaccacaccactatcattacttttactccttaaatatgtttgaaataaaccaaactgaccagacacagcaatttttttgtggaaatatttcttccttctgtagctttactaccrtatacatcattgaggtgttaatttcctttgtgagaataatattcatctttaatattcccacattgcatacagtaattccagatcattttatgacattaaatcaactcagaatctgtaacatagcataattattgttcccatttcattactgcctttaacaaattttacagatgtttc

SEQ ID NO: 420913 - DNA, 578 bp, Homo sapiens
tatatttagatactaaaaaaaaagtgtcataatgctttcactaatcacagtgcatacaaagctaggagcagtcattttacctttcataatattgcaccatctatgcgaaactttgaataatatgaaggtactttgaatttgaaccrcatttaattcaatagactgtgtcagaaccctggacagaaaatcttgcagtttttgtcactgtcatgatccaatcaaattaaccatgatctaattccaagtcaacagttctattgattttgtagcaattggtcaaaatgaaaacactttgctatacttcacttatgagcaacaccctattttatctatttttggtcatttcctttgagtatttgagtaatcccctctgataaatcatcttaaccttaaaatctgggtctcatcctttcttacccaattcagtaacccctgcatcaagtcccttagaacaggcaattggtaaatatttagagttcaattgaactgaaagctgttcagtggagtagccaggaaacgtaccctgtgtgtgattctaaggagaaatcctacttgtcctctgactctttaagttttat

SEQ ID NO: 420914 - DNA, 505 bp, Homo sapiens
agccaattttatattgtactctaccaccactcagagtgcccaatgccttttcttttgcatttattcctcagtacttatcaccatctataataccacttatgtttaccattatgggttttttaaattttttctttttttgagtcagagtcttgcactgttgcycaggctggcatgcaagggtgcaatctctgctcactgcaacctctgcctcccaggttcaagcgatgctcctgcctcagcctcctgagtagctgggattacaggtgcccaccaccacgcctggctaattttttgtatttttagtagagatagggtttcactatgttggccaagctggtctcaaactcctgaccttgtgatccacccgcctcagcctcccaaagtgctgggatgagccactgcacccagcctaccattatgttttgtttctgtctgtcttttttcactagaacataaactctgtggggagaatttttgtctatttttttcagtgctgcatccctag

SEQ ID NO: 420915 - DNA, 550 bp, Homo sapiens
agcttgccactgtatttctttaacatatcagtaaatctgaatttactctcatagaggctaatcattgcttaatatatgacattcagttattttgcattttacgtgcattcaatctgaatactaatgttacagaaatcaaaagtagttaacttttttaaaagaattggtcataactttcaagagttttataatttatgataatattaaatctacattaactgcatttttcaaaaaccaaatgaattctcacaggtaatctgttggttttgaattggaatcatgtattaagaaacaaagataaagtaagttctttttaggaattactttcatcagcattccactaccttattaaggacatgaacaaaatgagggaggttcattttaaygtgtatgtttatgcacatgtctgctttctaagatgcacgtgttctcatgtttggaaggcgtaatagtttttatccacattcacaacgccccttatgttcatggaatactcacgttgtttgaccgtagagacacgcggcctccgcagcgcgcacagaacttagtg

SEQ ID NO: 420916 - DNA, 559 bp, Homo sapiens
aataatgcccttacttaggggatgctgaccatggacattcgacgaaacccttttctgggctttcattaacctaggagtaaaagaaaggggatagcttcactttagatgatagtgaaattttctaaaatttataacacaatccccccttgcctcatgcctctacgcttttgtttactatgatggtatttaaagctaaaacaaaacccagaaatctttgggttttgaaagcaatctgttaaaaactataataatccatgtatccttagacttgagagcatttctaaatgaagcttgcaatctgatcatttggtgatrtttggattatgtggttatagtaggatttaaaatgccttttcacacagatactatagaaaggtgagcagcaggttgcacacagtgacaaattagcggtgctcttagccaggctgtttaaattatttttaggcaggagacatactgtacacaccaggttttagatgcaagtaattactatgaaatgttacctcactctttgcctgtagttaatctgagctctccctatttctctctctttccttcc

SEQ ID NO: 420917 - DNA, 407 bp, Homo sapiens
attttgttatggaaacccaaacatattaatacgaagagcaaaataaatgcagacatataccatatttaatgactgaaaaactcagtattgttaaggtgccagttcccccaaataataggtaccagtaggataccagaggtcaggagagaaaagtttagatatttttccctctgtttacttcatcccatcatggttmcttttgggtggcctcctcattcattattctcttatggccctactagcagcattttttctccttactcattagatctaggtatattcatgggttccagcttcaaatctgttcaatctctgattgaattaaaataatctgcctcttctcttactgcatgcaaggagcaaaagtacattgtctcagtgggtaacaggacataaacctcaaatta

SEQ ID NO: 420918 - DNA, 520 bp, Homo sapiens
agaacaagtttcaagggctaagcattctctagagagaaaaaccacaaacattgcaggctaacagcctcttgtaacaaaaacaaacaaaaaaaaaaccctcaaagctatttataagcctaaaatataagacagatattatagtattgaaatacatttgttaaaactcaccagtcattatatcaatatacccccttttctgaagtcagttttgaaatttgttcaatgtttacagttcatcataagaatttatttcccagatattcaagactcatagaagtcacgtaaaaccttctctaaaacttatttaaattaactacgcaatcaagatttttggttacacttctkcaagtaattgacccactcataatataattatgatgattcccttcttaaagacaaaagattggcctacgtgaagcaggttatataatatctaaaaccatttcattagcctacaacttacaggcatgatgataagtatttaaaagttttcttgacaattatcatagtatcaaataat

SEQ ID NO: 420919 - DNA, 520 bp, Homo sapiens
agaacaagtttcaagggctaagcattctctagagagaaaaaccacaaacattgcaggctaacagcctcttgtaacaaaaacaaacaaaaaaaaaaccctcaaagctatttataagcctaaaatataagacagatattatagtattgaaatacatttgttaaaactcaccagtcattatatcaatatacccccttttctgaagtcagttttgaaatttgttcaatgtttacagttcatcataagaatttatttcccagatattcaagactcatagaagtcacgtaaaaccttctctaaaacttatttaaattaactacgcaatcaagatttttggttacacttcttcaagtaattgacccactcataatataattatgatgattcccttcttaaagacaaaagattggcctacgtgaagcaggttatataatatctraaaccatttcattagcctacaacttacaggcatgatgataagtatttaaaagttttcttgacaattatcatagtatcaaataat

SEQ ID NO: 420920 - DNA, 567 bp, Homo sapiens
ctggaagtcaaatatgatcaagatcctctcttgcttaaaactttccccacttcccttaggatggaatcaagctccatgccccaacaatggcaaaccactcataaattccagaccctgtgggctgtctcaagggtgactgatgcaggccgaaagagtgagggtcgtgatcagctcagtataccactggaggctatatgagcaaacagcaaactgttctcataaaagcagaatgttggcaaactgacaaactgcgtctgccgcccagaaagaatgctgagggcagtcacgacccaggcacaagtgtttcttgtgattatctacagggcacacctgaagcctgttagtaataatatgaacctgtgatcarttaagcagctgaccaattgttacctcctcctccctgcttattctacccaataaatactaagggctgaagaagctcggggtgggggctgtctttgcttactaggagtagggagccctttttcttcccctggcccctttaaaacagtttcttttgttttaagttttcatttctacgttcatcccccttcgttccgtctcgta

SEQ ID NO: 420921 - DNA, 567 bp, Homo sapiens
ctggaagtcaaatatgatcaagatcctctcttgcttaaaactttccccacttcccttaggatggaatcaagctccatgccccaacaatggcaaaccactcataaattccagaccctgtgggctgtctcaagggtgactgatgcaggccgaaagagtgagggtcgtgatcagctcagtataccactggaggctatatgagcaaacagcaaactgttctcataaaagcagaatgttggcaaactgacaaactgcgtctgccgcccagaaagaatgctgagggcagtcacgacccaggcacaagtgtttcttgtgattatctacagggcacacctgaagcctgttagtaataatatgaacctgtgatcaattaagcagctgaccaatygttacctcctcctccctgcttattctacccaataaatactaagggctgaagaagctcggggtgggggctgtctttgcttactaggagtagggagccctttttcttcccctggcccctttaaaacagtttcttttgttttaagttttcatttctacgttcatcccccttcgttccgtctcgta

SEQ ID NO: 420922 - DNA, 597 bp, Homo sapiens
acacagaatgaacaattttacatttttgcgaaatcaatgaccacattcaaagcaagaagaacgaagtgcgaaggccccagtttctgatgtgtctgacgctagctataaaaccatcaggccgtgtgcctttgtggtcaatcatttgacttttcttgcactttgttcgactgaagtctcttggtattctacaagccagtgagctgagatttgcagttgcttattstgtattctgtgggtttgaactgtgtaagtaacataaaatattttgcttcattatttcctgcagaagaccaagcattcatcttgaaaagaaatcatgctaattattttaaatagtatttttttttaaaaaaagcagctaactaagagctaaagtttaatataatagaacatttgttagagtttcaaacattacaggctacaatattttagcacaccttctacactagcccgggcttggtcaggatgagacagcagtgctatgagtgacctgtgatcatccaggctagaagctctagttcaagatggaacagagaggcctttttgcttggtcactctgccttgtgttgactttgactttaccattttcttacttgt

SEQ ID NO: 420923 - DNA, 597 bp, Homo sapiens
acacagaatgaacaattttacatttttgcgaaatcaatgaccacattcaaagcaagaagaacgaagtgcgaaggccccagtttctgatgtgtctgacgctagctataaaaccatcaggccgtgtgcctttgtggtcaatcatttgacttttcttgcactttgttcgactgaagtctcttggtattctacaagccagtgagctgagatttgcagttgcttattctgtattctgtgggtttgaactgtgtaagtaacataaaatattttgcttcattatttcctgcagaagaccaagcattcatcttgaaaagaaatcatgctaattattttaaatagtatttttttttwaaaaaagcagctaactaagagctaaagtttaatataatagaacatttgttagagtttcaaacattacaggctacaatattttagcacaccttctacactagcccgggcttggtcaggatgagacagcagtgctatgagtgacctgtgatcatccaggctagaagctctagttcaagatggaacagagaggcctttttgcttggtcactctgccttgtgttgactttgactttaccattttcttacttgt

SEQ ID NO: 420924 - DNA, 597 bp, Homo sapiens
acacagaatgaacaattttacatttttgcgaaatcaatgaccacattcaaagcaagaagaacgaagtgcgaaggccccagtttctgatgtgtctgacgctagctataaaaccatcaggccgtgtgcctttgtggtcaatcatttgacttttcttgcactttgttcgactgaagtctcttggtattctacaagccagtgagctgagatttgcagttgcttattctgtattctgtgggtttgaactgtgtaagtaacataaaatattttgcttcattatttcctgcagaagaccaagcattcatcttgaaaagaaatcatgctaattattttaaatagtatttttttttawaaaaagcagctaactaagagctaaagtttaatataatagaacatttgttagagtttcaaacattacaggctacaatattttagcacaccttctacactagcccgggcttggtcaggatgagacagcagtgctatgagtgacctgtgatcatccaggctagaagctctagttcaagatggaacagagaggcctttttgcttggtcactctgccttgtgttgactttgactttaccattttcttacttgt

SEQ ID NO: 420925 - DNA, 554 bp, Homo sapiens
atatgtgtctctcctttgatactttttaacttctctgaaaccaaactgtgtttggtttccattttgacattagttaataagtttctatggcaagtctttagcttttgaaacttggtgtacaggattatctttaaatcacagtttcaactcattcaacaatattatgcatctcttttgtatgtggcacactatgtgaatacaaaagcatagacgagagccattttccttatgaagtatacaaggtagttttaaaggaaagcaggataagtaataaaagcattaatacattataagaaggtaacatgtatttatgtgtccaactagtatcaaggcaagtgtgtatgatatgagagaaaaacaatatgaaccaagatatttgggaagacgttcaagcaggaacggaactctgagctaagttcctttcagagttctgtagagaaacagaactaattgttaaatattcaaaaaattttgarttgattgtttaaccttggtaaaccttggtagcttgaagcagaactttggtgtaaaccttggtagcttgaaccagacca

SEQ ID NO: 420926 - DNA, 606 bp, Homo sapiens
cccacaataccagtttgtggccttttaggaactgggccacatagcagaaggtgagcagtggtggagtgaagcttcacctctatttacagccactccccattgctcacattwccacctgagctccacttcctgtcagatcacgggcagcatcagattctcagaggagcacgaatgctattgtgaactgtgcatgcgagggatgtaggttgcatgttccttatgagaatctaatgcctgatgatctgccactgtttcccatcacccccatatgggaccacctagttgcaggaaaacaagctcagggctcccactgatttaacattatggtgagttgtatgattatttcattattcatcacaatgtcataataatagaaataaattgcaaaataaatgtgtatgtacttgaatcatcctgaaaccatcccctacctcctgatccatggaaaaactgtcttccatgaaaccagtctctggtgccaaaaaggttggagaatgctgctttagaagaaagaaaggtcactgaatgatatttaagttttcccataacaggttatgggctctcagttatttctgaagtaaggagaactggtaaggctgctgaaaa

SEQ ID NO: 420927 - DNA, 606 bp, Homo sapiens
cccacaataccagtttgtggccttttaggaactgggccacatagcagaaggtgagcagtggtggagtgaagcttcacctctatttacagccactccccattgctcacattaccacctgagctccacttcctgtcagatcacgggcagcatcagattctcagaggagcacgaatgctattgtgaactgtgcatgcgagggatgtaggttgcatgttccttatgagaatctaatgcctgatgatctgccactgtttcccatcacccccatatgggaccacctagttgcaggaaaacaagctcagggctcccactgatttwacattatggtgagttgtatgattatttcattattcatcacaatgtcataataatagaaataaattgcaaaataaatgtgtatgtacttgaatcatcctgaaaccatcccctacctcctgatccatggaaaaactgtcttccatgaaaccagtctctggtgccaaaaaggttggagaatgctgctttagaagaaagaaaggtcactgaatgatatttaagttttcccataacaggttatgggctctcagttatttctgaagtaaggagaactggtaaggctgctgaaaa

SEQ ID NO: 420928 - DNA, 563 bp, Homo sapiens
tcctgatctccttttaaatagtatctatgatgctaaataaaaagtgttctaataatagaggaaatattttcatattttaggtcatatacatatacacaacataatagggacrgggagaggcatcatgaaataactcaaggtagtatactatctgaaaatttatacttatgaaaatttatgttataaaaataaagttaaattgcttttttaaaattgctttagggtttagctctctgtctacatagttggcaaccttgggtgacttattttattgtaatctattgttatgttaatttcccctattgctacttgtataatttttatatacataaggcctcaataaataaactctttgaataaaaaagaaccctaagcatctttttgcaaatagttctaaatcatgaaaacactaatattttataatgctctaagaagctaatgaaccagaaatatctttaaccaaaggcacttttcctttggttttcacaaagcagagaatcctaatggacaggcaagataaatcatttactgtgtaaaacactcatatacctattgaaagggta

SEQ ID NO: 420929 - DNA, 582 bp, Homo sapiens
aagacatgcctatgactccttcgccttctgccatgattgtgaggcctccgcagccatgtggaactgtgagtccattaaacctctttttctttataaattactcagtctcggatatttcttcatagcagtatgaaaatggacgaatacaaaaccctttaataaatctccaaagttgtaaatataaaatttgaataaactaatctcacaaaatatgcataatctagttcctgtctttgtatagtttaacctttacccagttcccactcagctgcaggcattctgagcatgctataatgctttgtacacgtctttgtatggaatgcaaactccctcttttacttaattatcattggcatgttcttcattactcagctcaagtctctttgattgcaggaaacattgtatcatcccaaatctgatttagggcccccactctctgttctcccacagcatgctgtgcagaccgtgtcatagaaagarcaatacagagttgtgggatatttgctttttgatgtcaaaaaatatcttattaacttctcataccaaaaaccaggacaggactgatgcaatagttattcaaca

SEQ ID NO: 420930 - DNA, 581 bp, Homo sapiens
atatgtaagatgtatgttggttccatctggaaaggtgggacaactcaaagcaggggctcccaggtgataggtagatttaaatattttccgattggcaattggttgaaagagttattatttaaagacatggaattaatagaaaggaatgtctgggttaggataagcagtcatggggacccaactttgatcatccagatgaagcctccaggtagcagtcttcagagagaatggattgtagatgtttcttatcagacttaaagagactattctatcagtcttaaggtctctgtgttgatgtttgtgaggcatgtctgacctaaactagtttttttttttttttttttcaggattatttggaatgtctttggctaaggggagggttcatcagtcagtatgatggcttaraattttatatttggtttatacagcagagacttaggaatcctatgatggcctttgagggtctaatgtgtagagggcctcatgtcagcctgagtggctgtgtagagcagatagggagggatggcatgctgaagtaaagggggcgtagcctaaggaagctgtccctaatgcctaacctc

SEQ ID NO: 420931 - DNA, 562 bp, Homo sapiens
ttcactattactcacaaaacagaaaaaaaaattgtcaaaccaagcatgatcaccacttaattaagctcaaaatatgttaacatcagcttcttcctaaccatgtgtcctggctacaaccacagaaaaacaggtcaaacaataattctacaacaattcacaagttctgaggccaactatcagatctgttgtagcgagtctccgagtttaggaattctagccaataccaacaaggactgactcactccatcccctaataccctccctgactctccctcaatgtccrtccctccccaagcaccccctctccccaactttgagatgccctatggttctccttgtgattctctcttgaaggaagaagtgagtggacctaactgtggctaaaggagtgtttctgaaggtttgggctctcaggttttcacacctggaaagaggctggagagaaaaagattgagaataagagttgagtcaggcatcttaagatgtttgccacaagcagtcaataatgcaagggttctagaaatgagtaaaagagagtaacaatgcaagaagaaacaaaaat

SEQ ID NO: 420932 - DNA, 573 bp, Homo sapiens
cttaatacagttgcattggggattaagtttcaacatgaattttggagaagccaccatcattcaaaccacwgcaaaacagaaatcagtcttacctggaagtatgtggaatggctttattgaatatgggttctttcaacagatagagataagataaggtcattgaacaatatgattcttatcagagcaaacagaggcaacggtgactgagcatggagatatgtgagaaagtttaacaatagtttggataaaatgtagaaataaaaccaggaggcccccgtcatggagagtttttgaatgttaagtcagagattgggtgttttagtgggtagataaccaatagggaacacaacaaggagtacataaactacatcatattcacattgaaaactgagagaattgaacggcagccacaatgaagtacatgaagagaagtactaactaaaaatagatatttttcagagatgcttttaccatttacaaatgcaggtacatgcactctctgcctgttattcattttccaagagggctccaggcaatcaacctttatcttttttgggacttcaaaagaggaca

SEQ ID NO: 420933 - DNA, 590 bp, Homo sapiens
gtgaggtgtctcttaatataacagcttatacaggggctgaatgatgccagctttgggcttaatgttgtttttaggttatctagacagttctgattttagaatgttcataagttaggtctgaattaataagccaataggttcttatttcaaaagaatatatatatacacacatatatatacatatatcaaaaatgtgagctaaattcccatttatctttagtattctccatatctctttcatttccagagtaatggtccttgggaagataatagctagcataatgagacctggtacttacacagcactcaataagtacaagactctctaaatgttcattcctcacaaaactctatgagatacattatagtgctattccccttctacagataatggaactgggacactaaaggttaagtgatgtgctgatacttccaaagctcataaacagaagagtcatccagagccaaactattttggcttcaaagtccaggcacttaaacagtgacgctgyccactcactagtaccttctggagaagccactaggatagtctgagaatattactggactactaaacaaattgagattct

SEQ ID NO: 420934 - DNA, 553 bp, Homo sapiens
tcaaacagctgttgttgttgttgtcgtaatataagtagttacagtgagggagatagatcacatgctctccgaggtcttctcaaattctaaaattctgtggttctatgaacaactcgctcccaaatgatgtcagataaatgagatctcactgtatactgggcaataaaatcaatgtggtcaattttaaatcrtaccctgtaaggtaaggttgagcaggtcatgaattattcaaaactttggttacactcaatatatttctatttgatcatggaatgcatagaactatttaaaagagcatttttaaccttctcatattatgtttaatgattaaaatgagtttgatctttccgtgttcactaagggaaaagaaatggagcaatgctggatagtttatatatgtgccccacttaatcattagcgatttaggtgaaatcatcgagcaactttttgggtaataaaaaatgcaagcaggatatacagttttggcccagataacagacatgcctataaatgagagccagtgcgacatcatctccttatgaagctttttcag

SEQ ID NO: 420935 - DNA, 533 bp, Homo sapiens
atccacaccatgtcttcttttcttcccccatttcttatcacatacaccctggaatcagagctatttatttaaataacacacgcattatatttsaattatttggttgcacatgctgtataaagcaatacattatttttattagaatgtcaatgatcatataattgtttgataaaaatttttcttttatggaaattttctctgaggggggaatatcacaattttcatagaaggatttagaagttgcactatataatgagaaatgagtactacagatccttagcaaatatgactttattcttccacttttaacaacataaatgccttggaaaaaatcactcaatttgatcatgattgaaattcccggtggaaaaatatatttgggatttgttaattatttttcagtggggttctcttttttgagagagctgagtgatatggtttgactgtgtccccacccaaatctcaccttaaattgtaataatccccatatgtcaagggcagggccaggtggaaatgattgaatcatggggtgg

SEQ ID NO: 420936 - DNA, 533 bp, Homo sapiens
atccacaccatgtcttcttttcttcccccatttcttatcacatacaccctggaatcagagctatttatttaaataacacacgcattatatttgaattatttggttgcacatgctgtataaagcaatacattatttttattagaatgtcaatgatcatataattgtttgataaaaatttttcttttatggaaattttctctgaggggggaatatcacaattttcatagaaggatttagaagttgcactatataatgagaaatgagtactrcagatccttagcaaatatgactttattcttccacttttaacaacataaatgccttggaaaaaatcactcaatttgatcatgattgaaattcccggtggaaaaatatatttgggatttgttaattatttttcagtggggttctcttttttgagagagctgagtgatatggtttgactgtgtccccacccaaatctcaccttaaattgtaataatccccatatgtcaagggcagggccaggtggaaatgattgaatcatggggtgg

SEQ ID NO: 420937 - DNA, 490 bp, Homo sapiens
cattaatataaattatatcgagattgtattttttgtttaaaaatataatttaaaaactatattcatatatatatatatatataggaatcagaaagactcatttttccaggcattttgggttagggaaaatctgtcctttgcttccccgaccattttgaatgtgattaaatatgcacacacacatgcacacacacacgcatgcacacactgatgcaaactttagcaagtgacatgagggtgtcttttcacaggataacttttttcatttgattcctcattcataaaacactagtatgatatacatccccacatagattttccccgtttctataaaggatgaagattcaaatgctgcaaactcactscgggcccctggtcagaaacagttctctcagcactctcctgacattattaatggccctgatgtacaaacccagaataaaatagaattaaaatccaaagttaatttcaagctccattagaaattaaa

SEQ ID NO: 420938 - DNA, 533 bp, Homo sapiens
gagggatgagtggatggaaccaggagaaagggtttgtgccattgaaacaggggtgtttcaggacaaatttcagcctcacaatttctgaggtacagtaaagctgtgccctggaggctgtgtttcagaaatctaaagcttccgtttattggcccactatttcctgcctattagttgtctgttaatacttcatgaacattatccycaaaccttaaaattatttgtaagatagaattatcctatttttcaaaggtgaaaactaaggttcagaaaggttcagttaagtagctacaattagtcatcttaataaaaagatatagatttgaacacaaaacctgtatctttccttctgtattatgcttgctgcctctttcagcaggctgctttagttatccagtgggaaataggtgtttgggagacttagaaatcttttctttctaagttagtatattttcattgctgttatcatgacgttatttcaaaaactcaaattgctatgaaaaacttgatgatacccctctttacgtcagtttttg

SEQ ID NO: 420939 - DNA, 533 bp, Homo sapiens
gagggatgagtggatggaaccaggagaaagggtttgtgccattgaaacaggggtgtttcaggacaaatttcagcctcacaatttctgaggtacagtaaagctgtgccctggaggctgtgtttcagaaatctaaagcttccgtttattggcccactatttcctgcctattagttgtctgttaatacttcatgaacattatcctcaaaccttaaaattatttgtaagatagaattatcctrtttttcaaaggtgaaaactaaggttcagaaaggttcagttaagtagctacaattagtcatcttaataaaaagatatagatttgaacacaaaacctgtatctttccttctgtattatgcttgctgcctctttcagcaggctgctttagttatccagtgggaaataggtgtttgggagacttagaaatcttttctttctaagttagtatattttcattgctgttatcatgacgttatttcaaaaactcaaattgctatgaaaaacttgatgatacccctctttacgtcagtttttg

SEQ ID NO: 420940 - DNA, 533 bp, Homo sapiens
gagggatgagtggatggaaccaggagaaagggtttgtgccattgaaacaggggtgtttcaggacaaatttcagcctcacaatttctgaggtacagtaaagctgtgccctggaggctgtgtttcagaaatctaaagcttccgtttattggcccactatttcctgcctattagttgtctgttaatacttcatgaacattatcctcaaaccttaaaattatttgtaagatagaattatcctatttttcaraggtgaaaactaaggttcagaaaggttcagttaagtagctacaattagtcatcttaataaaaagatatagatttgaacacaaaacctgtatctttccttctgtattatgcttgctgcctctttcagcaggctgctttagttatccagtgggaaataggtgtttgggagacttagaaatcttttctttctaagttagtatattttcattgctgttatcatgacgttatttcaaaaactcaaattgctatgaaaaacttgatgatacccctctttacgtcagtttttg

SEQ ID NO: 420941 - DNA, 533 bp, Homo sapiens
gagggatgagtggatggaaccaggagaaagggtttgtgccattgaaacaggggtgtttcaggacaaatttcagcctcacaatttctgaggtacagtaaagctgtgccctggaggctgtgtttcagaaatctaaagcttccgtttattggcccactatttcctgcctattagttgtctgttaatacttcatgaacattatcctcaaaccttaaaattatttgtaagatagaattatcctatttttcaaaggtgaaaactaaggttcagaaaggttcagttaagtagctacaattagtcatcttaataaaaagatatagatttgaacacaaaacctgtatctttccttctgtattatgcttgctgcctctttcagcaggctgctttagttatccagtgggaaataggtgtttgggagacttagaaatcttttctttctaagttagtatattttcattgctgttatcatgacgttatttcaaaaactcaaattgctatgaaaaacttgrtgatacccctctttacgtcagtttttg

SEQ ID NO: 420942 - DNA, 588 bp, Homo sapiens
aagtttttgagctttaaaattctgtttaacgttagaataaatgaagtatgcatcagaagcttcagatggaaataccgtgttaaactgagaatcagaacaaaatcaagtaacacatgatcaaatcaataggaaaatacatcttcaattaacaatgctgacaagaagttcaaaaaaattcatctcttcgatattttccatttacccttccttgggtatatggacsaaggattcagtagaagcattctttatcaacagatacaaaaatgagaattgttatcagagaaagatccagaagttaggtagccatattaaattccacatggcttggtttgacaatggggtggagagcaaatagatgattgtgaggttgggctggatgctagatcagggagtttctaaagatatttatggaatattttgtctctgcactttggggtttttcaggagagttgagtgagttttcttacaggatttaaaaaaaataattacatataaaccagctgtaacatgaaggagcagtctttctttaccacaatgagagaggctgtaagtaaagcaccatggtaatattgcaaatacaacttaaat

SEQ ID NO: 420943 - DNA, 549 bp, Homo sapiens
tgattcttgcggtcaggattggagtctgggattctgagatcctaacaaggtcccaggtgatgctcatgtggtcgggcagagaaccacggttggaatagcaaggctctagcgcatcgcacttctctgcagcgggggctcaaaggagaatgcagttgctgagtaggaggagaaacagcccaggaagggagcacaaggagagaagacagcctgcagccagggctaacacgatctgttcagtcatttctcctaagactgcttttccataggtcctcctgccatgttttaatctgatctactcagagtgamatataataatctttgtaatctcatttagcaagttaaatcatttctgcacctgactgtagacttcatataattcatagaaagtgatcactgactataaaggcagtttcacttcttcataaaatcaagttcagcattctcaatctcagggtcagctaagactttccccatgcttagaccacatacatataacagtgctaggatatttaatttgcttttagactaatgccaactttacacctggac

SEQ ID NO: 420944 - DNA, 549 bp, Homo sapiens
tgattcttgcggtcaggattggagtctgggattctgagatcctaacaaggtcccaggtgatgctcatgtggtcgggcagagaaccacggttggaatagcaaggctctagcgcatcgcacttctctgcagcgggggctcaaaggagaatgcagttgctgagtaggaggagaaacagcccaggaagggagcacaaggagagaagacagcctgcagccagggctaacacgatctgttcagtcatttctcctaagactgcttttccataggtcctcctgccatgttttaatctgatctactcagagtgacatataataatctttgtaatctcatttagcaagttaaatcatttctgcacctgactgtagacttcatataattcatagaaagtgatcamtgactataaaggcagtttcacttcttcataaaatcaagttcagcattctcaatctcagggtcagctaagactttccccatgcttagaccacatacatataacagtgctaggatatttaatttgcttttagactaatgccaactttacacctggac

SEQ ID NO: 420945 - DNA, 592 bp, Homo sapiens
ccaaattgtatttaatacttaccaagcactaagcagtgggataggcatttgtgttcaaagatgaaaagcacccggtcggtggcattaagaagaacagtggatagagagcttatgtcaatacaatagggttgctgatgacataaagggacttatatgaggtatacctccaggaatgagtattatttgatttcatttttatttaggatctatctagtataagaactgtcaatgtgtttatactgttcatggtttgtaagagaccagactggtctgtttttgcattcataattttaatgtaaaaatgtctatgcctttgtctttgataaggttttaataactgatttataatctctctcattgttataaatggaaagcccttctgcataaaggataaaagagtaaatgtcagtgatagatcatattgccataaactgtttccaaagaggcattaatgaaatcayttctgcttactactagtttttttttttttaaaaaatcttgctctggttttacatggaaaaaaatactgttcttttgattttaaaaatactttttgaccttaagtatatatttaaatctaaggtaagaagta

SEQ ID NO: 420946 - DNA, 592 bp, Homo sapiens
ccaaattgtatttaatacttaccaagcactaagcagtgggataggcatttgtgttcaaagatgaaaagcacccggtcggtggcattaagaagaacagtggatagagagcttatgtcaatacaatagggttgctgatgacataaagggacttatatgaggtatacctccaggaatgagtattatttgatttcatttttatttaggatctatctagtataagaactgtcaatgtgtttatactgttcatggtttgtaagagaccagactggtctgtttttgcattcataattttaatgtaaaaatgtctatgcctttgtctttgataaggttttaataactgatttataatctctctcattgttataaatggaaagcccttctgcataaaggataaaagagtaaatgtcagtgatagatcatattgccataaactgtttccaaagaggcattaatgaaatcatttctgcttactacyagtttttttttttttaaaaaatcttgctctggttttacatggaaaaaaatactgttcttttgattttaaaaatactttttgaccttaagtatatatttaaatctaaggtaagaagta

SEQ ID NO: 420947 - DNA, 592 bp, Homo sapiens
ccaaattgtatttaatacttaccaagcactaagcagtgggataggcatttgtgttcaaagatgaaaagcacccggtcggtggcattaagaagaacagtggatagagagcttatgtcaatacaatagggttgctgatgacataaagggacttatatgaggtatacctccaggaatgagtattatttgatttcatttttatttaggatctatctagtataagaactgtcaatgtgtttatactgttcatggtttgtaagagaccagactggtctgtttttgcattcataattttaatgtaaaaatgtctatgcctttgtctttgataaggttttaataactgatttataatctctctcattgttataaatggaaagcccttctgcataaaggataaaagagtaaatgtcagtgatagatcatattgccataaactgtttccaaagaggcattaatgaaatcatttctgcttactactagttttttttttttwaaaaaatcttgctctggttttacatggaaaaaaatactgttcttttgattttaaaaatactttttgaccttaagtatatatttaaatctaaggtaagaagta

SEQ ID NO: 420948 - DNA, 535 bp, Homo sapiens
tttaaacaactaggaaatgtaattggctgaagaagaaatgggtagattgaaggtattgggggagaggaggaaatggagcagcggaatgaagtaggattgcaacaccagggtcccactgaaggttaggagctatgaatttaaagtgagaccaatcagcataggtgtgtggttttccccagccacattcttccattcttccccccagggagatgctgaagcacaagtttcacttaatcagcattgctgtttttytgagcaagtgttaggaaagagagaggagcaaagaaatcaaaggtgattgcaagggagtcataatgatagaatgtgggactaaagctaagtggaagggaagtgagcacatgagtgaacaagacatagatgtaacttttgttaacagtgaatttagagagctgcaggaaatgagaagcacaattatggagtagttgtagttaatgattatgttgagttccaggagatgatcttggaactgagtgattaagacatgctggaggatggtatcaatggaggagggcca

SEQ ID NO: 420949 - DNA, 615 bp, Homo sapiens
ttttttttgtagagatggggtctctatgttgcccaggctggccttgaactcctggcctcaagaaatcctcccgccttggcctcccacagttctgggattacagatgtgagttctgttgctcaggctggagtgcagtgctgtgatcatagcatactgtaacctcaaacacctgggctcaagcaatcctccctcttcagcctcctgagaagctaggactacaggcatgcatcaccatgcctggctgatttttaaaattttttttagagacacattcttactatgtttcccaggctggtgtcaaacttctggcctaaagcaattctcccaccttggcctcccagagtattgggtaacaggtgtagccacaatgcccagccacagctgttctttcttaaagaaattactagtatgagtaattgttattggataatataatatcgtgtcagtcatttacttatttgtatttagtgggtataagtgcagatgtctcacatccatatatggtgaagtctgagcttttaatgtatccgtcgcccaaatggtgagcattgtacgcaayaggtgacctttcaatacttcctccccgcaacattttggaggctctagtatctatta

SEQ ID NO: 420950 - DNA, 634 bp, Homo sapiens
attacaggaatgagccactgcataaatttttattttctaggatgctcagatgttggggatcagaaaacaatatcccaaatgaaggcctcagtggcagtctcagaagcaaaagrttttctctgtacttttcctgctctcctgtgtctagatcctattatcccccaaggttagtcataaaaactagaatccctcttccccaaagtgggtcatagaaaccagaaccccttttccccaaagccagccataaaacctaaaaacatcactctaattttccctccaccattctgtgtaaaaactggccataagaaattatcaatatacaattgatatattgtatattgtttgactgtaggtcataaaacctccattccagagaggtccttccataccctgaaagaaggaatgctgtagagagaggccaagaagaacttaggccttgttggtttccccactaaatctattagcattagatcaggcccttttttccttcaatcatgtttctagatggctgtccacacttggttgaacgtagacattaaaaatggacaatttcctctgtatctttggcctttattctacaggctcccatgtatatgcattaaatacatttgtatgctttttctccaatatgctt

SEQ ID NO: 420951 - DNA, 634 bp, Homo sapiens
attacaggaatgagccactgcataaatttttattttctaggatgctcagatgttggggatcagaaaacaatatcccaaatgaaggcctcagtggcagtctcagaagcaaaagattttctctgtacttttcctgctctcctgtgtctagrtcctattatcccccaaggttagtcataaaaactagaatccctcttccccaaagtgggtcatagaaaccagaaccccttttccccaaagccagccataaaacctaaaaacatcactctaattttccctccaccattctgtgtaaaaactggccataagaaattatcaatatacaattgatatattgtatattgtttgactgtaggtcataaaacctccattccagagaggtccttccataccctgaaagaaggaatgctgtagagagaggccaagaagaacttaggccttgttggtttccccactaaatctattagcattagatcaggcccttttttccttcaatcatgtttctagatggctgtccacacttggttgaacgtagacattaaaaatggacaatttcctctgtatctttggcctttattctacaggctcccatgtatatgcattaaatacatttgtatgctttttctccaatatgctt

SEQ ID NO: 420952 - DNA, 596 bp, Homo sapiens
ctgtggttcaggtatttgtgtgtgagggttgaggtgggggtgcaccaaattcatacagatttcctcagtagctttattttctgaatttgaggcaacaggacagtgaaaaatggcgatcgttatattgattcatacaacacagagatctgaaggaagcattttgtacaaaccctgctctgggtaacacaggaaatgccaagattttgaaatgtaactttcttggtcttgaagaccaaattgtgctcagaaaaggcagagtccctataagttttgtcacaataaatgagtagagcccactgcaggttggaaatctacaaatcattgcagggtattattaagataataactgcacgagagccatcacagcagcagaggtaaggatctctgccaagattcaccttagaccggtgattctggaacttgagcaagcctagactcaccaggagggcttgattgctagagtaggagaattttccccgycttacatataaccaggtgatactgaccacacttggagaatcactgccttaggcattaggatctgagactatatatccatggattgcagcaagaagcagacaaaaacatttcttcat

SEQ ID NO: 420953 - DNA, 561 bp, Homo sapiens
actgcctttttcatctgtttatgtcccaacgtcaattgctaaacactgttttatttgtttttatatggaattaaatgtactgatatctttagggctccatttgagaacatacattcaaatcaaaacatgaaattgactgtataagtaaattggctaacgttaataggggctggaaaatgaaatgctttctagagaaggtatctttaaggtctattgaagaaaccactagtgagaagtaagcagtactttacattcttgtttataaatgaaaagggtatttattggctgcctattatgtttcatgcactgtatgaagcactggggactctaagcaaatttggcaaattccgtgcaatgcaggaagtgttttcgtrgacgcatgggcaggatactgtggggcatacagggttgctatatatatgatgctatctatggtggtgatggggaggcttgtccttctggaatctctttagatgtggtgcttgagctgagtttgcagggtggatgagggttaagaatatgaaaaggaactctgggtcacgagagcagtgtgggcaaaat

SEQ ID NO: 420954 - DNA, 561 bp, Homo sapiens
actgcctttttcatctgtttatgtcccaacgtcaattgctaaacactgttttatttgtttttatatggaattaaatgtactgatatctttagggctccatttgagaacatacattcaaatcaaaacatgaaattgactgtataagtaaattggctaacgttaataggggctggaaaatgaaatgctttctagagaaggtatctttaaggtctattgaagaaaccactagtgagaagtaagcagtactttacattcttgtttataaatgaaaagggtatttattggctgcctattatgtttcatgcactgtatgaagcactggggactctaagcaaatttggcaaattccgtgcaatgcaggaagtgttttcgtagacgcatgggcaggatactgtggggcatacagggttgctatatatatgatgctatctatggtggtgatggggaggcttgtccttctggaatctctttagatgtggtgcttgagctgagtttgcagggyggatgagggttaagaatatgaaaaggaactctgggtcacgagagcagtgtgggcaaaat

SEQ ID NO: 420955 - DNA, 587 bp, Homo sapiens
acatgattgcagaacacaactaaaaaatctgcatagatatcaagagcccactagtctggagccatagagtctccttgacactgaaaggataccagcctcggggatatgtttgtcaatttcttaacaagtctatgaatttcttgagtaaaagaaccayattttctattttttggataccactaataatatctcgttggcatagaatatatgcttaaggaaccaaatttgcacttaagcttcacaaatttcagacaacatagcaactggtgtagttatcttactgctcactttgtcactatttctttaattcaaactccctccctgccttgacttaccaaactgaagctggatgggagaaacagtgggagtaataatacaactagggcccagagaaaactttctcaagatcacgtagctagaaacatactggacccaggattgaaacctgtggtttctgacgccacagctctgcccatcataactcccacaccttcttgcctatccccacccaactcccagtccctaacagtctaggataagaatcctttgtattcctacaaagaggttgctatgatttgaatgtttgt

SEQ ID NO: 420956 - DNA, 489 bp, Homo sapiens
agaacagaggagagagcagttagagaagtacatgcaagctggtgagtggttgcaggaaactaggttgactatattgaggactatggggagagacttaaaaacagctggttctgtggaagggcctgatttaatttctagatctaggaaggctcttgtttgatctgttatgcagttagcaaagtaaatagtstacgaggatgtgtaactctgtgtactagcaaaacaatttgggcactaacatctatgagaaatactagtataacactagtcttaatatcagtggagagaacttaatttgtatctgatgtgctttagattaacatcattgttatttccctagttctatagactggactcacctagatggcagccaagggtggggcaggtgaagaatttatgcaaacagtgagtgaggtgaggccagctgggggatgtggcaggccaccatcagcccaggaaatggggtcgggggaactactgagaggagga

SEQ ID NO: 420957 - DNA, 573 bp, Homo sapiens
ccaggcaaaagtctgttgcaggggcagagccctcagggtaaacctctgctagggcagtgtggaagggaaatgtggggttggagccctcagagtccccactggggcactgcttactggagttgtgagaaagggcyaccattctccagaccccagaattatagaccgactgacagcttgcactgtgagtttggaaaagccatggacactcaacaccaaacataaaagcagccaggatggggactgcaccttgcaaagccacaggtgtggagcttcccaaggctgtgggagcccactacttgcatcagtgtgacctggatgcgagacatggagacaaaggagattttggaaccgtaagttttaatgactgccttattggattttggacttgtatgggacctgtagcccatcagtttgggccaatttctcccatttggaatgagtgtatttacccaatgcctgtatccccattgtatctaggaagtaactaacttgctttcaattttacaggtgcataggtggaacggacttgccttgtcacagatgagactttggactgggacttttgggttaatg

SEQ ID NO: 420958 - DNA, 602 bp, Homo sapiens
acattatgaagtatgttagttactagttttctgaggctgcaggatggcaatcattatacaatgtgaataaactacagaagaaagggcatatgagtaattttcagccctagaattggttctcttattgttcatcgcatatgcacccctcataaaaagtaccataaatacattccttcaacaagtgcaacaaaggaagcaaattcagaaatcattctcttgttacttccaatatgtgygtataccttaggcaaatgtctaggtctccatggtgggttctaacatgactatcctgtggcttcaccccatggggagacaaaaattttgtttgcagagagagtttatttttacagcaaatcagagaagaggtttccctccatatgaatccagaatctaaaccttaggtggacaacagaggtctaccttgaatagccatgaagaagttgtcttaaataggaatgttaatgcagaatgtagtccctcattaatacaggttaatacaaagattccttgtataactaaaggactaaagatccttttacgcaccttcttctttatatagctacttatttccgaataagtctgggaaataatcagttatattc

SEQ ID NO: 420959 - DNA, 431 bp, Homo sapiens
tgttaacatgttagcactaatataagcccattatgatttttttccttcaactgttttttatgcatagttttgtgttgtaattgtaattttttaatagcaatacctgaacacgtgatttttctagcacaatattaaattataattttttttgatatttgagcaaccataattttattaacataataatacccaatggattttggctatatcatcatttacctatgatttatccattgaaattattaaactcttaattgaatatctgtatgtaccagacatttgtttttgttcctgaaattctgcaagaaaggccataaatttccttttatcttacaaagcttaccttctatggagtaagacagtcgataaactaataatgctataatatacgttagatgattatraggactataatgaaaacaataaaacag

SEQ ID NO: 420960 - DNA, 628 bp, Homo sapiens
ctggttgctccttctttctcaggattcaatttctactcttcttttttttctattagtgacagtcacactaactttcttaatgttattgaagcatagcaagagcacgcccatgtctggggctttaagtttattcttccctccgactctatttcacatagatttccctggatatcttcatggctccttccctcaatgtctttagatttctgctaaaatgctaaatttaccrgaaagcgttttcctgattatctcatttagcacattctgttccacttttttgctttatttttcttcataacacatatcaccactctataagagtttatttgtatatatgtttgctatgtcttgtccattagactgtacatgccagagttctatatcaaagcaagactttgtccactaccaaattcatagcatctagaacattgcctagaatatggctgatacagtgtctgttgaatgaaggaatggatgaagaaaaatgaagacatgttatatgtttgctttttctgtgtggcattttctaagtaaaaatgaaagaaaagtattttttctttgcaacattctatattttaagtataattacatcaaaaatcttaaatgtaccattttgacatttcagcag

SEQ ID NO: 420961 - DNA, 505 bp, Homo sapiens
ttttgtttactcaggtgtaaaataagaattaaaatagtcctaaattgatagaattattttaaatattaacaaaatgagtataaaaaacttaggagaatgcctgggcaaggtaaacgattcaatatttattagtgatcataattaattactattaccaattattattttaatatgtgtgttctgtgtttgctggatggtgatagtaagacaaatagcacacaagtttgattcaatacaataacatttaaaatctttaaaatttgactttttatttaagtcaaaaaaaatccrggtgattaccttaatgctcaaaatgtgtaagaagtaacataaatttcaacatcatttttgattatttgtatgaaaaaagttaaatatacactttttaaataaggcataaagatgtgattaaaatacctatttgagaataagaataagcatcatactcaagaaaaaattagagtcatcttaattaaaatcaggaacaaaaaaatttctattaagt

SEQ ID NO: 420962 - DNA, 621 bp, Homo sapiens
ttgtatgaaaaaagttaaatatacactttttaaataaggcataaagatgtgattaaaatacctatttgagaataagaataagcatcatactcaagaaaaaattagagtcatcttaattaaaatcaggaacaaaaaaatttctattaagtaccatatctcagagtattctgaaaatttagttatttaaatatctaggagaaagaaataagacttgtaagaattggaagaaagaagattaattgtttttgtcttgtgaaagaaacttcagaaattctataataaaactattatagtaatagaatccaagaagtttgctaattgaaaaatacatgtattttctaaatatgagaaataactagtttaaaagttgaattgttaaaattcagatacaatgtcaataaaatttaaaactaaccagcatcagagcttataaaagaagaaatgtaatagcaagtggttaagtacaagaatttggcattgtatggaactgggattgaatctcaaattttaccaccaagagtttacatttattaatgttctctctgaggcagatgctattataagcaattactaggtaaataatttaatmttctaaacaactctgagctgggtgacaaaatg

SEQ ID NO: 420963 - DNA, 580 bp, Homo sapiens
ccaaaacaataatctactcataaggaaaatagacaaaccccaaatgagagactttctacgaaattacaaacttgtattcaataaaaatatggaacttaggaaagagactgaatgactgaggagctgttccaattttaaggagactagaggaacatgacaactaaattcaatgtgtgatcttggatatttagagaacctttcttgaataattgacaaaatttgagggagatctatgaattagatggtaatctaatgcatcagtgttaatttcctgacattgtggttatgtagaaaagagtayatttttagaaagtgttaagatataattgggttattgtgttttccactttttctcaggtggtagagaaaagcacattatatatatgcatatacataaatatatatgtatgtagatgtgtatgttttatgtacatagagagagacacagacacagagagagacataataaagcaaatgggaagatttcaatgaagagtatagtggagttctttttactatttttgtaccatctctgaaaatttgaagtcatttcagaatataaagttcaaaaaaagccaaa

SEQ ID NO: 420964 - DNA, 536 bp, Homo sapiens
catatgtaaataataaacactgtgattactgaccttttaataagcactatttttttcctttttttcccctctaatctgatcttaacaactctattgtcatcccccaaaatgtcttttgcctgtgtcaagaaaacccaagaacaaagttttttagggattttgaggttacactaatcaaacattttaggcaaatcttctctgcatgacctatttgcatgttagttgagaatgttacacttttgatagtaatgtttcagactcagactttctagtttggatcttggacaatttccaagacttcatagaaataattccttggtgaaactataygagtttatattattttaactggatttagattcctctgaattctttgtattgcactctttagaggttcttattggagtagccttaagtaattaaaggtcacaagggagtgctcaatactaatatctttatttacatagataccaataaaatggcctccctgaagtgtgtgtgtgtctctgtgtgtgtgtgtgtgcgcgcgcgcgtat

SEQ ID NO: 420965 - DNA, 444 bp, Homo sapiens
acaaaatactagcaaaccaaatccagcagaacatcaaaaaactaatccaccatgatcaagtaggctttatccccgggatgccaggttggttcaacatatgcaaatcaataaatgtgattcaccacataaatagaactaaaaaacaataamcacatggccatttcaatacatacagaaatggttttcaatacaatttaacattattcatgttaaaaaccttaaaaaaactagtcattgaagaaacatacctcaaaataataagaaacatctttgacaaacctacaaccaacaacatactgaatggcaaaggttggaagcattccccttgagaaccagaacaagacaaagatgcccactctcaccactcgtattcaacatagtactggaagccctacatggagcaatcaggcaagagaaagaaattgaaggcattcaaagagaaag

SEQ ID NO: 420966 - DNA, 624 bp, Homo sapiens
aggctgcatagaaagtcagaactagaagaggctggagaaataatctaacaacactacaaaattattttacaggtaagaaactgagtccctaaaaagttatgtaatttgttgaaagtcacacaactaattgataagagattcaagatgagaatttaggtttttgattcttagatgaaggcrttactctgtatagttcagaaaatataattctatattaccttgattaaactttataagctatccttcaatttaaaaagacttacataattaatgtcttcccaccatttcttttcttcttttaaaaaaaaattgcctacatttcttggtgattagatgaaaatattttggatatgaaatacttttctaggaattggggctcaggaggtttttcatggactccaaagactcatgcaccagagagagctctgtggtggggtagtcagaaaagatggacaggagcaaatctgaaagggtttttaccccatgttaagtaattctgactataacttaatagcaaagagaagactttgaaggattccaatgggacaagcactcgaataagtttattgcttcataaagctcaagctatgccaatattttaaacaaagcttggagtggaaaaca

SEQ ID NO: 420967 - DNA, 624 bp, Homo sapiens
aggctgcatagaaagtcagaactagaagaggctggagaaataatctaacaacactacaaaattattttacaggtaagaaactgagtccctaaaaagttatgtaatttgttgaaagtcacacaactaattgataagagattcaagatgagaatttaggtttttgattcttagatgaaggcgttactctgtatagttcagaaaatataattctatattaccttgattaaactttataagctatccttcaatttaaaaagacttacataattaatgtcttcccaccatttcttttcttcttttaaaaaaaaattgcctacatttcttggtgattagatgaaaatattttggatatgaaatacttttctaggaattggggctcaggaggtttttcatggactccaaagactcatgcaccagagagagctctgtggtggggtagtcagaaaagatggacaggagcaaatctgaaagggtttttaccccatgttaagtaattctgactatawcttaatagcaaagagaagactttgaaggattccaatgggacaagcactcgaataagtttattgcttcataaagctcaagctatgccaatattttaaacaaagcttggagtggaaaaca

SEQ ID NO: 420968 - DNA, 375 bp, Homo sapiens
atctctcagtgaacttctcaagagtagaactgaaatgatcaaacagataaggtagaaagctttataactacatgtaagcttcgaatttttagaaaaatttagtcaactattcaagtcaagtatattttaaacattattttagcatttaatctgaagaaaaatttggaaaaacagattttatagaactgttaggggttaatatatttacatataatattactcaaattgtctctataaatgctgcatacgttagttgttttaaaacattakttaaggatcatgtggctctatgaagaataataaaatatgtagaaaatatacaaaaaattatactctatcttttaaaggtatgattttatggatgatttttgttgt

SEQ ID NO: 420969 - DNA, 515 bp, Homo sapiens
gaacagcctggtactgctccaaaatagacaccaatggaacagaatggagaatccagaaataaattcatacacttgcagccaattcaattttgacaaaggtgacaagaacacatattggggaaaggccagtttttaaaataaatggtgctaagactggatatccatatgcagaagaattgaactagatccctttccttcaccatatacaaaaattaactcaaaatagattaaaggcttaaatgtaagacctgaaactatgaaactgctggaagaaaacattggggaagcacaacaggacattggtctgagacaagatttttggggtaaaacctcaaaagcacaggcaacaaaaacaaaaatagacaaattggattgcacccaggtaaagagcttctgcacagaagggaagcaattagcaaagtacagagacaacttatggattgagagaaaatacttgtgagctrtctatatgataagggattaataaccagaacatataaagaactcaaaaaata

SEQ ID NO: 420970 - DNA, 576 bp, Homo sapiens
tactcacctgctcacccatttcacagtatcagttggcacatattaaagtgtcaygttcaaagtattgtgctgctgctgacgtttataagtgtgagttgattggaaaaagtcataatttggcttcctctgaaaatcacctatcaagatgcaaaaatctaaagctttccctcagggaactcatctaaattccatctttgcctgtcattttttctcagttcctgtcattaaaatacatagtacctattgatcattctgccatatttttagagtgcttttgaaactggaaatctgtgaacttaattttattatttagagtattttgaaaaaggtcttcattcagctttgctacatgtacataaaagttaccttcaaaggcagaaccagccatccagtaggtaaggtaagcggattagggatcacacacttggtatgatttgagtagttctgggaagtcccatctcccccaatcaataatgcagtttgcttatgcttagaatttaattcctagagttccaaacttttgggctttgtagataagaatttgtgaacagtactcctgggagaaataacagaata

SEQ ID NO: 420971 - DNA, 576 bp, Homo sapiens
tactcacctgctcacccatttcacagtatcagttggcacatattaaagtgtcacgttcaaagtattgtgctgctgctgacgtttataagtgtgagttgattggaaaaagtcataatttggcttcctctgaaaatcacctatcaagatgcaaaaatctaaagctttccctcagggaactcatctaaattccatctytgcctgtcattttttctcagttcctgtcattaaaatacatagtacctattgatcattctgccatatttttagagtgcttttgaaactggaaatctgtgaacttaattttattatttagagtattttgaaaaaggtcttcattcagctttgctacatgtacataaaagttaccttcaaaggcagaaccagccatccagtaggtaaggtaagcggattagggatcacacacttggtatgatttgagtagttctgggaagtcccatctcccccaatcaataatgcagtttgcttatgcttagaatttaattcctagagttccaaacttttgggctttgtagataagaatttgtgaacagtactcctgggagaaataacagaata

SEQ ID NO: 420972 - DNA, 576 bp, Homo sapiens
tactcacctgctcacccatttcacagtatcagttggcacatattaaagtgtcacgttcaaagtattgtgctgctgctgacgtttataagtgtgagttgattggaaaaagtcataatttggcttcctctgaaaatcacctatcaagatgcaaaaatctaaagctttccctcagggaactcatctaaattccatctttgcctgtcattttttctcagttcctgtcattaaaatacatagtacctattgatcattctgccatatttttagagtgcttttgaaactggaaatctgtgaacttaattttattatttagagtattttgaaaaaggtcttcattcagctttgctacatgtacataaaagttaccttcaaaggcagaaccagccatccagtaggtaaggtaagcggattagggatcacacacttggtatgatttgastagttctgggaagtcccatctcccccaatcaataatgcagtttgcttatgcttagaatttaattcctagagttccaaacttttgggctttgtagataagaatttgtgaacagtactcctgggagaaataacagaata

SEQ ID NO: 420973 - DNA, 576 bp, Homo sapiens
tactcacctgctcacccatttcacagtatcagttggcacatattaaagtgtcacgttcaaagtattgtgctgctgctgacgtttataagtgtgagttgattggaaaaagtcataatttggcttcctctgaaaatcacctatcaagatgcaaaaatctaaagctttccctcagggaactcatctaaattccatctttgcctgtcattttttctcagttcctgtcattaaaatacatagtacctattgatcattctgccatatttttagagtgcttttgaaactggaaatctgtgaacttaattttattatttagagtattttgaaaaaggtcttcattcagctttgctacatgtacataaaagttaccttcaaaggcagaaccagccatccagtaggtaaggtaagcggattagggatcacacacttggtatgatttgagtagttctgggaagtcccatctcccccaatcaataatgcagtytgcttatgcttagaatttaattcctagagttccaaacttttgggctttgtagataagaatttgtgaacagtactcctgggagaaataacagaata

SEQ ID NO: 420974 - DNA, 484 bp, Homo sapiens
aacacaggcaaaaacaaggtatgctcaggaaaactagtatgttatgattaccccacctaaaatgtacagacacctcttggaagttcttaccagtgcagtgtctaggaatttgtctcctcctcataacagtgatgagggctcagaagccrttctacacaatgttactcttatgtgtagccataattagctgcttgagtggtaaacaatggagttcttcatctggcaagctagaattggaacttaaacattatagtttccatctgcctgttaactttaaaggagaagttttaatactggaaatacgtattcagaaaccaaaaaagtcattctgaatgtgagagtagagtgaagcaggtagaacatttattgctgtcacatttacttagcacagtggtcaccataacatagacactcagcaaaactcttttaaatgaatcttctgtttcttagctgatcattaaatagtgtttgacagatctcaaac

SEQ ID NO: 420975 - DNA, 513 bp, Homo sapiens
ttggtttccctggtatatcctacatcttcaggcaatatatatatatatgtatatgagttgagtgttcaaactgtgttcaaataaagcaaatgccaacctataaccaaaccagctgtttctgtacctcacttccaatttctgtgtatatacatacaggttaaacaaggaaaatcagttgataataaaatgcctataattaagctatagaatatgtcagtaaatttatatatatatatgtatatgagttgagtgctcaaactgtgttcaaataaagcaaatgccaacctataaccaaaccagctgtttctgtacctcacttccaatttctgtgtatatacatacaggttaaacaaggaaaatcagttgataataaaatgcctataattaagctacatttagaatatgtcagtaaattgacaacattaatgaggrtatgcattattctggaatgaacatgttcctccccaaatagtttcaaaagaatggaaagcatagctttccataataatggaa

SEQ ID NO: 420976 - DNA, 403 bp, Homo sapiens
tttccccttattcctagtttactaaaagtttttttttttaatcatgaatggacgttggattttgtcaaatactttttctacatgtattgaactcatcattatttatcttcctaagcctgttgacatgatgaattatcttagttgattttaaacattgaaccagtcctgcatatctgggawaaatctcacttggttgtggtgcataattatttttatacttgttggatttaattttttaatattttgtgggggatttttacatctatattcatgagagatattaatctgtacttttcttgcaatatcttcatctggttttggtattagagtcatgctggcctcacagaatgaattagaaagtattacctttgcttctatcttctaaaagagattgtatagaacc

SEQ ID NO: 420977 - DNA, 579 bp, Homo sapiens
atgcatttttttattttaaaaataggaaaattttaaagctaaagttgaaaataatacagggctttttagtcatagtcattttttattattwtgtctgtggctgattagcacagtgggtctaaattaatggccagaaaaatggtcacagaatgcctcaaagctcatagctgatgttggcctaatattgaccttacgatgttcacttatcattatgtatgaagaaatcacatagaagcaattacatttgataagcacttgttttctatcattttctttgtgaatgcataaaattgtgaatacatacacatagtgaatttgaaacaatgatgacaagattacatcttttagttttctttgtcgacatttagctgatgaacagtataggaaaaagtatccagaaggtttttaaagctatggctagtccagttcagggcaaatcaaaagtaccactaaatgacaaatattttctttcgatttaatccttgtgaaataagtcaactaaattatgcaattgtggtttcacatcatccttccccaaagaagttttctcattgctgaacaaggaaacattaatggatg

SEQ ID NO: 420978 - DNA, 569 bp, Homo sapiens
agggcaaatcaaaagtaccactaaatgacaaatattttctttcgatttaatccttgtgaaataagtcaactaaattatgcaattgtggtttcacatcatccttccccaaagaagttttctcattgctgaacaaggaaacattaatggatgaggaattttcagaccaatttagttgtttgtgtatatacatatatatatatatatgtgtgtatatatatatatatatatatgtatatacacacatgcatatatatacatatatatacatatatgcataccaggctttaaaacatgmtactttgtatttctatttttttcaacatttcctatacacatatagctatagaaaattcatgtatattaaaatgagtatccgtgtttcttaaatgatttttgaaagaattgtaatcactataaagagaatgtccctgaatctctttatagaattgctcttacataatgcacttccaatccctccaaaatggttctactcccatacacagatgtttttctttcttaaagtaggaaaacatacatagcataaaatgcacacaggcttattttaaaat

SEQ ID NO: 420979 - DNA, 556 bp, Homo sapiens
agggcaaatcaaaagtaccactaaatgacaaatattttctttcgatttaatccttgtgaaataagtcaactaaattatgcaattgtggtttcacatcatccttccccaaagaagttttctcattgctgaacaaggaaacattaatggatgaggaattttcagaccaatttagttgtttgtgtatatacatatatatatatatatgtgtgtatatatatatatatatatatgtatatacacacatgcatatatatacatatatatacatatatgcataccaggctttaaaacatgctactttgtatttctatttttttcaacatttcctatacacatatagctatagaaaattcatgtatattaaaatgagtatccgtgtttcttaaatgatttttgaaagaattgtaatcactataaagagaatgtccctgaatctctttatagaattgctcttacataatgcacttccaakccctccaaaatggttctactcccatacacagatgtttttctttcttaaagtaggaaaacatacatagcataaaatgcacacagg

SEQ ID NO: 420980 - DNA, 343 bp, Homo sapiens
cagcctctcgtgtccaggtgcaggtctactctgagcaagctttcctttgcaatgtattgaaggacaatgtctctgggtgcttaattactctcatcagcaccaccyctcagttcaggggtaatgtcccaaactcctcttccctgggtggtcaaggcattatctgtcccttacctagggaggcaagaagaccccacacccagaaaggcaggtctgggagagaccaggggagacagggctgagcctgacggacagtgagttgaaggattctgagcagaaggggagggcaaaggtaagtcagaggctgcctgactgatttctctggcttcataagcagaatgccttg

SEQ ID NO: 420981 - DNA, 499 bp, Homo sapiens
tgttatagtaaaggaaagctccctcccttccctaagttagtgcctttcagaatgtgagcatttgtcaagtggaattctgtctgatcctttttcattttctgagctattataagtgctttcttttcctttaactrtcataaatggtttttcttcccttaactaagtaaagatttctggaacaatgttttgaccagattgaaaccagcttctgtcctatctactagtcattcatttcttgatttctcgtgcatttctaaacatagataagtttctaatggtgaagaaagtgaaacagaaaggaaggaaagaagcaaaagctgggttgggtcaccatattgagcgaaggatatgcttgtggggaatcctacactgtgatattggagtaaacagttacattatggggtgagaccaggtgagatggcttatgcctgtgatcccagcactttgagaagctgaggtgggaggattgctttaggccaggagttcaagaccaggctgg

SEQ ID NO: 420982 - DNA, 556 bp, Homo sapiens
atgttaatggggaagtatctgtgggagagtgacctcttatccctgagggccgccatgtacagctacacaggaggcgaactgcacaattccctggaatgtgcgtgatgctccctggagttgtgcagtgtggcagtgctgtgtgcatcaagggcaggagcaacggcagtccttcaaaggcttaagtaagtggcatagaaagtggayagtccttttaagttgcatggcttcagacacttctgttagtgtgataactactgcctgtgcctctcactctttgaagaggaacttgctggtgatggggcttctcatggggaagctgggaagctccctaccaagggggagggttcctaagcctgacaaggactgctcatcaggtgctttggtatcctgtagactgggctaagaaacctcacaccagggtccactctccagctggtctccactgggcctagggagaccaaaagacctgcagttgctgaacctctcttattgtacctgtgaagccaagtaaaccatttgttcacttatgttaaagaataagcttgatcattcatgt

SEQ ID NO: 420983 - DNA, 599 bp, Homo sapiens
gtaagtggcatagaaagtggacagtccttttaagttgcatggcttcagacacttctgttagtgtgataactactgcctgtgcctctcactctttgaagaggaacttgctggtgatggggcttctcatggggaagctgggaagctccctaccaagggggagggttcctaagcctgacaaggactgctcatcaggtgctttggtatcctgtagactgggctaagaaacctcacaccagggtccactctccagctggtctccactgggcctagggagaccaaaagacctgcagttgctgaacctctcttattgtacctgtgaagccaagtaaaccatttgttcacttatgttaaagaataagcttgatcattcatgttcaaaatagttaactcttttttgtgaattaatagtctggctataattacatttgacatttcagtccagtatatttgtcatccagatgaagaagctgccagccgcatttttttccagcagttttacttgactttcttttaattttatgtacaaggtgttatttaagtgcacagattaatagagataatwtttatatgtaaaattatttttattgcatacctctatg

SEQ ID NO: 420984 - DNA, 571 bp, Homo sapiens
gttttttggtctctagttcatgtagttttgctctgatctttgtcgcttattttcttgtaactttgagtttggtttgttcttatttttctagttccttcaagtgtgatgttaggtaacttgtgacctactgttttgatgtaggcatttagtgctataaacttccctcttagtactgcttttgcagtatctcacaggtttcactatgctgtattttcattttcattcaaggaattatgcttcattcttcatcgacctttttagtgaacacccaggaagttttcctgtgtgcttgtagtctgcctccctttttccaattacaacaccttggtctttctttgggcaataagctggtgttctagagtaagatggtaaggatgtgacccaatcctggcaatcacagcattccacctatctcacattaacaattggtttgggactagtgggtgcttaagacytgtccagtaagactcatcctgggatttctattcaagtattttcaaagagagactcatttactacagttattaaactcatgggaaagacaataggagctgctagtagctaccttgaa

SEQ ID NO: 420985 - DNA, 605 bp, Homo sapiens
tgactcccctctgcaagaacacctcatgacacagggaaagcttacaatgtagtggcaaattgttaaaaataaagtacaaactcaacatgaacaaaatggatccatatatacaaatatctggaaaacaaaaaatatagaaaattattttaaatatgtaagtcatcagagataatcgctactcacacacacattctctctcagatttatacataggctttctgaatttttcacaaaagtatttgagcacatagtatatctctaacaggctggcgggctcttttttttttttttttaaagcccatactgtcagtctcttttcaatgagacaatataactcctaatctttcagatctaagctcttcaatacacrtactacctgagaagtttgaaagcccccagtgaaccttgttccccagctctttctgctgattcccttctctctttctgctaacgagacgtctgtggttatttactgggtaatttcaccagccagaaccactggggctaatccaagggtttcttttcctcagaaacaaaaacaacagcagcaaaatctccttatttataatattcaacacctcccacaacagtcacataatattcta

SEQ ID NO: 420986 - DNA, 581 bp, Homo sapiens
gccatgggggacaagccagattccagatggcaggaggtggggttctaagatcatgttctgacactttgaagttgagtcacttgggcaagtcgctgtccctgcaagcctcaagtggcccagtgagtgctctgttagcacactgaaactgtccctataaactttataaaattaatcagggaagaatggaggggaagaaattaaaataaaccaagcttatagcacattcagcacattcactaggtctcagcctgctttctgacctgtttccacatagctgtgcattgcctattgtcctagaatygtgtagaccctgttagataattataggtccccttaacagctctatagataccaacttgaacattatcaaacattacgttttccatctgagatgttctttcaggtcctgcatgctgacaccaactggtctgaaggactgcatgacaagctgactcaccaaagaatgcagtttccacatcctgaggatttcatctcctttaccccaatcaatcaatgacgccaattttccaatcctttgctctccattgtccccttaaaaatcgcagcccagaactcggcca

SEQ ID NO: 420987 - DNA, 583 bp, Homo sapiens
ggctcacgcttctgcaggctgtacaggaaggatggtcctggcacctagctcggttctctggggaggcctcaggaaacttttaatcatggcggaaggggaaggggaagcaggaacgtcttacatggccagaacaggagcaagagagagaggagggaggtgcacacacttttaaacaaccagatcttgtgcacactcactcactctacagaatcaaggtgggggatggtgctaagcattcatgagaactccacccccatgatccaatcacatctcagcaggccccacctccagcagttggaattacaattcaacctcggaacttgggtggggacacagatccaaaccatattaccccattatcttaacttaagcatttatttctgctgacttcaagtctttagccaaagcttaactctttcaaccagttgccaatcagaaaatctctgaatccacttgtaagtccctgcttcaagataacccacccctttaagctgaaccaatgtacatcttctatgtattgatttrtaattttacctacaattcctgtcttcctaaaatgtataaaaccaacctgtaacccaat

SEQ ID NO: 420988 - DNA, 503 bp, Homo sapiens
cttttctggctgtcaagaagagttcccacaaaaggccatttgtcccccagcaaaccctctggccgcaccagcctccctttggaaagagagaaggatccaagagctcctgatttcttttaggaatgtgcatggaaatattttccgtgttgaatggaaagaagaaaccaacaaggtgtgcaacaattctattctaacactaactaccaagagttagcatagacctcacaagggctccccaaggctcccactacttcagacacatgttggtggtccccagttcacccacacttctaaccaactggctacaaatcatgagctcccacaacttcctcaggttcaatcactcacaagaataactcaaagaattcaggaaaatgctgtacttacamttacagttttattataaagaatacagaccaagaacagccaaaagaagagactcataatagcacaagatgagtgagggtcccaaatgcagagcttccttgccctgaccccatgaa

SEQ ID NO: 420989 - DNA, 533 bp, Homo sapiens
taaattagtagattgaggtgatgtttataggagtttaaagcacagatagacaactagattgtcctacctacccagactgtgcttctcactctcactgtgccctttcttaatctttggaaatgcttttatttatatataaaataggctataacttcatatagttgtattatgaaaagttaatgcacagaaaaagacttgtgctaggtatatggtttcttctcaattaaatggaagccattgcctgtatttgtcaatagaattcatcatactttgtctcacatattcagtgctttacatcattgttggcacatggtatgtttagactgcgcaaatctcctccaaatccctcatagccactgatctctttactgtctccatagttttgctttytccagaaggtcatgtagttgaatcacacggtatgtagactttcagactggcttctttcactcggcaatatgcatttaaaggttcctgtgtgtcttctgtggcttgatagaataatattccattgcctggatataccacagttt

SEQ ID NO: 420990 - DNA, 588 bp, Homo sapiens
ttacacttgtttgcagatgatatgattttatatttggaaaaacgtagtgcccttcgccaaaaaactattagtactagtaaactaattcagtaaagttgtagaatacaaaatccatccaacatggatgaaactggagaacattatgttaaataaaataaagcaggcacagaaagaaaaattgtatatgttctcactcatacgtggaaattaataattaaaacaattgaactggagatagataatagaatgatggctaccagaggctgagaatggtattgggccaggggaacttgggatggttaatgaatgcaaaaatatagattaaatgaataaaatcttgtatttgatagcacaaggtctctatagtcaaccataacttattgtatattttaaaataaataagagtgaaattggaakgtttctaacacaatgaaatgataaatgcttgagataatgaatacctccattaccctgatgttattattacctactgtatgtctgcatgaaggtattacatgtaccccgtaaataaaagcacctgttatgcacttataattttttaaaaaatgcaagtttttaaaaaattat

SEQ ID NO: 420991 - DNA, 521 bp, Homo sapiens
acaaaaaaagattaaataagttccatacctcaagtaattaaaactrctctgtttttctattcatataccagtaccatattattttaattagagtctttatagtatgctatgaaatctggtttatctgttttaatattctaatttctggttttatcttttcagcattttactggctggtcttgcctatttgtttattcatgtgaacttttgaaccaacttatctaacagcatacaaagtctgctttatattctttcagaattttattaaatttacaaatcaacttagagataacatcttcttacagtgagaatctctaaccaaaaccagggatgtgttactatttgttaatgcctacttttgaatttttcagaaacacttttaagttttcaaaagtttttatgtttcatttgtaattcatctacttcatcaaatgaatcaatatttcctttcagctcattatattttcatattctgtgagttgcatgagtacccaagaagttgtattcttcattattatggt

SEQ ID NO: 420992 - DNA, 487 bp, Homo sapiens
acagcatacaaagtctgctttatattctttcagaattttattaaatttacaaatcaacttagagataacatcttcttacagtgagaatctctaaccaaaaccagggatgtgttactatttgttaatgcctacttttgaatttttcagaaayacttttaagttttcaaaagtttttatgtttcatttgtaattcatctacttcatcaaatgaatcaatatttcctttcagctcattatattttcatattctgtgagttgcatgagtacccaagaagttgtattcttcattattatggtgtaacatttgacatacctctaagatctgtccaactgattatattttttaggctagaattccactttatttaccctcagaatcattaccaatgctctcttatctctttcacacaccttattcattcctttatttttagcctttttaatgcactttgctttaggtttatctctcgtgtgcagtgcatagttg

SEQ ID NO: 420993 - DNA, 608 bp, Homo sapiens
ttcatttacaagttattgaactcattaagtgccacatatgtgctgagtattggagatgtgataatgattaaaacacagtctccatttctcaaaaatgacaatatattattgaaaaatgctaggagagtggatgttgttttcccaccacaaaaatarcaaggggaagaatcaattttgatgaaagataataatttaagttttggaacatctgaaaaattataaaatttcctgagcttcgtttatttaaaaaatgacagaatttatgatctccaaatccactcttgtcggtatagaatcattttgtctatgtgcttttttcctactaaatgtggcctaattttagtttccaatgtaaccatgtttacattgaagtaaatctattggcactagtcttcccattctgaaaaataatttatcatccaggcctcagcttggcttggaaattgcatttttgtgagtgagatagtttcattctcctttcaaagggaatcagtggtttgtgaagcatctatagataggtaaatattgaacacatattttttgctggatagaaatattccaatgagaaaagcatattcctttccaactaatcaattttctttgagaag

SEQ ID NO: 420994 - DNA, 608 bp, Homo sapiens
ttcatttacaagttattgaactcattaagtgccacatatgtgctgagtattggagatgtgataatgattaaaacacagtctccatttctcaaaaatgacaatatattattgaaaaatgctaggagagtggatgttgttttcccaccacaaaaataacaagrggaagaatcaattttgatgaaagataataatttaagttttggaacatctgaaaaattataaaatttcctgagcttcgtttatttaaaaaatgacagaatttatgatctccaaatccactcttgtcggtatagaatcattttgtctatgtgcttttttcctactaaatgtggcctaattttagtttccaatgtaaccatgtttacattgaagtaaatctattggcactagtcttcccattctgaaaaataatttatcatccaggcctcagcttggcttggaaattgcatttttgtgagtgagatagtttcattctcctttcaaagggaatcagtggtttgtgaagcatctatagataggtaaatattgaacacatattttttgctggatagaaatattccaatgagaaaagcatattcctttccaactaatcaattttctttgagaag

SEQ ID NO: 420995 - DNA, 608 bp, Homo sapiens
ttcatttacaagttattgaactcattaagtgccacatatgtgctgagtattggagatgtgataatgattaaaacacagtctccatttctcaaaaatgacaatatattattgaaaaatgctaggagagtggatgttgttttcccaccacaaaaataacaaggggaagaatcaattttgatgaaagataataatttaagttttggaacatctgaaaaattmtaaaatttcctgagcttcgtttatttaaaaaatgacagaatttatgatctccaaatccactcttgtcggtatagaatcattttgtctatgtgcttttttcctactaaatgtggcctaattttagtttccaatgtaaccatgtttacattgaagtaaatctattggcactagtcttcccattctgaaaaataatttatcatccaggcctcagcttggcttggaaattgcatttttgtgagtgagatagtttcattctcctttcaaagggaatcagtggtttgtgaagcatctatagataggtaaatattgaacacatattttttgctggatagaaatattccaatgagaaaagcatattcctttccaactaatcaattttctttgagaag

SEQ ID NO: 420996 - DNA, 608 bp, Homo sapiens
ttcatttacaagttattgaactcattaagtgccacatatgtgctgagtattggagatgtgataatgattaaaacacagtctccatttctcaaaaatgacaatatattattgaaaaatgctaggagagtggatgttgttttcccaccacaaaaataacaaggggaagaatcaattttgatgaaagataataatttaagttttggaacatctgaaaaattataaaatttcctgagcttcgtttatttaaaaaatgacagaatttatgatctccaaatccactcttgtcrgtatagaatcattttgtctatgtgcttttttcctactaaatgtggcctaattttagtttccaatgtaaccatgtttacattgaagtaaatctattggcactagtcttcccattctgaaaaataatttatcatccaggcctcagcttggcttggaaattgcatttttgtgagtgagatagtttcattctcctttcaaagggaatcagtggtttgtgaagcatctatagataggtaaatattgaacacatattttttgctggatagaaatattccaatgagaaaagcatattcctttccaactaatcaattttctttgagaag

SEQ ID NO: 420997 - DNA, 510 bp, Homo sapiens
ctatgttctctgtaggcatggtaatggcagctcctagcttagtgctgacaaatacaagggaaaataaatggtaacccaatgtaaacccaaacatcacaaaaattgtgatccaaaaaatcaaaggtgagcaggtgtttggtctttttatatctattacttatgatcaatatgttaagtccacaaaaatctagaatctatgttttaaaaaatggtctataaaataggatattacaaaagagtattaaaatgtaagttatgccttgatcattgtttatgtaatctgaagaagtcaacattaacagacaataaattaagcataaaatgtcgctgatccttttctgtggtagacagtctctaaatgacttctagcaatccctgctttctagtatccattccctcatgcrtataatctcctcactttgagtaggggcaggactagtgacttctaaccaatagaggtaataagcttttacttctgagattaggttacaaaaagaccctgttttttgt

SEQ ID NO: 420998 - DNA, 532 bp, Homo sapiens
tggggggtcaatgaagaaattaagaaataaatgaaaaacttagtgaaacaaatgatgagggaaacacaaaatacccaaacctatgtgatagggcacaagcagcgctaatagggaagtttatagctataagtgcctaggtcaataaaggaggaaaacttcaaataaacagcctaaagatgcatcttaatgaaatagaaaagctagagaaaacaagacccaaaattagtgagagaaaaaatttaataaaaatcatagcagaaataaataaaactgaaatgaaaaaatasagaagatcaatgaaaaaaagtgtttttcttttttgaaaagttaaacaaatttcacaaacctttggccaaactaagaaaaacagagagaagaaccaaataaataaaatcagaaatgaaaaagtcattgcaactgatactccagaaattaaaggatcattaggggctacaatgagcaggtatatactcataaattggataatctagaagaaactgatgaatttctaaatacatacaacctaccagat

SEQ ID NO: 420999 - DNA, 629 bp, Homo sapiens
cattccagttttacagatgaataatctattgaaatgcttctctgagggccacaagcatagacagaatctcactatcaagattctttttgctcttggtaaaggagactccaaagaaaaaagtctgaaaaagagatataactaattacctacttctcatatatacaattccagattaactacacctgtggctctctcacattttttaaattcagaatgatrgactcattaatttagttataaatcttacaagaataatttcttatgcatttaattctcatttagcactaacatttataagaaaaattttcttaataagaaggttgtattgaattataggttccctggagtgtatgtgagcatgtgtatgcatgtgtgtatttacgaaataacaagtaagaatctctaattttcaaaaaagcttacttgtaatatatccaaaaaggggtggtgggagtcatataagctcatactgcctttctaatgagagaaaatagttaaattttgataaccccaaaccaataaatgttatttgtttcatttaagcacagagaactgaaagggctctgatgtcaaatactagaaaaggagcacaaaaatcatagctatccaaaatatcttggtcttatttc

SEQ ID NO: 421000 - DNA, 569 bp, Homo sapiens
tgataaccccaaaccaataaatgttatttgtttcatttaagcacagagaactgaaagggctctgatgtcaaatactagaaaaggagcacaaaaatcatagctatccaaaatatcttggtcttatttccattgcaggaatttttttatagtaaatactaattccccagactttccacccattttaatcccaacaataagtaggtcatatctggccagtccaytgatttttgatcttacttaacataagaatattaattaatgaaaatgaataaatcgcaattttttatctttaatggtattgttcctatgaaattaaagtcaaaaaacctaaatattgtatttactaaatttgtgggcagggttgctcttaatatatgagagacagaaagagagagagagaagaaagagaaagggaagaagagggagagagggaagattcttgttagttctaaaacataataaattttaattgatttatctatgaaaaagaatactatttaggcaaattcttcaagagaactcaaataccctatttaaaatttggaaataaaaacatttctaaacaagaa

SEQ ID NO: 421001 - DNA, 577 bp, Homo sapiens
atgagcttcaagtatttaatattctataaagctataaatcctacagaactggtcaataaagtcccttgtctttaagacttaattattaattcacaagaaggtataagcctagtayttgctacgctatgcctttcccttaatacattgctatacttggaggaataatgcatgcaaaacacatctttgataaaatgttccttctatacagtgaagatttcaaacttccactttaggaaatgtagaaaaactaacttttcagaacaaaatacataaagggctcaatgcctaaaatgattgaaattgtcatatatacaaaaataaaacagtctttcagtagtaattggataataaatatgtattgatatttattctaattagagtttattctaatagacttaagaactctctttaattatattttaacaaaaacattacttttatctgattaaaattatctgcctataaaattatagaaacataatgttaaactttactgacctccacatttatgccctcaggggaaataactgttaatttgttaatggttaggtaatatggtactttgtgttgatttgat

SEQ ID NO: 421002 - DNA, 599 bp, Homo sapiens
ctgattaaaattatctgcctataaaattatagaaacataatgttaaactttactgacctccacatttatgccctcaggggaaataactgttaatttgttaatggttaggtaatatggtactttgtgttgatttgattatgaagtgatatgtataaatacatccccctataatatgtgaatgcatctttttgttaaagatgtaaataaatacaaatgcatatagaataaactaaaatggagtcagtattagacctttttcatataaaygcttacatatttacattgatgacagctcctcaaaagatataacagatgttagtttatccaacagctgctaactatgctaaagtctgcacattttcagaaagagtcaagtttagattactgatgctattgtaatgatttcagaaagggaagttagtctagagaaatttagagacatttaatgagtttatttgaactgaatgcaggttagaatgataatgcttacttataacgcatgaacatccaccataattttctaatataccatatacattagaaccaagtattacacaagagaaccatatttttctgcgttgtggtcaagtcttgcctca

SEQ ID NO: 421003 - DNA, 599 bp, Homo sapiens
ctgattaaaattatctgcctataaaattatagaaacataatgttaaactttactgacctccacatttatgccctcaggggaaataactgttaatttgttaatggttaggtaatatggtactttgtgttgatttgattatgaagtgatatgtataaatacatccccctataatatgtgaatgcatctttttgttaaagatgtaaataaatacaaatgcatatagaataaactaaaatggagtcagtattagacctttttcatataaatgsttacatatttacattgatgacagctcctcaaaagatataacagatgttagtttatccaacagctgctaactatgctaaagtctgcacattttcagaaagagtcaagtttagattactgatgctattgtaatgatttcagaaagggaagttagtctagagaaatttagagacatttaatgagtttatttgaactgaatgcaggttagaatgataatgcttacttataacgcatgaacatccaccataattttctaatataccatatacattagaaccaagtattacacaagagaaccatatttttctgcgttgtggtcaagtcttgcctca

SEQ ID NO: 421004 - DNA, 599 bp, Homo sapiens
ctgattaaaattatctgcctataaaattatagaaacataatgttaaactttactgacctccacatttatgccctcaggggaaataactgttaatttgttaatggttaggtaatatggtactttgtgttgatttgattatgaagtgatatgtataaatacatccccctataatatgtgaatgcatctttttgttaaagatgtaaataaatacaaatgcatatagaataaactaaaatggagtcagtattagacctttttcatataaatgcttacatatttacattgatgacagctcctcaaaagatataacagatgttagtttatccaacagctgctaactatgctaaagtctgcacattttcagaaagagtcaagtttagattactgatgctattgtaatgatttcagaaagggaagttagtctagagaaatttagagacatttaatgagtttatttgaactgaatgcaggttagaatgataatgcttacttataacgcatgaacatccaccataattttctaatataccatatacattagaaccaagtattayacaagagaaccatatttttctgcgttgtggtcaagtcttgcctca

SEQ ID NO: 421005 - DNA, 514 bp, Homo sapiens
atccctgttgccaaattttaatgaaccttacttctaataaagaatagcaaatcctaatattaaggccttggacctataaagacatactaaagagggagcttatcttgtcaaatatttgcacgattgcattaaaggatgataaataagacgtgcaaatccatgcttaaatttcctttgtctaagaatatgtttctgtctctaatctatttarggagaggttatggtctattggaatttccctggggtaggtttaaatacattttgctctgaagagcgacttgtgagtaaatttgatgaaatgattacaacctccacatagaagaaagcataataatctataaaattgctgtacagacccaagtgtaggttgttagcaccaaccccatcagtcattcgccccgaacaagcattgaatgacataagacagaatcttgaatagactaatgtttactactttgagtctaagggcagaaatcatggcaggttatctaagcactgtttcagcattgcattt

SEQ ID NO: 421006 - DNA, 448 bp, Homo sapiens
atgtttactactttgagtctaagggcagaaatcatggcaggttatctaagcactgtttcagcattgcatttgagatggaataaagtcacacctgtataattcatgatttagaagtcaagaaagatctagatcagaaaggagatctgcctaaatctggaagattctaaactgggatatgcacacataggtttatttgaatctacagcacaatattcactatacaaggctgattttttwaaaaagttatcattatttaaggcaaagactcaccaatatttgcgacaaaaacattcaagttttttttaactttgtaagttacatcaagtctaagtaattaaaagctaaaaataacaaaaaccaatattttttaaaagctctattattaaatatcaaaatacaaactaaaaacacatgttttctatttatttgaaaaatatttctgaggcct

SEQ ID NO: 421007 - DNA, 604 bp, Homo sapiens
tttcctcagtgattctttttaaacctctatacttgtcagcttcccttttactagcatataccaatagtaaaagtgtcatctgtaagcagaagctcctcatcttaatacctaaacacgttaattctttattcatgagtatattctttaaggaagtctgaaacttggttcattcaaagctggaaagaaaaaaatcaagrtgattgtctaattctaaaatatttgtcaacattttactatatttcaatgttttagaaatattttaatgttccactgttctcacaatgaagtgtaagcatgccattttccaagtaacagagatacaaattgaccacagctattaatttaggttaactgttaaatcaacttttacaaaacttttagttaggcaagtcattttattccttttgttttttttctgctgcactctgaggaaggtgtctgactttttattaaaggcacataatgactgagatgctggtgtcatctaaagaacattcagataatttgtaatagtaattagaagagactacaattattcttggttgaaatactttagggctaaagatttttctttagggtatgatgttttataagatatcaaaat

SEQ ID NO: 421008 - DNA, 634 bp, Homo sapiens
tatgaaacaataaaaaaaaggattctgaacagatctaatatataactgtctttgtaatcctctctagtcttatcttgctatttcctttcaagaactttttctatgatgcttttttttctttagtccctagagaattattttctaactcattatttgagttttttagcccaatatcattatactattaaattttaagcaaattgttacagctgtaagcaaatttttacaactgtaagcaaattgtaagcaagtttattttccctgcaacttggtatacttataccatggctgacgttttttcagatgaaacattttgccaagcaggttatatgttgtggtaaaagaatggcacaacttacaatgagtaagaagaaagtgaaacaatcttgtgtctactggaacctgaaagaccttttccttgagagaatagaaaagaacagttccttgctgaagggaaacaaagaaaacagtataactgcttaaatagaaaccataagaagttcttttggtacaatatcatttgaattgtaattgttgctgactttagtattgttctgaactttaaattcatcaagagtgctattaaaaatatkggtcatttatacccgttttaatgggtccatgaagcaatgat

SEQ ID NO: 421009 - DNA, 344 bp, Homo sapiens
aattgtcttgctcttttgctatttgtatgtccttctacctcatgttatcagatttcagctcctacttagtactaactttaatcmgttttttaaaaactataaatacatttaacaggattatacaaatacagactgtattttttaattatgaaaacagttatatttatgtattgtttacatggtcccactattaatattattgatttgtgattgtatattacagccagaagaggtgttctactttattctgcttccatatctgaaagccatggtccacagaagtaggaggtgcaacccaatatgcagataaatcataaaatgaaaatctgtcattatgttttagc

SEQ ID NO: 421010 - DNA, 344 bp, Homo sapiens
aattgtcttgctcttttgctatttgtatgtccttctacctcatgttatcagatttcagctcctacttagtactaactttaatcagttttttaaaaactayaaatacatttaacaggattatacaaatacagactgtattttttaattatgaaaacagttatatttatgtattgtttacatggtcccactattaatattattgatttgtgattgtatattacagccagaagaggtgttctactttattctgcttccatatctgaaagccatggtccacagaagtaggaggtgcaacccaatatgcagataaatcataaaatgaaaatctgtcattatgttttagc

SEQ ID NO: 421011 - DNA, 344 bp, Homo sapiens
aattgtcttgctcttttgctatttgtatgtccttctacctcatgttatcagatttcagctcctacttagtactaactttaatcagttttttaaaaactataaatayatttaacaggattatacaaatacagactgtattttttaattatgaaaacagttatatttatgtattgtttacatggtcccactattaatattattgatttgtgattgtatattacagccagaagaggtgttctactttattctgcttccatatctgaaagccatggtccacagaagtaggaggtgcaacccaatatgcagataaatcataaaatgaaaatctgtcattatgttttagc

SEQ ID NO: 421012 - DNA, 588 bp, Homo sapiens
acaattcatagccaataatatttcttctgaactctcaccttctttggggggtaggggtgagatggagttttgctcttgttgcccaggctggaatgcaatggcacgatcttggctcactgcaacctccgcctcccaggttcaagtgagtctcctgactcagcttcctgagtagctgggattacaggcrcaccacctccacgcccagctaattttttgtatttttagtagaaattgggtttcactatgttagccaggctggtctcgaactcctgacttcaggtggtccatccgcctcggcctcccaaagtgctgggattacaggcgtgagccactgtgcctggacctctcacctattcttcctgctaggactttgtcatattttttgagtgggctttggaaacaaatcctggcattgtaccatttatctgtaaatattttactgtgaatctctaaacaaaaatcacaatactattatcacacaaaaatagtcataatttttaatatcatcaaatattccatcaggattcatatttctcaaatattcttttaagagtaagtttgactcagagtccatttaaattagtttat

SEQ ID NO: 421013 - DNA, 585 bp, Homo sapiens
gacagaaactattgccaatatcttactgttcataagtatgccatgtgtcatctatagawgaaagggagcaaggggtaggcagaagtatttttagctagtacattatgatgctgagaaaacaatcaagagaaggaagggagaatgggtacagataggcagctagaagaagctgccaagggaataattagatgaagaaggagaccaaatcaacataagctttgggccaaggttaatagcactgcagattttcagcacaaagatcaaatctcagcagcaagattctggtaaaataaaagtctctcctttcatccattgctccttccaatacggcacaaagcttcccagactcagaatttggctgcctgccatatgactaatatgtgaaccaattcacttatcttcacttttatactatttcagttccagtatcaatatgacttcagccttctccatcttcacaacagacaaagaaaaaagagtttggaaagtataattaaatatttataacttacactggtattttctcagaacaaaagattagttttagtttgagaaatgaaaatatttcttcattgattagaactt

SEQ ID NO: 421014 - DNA, 585 bp, Homo sapiens
gacagaaactattgccaatatcttactgttcataagtatgccatgtgtcatctatagatgaaagggagcaaggggtaggcagaagtatttttagctagtacattatgatgctgagaaaacaatcaagagaaggaagggagaatgggtacagataggcagctagaagaagctgccaagggaataattagatgaagaagkagaccaaatcaacataagctttgggccaaggttaatagcactgcagattttcagcacaaagatcaaatctcagcagcaagattctggtaaaataaaagtctctcctttcatccattgctccttccaatacggcacaaagcttcccagactcagaatttggctgcctgccatatgactaatatgtgaaccaattcacttatcttcacttttatactatttcagttccagtatcaatatgacttcagccttctccatcttcacaacagacaaagaaaaaagagtttggaaagtataattaaatatttataacttacactggtattttctcagaacaaaagattagttttagtttgagaaatgaaaatatttcttcattgattagaactt

SEQ ID NO: 421015 - DNA, 534 bp, Homo sapiens
acagaaactattgccaatatcttactgttcataagtatgccatgtgtcatctatagatgaaagggagcaaggggtaggcagaagtatttttagctagtacattatgatgctgagaaaacaatcaagagaaggaagggagaatgggtacagataggcagctagaagaagctgccaagggaataattagatgaagaaggagaccaaatcarcataagctttgggccaaggttaatagcactgcagattttcagcacaaagatcaaatctcagcagcaagattctggtaaaataaaagtctctcctttcatccattgctccttccaatacggcacaaagcttcccagactcagaatttggctgcctgccatatgactaatatgtgaaccaattcacttatcttcacttttatactatttcagttccagtatcaatatgacttcagccttctccatcttcacaacagacaaagaaaaaagagtttggaaagtataattaaatatttataacttacactggtattttctcagaacaaaa

SEQ ID NO: 421016 - DNA, 539 bp, Homo sapiens
aagaaggagaccaaatcaacataagctttgggccaaggttaatagcactgcagattttcagcacaaagatcaaatctcagcagcaagattctggtaaaataaaagtctctcctttcatccattgctccttccaatayggcacaaagcttcccagactcagaatttggctgcctgccatatgactaatatgtgaaccaattcacttatcttcacttttatactatttcagttccagtatcaatatgacttcagccttctccatcttcacaacagacaaagaaaaaagagtttggaaagtataattaaatatttataacttacactggtattttctcagaacaaaagattagttttagtttgagaaatgaaaatatttcttcattgattagaactttatgaatcaaattagaaatgaacgtccatcttcaaaattcctagagttttctttgaaagagtagctttgttttttttttaagttgttaaatttgcttttctgagttttgaattctctaattgctagactgagaatatgtcataaa

SEQ ID NO: 421017 - DNA, 539 bp, Homo sapiens
aagaaggagaccaaatcaacataagctttgggccaaggttaatagcactgcagattttcagcacaaagatcaaatctcagcagcaagattctggtaaaataaaagtctctcctttcatccattgctccttccaatacggcacaaagcttcccagactcagaatttggctgcctgccatatgactaatatgtgaaccaattcacttatcttcacttttatactatttcagttccagtatcaatatgacttcagccttctccatcttcacaacagacaaagaaaaaagagtttggaaagtataattaaatatttataacttacactggtattttctcagaacaaaagattagttttagtttgagaaatgaaaatatttmttcattgattagaactttatgaatcaaattagaaatgaacgtccatcttcaaaattcctagagttttctttgaaagagtagctttgttttttttttaagttgttaaatttgcttttctgagttttgaattctctaattgctagactgagaatatgtcataaa

SEQ ID NO: 421018 - DNA, 539 bp, Homo sapiens
aagaaggagaccaaatcaacataagctttgggccaaggttaatagcactgcagattttcagcacaaagatcaaatctcagcagcaagattctggtaaaataaaagtctctcctttcatccattgctccttccaatacggcacaaagcttcccagactcagaatttggctgcctgccatatgactaatatgtgaaccaattcacttatcttcacttttatactatttcagttccagtatcaatatgacttcagccttctccatcttcacaacagacaaagaaaaaagagtttggaaagtataattaaatatttataacttacactggtattttctcagaacaaaagattagttttagtttgagaaatgaaaatatttcttcattgattagaactttatgaatcaaattagaaatgaacgtcyatcttcaaaattcctagagttttctttgaaagagtagctttgttttttttttaagttgttaaatttgcttttctgagttttgaattctctaattgctagactgagaatatgtcataaa

SEQ ID NO: 421019 - DNA, 539 bp, Homo sapiens
aagaaggagaccaaatcaacataagctttgggccaaggttaatagcactgcagattttcagcacaaagatcaaatctcagcagcaagattctggtaaaataaaagtctctcctttcatccattgctccttccaatacggcacaaagcttcccagactcagaatttggctgcctgccatatgactaatatgtgaaccaattcacttatcttcacttttatactatttcagttccagtatcaatatgacttcagccttctccatcttcacaacagacaaagaaaaaagagtttggaaagtataattaaatatttataacttacactggtattttctcagaacaaaagattagttttagtttgagaaatgaaaatatttcttcattgattagaactttatgaatcaaattagaaatgaacgtccatcttcaaaattcctagagttttctttgaaagagtagctttgttttttttttaagttgttaaatttgcttttctgasttttgaattctctaattgctagactgagaatatgtcataaa

SEQ ID NO: 421020 - DNA, 289 bp, Homo sapiens
gggtctgcaggccccacccaagtccaaaacccagcagtgccwccattaaatcttaaagcttcaaactaacttcctctgactctatgtctcacatccaggccactctgacacaaaggatggactaccaaggccttggcacgctctgcatctgtggctctcggaaggcacagccactgcagctattttcatggactggcatagagtgcctgcaacagttccaggcacatggtacaagctgttggtggatctatcgttctggggtctagaatatgcgtggccctcttctcac

SEQ ID NO: 421021 - DNA, 289 bp, Homo sapiens
gggtctgcaggccccacccaagtccaaaacccagcagtgcctccattaaatcttaaagcttcaaactaacytcctctgactctatgtctcacatccaggccactctgacacaaaggatggactaccaaggccttggcacgctctgcatctgtggctctcggaaggcacagccactgcagctattttcatggactggcatagagtgcctgcaacagttccaggcacatggtacaagctgttggtggatctatcgttctggggtctagaatatgcgtggccctcttctcac

SEQ ID NO: 421022 - DNA, 289 bp, Homo sapiens
gggtctgcaggccccacccaagtccaaaacccagcagtgcctccattaaatcttaaagcttcaaactaacttcctctgactctatgtctcacatccaggccactctgacacaaaggatggactaccaaggccttggcacgctctgcatctgtggctctcggaaggcacagccactgcagctattttcatggactggcatagagtgcctgcaacagttccaggcacatggtacaagctgttggtggatctatcrttctggggtctagaatatgcgtggccctcttctcac

SEQ ID NO: 421023 - DNA, 529 bp, Homo sapiens
gtaaatgttcagaggtggaagtgattgcatctggatgggaaaacagttaaaagttcttgaaggagcatttaaattaaacttaaaagacaggtaattctttaataacttttctacattttgcctattgttttctataggactttagactattattcatgaaatgtagaaaaaaaatgttacttgcagtattgacagcaattctaataaagtaacactttttcattttattgtaacaattagttcaccctatcaaaataaacaatatgttttcttaactagagaaaaatatcattattgatcaattgatwatgaaatggcaaaagctggtcttgaattcctgacctcaagtgatccacctgcctcaacctcccaaagtgctgagattacaggcatgaatcaccacacccagcttgatatgtttcattttgaacattggtatttattaaagcaccaagaaaagctgccataacctctgatcagagatcccctttgttaaaaatttttcttgtcttaattttataaataagtc

SEQ ID NO: 421024 - DNA, 576 bp, Homo sapiens
tcagctgtctctgtatcacagtgcttgtattcagatcactgttatttgacttaataatggtcccaaagtgcaagagtagtgatgctggctttgtaaagtgcttcaaatgaaaaggtgaaggttcttggctcataaggaggaaaaaacattcatatgtcaaggttgctaagatctactgtaagaatgactcttctatttatgagaccatgaagaagaaaaaataaattagtgccagttttgcagtcacatcttaaactgccccccagataaaaggcgactactgtatatggctgagacccactgctttaattaggcatgattgtgcataattatagtagacaaatacagygcaaattaaagaatttttcctaataaaaagactgccttttgttgtgtagctatttataggaaacacctcagcaattaccttgctgttttcattattcatgataacatgtgctgttggttcttaaacttgagtaagaagagtgctgtcatttcctttcaaacagtttgttgagaagactggtttttgtttctggctcactagagtacagtatttaatatttaaatgca

SEQ ID NO: 421025 - DNA, 512 bp, Homo sapiens
ctctggttcatctttctgccgcaattgatttttattgcttagtaaatttgccctcttgaaagataataggttcagtctatactataatcaaggtcaattttccatttttagtaataggaaagtgaatgattgaattgtttagtcatgatttttggaatcytgaaagacaaagaaaaccaaaaattaattcagtttgaaattttaaaacaggctttggaatcatgattgttttaccttgtcttatatttcagaattactttcagttgtaacttcttcctgttattttataggtcagccccagggaagttaattaatttgatttgagacccaaaattagttagaataagaggataaacttgattcttattccgtaagtgtttctacgctaaacagtctttttcaattcaggctcaaataggaatgctatgataataacaacttaacactttctcttagtaattttattctgatatctgttttggtgaattacaccactgttaatgctaactatg

SEQ ID NO: 421026 - DNA, 541 bp, Homo sapiens
ttatttttttattgttcatgaaatactatctttttaaaaactctctttttattaggaaatagatttatttagctttcaacttaaggttttttatttttaaaatgttttataaatgaaatcatgctcacacttagttttccaaatgtactatcttctctgcaagagcagacagaacctttgagcatgcatgccttcccatcctcccagtcttcagtcatgaacatgttcatcctttcctcaaagaagccttccaagctcccttcgatcatttaaatttayattttactctcttatcacaccaagaatttccatagtaaaagttttccttttacaagtacaatatttgtgttattatttgattaacatcagtctttgtcacaaaaatggaattcactaaggataggaaatgttgatttttaccaactgttttatccttaacattttaggataaatcaaggaggattcaaaagaggcactgaatgaatatcggatgaatgaatgaattatttaaaatgccactgaaaacagaaacatttatagg

SEQ ID NO: 421027 - DNA, 408 bp, Homo sapiens
ttttttagctctgctaagtaaagcaataaacatacatatacacacacatacttgcataaataagtgctccatataataaaacacagagtagtatctgttgtaaactgcctttaagaaacaraaatccaatccatttaaaacaataagaaagaaatttgcatttttttttcaagccatctggacagatgatagaaataatctgaattcttgatcagttcacagatgtgtgaaaggtgtgggcaaccacttattctatcacataagtcaaattcatctaaaggtccttcaggagccggtgaaggacatttctaagcagaaagagtttaagggaaatcatagtcctaaagaaaattacatgtcatgaaatcatggaaatgaataaatccctgaacgacattttagttttga

SEQ ID NO: 421028 - DNA, 543 bp, Homo sapiens
gtcacagtctttcaaaacatgtgacaactaaaaacatagaaatggcttaaaatgtgaaccaaatcaagccttcaaattttagaaaaaatataaaactacaccccgaattttcagatgttttattttagaatagtttctgattcacagaaaaattttagyaataatttctacttgatttatgtgatttatacagtgattaaattcaacccagcttttaaaattctatagagtagacagaagcaagagcaaaagagaaaattgatatcataaagagctctatggcaaagtgtgtacccacctctacagagaatgtcagggaaccttttcattttcattaagcacttaattttttctaataatttttattttagaatagagttaccaaaaaattgtaaaggtagtatagaatcgcccatgcatacgcagttccagtatccacaataatatcttatatttgtatagtgcatttgtaataataattaatattgatacattattaactaaagtcgatatcttttttcatatttttcttagtttttacct

SEQ ID NO: 421029 - DNA, 543 bp, Homo sapiens
gtcacagtctttcaaaacatgtgacaactaaaaacatagaaatggcttaaaatgtgaaccaaatcaagccttcaaattttagaaaaaatataaaactacaccccgaattttcagatgttttattttagaatagtttctgattcacagaaaaattttagcaataatttctacttgatttatgtgatttatacagtgattaaattcaacccagcttttaaaattctatagagtagacagaagcaagagcaaaagagaaaattgatatcataaagagctctatggcaaagtgtgtacccacctctayagagaatgtcagggaaccttttcattttcattaagcacttaattttttctaataatttttattttagaatagagttaccaaaaaattgtaaaggtagtatagaatcgcccatgcatacgcagttccagtatccacaataatatcttatatttgtatagtgcatttgtaataataattaatattgatacattattaactaaagtcgatatcttttttcatatttttcttagtttttacct

SEQ ID NO: 421030 - DNA, 431 bp, Homo sapiens
gggaacaagttagggttctcccctgtaaacctttgcmatctgtttgaacgtgaggagcggctgccaccaaaagagaagcagggaagaactgggggggcccggatttccagtcgtttccccttcctgactgcagatacaatgacccgccaccacttggctttgtaaattcagagcacataggcttctactgattgtggacaccaatttcagaaattggcactaggagtgtgggaaaatccaaacgagccctttgcactgtttgagtttttttttttttcttcccacttccagagtctccattacagcctaaaatataacgaaagtagctctcataaccaaacttgagtacctgccactcctgtggcccccaattataacctccccttattcttagttcgtccagaatgggaggttcctaagcttttttgtgc

SEQ ID NO: 421031 - DNA, 431 bp, Homo sapiens
gggaacaagttagggttctcccctgtaaacctttgccatctgtttgaacgtgaggagcggctgccacmaaaagagaagcagggaagaactgggggggcccggatttccagtcgtttccccttcctgactgcagatacaatgacccgccaccacttggctttgtaaattcagagcacataggcttctactgattgtggacaccaatttcagaaattggcactaggagtgtgggaaaatccaaacgagccctttgcactgtttgagtttttttttttttcttcccacttccagagtctccattacagcctaaaatataacgaaagtagctctcataaccaaacttgagtacctgccactcctgtggcccccaattataacctccccttattcttagttcgtccagaatgggaggttcctaagcttttttgtgc

SEQ ID NO: 421032 - DNA, 431 bp, Homo sapiens
gggaacaagttagggttctcccctgtaaacctttgccatctgtttgaacgtgaggagcggctgccaccaaaagagaagcagggaagaactgggggggcccggatttccagtcgtttccccttcctgactgcagatacaatgacccgccaccacttggctttgtaaattcagagcacataggcttctactgattgtggacaccaatttcagaaattggcactaggagtgtgggaaaatcmaaacgagccctttgcactgtttgagtttttttttttttcttcccacttccagagtctccattacagcctaaaatataacgaaagtagctctcataaccaaacttgagtacctgccactcctgtggcccccaattataacctccccttattcttagttcgtccagaatgggaggttcctaagcttttttgtgc

SEQ ID NO: 421033 - DNA, 431 bp, Homo sapiens
gggaacaagttagggttctcccctgtaaacctttgccatctgtttgaacgtgaggagcggctgccaccaaaagagaagcagggaagaactgggggggcccggatttccagtcgtttccccttcctgactgcagatacaatgacccgccaccacttggctttgtaaattcagagcacataggcttctactgattgtggacaccaatttcagaaattggcactaggagtgtgggaaaatccaaacgagccctttgcactgtttgagtttttttttttttcttcccacttccagagtctccattacagcctaaaatataaygaaagtagctctcataaccaaacttgagtacctgccactcctgtggcccccaattataacctccccttattcttagttcgtccagaatgggaggttcctaagcttttttgtgc

SEQ ID NO: 421034 - DNA, 526 bp, Homo sapiens
gatggtttatataaagcaactgcaggctgagacagctccaaagacttattgctgactgggcctagcggggctatttctcgtaaaacaatgccagtgatgtgattataattggccaagagaatagttactacagatcccacaagtcctgatgcaaaaataatcataataataataacacagcatcctgttgaccttgggcaagtcacttaaccactctgagcttcagtctccttctctaggagggggctggacaagatgatctccaaggtcccatttagctctgtttataattcagagacttaaaagattttgagaaacactctggctggcccctgcacaagtctrtgatgcagtgaagctctggagaggagctcttccttggtgtgcattcaggcaccaaaaagaagcattgaagaaataaaaggcaacggcactttgcttctcagtgactagacttgggagaggaaagaatttctgctgaaaaggatcagaacttgagatgtaatttatttacattgcgaaaatt

SEQ ID NO: 421035 - DNA, 674 bp, Homo sapiens
ccctggattcattttctcctcctgtaaacaggatatatgtcaacactaataattcccatcaggataacttatgtgtaattaaacaataccacacacatctaattattacacagtgtagatggggtaggcaatgaaaaactcctcaaccacagaaatgtggttttagcaagcctgctctatcgcccagtccaagggattacttccatcactgacctttgcaacgttaattgcctgcatgttcctgggagtcttcacttccttatgcacagacattttcccaaaatcaaatccaggattgtcacttaattggttcttagggggataacagagataaaaccaaaaatccaagatattttcctaaatccctattaaaaattctataaggataaacaggctaatccttcaaagtctaagacttggttcctgagtggattttaaagtatgacactgtttaatgtccctaccttccataagatatacttaaattttaaaaattatacttctaacattaccaagtttttttttttttgagacaaggtctcactctgtcatccaggctggattgcagtgatgcaatcatagttcrctgcagcctcaaactcctgggttcaagctcaagcctcccatttcagcctcccaagtagctgggactacaggtacccaccacccagccc

SEQ ID NO: 421036 - DNA, 639 bp, Homo sapiens
gcagcacgggcctctaaagctgtcctgctgctgtccgggagtacctcctatataagtcctaataaactcatctacttgccaactggacttgtctgagtcattgtttggtctcttggctccctcccagcttgggggaaggtttttctatatgattccaggtttttctcattacaggcatgataatgcatgcatgtagtcctgagctacttgggaggctgaggcaggaggatgcttgagtccaggagtttgaggctgccatgagctatgacagcaccactgtattccagcctggacggtaccttgcycaaaaaaaaataaaaataaaaaggcatattagagaaacagattagcctgtgattccaatttaacatataaattgtgtaactgacttagatttgggattcaagatttaactcttactaaatttataacagtattggaccatttaagtgacattaagtcttattgtatttataaatttaattatcatgagacatttcatttgagaagttatttgtaggagcttttcttgggaagttttgttataagccaattgaagaatttaaaatgaaaatgaaattattatacactagtaataattttcatttgtttgtttgtttgtttgttttgagacagggt

SEQ ID NO: 421037 - DNA, 450 bp, Homo sapiens
atttaaaaatgattaagggaattaattaattagatgctaaaaattcccttaaaagttaatattgcattttggtagattttataaacctaccaaatcagatctggaaattgaatttaaaagtttaaggaagaactaggttttaaaaattgcaataggtaaaatatgaattaaaaagaacaactggtctctgaataatttttctgtgtgcaaaaaattgccattaaatgcataaagtacccacattgacaatttgatgagaattggatgtttttattgagaaattcccatatgacagtatatrtgggtcatttctctagattgtccagtttccaagaacagtccttcaatcccttgcttgtgcaagaataacctgcagcagggctggcttcatgggccagcatcccatgcagtctcacagggccctgctcttagaaggacctcacacttgtt

SEQ ID NO: 421038 - DNA, 547 bp, Homo sapiens
tctttaaagtgctttggtcaacattctttttctgttcaaatkgttctttctttattagttcctacttcttatcttacacacaaactcaggtctctaactcctaaaaagacagaaaatcttatctcaaccgtcttggattagcatcttacgcctgcctttcctggtagaaatcttgaaggtcaagctacactgtttacctctacccagaggtttcttagtaaccattgtgatccatgacgtatggattcaacaatggttttaaatgaggctgaattgaagttttaggggcttataatatttttattttcctagaactaaatttcttcagcaccagtcacacatcaattaggtactttgcatatgctgtcatatttaataatcacaactgtactgaggtgggtactattgctttcatttaacagttgaggaaaaaaatgttgaagaacattgtacgacctggtcacagtcacccactgagtgtggagcttggattcaacagtcagggctcctagttacaagcagcagagattaaggctggctgatttcg

SEQ ID NO: 421039 - DNA, 527 bp, Homo sapiens
aggtaaacaacattaactagaaaaatcctaaaaccatgttgacacatcatatctatctgtgcactaaaacaataatacattatggttaaatgtcatttatatcaataactcagtaatttagaaactaaagaataaatgtattatttcaacagctatcaaaaatcacttcaaaatatgaaagaataaaaagaaaactttattgattcaaaaaaggaatatttaccccaaattgagatcaaccatcatagttgaagatgaaatgctagaagcacttccrcaaatgcaagattgaccaacttgctactactaattttaagagtattcattggacattggagattctagtcactgaaattatagaggaacaataatttcttatgtaatacttaaatcaggtgaaggatgaaggtgggttgggggaggcataaagtgttccaagaaatatcacaggtaaagagttaagacctggaaagtggaataattgtttaattcacaagaaatgggaaaagggtcaattattctgccat

SEQ ID NO: 421040 - DNA, 498 bp, Homo sapiens
ctctccctgggtcctcagtctggattattactatggctacatttgattttcttattaattttcctccttttcatttgagagcaacaagaaaaaagaaaaaaaaagaaaactgtcagttaccaattgtctgtgtgctttgcatcttccaaaatttttgtgacttctctcccctgcgatttattcttctccattatttttgtctttatagctttgtttattttaaacccttgccctctatcatttacataaagtttcaggaaaaaattgagaaamactagtgtgctcaaactagagtaaaatacagtccttactgtcagtcatattgtgctagttttcctgtacctgaatcatttatgttgttttatctcgatttgcttgatttcatcagatgtcagtctttagataagagttcataggtgctgtattttttcacatgcttgagaaatacaatttagctgggtataaaatttttcaatggactttcttttcatcaaagat

SEQ ID NO: 421041 - DNA, 637 bp, Homo sapiens
attacttataatttgagtgaaggaataaaattttgaatttggatgaattattcagagttcaggacaaaaaaccaacaaccactctgtgtgtctctaaccaaaaccaaaaaagatatcagctacaaggacttagatgcttatataaaatcactggaagaamtggacaagcagaagtaagagagtcagcactgaaatggttttgaaggcatgtgaccacagctgcagcacaggaatcaggaagctgatgctactactactaccaaaactgttgctcccacagtgccctctcccacctccaaaactgatggctgcacactggcacagagtgtctggatgccacagtggtctccagttccctaagaaggtgatggctagacagaggaatgctgacttggctgcaagcattcatatctttctgaccttatggtgaacagtggaagaccaccttgcctgtattctaaggctcacgtgaaggaatctcattggcaaaacctaatttacatccagaataataattctaagaagtctggaaaatggagttttaagctttctagaccctgaatttttaaaaaatttataaaatgaagtaggaatggatggcatattacaatagcacactggggaaacatgttcaaaa

SEQ ID NO: 421042 - DNA, 544 bp, Homo sapiens
tatattgcatataatacatgctatcagtttagtttattttaacaatgcctgctccttataccgaaatcatatatcttacttttctattatgtcaaaagaaaaacaattatgcttgcagcctatttcatattttatcctatctcatcaggcaggtcaaagtcattttaaaaaacagttataaaatagatacgatattattattataattttaggctgccctgactaatcatttcttgtggttcagagatagaactagtagagatgacaaaaccataggagaaggttctaattcacctgcctatacttagacatttacaytgggaagcaatgactagaaaaacaaacaccgactactcttcaggacacctgagtcagcaaaatcacctgcacatagttgagaaaggggtccctcatagtgcagattttgtggagaactcaaaagccagaatacagtagctgtggatggcatttatatttagtaagagtgcaatatactcgtttgaagttgggagatgagtatttattgaaacagctggcaaatcag

SEQ ID NO: 421043 - DNA, 604 bp, Homo sapiens
tggtatgtaaagaaaggatgtacagcttgcttacatgaactctaagatcacacttagatcccaggagctttagatcccagatctagcatttcccaactgtaaaagcttgggcaagttacttaaattctatcagttttagtttagtaacctgtgagataattataataaaactaaccttactttctagtaatttgaaaaaatggtttattttacataagcgggttattttatatagcatgtaaactattaatttacttttttaaacaatatttattgagtatctattgtcagacagtgacctcggtcctaatgatacagcagtgactaatcaataaatatctttaccatcaagcttacatttggtgcatgtatgtacatgtttcataattattccaattatatatatatatatwtttttttaattttttattttgagacagagtctctcactatcgcccgggctggagtgcaatggcacgatctccgctcactgcaacctccgcttcccaagttcaagtgattctcctgcctcagcctcccgagtgtctgggactacaggtacccgccaccacacctggctaatttttcatatttttagtacaga

SEQ ID NO: 421044 - DNA, 556 bp, Homo sapiens
gctccatattgcatctctaccagcaagggaagcatggctcctggtaggcctttgtggattttggaggccacacattccacacctagttacacagcttggcccatgtactgaatggcataggggttgccagcaggaaagggctcttcagcaactccagactgtagtgtgagctgctttgtcacttggaattacaatcctgtagacctatggtgttgcaagtatctgcaatggggaaagatacaatttgaggattatggcaagctgcagtgcaagaatcccaaagcaagcccttgggattcaggagcaagsctataccatcagcagtaaagaaatacacacttttggaaaatattttctgatatattattgtcctggtatagatcagtggttaaatacgaggcaccaagtgaccacgcatatcacactgctggtttctttggacctaccaagcttaccgtcagacaggtcgagcagaaattcaccgtgaatggaaatggtacatctgagatcaagcccaggcaggacagaaggtacaagtaagttgcatgaacaattg

SEQ ID NO: 421045 - DNA, 594 bp, Homo sapiens
  misc_feature (1)...(594): n = A,T,C or G
nnnngaaaaagtagcatctatatctagtaagtatatatgtctcaatcaatagggaagaatgcctcttattcctaaagtgtcgtcttctttaaatcctttcaaatttgttaatgtagatccatccttcgggtgagaacatgcactaattctaatacaattagagttagtgtattagagttaatcgaggaaatgaatgagccaaattcttaccaccaaagttctgaatttttttctggctgggtctaagaaaaacctgcacttgatttgcttttatgagtaaggtgatcttgtagaatacatttaaatgaagtatttatcgaaagtattaatatttaagatgatttatataaacaactcattgtgcctgtttaaataggaagtatttctgcaaataaagagacagcagcagagaaattgagagctacttggacatgagaaaatgttattggtgcaaaatgataatttctcacagtkgaaaatgaatatgtgtgttagactgacaacttaaatatttacagaacaacaacaaataataaagggaaagatgctgtcagacttcaagataaatagaaaagtaacaattacattcataaa

SEQ ID NO: 421046 - DNA, 576 bp, Homo sapiens
agactcttataatatattctttgctggtgatgcgtcttccaaataccttgaaataactagcttttcatacaaggttttaatgcatttatttttttacccaaacattctacatagttttttcttcatagcacttgaaatttcctggactttggtaggatggagaaaaaaacagacttggtaatctctattgaggaaattgtttttagatagtagcaacattatttcctatatctaaatagaaagaaataactttgccttaaatgtaggttattcaattatttttaaagtagcagaagcttttattaattggcagtcttcttaaactcttaattttatctcttgacacaatatttagtttagattttaatttttattgttttcatggatatatgtttttttcaaagatgtaacatgccttaactggactataagtctacacagattacgtatgaccaaatgttagccatattctcttataaaaaaaagccattactgttttcaaagtgttatttcttctaatgcagatatttacagtaatgcaaaygaaattataataacctattaggtttttagagt

SEQ ID NO: 421047 - DNA, 551 bp, Homo sapiens
aaatataggcaatcgggcatttattctggcatttcacttttctcctagaagttgtttatgggttayttttaagaaacagttttagaacacgcagcattagttataatgttgtttttattattttgttaagaaataatcaatatttattgagtgccttctgaacaccaaattgcaagagctttatagttgttgagcagttgcatataggggcttttcatatagaattttaaattcaataataaattctattcaaaagaaaatgtactgtacttttttttaccctctcccatttccctaacctttaactcaccacttgccatattccataaaacttcctacaaatatttgattaattacacatgtagtcaaatacaaaatgggaggccagggagagatgccttccttaacaaatctgcgtctctctatgagaaacatgctatgcttcacctgcttataagttcaaaacttgttacaggtaaggacacccaggacatctttattgatctaaacaccagtctgctctgctccccttgtgcatgagaggatcatga

SEQ ID NO: 421048 - DNA, 551 bp, Homo sapiens
aaatataggcaatcgggcatttattctggcatttcacttttctcctagaagttgtttatgggttacttttaagaaacagttttagaacacgcagcattagttataatgttgtttttattattttgttaagaaataatcaatatttattgagtgccttctgaacaccaaattgcaagagctttatagttgttgagcagttgcatataggggcttttcatatagaattttmaattcaataataaattctattcaaaagaaaatgtactgtacttttttttaccctctcccatttccctaacctttaactcaccacttgccatattccataaaacttcctacaaatatttgattaattacacatgtagtcaaatacaaaatgggaggccagggagagatgccttccttaacaaatctgcgtctctctatgagaaacatgctatgcttcacctgcttataagttcaaaacttgttacaggtaaggacacccaggacatctttattgatctaaacaccagtctgctctgctccccttgtgcatgagaggatcatga

SEQ ID NO: 421049 - DNA, 620 bp, Homo sapiens
agccatttttgagtaggaaaagcagaaaggatgcctttgaaagcaataattctttttttgttctttttactcttatacaatttaaaaatagtcaactggattttaaaattttaaattgataaataaaactgcatttgatccttgccaagttgactcatatattttatggatgaaattagattaattaagatactataaattccatgaagttatttattttactcttcagttgaatagcaaatattaacttcggttacacatgaacatgagagagaattatcttgagaggttttacatatttattatgataatttgttttgttgcatttacataatattttaaaatactgtgtagtcttacagcccatccttccatgcatactcacaattagggcttgtttcttgatgccggtatgtaatcatttgtcccttatactccrataaaaatacagtggaagaagcacagctctttggctttgctatgtttcttttggttgctattgaggtggccctcatttttccttccttctttgcgttagtcttttctaaaataatcacagagtccatgtgaaggacaataacaacaataataatagctaatatttgctgaattcacactat

SEQ ID NO: 421050 - DNA, 620 bp, Homo sapiens
agccatttttgagtaggaaaagcagaaaggatgcctttgaaagcaataattctttttttgttctttttactcttatacaatttaaaaatagtcaactggattttaaaattttaaattgataaataaaactgcatttgatccttgccaagttgactcatatattttatggatgaaattagattaattaagatactataaattccatgaagttatttattttactcttcagttgaatagcaaatattaacttcggttacacatgaacatgagagagaattatcttgagaggttttacatatttattatgataatttgttttgttgcatttacataatattttaaaatactgtgtagtcttacagcccatccttccatgcatactcacaattagggcttgtttcttgatgccggtatgtaatcatttgtcccttatactccaataaaaatacagtggaagaagcacagctctttggctttgctatgtttcttttggtwgctattgaggtggccctcatttttccttccttctttgcgttagtcttttctaaaataatcacagagtccatgtgaaggacaataacaacaataataatagctaatatttgctgaattcacactat

SEQ ID NO: 421051 - DNA, 622 bp, Homo sapiens
gcggatttctacaccctgtttcctctgccaggattactcttgctaactgaggcatgctcattttccagatcacagctcattactaagattttacttgtcactcaagttttccatgatctcttcttctatgttcacatattaccatataactctcctccacagcatgtaaccccaatcacaatattaagcacttttagttaaagtattcaaattaacwtttataggactagactattagctccgggcaggtagcatataatttttttacacttgtgtcataatgcctggcaatagtggcgcatggtaaatatttgtgaataaatgaactagacagcactcaaacgttcttgtagtaaattatattattattaagctgaaaccttaatagagtattagtctgtttttcatgtaatatgaccacaacatagacaaggagataaaaacaaaaggaagaaaatatgtttgaaagcttgccatatatgtatatgaattacatttttctgcacctatgtcttatatgttagtcccacttttatgctgtatgacatttaacatgaaaaacataagaatttagtgttaatatgtagcatgttaaatttctgggccatttgaccaagctcta

SEQ ID NO: 421052 - DNA, 552 bp, Homo sapiens
tacacttgtgtcataatgcctggcaatagtggcgcatggtaaatatttgtgaataaatgaactagacagcactcaaacgttcttgtagtaaattatattattattaagctgaaaccttaatagagtattagtctgtttttcatgtaatatgaccacaacatagacaaggagataaaaacaaaaggaagaaaatatgtttgaaagcttgccatatatgyatatgaattacatttttctgcacctatgtcttatatgttagtcccacttttatgctgtatgacatttaacatgaaaaacataagaatttagtgttaatatgtagcatgttaaatttctgggccatttgaccaagctctatgacgttccagataaataaattctaaaaacaaattagtaattgattaatgactgatgatatctaatccactttataagaccagatttaccatgcagaataaaatttaagaagctctgatatctttagaaacatcaacaaccaaaaggcacactcaaaacaatctaccttacagtgcttgtttgttttttttccta

SEQ ID NO: 421053 - DNA, 638 bp, Homo sapiens
tgatataaaagattttttttaaagtgtacctgtatagggcacttaccatttatatgatacttacccagcttgcaggaatgggaattgctctggatgactctgtgagggagtggtgagtgaaggtgaaggcctaggacattactatacactactgtaggctttacgaacactatagacttaggctacactaaatttatttaaaaagttttctttttcaataataaattaaccttaacttactgtaatgtttgactttataaacatttaaattgtttttaatttttgactgtttttaataacccttagtgtaaaacacaaaygtattataaagctgtacaaaactattttatttccttatatccttattctctaagtattttttctatttttgaattttttattttacttttgaaattttgttaaaaataacacacaaacacacacattagcctaggtatacacatgttcaggatcaataatattactatcttccacctccacatcttttctgtcttcaaggtgcaataacacacatggaactgtcatctcatgataacaatatcttctgtcgaatatctcctgaaggaccttcctgcggctattttacagttaagtttttaaatataagtaaaaaaagt

SEQ ID NO: 421054 - DNA, 592 bp, Homo sapiens
accatcaccaccatggctattaagcccagctctatgaatgcctctctgaattagyttcctggggcttgtataacaaagtaccccaaattgggaagcagggtcaggctccctctgaaacttacagggaattccttccttggctctttctagcttctggtagtttgcagtcatattgtattagggcccttcctcatgacctcattttcacttgatcacctctataaacacccaatttccaaataagctcacattttgaggtactgggggttaggaatttagcatatttttgtggggtgagacacacttcagcttataatactctcccaccatcacccttgacctgcggggagagccaccactgaatgcagctgtattatgatcacagaatacactctcaaaaatacattcatgttgaccatggtgaatggtgtgttctctaagcctctccacagaataatcttctgttaggtattctgacctcacaaatgtacccattccagcctaatcactttccttagcctgttaatctttcccctgctatctatcaggagaaacacaggcaggagtttgttcagcatagccacctcttctt

SEQ ID NO: 421055 - DNA, 592 bp, Homo sapiens
accatcaccaccatggctattaagcccagctctatgaatgcctctctgaattagcttcctggggcttgtataacaaagtaccccaaattgggaagcagggtcaggctccctctgaaacttacagggaattccttccttggctctttctagcttctggtagtttgcagtcatattgtattagggcccttcctcatgacctcattttcacttgatcacctctataaacacccaatttccaaataagctcacattttgaggtactgggggttaggaatttagcatatttttgtggggtgagacacacttcagcttataatactctcccaccatcacccttgacctgyggggagagccaccactgaatgcagctgtattatgatcacagaatacactctcaaaaatacattcatgttgaccatggtgaatggtgtgttctctaagcctctccacagaataatcttctgttaggtattctgacctcacaaatgtacccattccagcctaatcactttccttagcctgttaatctttcccctgctatctatcaggagaaacacaggcaggagtttgttcagcatagccacctcttctt

SEQ ID NO: 421056 - DNA, 550 bp, Homo sapiens
ctcataacttccagagaccaccagcattcttggtttactgtttcatcataccagtctctgcttgtctttacatagccttcttgtcaattctcctgcctcccacttataagaattctgtgataatattgggagcacacagataatcaagggtaatccccccaatctcagcatccttaatttaatcacatctgcaaagtttcttttactgtgtaaggcaattattcacaggcttattcttataracattacattcttatcaatagcccatgcttatcaatcagctggatgaatatagggatataatctatagtaatgatataatagattcatcttcatgaaatgaaatgactgatggcagtagcaaaaccttctttaacactagtcaactatgaatttgttaatgaatacccatgtaaaaggtagtattgatcacctaggagaggtagagcaaatttgtatagaggtcaaggaacattttggaaataaagagatcaagatcttcacctcttccctattgaggatgaatattcatttttctctaatgtacaaa

SEQ ID NO: 421057 - DNA, 587 bp, Homo sapiens
ttgagctaccaaagtttggttctcttgatggcatcatagcagcacattacaaagacagttaaagtaatgttgatgctttgttgtgtcataagcaaatactataagtaatgcacatctacttttcacacttaaggatcatgtggtttctcctttaaaagtaatgtactgaccacagcatactttataaaccaacaayaatcacttctcaaataactagatgagagagccctagattctgagtgcagaaaatctcaactcatgcacactctaaatgaattctaatggttttattaatctgactattttttctcctctaaaaaaaagtgtgatacatttttttctccagttccttcaaaaaacagaaacattgtttttataaatactttttcgttctacaatttatgatgttttctgagattggtataaagtacaaatcaacactttctagttcttaatatgagcatgtgaagtgtatgatatttatatagagtttttataacctttgtcctttttatttaagagacaatacagagaactcactgggaatgaatggatatactataaaggcagattaaaagcatataata

SEQ ID NO: 421058 - DNA, 570 bp, Homo sapiens
caataataattccatttacacgaggtgcctagaataggcaaattcagaggcagaaagtagaacagaagttaccaggggctgggaggagtgcagaatagtgagttattgtttaatggatatagagtttctgtttggagtgatgaaaaagttctggaaacatggatagyggtgacagttgcacaacattgtcagtgtacttatgtgacactgaagtgtacacttaaaatggtttaagatgctaaattttgttatgtatattttactacaattaacaaaaaagaaaaaagactatgccaagtaactcaggctgtgtcaagatgaagttccactgcagggagaaaaaaaaatcaaatcatcacagtacttaatttacatacttaaattaacaaggagtcacgaatgtgaaaaccaaaatagtttgaaaaggttttagtgaaagaaattacttctggaaaggcaaagaaaacaaaacaaacaacaacaacaaacaacaaaccagcaagtagatacgtcaattagtgctactatcattaagaaagtctactcatgggagttagtagattccattga

SEQ ID NO: 421059 - DNA, 600 bp, Homo sapiens
atttctctgaaatgaggatagcactacttactttacaaggcacctatggaaatcaaccaaagaatgtgaaatttccagcacttaactggtgtgtattaacattaactgcctttctcttgtccctaatatgataccatacatgcatatgtgtttcatgtaagattacttcacatagtgtatcattgaaatcagttagcagtgttttctstaattcccttcagttagtctgattattcggtctcttcagaagcccaatgatgtcacaggctgcatttactaagctaccaactcagtgatcttatttgtaaataagacctcaatgtatgggtgctatataaatgtgaagtagacataaaatctgcctgttatatttgtcctttgttccataattaatgttttgggacatgttgggccagtaccatactgtcagtcttggaaactctcagttataaagtggtaatatagtcaagcattgcaaaaagggggccactaccctaggtggataatatttaatttggcatgtgatacttaggaagaaaattggtaaaatcaggattggctcattaccttcataaagaattttcaggaagttttgtttgc

SEQ ID NO: 421060 - DNA, 538 bp, Homo sapiens
cccaacaatgctgggttggatagagaaaatgtggtacatataaaccatagaatacaatgtagccacamaaaaaaaaaaaatgaaatcatgtcctttgcgacagcatggatggaggccattattctaggcaaattaacataggaacaaaaaaccaaataccacgtgttttcacttataagtggaagctaagcattgggtactcttggacgtaaagatggcaacagtcactggaaactgatagatgggaaagggatggaggggggcaaggataacaaaactaacttggatattttgttcactatctgggtgatggggtcattcatgtcccaaaccttagcatcatgcaatatactcatgtaacaaacttgcacatggactcccagaacctaaaataaaggttgaagttattaaaaaaaagttaacacactattttcccaaatcagaagaatgagtgtttccctggttacttatattttggattccttctaaacaggctatgcgtgattccccctgagttgtcttcaaagtctagtgttta

SEQ ID NO: 421061 - DNA, 562 bp, Homo sapiens
actttaaccgatgatttcttaatggttttaagttatttaggatcaccagttattgcatgtgctgcaatgttaatgtgactaaagatggcaatatgggtgtgactgaatgttcacccctgcaggggatgctctagaagttttttcttggagcatttgtaactatcacataaagccacatatggggctaatttccaggtcagtgtaatgtggctactgttctctaaaatgtgrtgaataattaaacgtttaattatccttctacaaaatgattttgcccttttgaggaatcaaaccattgctgtgaggattttttgccagtcagacatctacaacatgaatagtggccaagagtgacactcatgggcatagacccatccagaatgcaggctctgaaaggctagaaactctcccttttctagaaaatcattaggtaaccagccttttctttccaggcacctttgccctcttttggagcaagaggtaagaacaggacaccttgaatactctaggacaacgatattttccagtaccaaacaatttgttttatgagagaacatagagc

SEQ ID NO: 421062 - DNA, 569 bp, Homo sapiens
tatgttaaaacatgtttagattttttgaaggatcataacttatttttgttatctagtagaaacttatgaaaaatagagcatgccaaattataaattcgccaaataaagacacacctgacagtttctctgcagttcattttgtaggctctggtacatgtcaacattttattccttcagatcaggcaaggtttataagtcggacttttctagctgttatggcctaaatgattcccaaaatttatgtgttgaaacttaacccccattatggtactgctaagtgatagagccttttggaaagtaactaagtcatgagggcttcattctcatgaatgaattmgtgtctgataaaaagagctggagggagctgacttgacccctctttccctactattccttctgtcatgtgaggatatagcaagaaggccctcaccaaaccaaatgctggcatctgatcttgaacttcccagcctccagaactataagaaataaatttctgttctttatacatgcccagtctgtggtatttgctataactgcacaaacaaactaagacactaatcaaataagaa

SEQ ID NO: 421063 - DNA, 569 bp, Homo sapiens
tatgttaaaacatgtttagattttttgaaggatcataacttatttttgttatctagtagaaacttatgaaaaatagagcatgccaaattataaattcgccaaataaagacacacctgacagtttctctgcagttcattttgtaggctctggtacatgtcaacattttattccttcagatcaggcaaggtttataagtcggacttttctagctgttatggcctaaatgattcccaaaatttatgtgttgaaacttaacccccattatggtactgctaagtgatagagccttttggaaagtaactaagtcatgagggcttcattctcatgaatgaattcgtgtctgataaaaagagctggagggagctgacttgacccctctttccctactattccttctgtcatgtgaggatatagcaagaaggccctcaccaaaccaaatgctggcatctgatcttgaacttcccagcctccagaactataagaaatamatttctgttctttatacatgcccagtctgtggtatttgctataactgcacaaacaaactaagacactaatcaaataagaa

SEQ ID NO: 421064 - DNA, 562 bp, Homo sapiens
tgtattttaaacaattctttaatgctatgaaagtttttgtttaaacaaaaaatttaatttctaactttaaagttctaacctcattgaattgaaatgactaaataaaatatagtgagggataataaataaaataaataaaataaagtatagtgagggataatctattatagcacattaactctgtcctcttgtgtatcataaacatttcaattgattttatagcaaatctagtataaaattccttttctttgttatttttaccctactttctggccactcataggaacaaaattttaaaattagccgttatcatcttttttgtttctctaatctattttttcttttgttttatgatacctctactatctgcttttatgtactttactttgatcctactgctgccagctgaacttagccactgggagtccagtccctactttttgctctgccagaccttcactgggcatgrcacatttctccaggccacagattctgtcatgaagacttctctgacagatacacgttgcttagggttccaagaactaactctatatctttatct

SEQ ID NO: 421065 - DNA, 373 bp, Homo sapiens
tcaaataatactacaagggtgtaatgaaaaacagtgttcccctacctcactgtccccattctggtcttctgaccctaagtcccctgtttcacaactctgggggcaccactcccagagaactcaatctgaataatgcccctggagttgcggaacacaagtcctgcttggtccttagggatcttttgyggtttcttctggccttcacatcctacatctaaaacatgtgagtgtacctctgtttcttgattttttcaatcttagatatcatccaatcctcttctggaggatgaagagttaattgtgtaaaatgcctcccaatttaattgtatcacacatttaagtttatttaatattcagggatcatatagctatg

SEQ ID NO: 421066 - DNA, 576 bp, Homo sapiens
atagaagctgatcacattccttttcttacacaaattttaatttatcccagatgcaacagtaacctcattagtttggggggaggaaaatttctaggtgtctacctctaattttcttccaaattctccaaaaaaaaaactctgaagtttcctctcaatagatcgagacacctggaaatttgatagcatgctttttcttttgcctccagccaatgtcatttcctgctttttaggttgttggttttccccctggcttactgcgtagttgtcttccaggaaatttctttcagcatctttctgggaattcccttttcctcctctggattttaaatttcctgttttcagaatcctctgtcttcctttttcatggtgaacttccttgtttccatgaaagctctgtaaaggaaacagtgtcccactctggaggaactggggaagatttcatagaggaagtgaaaattgagttgggattagagaatgtgtaggaattttctagaaaagagtaatccatgcagaaaaaatagcgtgtgtaaccacccataagcattawactcataagtgagaaatccataggttatt

SEQ ID NO: 421067 - DNA, 573 bp, Homo sapiens
ttttcaaaaagcaacttttcctttcatgatctttgtattattttcttcatttatttctgccctgatctttatatttcttatcttcttctattaattggggttcagttttctcttgcttttctatttctcaggatgtatcattaggttatttatttgaggtttttcttctttttgatgtaggaacttgtgcctataaatttccatgttaatactgctttcactgtatcccataggttkgggtatgttgtgttttcattatttctttcaagaaatttttcaattttctttttaatttcttcatggccactggtcattcagtagcatatgtttaatttccatgtgttgaatagtttccaaaatttctcatgttattaatttctagttttattccatgtggtcagaggagatgttgatattattcaattctttgaatgtttgaagattgtttgggacttaacatatattctatccttgagaattattcatatgctgaggagaagaatgtgtattctgcagcaatggatgaaatgttatgtatatatctattaggtccattgatctatagtgcagatt

SEQ ID NO: 421068 - DNA, 560 bp, Homo sapiens
taattggggttcagttttctcttgcttttctatttctcaggatgtatcattaggttatttatttgaggtttttcttctttttgatgtaggaacttgtgcctataaatttccatgttaatactgctttcactgtatcccataggttggggtatgttgtgttttcattatttctttcaagaaatttttcaattttctttttaatttcttcatggccactggtcattcagtagcatatgtttaatttccatgtgttgaatagtttccaaaatttctcatgttattaatttctagttttattccatgtggtcagaggagatgttgatattattcaattctttgaatgtttgaagattgtttgggacttaacatatattctatccttgagaattattcatatgctgaggagaagaatgtgtattctgcagcaatggatgaaatgttatgtatatatctattaggtccattgatctatagtgcagattatgtctgatgtttcttkgttgtgttttttttcagagatctgtctaatgctgaaagtggggtgttgaggtttccagcta

SEQ ID NO: 421069 - DNA, 464 bp, Homo sapiens
tacccccttcatgagtaggtgctggctgagtttagcagttttgctttccaccatgacagggcagcactgggttcaatgcaaagtcccccagtaattgtactttccctccccaaagtgcactgattctctgtctgcaccacgcagctgctgctggggtgatgtatgcaattcagcactgtctttcctaccttcttcagtgcatctttcattgatatgaagttaaaaccagggacttasagtgttcacctgatttttggttcttatgaaggtgctttcttgcatacagatagttgttaaaatttgatgttcatgcatggggcggtggggacaatcagtggagacttacattgcctcagcttgctctgtcctgtctgtggctctaatttttaaagctaggcatttgctttgaaaaaaaaaatcagattaaatgaggttttgttttgtctaaattatgcttattttca

SEQ ID NO: 421070 - DNA, 561 bp, Homo sapiens
tgtacccatgtattttttttaatttcacgtatgatatggtttagctgtgtcctcaccaaaatctcatcttgaattcccacatrttgtgggagggacctatgggaggtaattgaatcatgggggcaggtattttccatgctgttctcatgatagcaaataagtctcatgagatccgatggttttaaaaaggggagtttccctgaacaagctctcttctcttgtgtgctaccatgtgagatatacctttcaccttccaccatgatgtgagagctctccagccacgtggaattctaagtccaattaaacttctttcttttgtaaattgcccagtcttgggtacatatttatcagcagtgtgaaaacagactaatacagtaaattggtaccaggaggctgggcgctgccaaagatacctgaaaatgtggaagcaactttggaactgggtaacaggcagagaatggaaaagttggagggctcaaaagaagacagaaaagtgtgggaaagtttgaaacttcctagagacttgtggaatagctttgaccaaaatgctgataacgatgt

SEQ ID NO: 421071 - DNA, 512 bp, Homo sapiens
ctttatttctccttcatgtttgaagtatattttcaccagatatactcttctagggtaaaagttstttctttagaactttaaatatgtcatgccactctctcccagcctgtaagatatacactgaaaagcttgctgtcagacatactggagctccactgtatgttattttattttgttctcttgctgcctctaggatcctttctttatcattgatctttgggagtttgaatattgaatgtcttcaagaactcttctttgggttaaatctgcttggtgttctatacctttcttgtatttggatattgctatctttctataggtttgggaagttctctgttagtatacctttgaattaaattttctacttctatctctttctctatttcctctttgaggccaataattcttacatttgcccttttgaagctattttctagatcccataggcatgtttcatggttttttattcttttcttttttgtctcctctgtgtgttttcaaataggctgtct

SEQ ID NO: 421072 - DNA, 393 bp, Homo sapiens
acccaagatggcagccaccaggggctcaggagtaaaagtcccttgcaatttccaactgttggaagaactcaaaggccagaaagaagtagcagatggcacagttagctgggatctagaagatgaggaagatataacacttacaagatggacagggatgataattgggcctacaagaatagtttatgaaaactgrggggagtggctggcaagatggctgaataggaacagttccggtctgcagctcccagcgagatcaatgcagaaggtgcatgatttctgcatttccaactgaggtacccagctcatcacattgagactggttatacactgtgtgcagcccatggagggcaagcggaagaagggtggggcatcgcctcacctgggaaacacaag

SEQ ID NO: 421073 - DNA, 393 bp, Homo sapiens
acccaagatggcagccaccaggggctcaggagtaaaagtcccttgcaatttccaactgttggaagaactcaaaggccagaaagaagtagcagatggcacagttagctgggatctagaagatgaggaagatataacacttacaagatggacagggatgataattgggcctacaagaatagtttatgaaaactgaggggagtggctggcaagatggctgaataggaacagttccggtctgcagctcccagcgagatcaatgcagaaggtgcrtgatttctgcatttccaactgaggtacccagctcatcacattgagactggttatacactgtgtgcagcccatggagggcaagcggaagaagggtggggcatcgcctcacctgggaaacacaag

SEQ ID NO: 421074 - DNA, 481 bp, Homo sapiens
ttgtggacattaattgatgtctaggcattgaagagctaggtgtttattacaatgtttgcagtttggacttgtttgcacccacccatattaggaaggctttccaagtattcaaagsgaattgagtgttgtgatctaagattttggtcagtgcagccatatctacattagggcgcaccccaagcccagtaacgctgtgactctacaagagtcacagaggtgcctctgtgacaagagtcacagagactcctagtggtaccgctttggtggtggtttggataagatctgagagaattcactggattatcaggcagagactcctgttctcttcccttgctttcccccaaacaaatgaagtccctgtgctgaactgcctggggttggggaaggggtgtcaaaagcacacctatagccaccatgactgggaccctgttgggtccaacttataaccagcccaggactgggtcttgctaaaggtctgtgg

SEQ ID NO: 421075 - DNA, 481 bp, Homo sapiens
ttgtggacattaattgatgtctaggcattgaagagctaggtgtttattacaatgtttgcagtttggacttgtttgcacccacccatattaggaaggctttccaagtattcaaagcgaattgagtgttgtgatctaagattttggtcagtgcagccatatctacattagggsgcaccccaagcccagtaacgctgtgactctacaagagtcacagaggtgcctctgtgacaagagtcacagagactcctagtggtaccgctttggtggtggtttggataagatctgagagaattcactggattatcaggcagagactcctgttctcttcccttgctttcccccaaacaaatgaagtccctgtgctgaactgcctggggttggggaaggggtgtcaaaagcacacctatagccaccatgactgggaccctgttgggtccaacttataaccagcccaggactgggtcttgctaaaggtctgtgg

SEQ ID NO: 421076 - DNA, 481 bp, Homo sapiens
ttgtggacattaattgatgtctaggcattgaagagctaggtgtttattacaatgtttgcagtttggacttgtttgcacccacccatattaggaaggctttccaagtattcaaagcgaattgagtgttgtgatctaagattttggtcagtgcagccatatctacattagggcgcaccccaagcccagtaacgctgtgactctacaagagtcacagaggtgcctctgtgacaagagtcacagagactcctagtggtaccgctttggtggtggtttggataagatctgagagaattcactggattatcaggcagagactcctgttctcttcccttrctttcccccaaacaaatgaagtccctgtgctgaactgcctggggttggggaaggggtgtcaaaagcacacctatagccaccatgactgggaccctgttgggtccaacttataaccagcccaggactgggtcttgctaaaggtctgtgg

SEQ ID NO: 421077 - DNA, 420 bp, Homo sapiens
tacgcctccccagaagccaagcagatgccagcatcatgctttctgtacagcctgcagaactatgagccaattaagcctctttcccgtataaattacccagtctcaggtatttctttayagcaatgcaagaacagacaactactaagactttattgaaaaaattatagttgcaaagacaatattgctttggtcagggatacaaaaatgagccaattgaaaaaaaacagaaactacagaaataaactcatgtatacttaataaatcactgaagttatataaaaatctaatgtggaagtattcactattcaataaatagatctgggtgaaatagactgatctacatggggaaaaaatgtctgtaagggtcaaatgtttattatcttgaggtaggaaagaatttcttacataagatactgaaag

SEQ ID NO: 421078 - DNA, 529 bp, Homo sapiens
caggctttctcttaccaaagttctggtgggcacagtttctcttacagcccatgaaccatttctagtccacataattaattcattaattcacacaaatttattgagagtctattttatgaaaaacgctattagttacttttatcataaaccaacatttgaatgtaatatggatttcaagaagcagaatgtggtaaattttraaaatggttggtaatttagaagaaggaaagactaatacagatagagcttcagaaaggtgagcattgagttggctgtgaaagatggataggttctccaaaggcttaaataggctgagatgtatgactttacaggttaaattaaccagcaaattatataaatgaagccacttgcacaaaattggaggataaaaataggtatgcatatgtttgggaaatgatacatttggcctgattagagttcagagatttaatgacagtatggctggaagtcaagtgtgaatgaatttgcaacagatttccatttatgtaaaggcactgaggaacataga

SEQ ID NO: 421079 - DNA, 562 bp, Homo sapiens
ctaattacaccattttgattaccagaagacagataataacctcatctaagacaataagctcacacatggctgtcatgtgctgtaaagtttctttycaaaagatggtatactatgttatactaattaggtttgtttgttcatgtgtgcagttttgggtatttataggcttttccagattaaaataaactgtttataattacacctttcttctcagggtgacaaatttttattttaaaaatattttgcaatagagaagttaagttgataattttctgttgggggaaaaaagttagtggttgattcctgtgccattttttggaaagttctcaaaaggatttctctccctcaatttttaaggacaaataaggggattataagtaaggaaattattctgggtctaaggcctatggaattcccagctgataaatgattgtcccttgttaggtatatatggctactttgtgagatgatttaaaaaattatgacagttatattttcagggtatcatttattttgctggaaatattttttccctatattttaacttttaggactcggggtt

SEQ ID NO: 421080 - DNA, 488 bp, Homo sapiens
tgtgaacatccttggaggaggcattattctgtctttcacagtcagatagtgccaaaaattataaactactcatctctgagctgaggtatcttatagtaaatgaatgtcatcattagaaaccaaataagttttcttacagacttttttttgaggagcactaactgctaaaaattacacaggggaatattatagaatatgcttactagctattctctctctgtcataactaaygaatttgtttgtttttgctggtattatgacatctttgttctaaatatatcagtaggaatcactgaactataagtacattccccctatggcccaaataatagtgctctatttttacaaataaacataaggaaattgttacagaccctaacaggaggaatttatattagataaaagttttcttaagcagatggttattgaatgagagcatccaaatgaaattctgacatcttctaaaaaagagttcacagaatatgaaa

SEQ ID NO: 421081 - DNA, 488 bp, Homo sapiens
tgtgaacatccttggaggaggcattattctgtctttcacagtcagatagtgccaaaaattataaactactcatctctgagctgaggtatcttatagtaaatgaatgtcatcattagaaaccaaataagttttcttacagacttttttttgaggagcactaactgctaaaaattacacaggggaatattatagaatatgcttactagctattctctctctgtcataactaatgaatttgtttgtttttgctggtattatgacatctttgttctaaatatatcagtaggaatcactgaactataagtacattccccctatggcccaaataatagtgctctatttttacaaataaayataaggaaattgttacagaccctaacaggaggaatttatattagataaaagttttcttaagcagatggttattgaatgagagcatccaaatgaaattctgacatcttctaaaaaagagttcacagaatatgaaa

SEQ ID NO: 421082 - DNA, 523 bp, Homo sapiens
tggtgtgatctcggctcactgcaacctcctcctccccggttcaagcgattctcctgcctcagcctcccaagtagctgggattacaagcgtgcatcaccaygcacagctaatttttgtattttagtagagatggggtttcaccatgtcggccaggctggtctcaagtttctgacctcaaatggtctgcccgtctcggcctcccaaagtgctgggattacaggcatgagccaccatgccaggccctcccagccctccttcacaaatttttcctggacttcgccacagaaaaaattaatggttttctcaatctccattccaacacagttatttacacatgaaataaacccttgacattcataaatttaaaattcctcattcaggcaattcaaaagttagtctacaaagtgagtctatggggtgtcatcattgtcattttgccaaagcacaaacgggaatagttctcactgaagagctggagaagagtgagtctacttcctcttggaagcctttcctgatactccat

SEQ ID NO: 421083 - DNA, 523 bp, Homo sapiens
tggtgtgatctcggctcactgcaacctcctcctccccggttcaagcgattctcctgcctcagcctcccaagtagctgggattacaagcgtgcatcaccacgcacagctaatttttgtattttagtagagatggggtttcaccatgtcggccaggctggtctcaagtttctgacctcaaatggtctgcccgtctcggcctcccaaagtgctgggattacaggcatgagccaccatgccaggccctcccagccctccttcacaaatttttcctggacttcgccacagaaaaaattaatggttttctcaatctccattccaacacagttatttacacatgaaataaacccttgrcattcataaatttaaaattcctcattcaggcaattcaaaagttagtctacaaagtgagtctatggggtgtcatcattgtcattttgccaaagcacaaacgggaatagttctcactgaagagctggagaagagtgagtctacttcctcttggaagcctttcctgatactccat

SEQ ID NO: 421084 - DNA, 647 bp, Homo sapiens
tggtcttcctcttcatgtcttgacattttttcacctgttacctgatgaggacaaggttactgtgtcatctacatcaatccagttccttccaggaggctcgaaacttctgcaggacagagattgcctcccacttccctactccccgcttgctaggaaaaccataggcactcatgagtaactataattgtccagacgagacacaaactcctcattaacacaaatggaatgtcctccaggcccctgacactcccccgtttctattttgtacctttctaagtcaggcccattctgctgctcctaagtcatagcctctatgagctatagtatgccaaagtaccagatacaattatatatgggggaaagaaatttctattttkgtctcaagaaaattatgtgattttgcttaagttcaattttaaaacatggaatatgactgaacttaatgttagtacttaagaaaaatgttcacggtaattacagatgaagatacatatctataatttatttcaaatttagtaatacaaaaaaattctggatcctaacataactatttatagcttggccaggagaactctaaggataccagttatttcaccagaataggttatttttcatgtatcttatttaagcaataatgcatgacagag

SEQ ID NO: 421085 - DNA, 554 bp, Homo sapiens
ggaaaatgtctccagtcatgtcagagacctttgtggcagactctcccatcagaatcccagaggtctagaagggacaaatggtttcctgggccaggcccagggctccactgctttatgcagcctcaggacatggtaccctgcatcccagccattccagttctagccatggctaaaaggggccaaggtacagctcaggccattgcttcagagggtgcaagccctaagccttggtgacatccatgtggcgttgggcctgcagatgaacaggaggcaagagttgcagcttaagagtctctgcctagwtttcagaggatgtgtggaaatgcctggatgtccaggcagaagcccactgtagggacagaaccctcatgaaaaacctctactaggacagtgctgaggggaaatgtggggttggagcctccacacagagtcctcactggggcactgcctagtggagctgtgagaagagggccactgtcctccagaacccagaatggtagatctactcacagcttgcacctaatgcctggaaaagctgcaggcactcaacacca

SEQ ID NO: 421086 - DNA, 554 bp, Homo sapiens
ggaaaatgtctccagtcatgtcagagacctttgtggcagactctcccatcagaatcccagaggtctagaagggacaaatggtttcctgggccaggcccagggctccactgctttatgcagcctcaggacatggtaccctgcatcccagccattccagttctagccatggctaaaaggggccaaggtacagctcaggccattgcttcagagggtgcaagccctaagccttggtgacatccatgtggcgttgggcctgcagatgaacaggaggcaagagttgcagcttaagagtctctgcctagatttcagaggatgtgtggaaatgcctggatgtccaggcagaagcccactgtagggacagaamcctcatgaaaaacctctactaggacagtgctgaggggaaatgtggggttggagcctccacacagagtcctcactggggcactgcctagtggagctgtgagaagagggccactgtcctccagaacccagaatggtagatctactcacagcttgcacctaatgcctggaaaagctgcaggcactcaacacca

SEQ ID NO: 421087 - DNA, 460 bp, Homo sapiens
gtggagaggcctggcgtgatcaggaaaggcctctccaaagaggtaacatttaagctgaaaactaaaggacaagaataagccaaccatacataataaaaatgaaaacaaaacaaaacaagcaattgaacaaaaaatgggagaaaagtattccaggtagagagaatagcaagtgttagttaagaggattctctcaagtgggcagaagcttggcaggtttgaggggcagaaaggagcccagcatggctagagcagggggarctttgcaaaaaccttttgttccaatgaaaataacacaaaatctaatataaaataaatcagagcagagggattcagataaagtctggttaaaaccactgataagattcaccactgccagaaactaagatttcccctataatattcagtatttatttgaattatttggtgatgccaaaccattacctccaaaatcaaagtttat

SEQ ID NO: 421088 - DNA, 519 bp, Homo sapiens
tgtttatggcagcacagttcacaattgcaaaaacatggaaccagcccaaatcgccatcaatcaatgagtggataaagaaactgtgtgtgtgtgtgtgtgtgtgtgtgtgtgtgtgtgtgtgtgtgtatcacacaatggaatactactcaaccattaaaaggaaagaattaatggcattctcagtgatctggataagattggaaaccattattttaagtgaagtaactcaggaatggaaaaccaaacatcatatgttctcataagtgggagctaagctatgaggatgcaaaggcataaaaatgatacaacmgaccttggggactggaaaggaaagagtgggaaggaggtgagggataaaaggctacaaattgggttcattgtgtactgcttgaatgatgggtgcaccaaaatctcacaaatcaccactaaagaactgactcatgtaaccaaataccacgtgttttccaaaagcctatggaaataaaaagtaaataaataaataaataacaggttccattt

SEQ ID NO: 421089 - DNA, 614 bp, Homo sapiens
gatgctatgcaaggatacttaatagcactaaggaatgtttatsttatggtgttagtaataatactaaaaagtataaataatatttattgagtgctattacatgcagccactctgctaagtcctttaccaacttgtttcattcagcaatcacaaaaatcatgtaagaaaggcattattacttgccctattttataggtaggaaatctgaggttaagaaggggtgaaattgaaatcactgcatgtcatattttctcttattaaatgcagtagcaggtaaaacacacacacacacacacacatctgtgctcgtgcacacatagccagttgttttcctccgtatgtggtgagataatgaattgtatttatttcttcattttaattatctctatttctttttctattttactttaagttctgggatacatgtgcagagcatgcaggtttgttacataggtatacatgtgccatggtggtttgctgcacctgtcaaccccccgtcatctagtttttaagccccacatgcattaggtatttgtcctaatgttctccgtcccctcaccccactcaccaacaggccccggtgtatgatgttcccctccctgtgtccatgtgtt

SEQ ID NO: 421090 - DNA, 615 bp, Homo sapiens
tccaaacctgactgttccttctctttctttggccaaaatctttgagactttctacttcccgttttttcttccaactagtcctgacacctgtctaccctgagcactgagccactgagccccttgggctttcaagtcaagtaagatggcatgcaccaaagagtaatattctaatagattttgctgctcaaaaaagcagtacagaaataaatgaaaaatgaaaggcccatttctatgatagctgcttgttttgggttcccacagttgggcttgtcaaaaattgatggscattgtattagtccattttctcactgctataaagaactactgagactgggtaatttatggagagaaggtttgattgactcacagttctttaggcttaaaaggaagcatgactgggaagcctcaggaaacttgcaatcatggtgaaaggtgaagggtaagcaagcaggttgtaccatgccagagcaggagagagagggagagaaaagagggggaagtgccacatgctttcaagcaacgagatttcatgagaactcactcactatcacgagaacagcaagggagaagtccatgcccatgattcaatcacctcccaccacaccccttccctga

SEQ ID NO: 421091 - DNA, 615 bp, Homo sapiens
tccaaacctgactgttccttctctttctttggccaaaatctttgagactttctacttcccgttttttcttccaactagtcctgacacctgtctaccctgagcactgagccactgagccccttgggctttcaagtcaagtaagatggcatgcaccaaagagtaatattctaatagattttgctgctcaaaaaagcagtacagaaataaatgaaaaatgaaaggcccatttctatgatagctgcttgttttgggttcccacagttgggcttgtcaaaaattgatggccattgtattagtccattttctcactgctataaagaactactgagactgggtaatttatggagagaaggtttgattgactcacagttctttaggcttaaaaggaagcatgactgggaagcctcaggaaacttrcaatcatggtgaaaggtgaagggtaagcaagcaggttgtaccatgccagagcaggagagagagggagagaaaagagggggaagtgccacatgctttcaagcaacgagatttcatgagaactcactcactatcacgagaacagcaagggagaagtccatgcccatgattcaatcacctcccaccacaccccttccctga

SEQ ID NO: 421092 - DNA, 615 bp, Homo sapiens
tccaaacctgactgttccttctctttctttggccaaaatctttgagactttctacttcccgttttttcttccaactagtcctgacacctgtctaccctgagcactgagccactgagccccttgggctttcaagtcaagtaagatggcatgcaccaaagagtaatattctaatagattttgctgctcaaaaaagcagtacagaaataaatgaaaaatgaaaggcccatttctatgatagctgcttgttttgggttcccacagttgggcttgtcaaaaattgatggccattgtattagtccattttctcactgctataaagaactactgagactgggtaatttatggagagaaggtttgattgactcacagttctttaggcttaaaaggaagcatgactgggaagcctcaggaaacttgcaatcatggtgaaaggtgaagggtaagcaagcaggttgtaccatgccagagcaggagagagagggagagaaaagagggrgaagtgccacatgctttcaagcaacgagatttcatgagaactcactcactatcacgagaacagcaagggagaagtccatgcccatgattcaatcacctcccaccacaccccttccctga

SEQ ID NO: 421093 - DNA, 507 bp, Homo sapiens
cataggacaacagacattttggttttcagacattgaacacaaaatgcaaagcacagagatggggtcccagcagcatggctggaggctggagcccttcagaaaacatcaccagggaaaggcttactagtcttgggaataaccaagaacagttaagaacagggatgcagagcttccaacargaggttgcttgctctgctccttgccatctcgcccaccctccacttctcccaaactcagaaccacatgttagatgggcagtcttcagctgatggtcctttgaggaatgataatatcaacaattcctagagaggtgatgtcatgtggagatgggccggcagagagatgcaaggtaacatatagggttttcaggtaaatataaatctcagataaacagtcaataattgtttaacataagaatgtccccagtatttcacgggacatacttatactaaaaaaaattcattgtttatctgaaattcaaatttaactgtttttcctgtatttatt

SEQ ID NO: 421094 - DNA, 523 bp, Homo sapiens
cttcactcaggatcctgccatttcgtgcctatttgtcctatcaggatcctaatttatctccccatttccagcctggatttcttctaatatgtcccttccagtacaaaatttctaaaatgcaaatctgctcatggaagcagctgctgtttatttagcatttactatgtttccaaygctggtactaagtcaccttctctatctcctttagtctttgcagccaccctctgagatgcctttgttacttgacaaataaggacttggaggcttagtgaggtgtgacacacactaactagctcaaggagacacagctcttgagtgagagtccagccttgaacctccatggctgaagccatactctcagctatgagctgtatgctttcactcactcactgccatgcccacaattcttccatggatctccggtgccttgtagatggaagtccaacgtgcttaacctgccagtcttatttcctagagctccccactccctccttctttacgcagcctcccaccggtctgccac

SEQ ID NO: 421095 - DNA, 479 bp, Homo sapiens
tctactaaaaatacaaaaattaacctagtgtggtggcacatgcctgtaatcccagctactcgggaggctgaggcaggagaatcgcttgaacccaggaagtggaggttgcagtgagccaagatcgcaccactgcactccagctgggcaatagagcaagaccgcctttaaaaacaaaacagaacaaaactaaacaaaacaaraaccacacttattgacctcccacctttctgcctggtgctgtgtgtgtgtgtttaatcatttgcttaccattttatgtttttctaacttcaggtgcaaagggttgagacagcccactcctaggtaagtggtctaccaattttttttctttttttgtgacggggtttcactctgttgcccaagctggagtgcagtggtgcaatctgtgttcactgcagcctcaacctcctgggctcaagcaatccttctatctctgtctcccaagtagctggaaccacagt

SEQ ID NO: 421096 - DNA, 585 bp, Homo sapiens
atcccccctttaggctggacccaggcagaagagtcacatcacctgggtgttaaaatgagcaatatgacacaatgccccttattggcagcaccaaggtaggagagaaaatttacattacctgactgcaaatcccagcgatatgtcacagtgyctcctgtaagaggcaccaaggcttgagaatagagtcatctcacctgggtgctgggtccagcaatatatcacaattctacctgtgaaccaagccaggcaggagagtcaaatcaggtgtttggcagaggtgtatgtcacaatcagaccttcaaaaaatacagggatgaaattaccaatccctcacatgttctggttctaggtatgagagtccacatgtcttgtatgatgggtaaagtagacaagtcacaacctcaactgtgaactggatctgtgcagcagcttctcaatgttttctgggcattgtgtccccttagaaaagtcacagcctgacacgtgtgctaaattatggtttaagggtcacaaaatccatgcataacgaattcatgaatgagagtcaacattgcaacttttgactgcctctagatataagattca

SEQ ID NO: 421097 - DNA, 595 bp, Homo sapiens
aacccctttggtcagtggatcatagaagcttgagcccccagccacagaggtgggtattgtatccattctgaacaggtcttagtactttaacctgatcgagcatagtgattggcccaagaactagccacatgacccatgcctagccaactakaattcttatcctggttttctcaaattggagttggggtaagagtcctttcttctcaggctactctgggaagatgtgagtctggaagctactaatcatttctgtctctcctccagagaaggccagacaccataaggacactgaggctgacattcagaaaaaagtcaagcccaaggaagacaagtccctggcttcagttttcgcaagtcataccctctcttcccacctccccaagaaaattaatttccccttttacctaaactactttaagtagaatttcatcatttgcaaataacaatcccaaataattcaaaaggtaagccctttgaggaaaattcaattcacaaatctgaccaacctgtctgagcacccactatgggcagttatagcttccattatcaatagtataattttaaatacagaatagatgagaaacaaatgtgatga

SEQ ID NO: 421098 - DNA, 558 bp, Homo sapiens
gtcacagcagccactatcttgaatgccgttggttgtcatgtcagagggaaagagagcctggaaggtcttgcaccagcaattaaatatccagaatgaaagtgtctcattcactcaaaactcattggccacagtagtgacatgacctcatctaaccactggggctaagaaagtacaatccgaccgtgtgcccagaggggaagaagaagcagatctcagtggaatatctctaatgattatcaaagtattagttgtactatggtcattttgctgttgccacaaaaaattattccatataaagtacttagcataaggttgggctcatactaaagactcagtgttagctattaacagtattagcaccagtaatagtttcacataarcaaaattcttttaagtttactcagacctaaacattaaaacacatgtacacatgtatgcacacgcacacgtggaaacacacacacacacagaggtgagattgtattaacctaatctgtatactgcaagtcaagttgggatatataataccaaatacatacttgatattaaaaaataaaa

SEQ ID NO: 421099 - DNA, 595 bp, Homo sapiens
taatccaccattggtggacacttaggtggattctatgactttgttattgtgaatagtgctgcaataaacatatatatatataatatttttcctttaggtagatattcaatactagagtygctggatcaaatgttaactctatttttagttcattgaaaaatcttcatactgctttccatagaggttgtactaatttacattcccaccaacagggtataagcattccctctcctctgcatcttcgccagcatctgctgttttttgactctgtggccattattaaagagtcaagaaacaacagatgctggcgaggctgtggagaaaagcaatgcttttacagtcttagtgggaatgtaaattagttcaatcattgtggaagacagtgtggcaattcctcaaagacctaaagccagaaataccatttggcctagcaattccattactgaacatatacccaaaggaatataaatcattctattataaagatacatgcatgcgtatgttcattgcagcactattcacaatagcaaagacatggagtcaacccaaattcccatcaatgatagactggataaagaaaatgtgctacatatac

SEQ ID NO: 421100 - DNA, 595 bp, Homo sapiens
taatccaccattggtggacacttaggtggattctatgactttgttattgtgaatagtgctgcaataaacatatatatatataatatttttcctttaggtagatattcaatactagagtcgctggatcaaatgttaactctatttttagttcattgaaaaatcttcatactgctttccatagaggttgtactaatttacattcccaccaacagggtataagcattccctctcctctgcatcttcgccagcatctgytgttttttgactctgtggccattattaaagagtcaagaaacaacagatgctggcgaggctgtggagaaaagcaatgcttttacagtcttagtgggaatgtaaattagttcaatcattgtggaagacagtgtggcaattcctcaaagacctaaagccagaaataccatttggcctagcaattccattactgaacatatacccaaaggaatataaatcattctattataaagatacatgcatgcgtatgttcattgcagcactattcacaatagcaaagacatggagtcaacccaaattcccatcaatgatagactggataaagaaaatgtgctacatatac

SEQ ID NO: 421101 - DNA, 525 bp, Homo sapiens
aaattcagaattggatatgtagcttgtatttgtggctcacattatgtttctcttgggctgtgcttctgtagtttctcttttactcaccttctattcaaattctttccttctcttaaggcctagctcaagctttgctgtctttttgggtcctttgggtcaatctctcccttccctaaaatctcctaggggttttgtcatggagagacagtcacataatgtgtatttgtgggctgaatttaagcaggaaaaacatataaagtgtttagcccagtgtctggcacatcacaaacaaaataktatgattcattttttttttttttgagattaccattggagtctggctacctagttcagagccggtttttttgctgccttgcatccttctcatgtgtttagtctctcttccttgtgtgtttagtcttgttgaatatgcctgtgaggacagagaacccgtctatttttcctgggtttgttcttaacccacgaggcagctctagcacaatggattctcccctatgattattc

SEQ ID NO: 421102 - DNA, 509 bp, Homo sapiens
taggaaaggcctggcaatctggttattttcaggcctcttgggtgcaaatggtagaagggaggagcttcatgaattttgagcaccttgatgtccaagccatggcagaattggacttcccttcatgtattcctttttccaccccccaccagctgtcttygttgccttcattgttcccaaagcctccttttcatccttgtttattcctggctggaataggttcagtggaaccatattcctccgacagtttgcattgcttcacttgctcaggagccggtagcactgccagctgcctctgggaccggaatttcttacatttatctcatgagctatacttttctgtctatttttgcatgttatcctttgatcctcgcagcaactgtgtgagttctctcaattcttagcctaaacctaaaacgtgtctattctcagcctcttactcccattccactgcgattctcttaagtgtactactcttccttcctcttccctacacagatgcttgaatctgc

SEQ ID NO: 421103 - DNA, 517 bp, Homo sapiens
ttcaagggtggatgtcctggaatggccaattatttgtctaaatgctttgtttctttcctaaccaattaggctaaaacacctctggtaaacaaataggcatacaggccccccgccctcaccaccccataaataagactgtaggtgagaaaggcagggaggctgcactttccccttctgatctgtgcaggggaggtttctgcttcaggggatgtggaggagactggtcctggcttagtcttcttaggtwaatctttggcgggacgagcaagctgccccttctaatctgccttccaagtgcatgtagtggttcatggcactgctttacaagagggatgggtttgatgggtggagcacttgcacatttttaacttataaaagtccttgtgagccaggcacagtgcctcatgcctgtaatcccagaacactgggaggctgaagtgggaggatcacttgaggccaggagttggagaccagcctgggcaatatagtgagactctgtttccaccaaaaaaaaaaa

SEQ ID NO: 421104 - DNA, 517 bp, Homo sapiens
ttcaagggtggatgtcctggaatggccaattatttgtctaaatgctttgtttctttcctaaccaattaggctaaaacacctctggtaaacaaataggcatacaggccccccgccctcaccaccccataaataagactgtaggtgagaaaggcagggaggctgcactttccccttctgatctgtgcaggggaggtttctgcttcaggggatgtggaggagactggtcctggcttagtcttcttaggtaaatctttggcgggacgagcaagctgccccttctaatctgccttccaagtgcatgtagtggttcrtggcactgctttacaagagggatgggtttgatgggtggagcacttgcacatttttaacttataaaagtccttgtgagccaggcacagtgcctcatgcctgtaatcccagaacactgggaggctgaagtgggaggatcacttgaggccaggagttggagaccagcctgggcaatatagtgagactctgtttccaccaaaaaaaaaaa

SEQ ID NO: 421105 - DNA, 529 bp, Homo sapiens
tggatacatacaagagggagaggagactgagaatgtatcctccatgacacacaaagatcagtgttttttacaaggtggtcccggctgggtgtggtggctcatgcctataatcccagcactttgggaggctgagctgggcggatcacatgaggccaggagttccagaccagcctggccaacacggtgaaaccctgtctctactaaaaatacaaaaaaaaaaagaaaagaaaagaaaagaaaaaaaattagccggacgtagtagggtgcgcttgtagtcccacttactcgggaggctgaggcaggagaatcacttgaacccaggaggcagaggttgcagtgagccaagatcatgtcactgcactccagcgtgggtgacagagcaagacttcaactgaaaaaaaaaaaaaaagtggtccctagaacactawttttggatgaattaataaatgtggtataaaaaaggattatatggtatgttttttgtcagtgtggcaactatcaatttattacctctcagctccaaattcac

SEQ ID NO: 421106 - DNA, 570 bp, Homo sapiens
cagcatccactacttctgtctgggtgggcaagttttaatatattcccacaaatatacccctctatttcattttctttctttctttctttctttctttctttctttctttctttctttctttctttctttcttycttccttcctttttctttttctttcttcttccttccttccttcctttctctctctctcccttccttccttcatttctttctttctctcttcttcttccttccttccttcctttctctctctctctctctcttccttccttccttccttccttcctttctttcttattttgagatggactctcactctgtcgcccaggctggagtggcatggcaccatcctggttcacttcactgcaacctctgcctcccggttcaagtgattctcctgcctcagccccctgagtagctgggattaccaggtgcatgccgccatgcccggctaatttgtctttgttttgttgttgttgtttgtttgtttttgtatttttagtaaagacggggtttcatcatgttggccaggtcttaaaatcctgacctcaagtgatccatccgcctcg

SEQ ID NO: 421107 - DNA, 481 bp, Homo sapiens
atttgccaactttttaaaaaaataagtttcctgaagtacaatttacatatggcaaaattcacccttttaggtgtacatttcaagaataagcaccatcataaataaaaaatagaatatytacaaaccctgaaaaaagtccttgtttcctgcttcaatcaatcacctcccctcacctttgtccttgacaactactgatctttgttttgtctccagggttttgtcttttccagaatgtcatataaattgaccaatatggtatgtagccttttgtgtctgacttaattagtattgcataattattttttaccatttctaagggaaaatacattaataaaatacagcaaaagttactgtatgaatttgctgcctgagatgaacatgggaggtgatgtgttgaggtcagtccctgaggcttatcatgaagttaatataagtaggtggctatttattaaaaagaatgataatgtatacatgttttctt

SEQ ID NO: 421108 - DNA, 474 bp, Homo sapiens
cttttgccatactatactgtttacatatctgtaaagtaagtttcatgagagcaggagtttttattttgtgtgctgataatccaagcacatagaacwtcacttggcaatgataggtgcacattaagtaaatgcttcttggaatgaaaagaaagtgaatagaataaggcaaccccatgatcccacacctgaggagctaaaagatggtgtctacagagagttatagaggaaaggcaggggaacagctttgctcagcaaactaaccagcttgttttctgtttcctctgaacaaaagtgagcctgaatgcaattgtggaagattggggttgaagattttccagatcgagtttgtgcatggtgcctgatggaacagagggaccatagccagcctcttcaattgttcagatgccaggatgtgtgatatcaaggggctttttgacatgtctgggaaacagcaggatctagtggttgagctga

SEQ ID NO: 421109 - DNA, 619 bp, Homo sapiens
tgtgaacaacagccatctccttaataagggaattgctaacactatctaataaatgcctatagtgaacattaaagctattccctaatactcagttttcctctctacctcaaagtacacaaaaatgctgtttttcctctcttctaatatactcgatatgaacacggggactcatcaagaaatataagcagataaggcatgtgtcactttcaagtggtagtaatcacttggctttgtataagatggcagagccaaaaaagtgaagtagcatagatcactgagtacggagaacagcttgcttggagggtcacttaaacccaccacagacttgagaaaaaaaatggatagattaagacattgatataggggggttagtattgattatcgtacagtgtaacttcactatttacactgctataccatctagggaaataatcaagaaatctggctccagaaataactcctagctttttttgaacttattgaattgatggagaggccatggatgccattaatccaaaataaacggagaagggaaaatgaatmgataacacagcctacctaatttggaaatacaagagccatgtttccactttcaatttcttgtaccttgtgactaaat

SEQ ID NO: 421110 - DNA, 454 bp, Homo sapiens
tgatactcagggcatgaaaaataggaaatccctgaacaggatgatattaaaagtaataaagagaaaaggaaaaactatactcaaatacctatagttctttatgtgtaaaacaaatgtgatgggcctctttaatagaagtccaaaaattctaacatttttayactttgaaagtataaaaacttgataatgacatatacttacaatcacttcctaccactatcatttggtccctgaaattgtctattaagacatttggtcctctgaaattggctattaagcaatggaacaaagtttgctgatggcaaaattttcatgaaaaactaacatttcctaagtgcttactaaaatatatcacttttacaaaagaaaggcacaagcttcacatgataccaaaaactgatcagttgatagggattttacccaaatgtataaggagaaagaatgagatgcattt

SEQ ID NO: 421111 - DNA, 606 bp, Homo sapiens
aatacaattgcaaagtcatagaagacttgccaaacattctcaaaacatttgttttaatccaaatatgaggcacaattcaaaaatgttttatttgatattacttaaccaggcacctatggtgagaatattagcatttttctttacctgtaactataagttgaaatattactacttaaagagtatttatttaatgtgtttttttagtaagagtattatactccccccagacagaaattattatgaaaacagtctgtaaayatgtaaggtaattctgtatatttagtatagtttagtttgtgctccaacatgaaacatttttattcctttaaacctgccattcacttaaaacaagcactctgtgctttacaaaatttagatatgtgcagagggtaaattatgagtttataaaaagtaaagtcacataattttaacaaaaattcagggcattcagcagagtgaaaccacttcattctctgtttttaataattgtggaatcttcctacctgatgctgattactctcatttgtaggattgagagtaaatttcaatctacaatacctcattgccatctagcacccatcgaaataacattcaaggaaataaacc

SEQ ID NO: 421112 - DNA, 344 bp, Homo sapiens
aattctataaaccatataacatttcattgtttttatatggcctgttgatttttatattatctgaattagtatgtcacattttaaaaaaatacttgcatagaataactcatttattcatctaatgcaaattgagtacatattaaacaattttgtgcaaaaaggtaccttacttgcaagaagctcacagtccaataagggagagagacagaaaatctgataaattgcaatgtacaaaagtattgtacattttaaartaactaaaagagtggaattgaagtgttcctaaaacaaaggaatgataaaaacttgaggtgatggatatcccagttatcctgatttgatca

SEQ ID NO: 421113 - DNA, 580 bp, Homo sapiens
tgagatttgggggaacacattcaaatgaaggcctagctcttatcttaattttttaaaaaattgtattatattgtactgacacagttttcccactgcaagagcttaactctatcataaatgctttttctaattgcttcctccttttaaattcccaaacacaaaattaagattccttatacaaatgcatgattaataatactcaaacactaattaacctcacttctctcaaagttcatgttcttttattcctctttctttcaagacagactacatttttggaaaacaatttttgtttcaaaaaatgtaacataacatttttccaaaattgcttttttttttttctagcagtatagtaaatcacttagcttgaaagattctccaaataaaaacaaaaatgctggataaaatacattttaaatgtattgcttattttgcatgaaaatagggaaactaaygagtccaaaaccaaaattcataaaggtactctgaaaacccatcaaatgtcaatgctaatattgtcctacatgttttctgccaagatccagagactcagggtatatgttaaacctatggcctgccc

SEQ ID NO: 421114 - DNA, 523 bp, Homo sapiens
ccatgacccagtaagaccccagacaggtcaggtgggagagtgcttgtgctgcctctaccccaacccatggcagtgcagctcacagcaacaaaagtgacttctttctgcttggggaaaggagagagaagagaaaagaggagtttgtcttgcatcttggatactagcacaggcacaataggagagagtactgggtagagtcatgagacccccacttcaggccctagtttctagatgacatttctagacacaccctgggccagaaggaarcatgctgccttgaaggcaaggacccagtcttggcaagattaatcacctgctgactaaaatgctcttgggccctgaagaaccagcagtgatacctagattgtatgtaatgggccttgggtgagtctctgaggtatgctggctttagataccagctcagctgcagtgaaacagaggaccaagtgggcttttcagatccctgagtccaggcctaggttcttgtacagcatatctggacctgccctgggccagaggggag

SEQ ID NO: 421115 - DNA, 583 bp, Homo sapiens
  misc_feature (1)...(583): n = A,T,C or G
cttgtgctgcctctaccccaacccatggcagtgcagctcacagcaacaaaagtgacttctttctgcttggggaaaggagagagaagagaaaagaggagtttgtcttgcatcttggatactagcacaggcacaataggagagagtactgggtagagtcatgagacccccacttcaggccctagtttctagatgacatttctagacacaccctgggccagaaggaagcatgctgccttgaaggcaaggacccagtcttggcaagattaatcacctgctgactaaaatgctcttgggccctgaagaaccagcagtgatacctagattgtatgtaatgggccttgggtgagtctctgaggtatgctggctttagataccagctcagctgcagtgaaayagaggaccaagtgggcttttcagatccctgagtccaggcctaggttcttgtacagcatatctggacctgccctgggccagaggggagcccactgtcctgaaagangagtcctagccctggcagcattcaccacaagctgactgaagataacttgggccttaagtgaacattggtggtggcctggcagac

SEQ ID NO: 421116 - DNA, 611 bp, Homo sapiens
caagagaaggagtagttatatcagacaaaacagatttcaagacaaaaactctaggaagacacaaaggaggtcattatataatgataaagaggtcaattcagcaagtgaatatgatagttgtaaatatatgtgcatctaacacttgagcacctacatatrtaaagcaaatattattacaggtaaagagacaaatctcaaaacaataatatctggatacttcaacacattttcagcattggacagaccttccagacagaaagtcaacaaaaaattaggcttaatctgcactataaaatcaatatacctaatagatatttacagaacatttcatgcaatggctgcagaatacacattctttgcctcagcacatggattattctcaaggatagaccatatgttgggtcacaaaacaagtcttaaaacattcaaaaactgaaataatatcaagcatcttctctgaccacaagaaaataaagcctagaaatcaatataacaaaaggaattttgtaaactatacaaatacatggaaattaagcaatatgctcctgaatgtccagtgagtcaatttttcaagaaatttttcattttttcaattttaagaaaattgaaaa

SEQ ID NO: 421117 - DNA, 530 bp, Homo sapiens
actataaaatcaatatacctaatagatatttacagaacatttcatgcaatggctgcagaatacacattctttgcctcagcacatggattattctcaaggatagaccatatgttgkgtcacaaaacaagtcttaaaacattcaaaaactgaaataatatcaagcatcttctctgaccacaagaaaataaagcctagaaatcaatataacaaaaggaattttgtaaactatacaaatacatggaaattaagcaatatgctcctgaatgtccagtgagtcaatttttcaagaaatttttcattttttcaattttaagaaaattgaaaaatttttgaaaacaaatgatcctggaaacacaacatgccaaaagctataagatacatgagggcagaacttgccaggaaatctatagttaagagcaactacatataaaaaagaaaaacttcaaataagcaacctaatgatgcatcttaaagaactaaaaaagcaagagcaaaccaatcttaaaattagtagaagaaaaaaataacag

SEQ ID NO: 421118 - DNA, 530 bp, Homo sapiens
actataaaatcaatatacctaatagatatttacagaacatttcatgcaatggctgcagaatacacattctttgcctcagcacatggattattctcaaggatagaccatatgttgggtcacaaaacaagtcttaaaacattcaaaaactgaaataatatcaagcatcttctctgaccacaagaaaataaagcctagaaatcaatataacaaaaggaattttgtaaactatacaaatacatggaaattaagcaatatgctcctgaatgtccagtgagtcaatttttcaagaaatttttcattttttcaattttaagaaaattgaaaaatttttgaaaacaaatgatmctggaaacacaacatgccaaaagctataagatacatgagggcagaacttgccaggaaatctatagttaagagcaactacatataaaaaagaaaaacttcaaataagcaacctaatgatgcatcttaaagaactaaaaaagcaagagcaaaccaatcttaaaattagtagaagaaaaaaataacag

SEQ ID NO: 421119 - DNA, 523 bp, Homo sapiens
cagcagcatcatgctgttggaggtttgttccacaagtccccttatcacactactggaatatcccctttggaccccccttatttgggatgggtagcacactgactgtttattagaactgagacagacttaagcttaaggcaccatcaagtgcaaaaaggggacagtaatctaggggaaaaacattttgaaagacagaccaacaggaaaatcaaaaagaatctctaagcaaacatatccaataaaaactaaaacaagccacacygagaagacaggaataaatccctcaatgtgccgggcatggtggctcatgctgtaatcccagcactttgggagactaaggtgggcagatcacttgaggtcaggagttcaagaccagcctggccaacatggtgaaactccgtctctactaaaaataaaaaaattagctgggcatggtggtgtgtgcctgtaatcccagctactcgcgaggctgaggcagcagaatcacttgaactcccaaagcggaggtggcagtgagtcaaaa

SEQ ID NO: 421120 - DNA, 601 bp, Homo sapiens
ggtcagcaccatgaagtgacaatgattctgaaattcaagtttacacattagcatgctcttaggaaaactccaatttgaagataaaattaagtataggaaactaactgttgtaatcaatattagtattctaataaggttatgctcataagaaaagctaatctactgagaaaagtaattatatatttgagaaactgactgagaaaaataacctatgcatatgtcccaaattttaaaccaccatgtttcttctttctaatggattatgacatatttatgtagctccagaaacatctactgcccagaaatattaatgtaatcattaccaaaatattcttgacaaggaactgagagtttagaatgaccaaatatttatgtcatatccaactttattgcttgaaaatggacatagcaagtgcacaatattaatgtcagtctaacaagattatataaagattaaaacaaaaatccttcatctgaccatatttagtttatcatttctaacaaytggctttcaggctagccaaatgatttcctctcttcaccaatattatgtccttcatattcttataagcaggtatgttgtttaataagtctttccata

SEQ ID NO: 421121 - DNA, 636 bp, Homo sapiens
tctaacacaccattagggtcttgtgttaaacactactttttgtgaacctgccctgaatcttccacccatcagtcttgggttgttttttacctcctcttctcccaaaatatctttatttgaattataatgaatcattactatttatgtattacatgtttgagaacttgctgacttgctataatttattggtaamccccaaatcaatgctcacaacccttttgaagttctccacaggcatacggataagctttgctcaggcatcagttgtgctgttggccatgagttcaatgttaacaaatcaacaatatatttaaataatgtagtttaaaacagaagctcatatagaacaaagttatgtattgattggttgacaaaaatattgtgactagagactcaggggaacctaaacctgtgtttgccctagaagcactggttcagtactcattaattcagtgttcacagtgactttataaaacattactacagccagcaataagtatcaattatatatttgctttcatgtctatgtgtattttttttatggttgtcactctctcctttcatattgcctatcttcagggcctgaacaatccttaaaaaatagtagataacaaataaatatttgttgaataagta

SEQ ID NO: 421122 - DNA, 636 bp, Homo sapiens
tctaacacaccattagggtcttgtgttaaacactactttttgtgaacctgccctgaatcttccacccatcagtcttgggttgttttttacctcctcttctcccaaaatatctttatttgaattataatgaatcattactatttatgtattacatgtttgagaacttgctgacttgctataatttattggtaaaccccaaatcaatgctcacaacccttttgaagttctccacaggcatacggataagctttgctcaggcatcagttgtgctgttggccatgagttcaatgttaacaaatcaacaatatatttaaataatgtagtttaaaacagamgctcatatagaacaaagttatgtattgattggttgacaaaaatattgtgactagagactcaggggaacctaaacctgtgtttgccctagaagcactggttcagtactcattaattcagtgttcacagtgactttataaaacattactacagccagcaataagtatcaattatatatttgctttcatgtctatgtgtattttttttatggttgtcactctctcctttcatattgcctatcttcagggcctgaacaatccttaaaaaatagtagataacaaataaatatttgttgaataagta

SEQ ID NO: 421123 - DNA, 636 bp, Homo sapiens
tctaacacaccattagggtcttgtgttaaacactactttttgtgaacctgccctgaatcttccacccatcagtcttgggttgttttttacctcctcttctcccaaaatatctttatttgaattataatgaatcattactatttatgtattacatgtttgagaacttgctgacttgctataatttattggtaaaccccaaatcaatgctcacaacccttttgaagttctccacaggcatacggataagctttgctcaggcatcagttgtgctgttggccatgagttcaatgttaacaaatcaacaatatatttaaataatgtagtttaaaacagaagctcatatagaacaaagttatgtattgattggttgacaaaaatattgtgactagagactcaggggaacctaaacctgtgtttgccctagaagcaytggttcagtactcattaattcagtgttcacagtgactttataaaacattactacagccagcaataagtatcaattatatatttgctttcatgtctatgtgtattttttttatggttgtcactctctcctttcatattgcctatcttcagggcctgaacaatccttaaaaaatagtagataacaaataaatatttgttgaataagta

SEQ ID NO: 421124 - DNA, 581 bp, Homo sapiens
ccaataagctgaaaaatcatcccagcatgcccgaggtgtcctagatttagcattaaaatcccattttctgggaaactcctcaatcctggtaaaccaaggcacttggtcactctgtttataaactactatattgtaaggcaaaacatactttgtaaattacgacagtgtgaatttagtgttcattcattgttcacgcaaacaataactgccaaactgctattatttcacaagcactctctagtttttgaggacacaaagttgattttgatattacccttttccttaaggatccctgcataacacctcaaaataatttacactttaaagtgttttttataaatatgtatgaactcagggcagaaaatcataacaatggatacttcgaatacagattcttcctagggctgaataaccagastgatttaagagctagggaatgtgtaaaggttggaggcatttttaacctgtacttagatggaacagaaaaaaaaaaatctggaagaaagatcttgacaatacagaggagaaacatttgtagactaacacacttgggaaaagttggaagaaataagcttctcttc

SEQ ID NO: 421125 - DNA, 513 bp, Homo sapiens
gtttatgattctgacatgtaatctagctcctgaattaatatgcagcacagttgaaattactggaatcacgctctgaaatcatgctaagcacacactttgtatacacgatgaccttcaataaagatcacaaatgtgtatttccattttcgaatgagaacatttaactccaggattaccacccagagtgccatgttcacattgttggggcatgattaattttgaattataaaaatagaactcttttcaatcatatcttagattccattcaaacctggtatgaaagcaagtataatacacagaaatactatgaagggtgcaaattaaacccacacaaagagggatttgggccagatttctgaaagaacagtcaaacttagttcatgtcactgttttgcaaacataaattaaagaagggraagtgccaatatcctgaccgcgtaacagcatgaacttagcctcaggctaaagtctaaattacccattaataatattttcagtcttattcaaactggg

SEQ ID NO: 421126 - DNA, 601 bp, Homo sapiens
acctatcatgcagttgtgactctgccccttcttctggaccattcaacctaagctgccaacaagcaaaagactagaaagagcgttggcagctaccacctccacagcaccatccttcttgcctgttgactcagtggccggagtacaaataaggttctaattttggggagaaagcacagaatgatctaagaattactgggaaaattctcttaaacatactaaccctgaagccaagatgttttcttcaaacaaccacccggtcctcttaaccctgatacttttttccagtccttgaaatayataagtaattgggaagtttaacaaagtgaaaggttaaatacaggattactagaatcactagctagtttagaaaaacacctaactagaacggaaaaaaaaagttatacagatgggtctgagtaaagggcaagcaaggtataaacacaaccaaaatagttttatatgtgtttagtaagttatgcataatattttactgtgaaaaaagtcaatctttatttactaacttctcaggtctgtagaacatttcatctttggtttgagacacatatgtatcaaagtgcatagaaaatgctttaaaatattt

SEQ ID NO: 421127 - DNA, 601 bp, Homo sapiens
acctatcatgcagttgtgactctgccccttcttctggaccattcaacctaagctgccaacaagcaaaagactagaaagagcgttggcagctaccacctccacagcaccatccttcttgcctgttgactcagtggccggagtacaaataaggttctaattttggggagaaagcacagaatgatctaagaattactgggaaaattctcttaaacatactaaccctgaagccaagatgttttcttcaaacaaccacccggtcctcttaaccctgatacttttttccagtccttgaaatacataagtaattgggaagtttaacaaagtgaaaggttaaatacaggattactagaatcactagctagtttagaaaaacacctaactagaacggaaaaaaaaagttatacagatgggtctgagtaaagggcaagcaaggtataaacacaaccaaaatagttttatatgtgtttagtaagttatgcataatattttactgtgaaaaaagtcaatctttwtttactaacttctcaggtctgtagaacatttcatctttggtttgagacacatatgtatcaaagtgcatagaaaatgctttaaaatattt

SEQ ID NO: 421128 - DNA, 585 bp, Homo sapiens
gaaacagaaggaagatgtgttcaaatacctgcttgasaatgcctttagcatagatgtaaattccagatggttacaagagcatttaatttctctacagttttgctctattaaaatcttgatcatgcagcacacaaaaggtggcctatatgaaaaatgtagaatgtggatatcatttccataacacacattagatttggcagtgtgttttctgagttagtaaagatatttctgattcaattacaattacttttaaatgaaattactaattatctgtccgatttcagaataatggattacctaatttgtaattaaggatgaatttactaattgctacaaaaaaataattagtccaatattttcaaaggtcatgttgctgaatgacaacatattctaggaaatttgtattttgtggttatttttaatgccctgatttgatttgacaatcacattaacatcatgaattgtaaatagatggaaaaattagggcacagattctgatgcctatccacactgctcaattttctgtgtgaatatcagagaatttaggaggataagacaaaattgtaggaaagacaacttataaga

SEQ ID NO: 421129 - DNA, 585 bp, Homo sapiens
gaaacagaaggaagatgtgttcaaatacctgcttgagaatgcctttagcatagatgtaaattccagatggttacaagagcatttaatttctctacagttttgctctattaaaatcttgatcatgcagcacacaaaaggtggcctatatgaaaaatgtagaatgtggatatcatttccataacacacattagatttggcagtgtgttttctgagttagtaaagatatttctgattcaattacaattacttttaaatgaaattactaattatctgtccgatttcagaataatggattacctaatttgtaattaaggatgaatttactaattgctacaaaaaaataattagtccaatattttcaaaggtcatgttgctgaatgacaacatattctaggaaatttgtattttgtggktatttttaatgccctgatttgatttgacaatcacattaacatcatgaattgtaaatagatggaaaaattagggcacagattctgatgcctatccacactgctcaattttctgtgtgaatatcagagaatttaggaggataagacaaaattgtaggaaagacaacttataaga

SEQ ID NO: 421130 - DNA, 593 bp, Homo sapiens
tcactgcagcctctaactcctaggcttaagtgaccctcccacctcaacttcctcagtagctgggactacaggtgcacaccacaatgtctggataattttaaatttttttgtagagacagaatcttgctatgttgcccaggatggtcttcaactgatccccctttctcggcctcccaaaatgctgggattgcaggaataaaccacygcacccagcctattatccagtgtttaaaaataagaccgattttttgcctttggctggttgactcatctgatatcaaaagaacccagcacaacctggcagaggtggaacgttagcaaactatgtacacacatgttttgatttttacatattcaatggaatcctcatgaacttttgactgaacacaaaggtctaccttgctgagctaggttacaggtctgttgatctccgcctctttttccatgccaccctcctttagcagaatgttgtgtattctgtgagctctgagcaaatattaattctagataattatataggccagcacattcaaaccagtcactagctaccttcctctacgtcttctttgctaatcaagggccttcctatcatg

SEQ ID NO: 421131 - DNA, 593 bp, Homo sapiens
tcactgcagcctctaactcctaggcttaagtgaccctcccacctcaacttcctcagtagctgggactacaggtgcacaccacaatgtctggataattttaaatttttttgtagagacagaatcttgctatgttgcccaggatggtcttcaactgatccccctttctcggcctcccaaaatgctgggattgcaggaataaaccactgcacccagcctattatccagtgtttaaaaataagaccgattttttgcctttggctggttgactcatctgatatcaaaagaacccagcacaacctggcagaggtggaacgttagcaaactatgtacacacatgttttgatttttacatattcaatggaatcctcatgaacttttgactgaacacaaaggtctaccttgctgagctaggttacaggtctgttgatctcygcctctttttccatgccaccctcctttagcagaatgttgtgtattctgtgagctctgagcaaatattaattctagataattatataggccagcacattcaaaccagtcactagctaccttcctctacgtcttctttgctaatcaagggccttcctatcatg

SEQ ID NO: 421132 - DNA, 571 bp, Homo sapiens
actggttattatgaggataaatagtgttttgttaaaatagctattgctacagaggatcaaaaaagggaaagaatcagtatgtgtaattttgtcmcatagctgaattctgtgcaccatataatgctctcaaatttaaaatgtctatgttctaattcagaaatgatggagacagaaacatcagaagaaacccccaactaacccaaaaccaaaaaataaaaaaaaaaatccccaccaaatccaagaaacttttcataaaacctgaaactcaatattttctactttctgtttaaaagtacaacctattttttgaagtttctaaaatttcagaagcacaaaaatttttgcctaccaaaaggaataaaatattgatattggcattgagtcagtcctcactccttgttttaagtggctttaatatgttcctttctgtgccttctttctttttcctagacgctttcttgacataacatgttgagaatgtgaccaggggacaatgtatgtaacttctacacacaaagactcaaaccatgttaggttgatgtcagcttccacaaaatgaccaactattatt

SEQ ID NO: 421133 - DNA, 605 bp, Homo sapiens
aatattctttcatttaacaaatattaagtgagtacttcttatatgttaggcactctgccaattgctgcaaagacgagcgtggatagtaactgctgtgggcattacaaagaagctatactggtattggacggaaagtgatcatgacagaggtggggtgagattgggttaataaattcaggcagaagtaggagagaagggaacagcatgaatcctggtgcagggtgcagagagcagtgaaagctggccatgcaaggtcaacaaatccagagtcatcttgcttggctaaagtagaaagctgtagttttcaaccctcacatctgttcatttactatttttttctttcattccattcatttcattcattcatatattcaaaaactatttgctgagtacttaagttagtggayatgaggatacagagatgggcaagacttatccctgccttttaaatgacaataatgtcatttatggagttccttttatatagcagacactgctataggcttttatacatttattactgatttgcacaaattacaatgaggtataggtcttactatccccatttgataattaacaaaattgacacttaagagtaccttagg

SEQ ID NO: 421134 - DNA, 617 bp, Homo sapiens
gaataaatattcatttgtacaaataaacatcattaagtacataaatgtatgtctattcatttgtttatgtacttaatacataaaattttatttatgtatttaatatatttgatgtttccattgtgtttgcaaattattggagaaatggagatgttgacctgaaggagaaacatgccaattataataaaggccagagtctatccctagtggctaagaaagtttgatatctgctgttctgtgctgttttgaactgtccgtactccaatatcaatgtttgtgatattattttttgttgyctttgtattttaaggatatcctacatggaaaggcagctttgatttaggaatacagagagactgaattctattatctaatgcagttatatttatcatttccatccaacttgtctgttccacctgaaaaatcctagataagactttcatagttggcaggttaaataaagcatttatgaagaactctagatctttgcaaatctggcccttttaaatacttctaccctgagagtctatactgatcgccttataaatatcaaagtgttccaagaaaacagtgaatgttggtacctaaaagtaatcaaaagccacatcttgcacata

SEQ ID NO: 421135 - DNA, 607 bp, Homo sapiens
tgcatcctttccaggcacatgttgcatgctgttggtgtatctactattctggagtctggaggatagtggacctcttctcacagcttcactagacagtgccccaggagggactctgtgtggggctttgaccccacaatttcctttcttcacgccctagcagaggttctccatgaggctccatccctgcatcaaacttctgtctgggcaaccaaatgtttccatacatcctctgaaatctaggtggaggttcccaaacctcagtttttgacttatgtgtacccgcaggctcaacacaatgtgtaagctgccaaggcttggggcttgtattctctgaagcaatgggctgagctgaatgttggccccttttagccatggctggagctgaagcagatggtacacagggcaccaagtcctgaggctgcagggggaccctgggcctggtccatgaaaggatttttccctcttagggaaaaatgrcctggagacattttccccaatgccttggtggttaacatttgggtcctcattacttatgtaaatttctgtagccagcttgaatttctactcagtaaatgaggttttcttttctatcacatagtcaggctgc

SEQ ID NO: 421136 - DNA, 547 bp, Homo sapiens
tgcaacatgactacagagtaaagcacagaactacaaccctcagcattgaaaataattctcacttattaccctcagacttcccagtctggccacactggtctaaatgcattcctaatctttgagctgccgaactagaacaaggatcagctacataggagtctctggacatcatgataataggccttaggccagttagatgatatcttttagagagtaaccataacttgagataccaaggcttaagatacccagtctatttgatgaaatagaggatatagaacatatgcaaaagttacaccaacaagaccaaaaaagataagtattytaagacaggtaacaacaaggtatagtaagacctgggtaaaaataaaactagcacttcatggtgataagctgaagggggtggtaaataaacacttaagggagaaagtggcactttagttggctttactgtaaacatgaataggagagagtattctaaataaagctaatgacatgaactaaccaagaaaaataggcactacctgtaaatgcgaataggaaagcc

SEQ ID NO: 421137 - DNA, 417 bp, Homo sapiens
ctatgtgttgagtaaataaaacgatcaactaccctggttaatttaatttgctcaccaatacctaataccttcctaccatcctccaaaaatactgaatagaaaaaaacaatttcataaacaaacaatkattttttagaccaagtatatggaataatacaaaggaaaaaggcttctgacaactgggaacataaattttaccttgactttgagggataccaacctgggcacaacacaaattgacatctcataaaaacaggcatatttttgaacggttgagattcagctgaattgtatctcatcaaaacgtaaattcaaaacagctgcccagagttttgctgtggatgtcttctacacactgatcatatttgattacctgggctttcaattatttgcagagcccaaggagcagccccaggg

SEQ ID NO: 421138 - DNA, 436 bp, Homo sapiens
tgtttggagagcattcaggttggtgaacacatagagtactgggagggtggtgcacccagggakggcatggaaattgtgcagcccctcacacccatagctcaccccatgcatccctttcatttggctactgctgagttgtatccgtttatcataaaccagtacttgtaagtaaagtgttacactaagttatgtgagccctctagcaaatatggaaactgaagaggggtttgtggaaacttctgatttatatctggctggtcagcaatacaggtggcctgggacttgtgactagtgtccaaagtggggacaggcttgtggaatggagctgtttaatttgtggaattggttacttcagggagacagtctcagaattgaattgaatattgaacacctagttggtgtttgagaattggagagttgagtggtatcagcgaaa

SEQ ID NO: 421139 - DNA, 556 bp, Homo sapiens
tctgatgttttctcataattagattgaggttatgggtttggagaatgaagcasagaggcaaagtgctattttcaccatattatgcccagagtatataatattgacatgacttattactgttgatgctaaccttgatcacccaggtaaaatagaatttgttaggtttctctatcatcaagttattcttccccaccccttttcatattatactcattggagggaaattatttacacagcccacactagggaatcggaggtttatctccccctcctttagggtctaacatttgcataaattatgtgaagttctacatctgagaggcgtatttcttcttccttatgaatcgcttatttatagtgttatagggttatggatatttattttatactctggatcattatccaacacgactttatatttgttttgttgctcagattgttctcactttggccattgagagacctgtgagttggctcttgtgtcctttgacatatctcgccagtgcagagtgcaggtggtgtgtgcatgtgtgtgtgtgtgtgtgtgtgtgtgtct

SEQ ID NO: 421140 - DNA, 574 bp, Homo sapiens
gatgaacttagcattttgaaattttctgtaactgkattacatattacggtaagtgaagtagctctgtttgcaagttagccaaaggcttttgacagatagatgttatgttcctgagtggtagtccttcatgatgaataaattggtcatactaacctcttctagggctgaaaataccattatctattcccagaaatgtgacagtttctactgactgtaattgcaatgcctgctgcatgacagacaatctttggcatacacaataactgttcatttcaatggactttttagcactgtataatctttctgaagacattttaaatgacaattggggatcaaaatttaagtcaaactttaattttatatcacgttaacaaagtaatccaaatcaggtaacagtagtatgaacataggtatgaacacagatatgagcacatgtatgtccacaggcaaagagaagttatgttgccacacattcttctgcttaatggctgcatttttcttttttacaaaaattataaaacatattccaatatcaaataccttaaaatgtaaaaaatatgtgtttttaaatcaa

SEQ ID NO: 421141 - DNA, 519 bp, Homo sapiens
tttgccacatagtcagcctccaaatttttcaaacttttacactctgcttcccttttaaatgtaagttccagccttaagtcattttttttgctcccacatctattrtaggaagcagccaggccacatcttgaacactttgctgctcagaaatttctttggccacataccctaaattattactcttaatttcacacttccatagatccctagggcatgcacagaaagcaaccaagttctttgctaaggcatagcgtgcgtgatctttgcttcagttcttaataagttcctcatttccttctgaaacatcaacagcctagacttcactgtccatattactatcagaattttgatcaaaaccatttaaccagtctctaagaaatttcaaactttcctgcatcatcctgtcttcttctgagccctccaaacttttctaacctctgcccgttacccagttccaaagtcacttccacattttcaggtatctttatagccatgcaagaatggcctaatacacttgat

SEQ ID NO: 421142 - DNA, 609 bp, Homo sapiens
atataaaattgccagaggaatgcaaggcacacagtaaatacccaataaataccaatattcatgtctttcttcttgccttagaaatcctaggaggaaaaagaaatacatgtcatctaaatattatctttgtaagacttgaaatggttttgattacaaataacatcatttttactgcagctaatcaatcrcatcttgagttcccataccagctttgtaggcagctctgatgggaccgtgggatctgtttcagaacacagaagctttctcttttctttttttttttttttcccagagttggagtcaatagtggttagtacttgaaagtctctgtggtgccacatgcctgctaagtgacaccaaatatactagcgacaggcttggcaaagcaactttgatttggagtgcctctgatgtttattcttggctctggatttggataatctgtggcaaaggtttctgtttcctcatgacccttttcccttcaatttacttcactttgggagggagatgtaacacaaatgaacctctgccagaggttttttgattttcagcagtaaaatggaaagaacaccacctatttttcagctttgctgtgagaagctaatgaga

SEQ ID NO: 421143 - DNA, 633 bp, Homo sapiens
ggtggtaactagtccttagtttctgttttcaaaggttttgagtcataagagggctgcaagccagctttttctttgcctttggaaaagttcagcaaatgatcatttcaaataaaatattatgtaaattattttcttgagaatgcattttcttccatgtaaatgaagaggtccaaagacagtttttctatttgaatataagtgcttatagatgaattgacggcaaactcattttcagaaagttcatgaaagattcttataagggccagagtccgtaaatagaattcaatgggaaggagagagtcaagcagtgagaggcattaagtccagagaagacatatcagggatttgtttgctatcattaaataaatgggcaggtattcttaggagaagccaaatttggaacgcagttctctaaagtasgtacatgtagagagaaatggaacaacaaaacctgacagggtcccagggaatgagacaagatgaaaagatgctctgagtaatatgatcatatcctaacctaacaggaaagatcaaagaccatgtactcctgaaattcagctgtgacctactaggaaatagcacattttaagatgtttggctaaaccccagctatggtatttcagaactatatga

SEQ ID NO: 421144 - DNA, 550 bp, Homo sapiens
gctgtcaatttcaggaaggatatcagtcaggctaggtgttcaaatgggataaaggtcaagacatgtaaactgtaaagtgctagacaaatctaagctgattttactatcgtgagaatgaagcccaggaaaagtatctgagaaaccaaaatgcctggaattactaatggccattaycacaacatgctatttgctgtttccaatatggcatatttcctggtacattaaagctatttgatgagcaatttctatcttttaaagaactcctagtgttttttcttaatttggagacatgaatatgcccaggatgagtcaaagaataactgtaaggtgaaatttcttaggattgaaaaaattaatatattctctctcaatcactctatcacgctaagactactttggtgtaataaaaaatacatattttggtctttgtccctggttcctggcagagagttcctaaaacttacacttttctgagtggtaagagagtctttggttattcgtaatgagcccctttggaacaagcctatgtctatactaatatggtgactga

SEQ ID NO: 421145 - DNA, 550 bp, Homo sapiens
gctgtcaatttcaggaaggatatcagtcaggctaggtgttcaaatgggataaaggtcaagacatgtaaactgtaaagtgctagacaaatctaagctgattttactatcgtgagaatgaagcccaggaaaagtatctgagaaaccaaaatgcctggaattactaatggccattatcacaacatgctatttgctgtttccaatatggcatatttcctggtacattaaagctatttratgagcaatttctatcttttaaagaactcctagtgttttttcttaatttggagacatgaatatgcccaggatgagtcaaagaataactgtaaggtgaaatttcttaggattgaaaaaattaatatattctctctcaatcactctatcacgctaagactactttggtgtaataaaaaatacatattttggtctttgtccctggttcctggcagagagttcctaaaacttacacttttctgagtggtaagagagtctttggttattcgtaatgagcccctttggaacaagcctatgtctatactaatatggtgactga

SEQ ID NO: 421146 - DNA, 550 bp, Homo sapiens
gctgtcaatttcaggaaggatatcagtcaggctaggtgttcaaatgggataaaggtcaagacatgtaaactgtaaagtgctagacaaatctaagctgattttactatcgtgagaatgaagcccaggaaaagtatctgagaaaccaaaatgcctggaattactaatggccattatcacaacatgctatttgctgtttccaatatggcatatttcctggtacattaaagctatttgatgagcaatttctatcttttaaagaactcctagtgttttttcttaatttggagacatgaatatgcccaggatgagtcaaagaataactgyaaggtgaaatttcttaggattgaaaaaattaatatattctctctcaatcactctatcacgctaagactactttggtgtaataaaaaatacatattttggtctttgtccctggttcctggcagagagttcctaaaacttacacttttctgagtggtaagagagtctttggttattcgtaatgagcccctttggaacaagcctatgtctatactaatatggtgactga

SEQ ID NO: 421147 - DNA, 567 bp, Homo sapiens
gattgtggtataaggtgaattcattcaactggcttcatttctggaagattttaaggggccagtgctctgctctcaactcctggactacaagctgtaactctggggacttgtattgggccccaactttgttctctggctccttgaggttaggaatcttctactgcactgtagggttcaaggtgctcctggaccactggtcactacacttctatgggtggtgacagccaaagtgcttcacagtgcagtgacagtggaatttgtcctcatagtggcagttgtggcagaatgttagtgggtgctgggtagcctrcctctctttggacgttcaccacagtggcagagacaacacagctgggggtgcagtaggcacctgctgggaactgtgtgcctggtcatgctggaagtagtgtttgttcttgggcgaagtactggtgggaccaggtctaggtgccttctctgtgccctgcaagcaggagtgatttttcaggatggaggataatctgctgttctctttgcagtgttagtgcaagggcagggtgctagtggaggcagcactggctggctctg

SEQ ID NO: 421148 - DNA, 586 bp, Homo sapiens
tatctttataaagtaacaagggtaaataatatataataggtaaatggaatgcattattattatgtaaatacatttacccaataaaatattatttactatatactggttttagatatcccagcaatcttattaaaaatttgaacccagctcattaactatggaaaatactctatgctttttataatacaatcraaacctgctaagtgtctgtgtttctgcaatcctgcaggggttgttgaaagacattatttatatatttcctttgtttcatccatgccagtggctattccttctactcacacctgcttgtgtccacactgagtctcctgtgatttcaaactcccttgttcctaaccaataaactcattgaaaacagattccctctaataattcttctgtctcattttggggtacctccaagtcacctcctgggtaactccaagtaccgtaatttctttatggtcatggcctgagctgcctgtgaaggcttgtattaagtctcagccaatgagttacctttccttttcttctatgacgcagaaactctatctaaaatttagatttgttaaagagccatacttcctga

SEQ ID NO: 421149 - DNA, 524 bp, Homo sapiens
ggcagttacctccatgctgctgttctcatgacagtgagtgagttctcatgagatctgatggttttatagggtgcctttccccctttttcttggcactcctccttgctgccaccatgtgaagaaggacgtgcttgcttcaccttytaccatgattataagtttcctgaggcctccccagccatgctgaactgtgagtcaactaaatttctttcctttatatattacccagtctcagatgtgtctttattagcagtgtaagaacagactaatacgtgggtcaatgtctttcagaatatgtggataatgcagagatttgcattaagcatttgatatttactcaacttgcttttttgagccatatgtattaaggacaactttagatcagcccatagagggcaggtagttgacgtgggccattgttcagagtggtatgagtttggagtccatgtaaaaagtgattatgacagaggataaaggagaaataaaggcattttggttgagtgcctactgacttcaaagtggat

SEQ ID NO: 421150 - DNA, 524 bp, Homo sapiens
ggcagttacctccatgctgctgttctcatgacagtgagtgagttctcatgagatctgatggttttatagggtgcctttccccctttttcttggcactcctccttgctgccaccatgtgaagaaggacgtgcttgcttcaccttctaccatgattataagtttcctgaggcctccccagccatgctgaactgtgagtcaactaaatttctttcctttatayattacccagtctcagatgtgtctttattagcagtgtaagaacagactaatacgtgggtcaatgtctttcagaatatgtggataatgcagagatttgcattaagcatttgatatttactcaacttgcttttttgagccatatgtattaaggacaactttagatcagcccatagagggcaggtagttgacgtgggccattgttcagagtggtatgagtttggagtccatgtaaaaagtgattatgacagaggataaaggagaaataaaggcattttggttgagtgcctactgacttcaaagtggat

SEQ ID NO: 421151 - DNA, 536 bp, Homo sapiens
tagcaaactattattcaaccttcatcatcgtggcatctttatgtttcctgatctgccctccaaatgctcagcaaatgagtaaccaatgcgttcatgctttaatgatttttaaaactctttaaagattttgcaagtggtaactttttaaactaacaactaatattacaatcgtaagtattttccccctctgaaaactgagctgaaatagataggaaggtaaatgggaaagttgctaaatcattcaggttttattaagcagtcagcatcctaatcccgaggattattcatgtatttagcaacatcctctgtgcgtgagactgtgtatgaacatttrgataaatgtagaaggaagtgaatacatgtgcatcaacaaggtaggccttgacttcttataagttctgcagtgtttaaataatcctttatgtaagaagacaggaatgtaagaatgaaaaattgctttaacctctaaaataagcacttactagaaagaatgtgcttcttcctctccaaattttaaaacttggccatggcaccat

SEQ ID NO: 421152 - DNA, 514 bp, Homo sapiens
cctcaggacctgatatcacctctggctcctaataggaacttagaagaagttgggtctaattcatggttctcagactctagagtacatcaaaatcatctggaaggcttattaagcataaaaatggctggaccctactctcaaagatctggattmactaagtcttagtcccagactgagactatgcatttctgacaagtttgcaggtggtactggtgctgctggtccagagagcacaccctgagaatcttttttgtagggatttcctacaaaggttcttctcacattacatcccagggtactttcttggtctcaggatggctagctgtacatctttctttctcctcacagggcccattgttttctcttttttactctcacctttttacaatcaataaaaacatctcaaacaagttcacagtttttcagctgagtaggtcttgcacaataagtgggaaatgggccaatgacagtcaaggacatagtctggactcatcacaatactcatagtttacat

SEQ ID NO: 421153 - DNA, 488 bp, Homo sapiens
tcaatcaatcaatcaatcaattgaagtggaggggagggatggagaagcaggactgtctgcgaggaagtcagagcaagctcctgagcagggaaggaatgaagcagaaggcaacatggctcaggggtgccatgcccagcccagcactgcccactccctgctgtccctgctgctcatccccctccccctcattcataccctggcttaatggacttaaccgcagtccccctatctgcaaagcccagatggagcacagaagcagagggctgtttgccatccatcccttaggcagaggcaggtgacaggacagggagaggggcagggaggccaactggggagasgcaacagccgtgggcaggcctgtctgaaagaaggtcagaatggaatctactccaagcgtggcaaaggcttactcatgacccagaggaaactgcacctggggcttggtttttccaaaggaagaactttttgtcaagtaaaaggattttaaa

SEQ ID NO: 421154 - DNA, 585 bp, Homo sapiens
tttgttacctttggatagatttccaacacttacttgtcccttcctggaagggtctgagatgtagatcatccgtctcctsagaacacactcatttggtaaaccattaggaaattcattcttaggaaacagtggttggtaaaaggcagacgtaagagacaagagccaggcactgttctgggtgcactacaaatacttatttcatcctcatagcaaccctatgaagtagatatgaaggaggaagctgaggcacagagaggttcagtaatgttcccaaggtcacagagtaagtgacagagttgggattcaaacagaagcatctgggctcccaagtctgtgatcttcatactgtactctgccatctcagtctgatgccacagggtcaggttgaactctgactcttctctccctccaacatcattagagccagatcttggctctttttttatcactgctctacattcattgcctaattcacagacacttcttgcattactcttacagaaacctcctgactgatcactctagttccttaccctctggtcctcctcacgctggtataagacttgctgtcctcaggcccatctg

SEQ ID NO: 421155 - DNA, 585 bp, Homo sapiens
tttgttacctttggatagatttccaacacttacttgtcccttcctggaagggtctgagatgtagatcatccgtctcctgagaacacactcatttggtaaaccattaggaaattcattcttaggaaacagtggttggtaaaaggcagacgtaagagacaagagccaggcactgttctgggtgcactacaaatacttatttcatcctcatagcaaccctatgaagtagatatgaaggaggaagctgaggcacagagaggttcagtaatgttcccaaggtcacagagtaagtgacagagttgggattcaaacagaagcatctgggctcccaagtctgtgatcttcatactgtactctgccatctcagtctgatgccacagggtcaggttgaactctgactcttctctccctccaacatcattagagccagatcttggctctttttttatcrctgctctacattcattgcctaattcacagacacttcttgcattactcttacagaaacctcctgactgatcactctagttccttaccctctggtcctcctcacgctggtataagacttgctgtcctcaggcccatctg

SEQ ID NO: 421156 - DNA, 622 bp, Homo sapiens
tttttacttatgtattgggttttaatttattccttgccaacttkaaaacaatttgcagtaccttgtttcacacagacgctccagaatgattcccaagtctcccaacataaacatgagtggtttaccattaaaataaaaaaaattcatcatttacattctgctctgcattaaaatgggatcacattaatttcttttccacattattcactaagaaaactagagttcttggtttccttccttccctcccttcctcccttccttttttcttcccttctcccactcttcctttcttccttcctttcttgtagctgaaaatatttctgtgagaaagattaggaaacaggacagatcatgtccggattttgtagcttacatatggtctcatgctgttgccccagaactctgtgagggtccaagatgactgtggcttacgtctgatgagcttatgccacataaggatgaggtcagatgctacaagaggggcacagacattgaaaagaagaaacatggggcaactcaatggatgagcaaagttgaatgcgttgtgcagtcagcaagtgtcttttttataagaaagctctgtgcttggtttcacctcctggtgctggacataccatcatcc

SEQ ID NO: 421157 - DNA, 637 bp, Homo sapiens
atgttagaatcatgatcgatttatatttttaaaaaacctgttattgagactgtttttgaactcatagaaaaacgtggggagatttgacaactttacattattaaatctttcaatcaatgaccatattattccatttatttagttttactctaagttctctcaataatgttttatagctttctgtggataagaagtcttgttcactttttcatgagatttattcctgggtattatatgttttatgctattgtgaataataactttttaaaatttcattttccagttgtttgtcactggtatataggaataaaattgacttttgtattttgaattaattttcagagactttgctaaattcacttattgcttctattactttgtatatagattattttggaatttacrtacacaataagttatgccaataattcccttctaatctttatagcttctctttttccttcttgccttattgcactggctattacctctacgatgttaaatagaagtggcaataatggacattcttgacttgttcccaatctcatggggaaagcttttaatatccatcattaagtaagattattgctatggcttttttgtaaatatttttatcacattaagaaagtttccttct

SEQ ID NO: 421158 - DNA, 605 bp, Homo sapiens
gaggggggtatcagacctgaaaggtggcttgcaccccagtgttcagaattgtggatgtttagccaagacttcggactataacctgtaagcgagagaggagcctttgtttagagaggacctactgtgtgccacaccctgtgctggggtgtggtagaggttgggggtgggataattaggatgtggtgccatcgttgctaacaatgtgtgaaagaaagtgataatgaagaggtgatgatcagtcccctggcagagcataggtaaatgggatgggttggcaaggacaggagaccattaggaggttactgcagtaattaaccagaaaatccttcacttaatcttctgtgtgtgtccttccttagggtgaggtagaggggagtcaggtgggtactagcaggcatgaaaatcawggcttctactttagacagctgctcttatagaatctctccccaaagcaatgcacatgcttacaattttgcatatactttccatacagttttttcaggggttcaaagatcctctggaaccaatcatggtctatgaggtcctagctgagaacagtgacccccctcccacacctccaaccccacctaaagagcaagcatctc

SEQ ID NO: 421159 - DNA, 372 bp, Homo sapiens
tggtgccatcgttgctaacaatgtgtgaaagaaagtgataatgaagaggtgatgatcagtcccctggcagagcataggtaaatgggatgggttggcaaggacaggagaccattaggaggttactgcagtaattaaccagaaaatccttcacttaatcttctgtgtgtgtccttccttagggtgaggtagaggggagtcaggtgggtactagcaggcatgaaaatcaaggcttctactttagacagctgctcttatagaatctctccccaaarcaatgcacatgcttacaattttgcatatactttccatacagttttttcaggggttcaaagatcctctggaaccaatcatggtctatgaggtcctagctga

SEQ ID NO: 421160 - DNA, 333 bp, Homo sapiens
cttgcttgtgttttcctgtcaaactcctactcacaacccccaccccacctttcctttacagccacatctctgggrtgtaaacttgaaggcctgacccagcacagggaccctctggttcccaaatccaaggccttcttataaggccttgtccacagctgtccctcttctccctcttctcagtctcttctgatgaagggcatccctgcccctcactcccaccaaaaaccgtcagtgtgggagcaatagctcacacctgtaatcccagcactttgaggggcctaggcaagcggatcacttgccaggaattcgagaccagcctggacagcatagcaa

SEQ ID NO: 421161 - DNA, 333 bp, Homo sapiens
cttgcttgtgttttcctgtcaaactcctactcacaacccccaccccacctttcctttacagccacatctctgggatgtaaacttgaaggcctgacccagcacagggaccctctggttcccaaatccaaggccttcttataaggccttgtccacagctgtccctcttctccctcttctcagtctcttctgatgaagggcatccctgcccctcactcccaccaaaaaccgtcagtstgggagcaatagctcacacctgtaatcccagcactttgaggggcctaggcaagcggatcacttgccaggaattcgagaccagcctggacagcatagcaa

SEQ ID NO: 421162 - DNA, 333 bp, Homo sapiens
cttgcttgtgttttcctgtcaaactcctactcacaacccccaccccacctttcctttacagccacatctctgggatgtaaacttgaaggcctgacccagcacagggaccctctggttcccaaatccaaggccttcttataaggccttgtccacagctgtccctcttctccctcttctcagtctcttctgatgaagggcatccctgcccctcactcccaccaaaaaccgtcagtgtgggagcratagctcacacctgtaatcccagcactttgaggggcctaggcaagcggatcacttgccaggaattcgagaccagcctggacagcatagcaa

SEQ ID NO: 421163 - DNA, 606 bp, Homo sapiens
taatacctctcacatctaaagtagttctttttaaaacacaatccagttttattcttgtctttttatatctcttatatgaaaatcaattcatcattagttttccattggatttgggcagacgggtaagttgtaaagtgctagagtaatggtattgacaagktatatgatgaagttgaacaatatgagagaaaatgggatcatggtaaccttgttatccctaggtcagtttaactattgaagaggaaataaactgagcactaaaactagctttcctttagtttttattaaaatcagaaccagggctttgtagtgtaactttgtgcaatgcgaattgagagcttgagaaatccaatgaccacacaagtttgggaatgggttgtagtcttgttaagagcctaaccgacctcttacccaaattctggtaataatcaaagctgcacatgggtgtgcagcaccatgtggagctgatatctctgattcaggtcgagatgtctgctcagagcagagaacgttgtttccaagggccacagatggtgggcctgccaagggtctcttttaggtgtgcagctctactgcaaagttcccgtccctggttttaaaaactta

SEQ ID NO: 421164 - DNA, 606 bp, Homo sapiens
taatacctctcacatctaaagtagttctttttaaaacacaatccagttttattcttgtctttttatatctcttatatgaaaatcaattcatcattagttttccattggatttgggcagacgggtaagttgtaaagtgctagagtaatggtattgacaagttatatgatgaagttgamcaatatgagagaaaatgggatcatggtaaccttgttatccctaggtcagtttaactattgaagaggaaataaactgagcactaaaactagctttcctttagtttttattaaaatcagaaccagggctttgtagtgtaactttgtgcaatgcgaattgagagcttgagaaatccaatgaccacacaagtttgggaatgggttgtagtcttgttaagagcctaaccgacctcttacccaaattctggtaataatcaaagctgcacatgggtgtgcagcaccatgtggagctgatatctctgattcaggtcgagatgtctgctcagagcagagaacgttgtttccaagggccacagatggtgggcctgccaagggtctcttttaggtgtgcagctctactgcaaagttcccgtccctggttttaaaaactta

SEQ ID NO: 421165 - DNA, 645 bp, Homo sapiens
ctcactacctcttctcttctgcttaaaaacttttcaaatacagaagagcattggcttacttatttacagggcttagccatcagagttaagattgaaatctgaaaaaatgaactaatgggggtgggagatgtccattctttttgttatactctaaaaaacaaagcraagttgtttactgctcctgctaagcttctttaaatacaagctcctagatttttaaaattagataaacattgctagaatttatcatctgtagtgctacagttccttccctggggcttcaaactcaagtgttagtggagtattacacatttggaagttgtccaggaatatagcctctctcccacatttaacaatgtttatgtgtaaaagtcagcttggaaggacacctttaaataatgctctttctggatatataattgcagtgttacttgtcagtgcataataaaccatcaaccagcctttattgtaccagtgggaatgagagtttgagggtgccctgaaattatgttctttgtgtctgagatgagaattaggttagtagctaggctttatttatagatatccaaataaatcaggagtcagaagttcagaaagactgggctgggaaggctgagtccaaagaaggctgaagtctatgaacac

SEQ ID NO: 421166 - DNA, 514 bp, Homo sapiens
ataaacattactaaagtgttgttcacccatagctctttagcatttttcttatttcactattttctacaagagtatttttataatacatttttgcaaggcaaaccccctaaggccttatatgcctgagaattttttattatgctctcacatttaaatgactgatggctgacataagacctgcattcagaaacactttgttttccattgtccagtgtgtccttctatccagctgcttagaagcctaatctcagtctgaatttggttgcttcctaggtgatcaaatctctctctctgttttgcttttccatttttttgttgttgttttgtttggtttgttttttgctgtctctttgatgttctttattttcacarttaatgtgacttgatgtcgtttttttctttttaaaacctggttttcggctgggcgcagtggctaatgcctgtaatcccagtgctttgggaggctgaggtgggcggatcacccaaggtcaggagtttgagaccagccagacca

SEQ ID NO: 421167 - DNA, 514 bp, Homo sapiens
ataaacattactaaagtgttgttcacccatagctctttagcatttttcttatttcactattttctacaagagtatttttataatacatttttgcaaggcaaaccccctaaggccttatatgcctgagaattttttattatgctctcacatttaaatgactgatggctgacataagacctgcattcagaaacactttgttttccattgtccagtgtgtccttctatccagctgcttagaagcctaatctcagtctgaatttggttgcttcctaggtgatcaaatctctctctctgttttgcttttccatttttttgttgttgttttgtttggtttgttttttgctgtctctttgatgttctttattttcacaattaatgtgacttgatgtcgtttttttctttttaaaacctggttttcrgctgggcgcagtggctaatgcctgtaatcccagtgctttgggaggctgaggtgggcggatcacccaaggtcaggagtttgagaccagccagacca

SEQ ID NO: 421168 - DNA, 494 bp, Homo sapiens
taatgttctattctattttatttaagccagtatatccaaagtagtagcattttaacatgcaattcatataaaaatttattattgagacattttgcattctctttttcataatatgatccattgtatttttttacacttaacagcacgtctcaattcagactagccacatttcaatcacacagtagctacatgtagctggtggcaaccatatcayacagcacagttttgtagcaaatcaaaaataaaaattctggttcaagatccagtctaagattatatactgcatttacttgtcaggtctctttagtcttgttcaatctggaatggttcttagtccttcttgactttcatgacactgatgcctttgaagagtacaaggcagttactatgtagactctccttctgtctggggctgtctgatgctttctcataattagattcaggttgtgcatctttggcagggataccacagccattatggatatttgtttaac

SEQ ID NO: 421169 - DNA, 494 bp, Homo sapiens
taatgttctattctattttatttaagccagtatatccaaagtagtagcattttaacatgcaattcatataaaaatttattattgagacattttgcattctctttttcataatatgatccattgtatttttttacacttaacagcacgtctcaattcagactagccacatttcaatcacacagtagctacatgtagctggtggcaaccatatcacacagcacagttttgtagcaaatcaaaaataaaaattctggttcaagatccagtctaagattatatactgcatttacttgtcaggtctctttagtcttgttcaatctggaatggttcttagtccttcttgactttcatgacactgatgcctttgaagagtacaaggcagttactatgtagactctccttctgtctggggctgtctgatgctttctcataattakattcaggttgtgcatctttggcagggataccacagccattatggatatttgtttaac

SEQ ID NO: 421170 - DNA, 527 bp, Homo sapiens
gtcccttttccaaagttcccatgggttaccttgagcaatacatcaacctccctcatccttttatctttactgagcatttggtctacactagctcagtgctacatccctggagacacagagtaaaaaagacatggcgtctgctctctaggagcacacagtctagtacctgggggaaaaaatatagcaacagatattttttataacatrtaaagtgtgttatggaggtatgaacaatgtgttctggggttgcagaggagagaacatctgcgtctatctgggtgaattcgaagaggcttcaaggaggaggtagtatctgtgttgtaagttgaatgaagaataggagtttatccagtggacaagggaatcaacagcatcccatgtagcagaaatgtgtgatgggccagtcttggccctggaaaccagaactgattctgtatttcataagttgcattctgggaggaagggtgtgataaaaggcttggtgaggaagataagcagggggaagatgatcaaaggccttcaatgcc

SEQ ID NO: 421171 - DNA, 593 bp, Homo sapiens
ctcagcatccccaggcagagatgaagtttctcccactcaaactgaagatcatgcatacttaaatttgtaagggtcatttttctataacagacgtagttaacagacttggttcaaatttccctgtttattatgtgtaattttgggcaarttactcaagctctccttgtctacatgtccttacctgtaaaacagcagtaatatttaatagtatttacctcctgttgtcatcatgacaattaatgaattggtaataggaagtatataaaaacatttgctaaatcaataaaatatattaaaaataaatcagtctcctctgtgaaataaggatcataattatcatctcgtggatttgtcatgaggattcaaggagataatgcaatgaagcacattgcagcagctcaataaaagttaatcctttccccattgtgtgacctcgtcgtggaacagctcagagccagatgaatgggtcctgagctgaacaacacgtggatagcaggaggaataatgggaaggatgcctctggggaggtagagatgtgtcagccaagagaacgtagctgggaatgtggatgagggcaggaagctctgggggac

SEQ ID NO: 421172 - DNA, 593 bp, Homo sapiens
ctcagcatccccaggcagagatgaagtttctcccactcaaactgaagatcatgcatacttaaatttgtaagggtcatttttctataacagacgtagttaacagacttggttcaaatttccctgtttattatgtgtaattttgggcaagttactcaagctctccttgtctacatgtccttacctgtaaaacagcagtaatatttaatagtatttacctcctgttgtcatcatgacaattaatgaattggtaataggaagtatataaaaacatttgctaaatcaataaaatatattaaaaataaatcagtctcctctgtgaaataaggatcataattatcatctcgtggatttgtcatgaggattcaaggagataatgcaatgaagcacattgcagcagctcaataaaagttaatcctttccccattgtgtgacctcgtcgtggaacagctcagagccagatgaatgggtcctgagctgaacaacaygtggatagcaggaggaataatgggaaggatgcctctggggaggtagagatgtgtcagccaagagaacgtagctgggaatgtggatgagggcaggaagctctgggggac

SEQ ID NO: 421173 - DNA, 527 bp, Homo sapiens
tgctgcccctactctgaccctgtggtcactggggcttccaatcacagttcatcctccttcctcaaatatcaagtcacaaaagtgactgtgatccagatccagtctatctccatgccattgccctggccatgtgacccatactggactaatcacaatcttccctgggatgtttcagtttgtagttagaaggaaaggggcttttcttttagtcacaggatgagctaagaggattttcactgaaggttgctggcagctatcctccctgtcatttggagaaagtttatctgtagtaagaaaaaatgagggcaaaacacagccaagagattgaggatggaaggagcaagacagagaaggtagaagcgagggacaaaaagatagagcgaaggagggaacgggggacagagagagagagagagatggaatgaccccwtttgagtcactagacccatttatgcctgaagcaagagccacccctgggctttgcaaatatgggaatcagtgcattcccttttctgctttagttaggt

SEQ ID NO: 421174 - DNA, 596 bp, Homo sapiens
tggtttattgattcatacttcccatccccaccccaccctgcacccaggttcttaattcatctttcttctctcgtgcctgacaaacattttcaatggttccagtcatttattcccctttactcattcttccttgagtttctcatgatgatatggctgctatttctgaaacctttgcttcagactgttttattcacatttaaataggccttgaaattggaaggttcacaggctctcactcagacttcctcctggaggtccaaaaactttatttcttgagcacatcatgtcctaaataacacacacctgtattggattggccattcagaattagatrttacattaaatattactttccttatatctatcaaggtaaagtcccattaccactgagaggggtaagttaatttattgataacttgcttgccatttactcctgctggttggcagtttaaagagcacatgcttcctgcatctcatttatgtagcttaagtagtcacctgttttgaactgatttgagagggaagactggattcattggcaagtcatggatcaattattatgtaagctctaatgctagcagtctcctagcaaaatg

SEQ ID NO: 421175 - DNA, 596 bp, Homo sapiens
tggtttattgattcatacttcccatccccaccccaccctgcacccaggttcttaattcatctttcttctctcgtgcctgacaaacattttcaatggttccagtcatttattcccctttactcattcttccttgagtttctcatgatgatatggctgctatttctgaaacctttgcttcagactgttttattcacatttaaataggccttgaaattggaaggttcacaggctctcactcagacttcctcctggaggtccaaaaactttatttcttgagcacatcatgtcctaaataacacacacctgtattggattggccattcagaattagatattacattaaatattactttccttatatctatcaaggtaaagtcccattaccactgagagrggtaagttaatttattgataacttgcttgccatttactcctgctggttggcagtttaaagagcacatgcttcctgcatctcatttatgtagcttaagtagtcacctgttttgaactgatttgagagggaagactggattcattggcaagtcatggatcaattattatgtaagctctaatgctagcagtctcctagcaaaatg

SEQ ID NO: 421176 - DNA, 590 bp, Homo sapiens
gcaaagatctgaggacaaccatcccaggcatgaagagcaaggatgaaggccctggggagsgaatgagcttagtgtatttggaaaattcaaaggatagtgttggcaggagttggggggaggacaaggaggaggaggaggaagaggaggagaaaagagcttcctgtagcacctagaatcaccatttggttcatcctgctgtgactgtgcccacctgcccacactcctgccccacagatggtgacttgttcttggaactcttccctgtttctctcacccagtccatgagacatattggcaaatatctcaaccacaactgtagagagggttcaagttatttcctatgggtctcctagcctcaagaaaatcagtggatgtgggtaggtcccttaagttttcctgaacatttcatggaatttatgaatattctgcgaaaggtagaagcctgctctacatagacctcacaaaggacttctagtggtctcacttaactccttgccctgtcctatctgcaccccaactccatccctgccaaaacattctgtaaaagtggggcattttataccagcaggagctgacaagcatcacaaaaa

SEQ ID NO: 421177 - DNA, 590 bp, Homo sapiens
gcaaagatctgaggacaaccatcccaggcatgaagagcaaggatgaaggccctggggagcgaatgagcttagtgtatttggaaaattcaaaggatagtgttggcaggagttrgggggaggacaaggaggaggaggaggaagaggaggagaaaagagcttcctgtagcacctagaatcaccatttggttcatcctgctgtgactgtgcccacctgcccacactcctgccccacagatggtgacttgttcttggaactcttccctgtttctctcacccagtccatgagacatattggcaaatatctcaaccacaactgtagagagggttcaagttatttcctatgggtctcctagcctcaagaaaatcagtggatgtgggtaggtcccttaagttttcctgaacatttcatggaatttatgaatattctgcgaaaggtagaagcctgctctacatagacctcacaaaggacttctagtggtctcacttaactccttgccctgtcctatctgcaccccaactccatccctgccaaaacattctgtaaaagtggggcattttataccagcaggagctgacaagcatcacaaaaa

SEQ ID NO: 421178 - DNA, 474 bp, Homo sapiens
aggctgattttgaactcctggggttaagcaatccacctgtctcagcctcccaaagtgttgaggttacaggtgtgagccactgcatctggcttcctctgctgattcttagcaggaacatcagtttatatgttgtcaagttgacccacctagctgacctttcactgagaaagtaagatatattgtgtttttacmtgactatgcatgaaaatatgtgacagagaccgttaatatgatccttagaaatttactttgtttcatctttttgaaaaataaattcttcaagttttagctgggcatgtggctacccagctaaatgctatatttcccagccttccttgcagctaggtatgaccacatgactgaatttttgccaacggagtgtgtttagaagtgctgggtgcagtttctgggtcacattattaaaagaaaactgaagtcctctacttcctctccccccagtccactgcatgctga

SEQ ID NO: 421179 - DNA, 566 bp, Homo sapiens
cttagcaggaacatcagtttatatgttgtcaagttgacccacctagctgacctttcactgagaaagtaagatatattgtgtttttacatgactatgcatgaaaatatgtgacagagaccgttaatatgatccttagaaatttactttgtttcatctttttgaaaaataaattcttcaagttttagctgggcatgtggctacccagctaaatgctatatttcccagccttccttgcagctaggtatgaccacatgactgaatttttgccaacggagtgtgtttagaagtgctgggtgcagtttctgggtcacattattaaaagaaaactgaagtcctctacttcctctccccmcagtccactgcatgctgactgaatacaggtgtgcagaggttctcctcggctgtaacggtgctgaggagaacagcaacttaaaacagtgctgtttagtagaaataagctcaagctgggtgaaattaattttgttaccaggtatccattaacataagtgaaaataggcaaaattagttttaactagtgtattttactttatacaattataatttta

SEQ ID NO: 421180 - DNA, 677 bp, Homo sapiens
tctttaaaatacatctaggaaaagccactctcattagccagagtctgactttattttcctaataaacagacctccagtaagacaaaagagcctcttttattttcaatcaattcttgaatatttcagtggattttcttctgtttggcttgaaattgtgatctgggaaaggctggtcctgcgaattgtcctcctrtataagggaagccccttgaggatcctcaacttgttatttttaatcactgtaatctccttttcaaaggagccctggccagaaacagagcaggcctttcagagctttctaaagcacaattattgccgttggagggaggggggactgtgggaagagggagggagagtagagagaagtggtgggaaagaaaaggaaatcaatataatactaacaacttggaaaagacaaaataatgatctcaactggattcaggttttggggaagaaactccatgtttcagtcttttttaatagtgaccattttattccggtctagagtacctaaagactgtacttagacagcaggcacaaagaacagaagctgcttggggatgaactggaatactgtggacaaagatttgaggcaggaaaacaagtcattgattccaaggattgtgaggaatcctaattcatgaaaaaattaaaaagcaaatagaacaccaggggaa

SEQ ID NO: 421181 - DNA, 525 bp, Homo sapiens
caatgcaattgtacaagagacactttcgtgccaatgacagattaagacaatggtgtctcaaagggagaaatccccacaggctagagyggcccaaaggtttcaggggagcagtaggacttgatgggtaggtgggatttggagataagaggggaaaagacatcctaagtcatgcagactgtaggagcctggagtagtggtggcgtagtgagaggccacccagtctggagcagaaggtttgtggcggggaatgacagggaagctgtaatgggaatagggctgtgatgagcccgtagtgttggggtttctctctagaagttttaaatttgcaatgagcttcagttctcagcccagtgcattttcaggcagtggcacaggagccagaattcagagtgcatttattcgtcaggctccgttaactcattaaacgtgcatttcacttttgtctcttttccttcgttctccttaacaaggcctggcatctcagatgctgacttttcagaaagattcttatgcagattgtcagtc

SEQ ID NO: 421182 - DNA, 571 bp, Homo sapiens
gacactgacaatgctgagccctttactgggtccctgaaggatgggaaagcatgcctccatctacagagggcttgcaataatcacagctgacagttcatatcatgcctactatgggccaggcagtggtctaaatgcttcacacatatctcatccttacaacaagtgttttattactcccattttgcagatgagtaaactgaggcgtaggtaccttagattacttgcttgcccaaagttacaatctatttgagagccaatgcaattgtacaagagacactttcgtgccaatgacagattaagacaatggtgtctcaaagggagaaatccccacaggctagagtggcccaaaggtttcaggggagcagtaggacttgatgggtaggtgggatttggagataagaggggaaaagacatcctaagtcatgcagactgtargagcctggagtagtggtggcgtagtgagaggccacccagtctggagcagaaggtttgtggcggggaatgacagggaagctgtaatgggaatagggctgtgatgagcccgtagtgttggggtttctctctagaagtt

SEQ ID NO: 421183 - DNA, 609 bp, Homo sapiens
aacttgtcatccagattaacatcatcttcaagtccataaggtctactagatcctcatcctagaaattgatgtggaacatgactgggacaaggactgaatctgctgtcacttaaaaatattgttattgccctaagtctgatattaattaaaataattcaatgtggtaataatagctgtagcttatagatctgacattaactattcatctgcagtcttttgatagtctttcaagcagttataaatctaccttactcctctgtcatggttgatcacatttctccatcttacctataagaatatcacaagtgaggattataaatcatgctgctataaagacacatgcacacctatgcttattgtggcactattcacaatagcaaagacttggaaccaacccaaatgcccatcaatgatagactgtcatggggtggggggagggggagggagagcattaggagatatacctaaygtaaatgacaagttaatgggtgcagcacaccaacatggcacatgtatacatatgtaacaaacctgcatgttgtgcatatgcaccctagaacttaaagtataataattaaaaaaaacaaaacaaaacaacgaaaaaagaat

SEQ ID NO: 421184 - DNA, 609 bp, Homo sapiens
aacttgtcatccagattaacatcatcttcaagtccataaggtctactagatcctcatcctagaaattgatgtggaacatgactgggacaaggactgaatctgctgtcacttaaaaatattgttattgccctaagtctgatattaattaaaataattcaatgtggtaataatagctgtagcttatagatctgacattaactattcatctgcagtcttttgatagtctttcaagcagttataaatctaccttactcctctgtcatggttgatcacatttctccatcttacctataagaatatcacaagtgaggattataaatcatgctgctataaagacacatgcacacctatgcttattgtggcactattcacaatagcaaagacttggaaccaacccaaatgcccatcaatgatagactgtcatggggtggggggagggggagggagagcattaggagatatacctaacgtaaatgacaagttaatgggtgcagcacaccaacatggcacatgtatacatatgtaacaaacctgcatgttgtgcayatgcaccctagaacttaaagtataataattaaaaaaaacaaaacaaaacaacgaaaaaagaat

SEQ ID NO: 421185 - DNA, 579 bp, Homo sapiens
attttcatttaagaaaagtgggttaatctgctggggtttctttgcaaactcatggcagttcctagcaatcaattcttttttttttttttttttaacatacrtatatactgtttcttggaaaatctgttgtaagagagactgctaattatgtactcaatataaattcttttcttccttactaacaaattcctgatcttggccagggagaggagccatgtgcctagctaaatcactatattccccacttgtttcagataccactggaccatctggcacagttttgaccagtgagataagagaaggaagttgacggatagagcctcggggagagtccctcagaagggaaagggaggctggagacagctgatgcatccaattatgcccttgtcctttatctttcttctgcctggaatatggacacttaggttggtgatagaggagccatgttgggaccatgaagtgacaatgagggaaaggccaagagaatctcagagatctcagtcctgacatccttgagcagttaaagcaatgcctcacttgaaacttctcatataatcagaaaaataagcttctaaattg

SEQ ID NO: 421186 - DNA, 622 bp, Homo sapiens
ggaactttgacttactctgttctcccctatttcttgcttacaatcatcaagaataactgtagaaactgctgggaatgccacatcctgagatagggtaggtactggccactatagcctaggctctgttccagtgacccaccscaccccccctctagaaaccagatgtccttcaacactttagcccagtctgtcttgttgcccctgaggtatataacccagggagggctgccttttggggtctctcagctgtggtgcaagtgaggcacacacagtcagaactctgtcttccctggcagctttcctgagccttgaggacccagctctcaatgaatcctaggcttctgttgtcccttgctacctatttgtaagtcataagcccacttcgtgtaacttgttgcatatgtgggtattctgtctcatcagactcagacaagtcagtaattactgcacagtgaacctgcttcacagcctcattgggagtagctgttttctcatcatttttcttgaactcaagtttcttgtgccaatacaggtttcactctctccagtccaatgaccattctccttgacaaagacaaaagcccagtagaagagcgcttctgttttctctctgtcatgcacc

SEQ ID NO: 421187 - DNA, 603 bp, Homo sapiens
cttaactatatttgtgtagcaacattccctattcaaaaatgctggaaagtcttagcagaacatacttggaaaacaatctactacagaagtgagtgcctgaatttattatctcttggtccagccatcctctttgccaagctaaatccaaattccttctcttctaactatttgtcttctaactatttttctgggagcagaagatgattccatcaaacccagtcttgaccgtcttgacccagtcagtaacacactaactgatctattaagcattctctattttaaagctcctgacaatctctcatttcagaaggtacttattttaggcagggctctgtgttgtgtgaaacagagaagrgatcagcacatttttcaggtgataaatgttttagggcccaagtttgttcaacctgctttattttgttgttgttctgttttgttttgttttaggcttttagcagcctgaagccatggtttttagtttatgtctctggtgataaatggaaaagagggatgaggaaggggcttcactggaccagccagaaacagaaactaagaacccatgacggtgttctctcccttggacacccctgtctaaggctctgg

SEQ ID NO: 421188 - DNA, 549 bp, Homo sapiens
gagaaccaagtcttagaccaatcagaaaaccccctggagctggagtgggattaccttccttgaggcacatggccagggaggaacatgaatatatctgtatgaaatcagagttctataaagcaggagaaataaaaaggaggtagggagttggggagaaatgggtgctgggtaggcaatcaactgagtccactccagagggaccgactggattgtccaatttagcagaggatgaaaagagcctttggagaggttttttgtttgtttgtttgtttcaagcagaacaaagaggttctgccttctataaacaaaataaggtcctgcctttttgggcaaaataaaaattatagcctgctgcccacccagctttccaataactatgcatgtggaaagattaggaggaaatgatatttattgacctgtgtgacagccagtaccaggagcaccygagatgtacagaaaccatgccagacgcttacctttattactccatagaatccttgcaattatacagcaaggcatgaattcccatccccatttcatagatgagga

SEQ ID NO: 421189 - DNA, 526 bp, Homo sapiens
tgtgaatgcttcaggaagttctcgtactgtrtttttcagctccatcaggtcatttatgttcttctctacactggttattctagtcagcaattcatctaaccttttttcaaggttcttagcttccttgcattgggttagaacatgctcctttagctcagaggagtttgttattacccgccttctgaagcctacttctgtcaattcatcaaacttattctctgtccagttttgttcccttgctggtgaggagttgcgatcctttgtaggataagcggcattctgatttttggaattttcaaactttttttgctggcttatccacatctttatggatttatctacctttggtctttgatgttggtgaccttctgatggggtctttgagtggacgtgctattcctttctgtttgttagttttccttctgacagccaggcccctgtgctgccagtctgctggagtttgctggaggtccactcctgaccctgtttgcctgggtatcaccagtggagactgcagaacacaaag

SEQ ID NO: 421190 - DNA, 524 bp, Homo sapiens
ttagtgacaacatagccactccacccctcattaactatataagcttggccacttaatttaaacttgctgagtttgtttccttgcctgtcaaaattggagtaatactaagtcgaagagttgtataagaacttctaatgtctactgtgacatgtgaagagcttagaaatcatcactcctgtcctcataygaaaaaaagctgaaaaactgaaaatcaacaactctaattacttccatcagagaactgaggtcatgaggcaaaccttcgccacctccttcctcctccaccccccaagaaatggagagacaagtgaatactgaaaatcacagattctcaggagctgctggaaacagtaaatggtaggaggacttaaaggctaactgatgactagctacaggctgagtgtagactgcttggagagttaaactcctgggagcccaatcctgaagggactcccacacttttgtgaattttaaccccaggagccctcatcaggttctcacggtgaaaatcagagaaatctcct

SEQ ID NO: 421191 - DNA, 576 bp, Homo sapiens
aaatcaacaactctaattacttccatcagagaactgaggtcatgaggcaaaccttcgccacctccttcctcctcyaccccccaagaaatggagagacaagtgaatactgaaaatcacagattctcaggagctgctggaaacagtaaatggtaggaggacttaaaggctaactgatgactagctacaggctgagtgtagactgcttggagagttaaactcctgggagcccaatcctgaagggactcccacacttttgtgaattttaaccccaggagccctcatcaggttctcacggtgaaaatcagagaaatctcctccagcttgaggcatgggaagggaaaaagaacctttttgaaatctggccagatgcttctccctaacaaggtctgccctcaaggaaactactttaccagagtcttatctgatccgaagaaagaacaattagccaggtccagccctgtctagccttcctgtctcatataaaggaagtaaaaaaaggctaagaaacttttctgaagaccacacacaaagattctgccccaataaaatattgagatttaatcaaaagatagaccg

SEQ ID NO: 421192 - DNA, 524 bp, Homo sapiens
ttagtgacaacatagccactccacccctcattaactatataagcttggccacttaatttaaacttgctgagtttgtttccttgcctgtcaaaattggagtaatactaagtcgaagagttgtataagaacttctaatgtctactgtgacatgtgaagagcttagaaatcatcactcctgtcctcatatgaaaaaaagctgaaaaactgaaaatcaacaactctaattacttccatcagagaactgaggtcatgaggcaaaccttcgccacctccttcctcctccaccccccaagaaatggagagacaagtgaatactgaaaatcacagattctcaggagctgctggaaacagtaamtggtaggaggacttaaaggctaactgatgactagctacaggctgagtgtagactgcttggagagttaaactcctgggagcccaatcctgaagggactcccacacttttgtgaattttaaccccaggagccctcatcaggttctcacggtgaaaatcagagaaatctcct

SEQ ID NO: 421193 - DNA, 524 bp, Homo sapiens
ttagtgacaacatagccactccacccctcattaactatataagcttggccacttaatttaaacttgctgagtttgtttccttgcctgtcaaaattggagtaatactaagtcgaagagttgtataagaacttctaatgtctactgtgacatgtgaagagcttagaaatcatcactcctgtcctcatatgaaaaaaagctgaaaaactgaaaatcaacaactctaattacttccatcagagaactgaggtcatgaggcaaaccttcgccacctccttcctcctccaccccccaagaaatggagagacaagtgaatactgaaaatcacagattctcaggagctgctggaaacagtaaatggtaggaggacttaaaggctaactgatgactagctacaggctgagtgtagactgcttggagagttaaactcctgggagcccaatcctgaagggactcccacacttttgtgaattttaaccccaggagccctcatcaggttctcacrgtgaaaatcagagaaatctcct

SEQ ID NO: 421194 - DNA, 604 bp, Homo sapiens
cccactgtaggcacgtagagggaggggagtgagggaggtttgaggagaatgtaactcagtgaggatctgatggacaaataaaagttagagagtggatgaggatggaagaggaggagtgttgcttggagaggcctggaggtgagagggaaccctaaagaacaagaaaggaatatgacatgggctttggaatacaacatctcagatttgattcctggctctcctgcttattaaccaggtgaccttgcacaattcttcaaacctcagtttccctgtgtgtaaaatggcagtaatagtagcctcctcaarggaagggtgtgagggctgcaatgcataatgtgtggaaagtgcttagcagagtcctggcaggtaaacagtggatgggtgggctgcagtgagataccaactcttgggatgggatgcctagccatgaaggccatgtaggtcataggagggagttcgttgacactttatctcctctttaccagttgggacttgctggccagccttccagaggtctaacactgaatgctgccagcctctcctgctggcttcagggcctccttgtgtcaaaagtgattgcagctccagacaactgagccccact

SEQ ID NO: 421195 - DNA, 570 bp, Homo sapiens
tggttgattgacacttgttaactatgggtaaatttaaactcagtaacaaagcttttgtgtttccattaccaaagaacaagaaactattggaggtaagtcattgtatatttatgttggctgtttggcgatgtccttgttaggaatggagtgagtcatgctgcctgaatgcagtgtgtcagaggctcagggtctcagggacaatatccaggctctaggtcacctttgactttacctgccttatctgaccggctcatagcaggctggggtaagttcatgttgccacggaytctaggagggatctctgaagtgtcaagtactgccttttcttctcatggttcagtgcagatggccgcagagggcaggatagttgatgacttattctctggagtcatccaatcttgggattaattcttttatattcatttgctgggaagggaaaggaagaaaaggggaagaagctctgatggcagttccctcttcctagattccctgctggtggtgcctcaggaacttcctttctttttgggtataccctcctttctttccttcctttctcagtgtttactattt

SEQ ID NO: 421196 - DNA, 570 bp, Homo sapiens
tggttgattgacacttgttaactatgggtaaatttaaactcagtaacaaagcttttgtgtttccattaccaaagaacaagaaactattggaggtaagtcattgtatatttatgttggctgtttggcgatgtccttgttaggaatggagtgagtcatgctgcctgaatgcagtgtgtcagaggctcagggtctcagggacaatatccaggctctaggtcacctttgactttacctgccttatctgaccggctcatagcaggctggggtaagttcatgttgccacggattctaggagggatctctgaagtgtcaagtactgccttttcttctcatggttcagtgcagatggcckcagagggcaggatagttgatgacttattctctggagtcatccaatcttgggattaattcttttatattcatttgctgggaagggaaaggaagaaaaggggaagaagctctgatggcagttccctcttcctagattccctgctggtggtgcctcaggaacttcctttctttttgggtataccctcctttctttccttcctttctcagtgtttactattt

SEQ ID NO: 421197 - DNA, 541 bp, Homo sapiens
gggttcttttattgtttagcaaggagtttggagataaatggcttccacattcttttagcagctcagtgacatcaggtccctggactagtagctctgtgattcactcagcctttctcttctattccataaaatggctgtgctagctcctccggttcataaattggccacactagctcaaagcatgtcaccctcaccaacagtgttctaaataggagagaaggaggatagtgggggaaaacactytcctcataggccactaccccttttgtcagagaggaaaatcccagaagcctcctggctgatgtttctgtacctctcattagccaaaagcaggtcacatggtcacctgaaactcaaggaaaggaacaggatagccataattggtttagaccagtcatgattcaatctctggggttggacactgtaaatcctaaacaaatagggtcttttagcaaaagagaaggagggaatggctgttgggccagtaattaagaatgtgcaccactctagggagggaggacatttagagaagaggacaaga

SEQ ID NO: 421198 - DNA, 566 bp, Homo sapiens
ccaaactccctaacaggacctgtgggatcctacatggcctatacctcacctccccatgcagtcccatctcacatcaaacaccccacctctctctgcatcccagctatgcagctttctttcagtctggaaaaacaatcccctctccaaatgcaagactttttttctaatctcagggaaacagaatcataccaatcataatctttacttaaagacccatcgttgcccatagatggcttggcttatttatgttcrtgtgtttatttgggcaaataattttaaataacataataggcactcacaagcccatgaccaacacaaaagcaagggtcttgtcaataatctgcagctaatcatgtggtctcttcacatctcatcctcctggttattaacccaggaaaccatcatcttgacttttatgttcatcattctcttgtcttactgtttggttttattgcatgcatatgtatatatacacacatatatgtgtatattgtatgtatttatatataatgtatgtatatattcctgtacatattttatatatatatatatattcctaaaaataa

SEQ ID NO: 421199 - DNA, 593 bp, Homo sapiens
ggtgtttttccccttgagttgctgggtgttaaacatttaccagtgctccactgggagcaggacctctttttgtrgcctgtagatttagtgacaagggacactggtgtgtgctttactctgtgggattagctcagaaattgcacaaactggagcccctgatgagtctgtgttttaagaactgagggagagagacgcaggtgaaagagaggagagggttggcacttgctctgacagctgcacaggctgctgaaactagccatcaggggccccactcttagccttctgcccacttgccttgctctgggtgtgtcatgtgggctctgtcacatgctgccgggtagtgaaaatggatatggacctgctgaaaaacaaattggaatcatgttccatgaacttaaaacatttgtaccctttgacccagtaattctccttctgggagtctgtcttaagaaatcaaacctaaacacgtgtctattttttttaaaactacaatgccaaaagatgttagctgcagttttatttatattagccaaaagttgaaattaattgaaatgtctaagtatagcggaatggttaaataactaatggcatat

SEQ ID NO: 421200 - DNA, 624 bp, Homo sapiens
atcatttctttgtattgggtacattccaaatctactctttgagttattttgaaatatacagtaaattaytgttaactatagtctccctattgtgtggctgatcactagatcttactgcttctatttttgcacccgttgattgagatgtttaccaaagatgagtggtggtcaagaagggtacctcccacttttgcttccacttgctccaggaaggctctcactctccgtggctccaaaggcacattggagaggtaatgtctaggccaggccattcagcaaatagaagacaagcaaaaacaacagaccttatcagcgcctctcctaactcccctagcctgggaagctctgcctctgaggctcagtgagcctggatttgcatggaggaaggaggaagggaagggagggagccacaaggagcccatgcagcttgctgtgcacaggagccagggagaaagtgacaacagagacagatgagcccggcagctagggcctgctcttacacaaactgccttcatcagcaacttgccgctaccatcagtcaatcctcttgcaaaggtacatttgtacatttcctttcccagtaacccaatctaccatctcctttatgcatacatgctctgaggt

SEQ ID NO: 421201 - DNA, 448 bp, Homo sapiens
aaaaaaataagaccatagaaataacagaggtaatggaagagaggtaataacagaggtaatacagaaataacagaggtaatggaacaagctaayaaagatttttaaatatctgtataaatatgcacaaggtttttaagcaaaacacgaactcaatgaggacaaaaggaaatattaaaaaggaataaaatatagctcatagaggtgaaaaatatgataccatagataaaaatttcactgaagatcagacagaagataggcattgctgagaaaagacaagcaaacttaaatatagcaatagaaacaatccaaactaacagagagggtaaaaggctggggaaaaaattaacaaatcctcaaataactgatgtaaatatcaaacagtcactatgtaattacagtcccaaaagaatgtggagggtagaaaaaagtttttaaaaataatgatcaa

SEQ ID NO: 421202 - DNA, 564 bp, Homo sapiens
taacacctgactcatggagttttcctgctgatgatataatgagatgaggtatgtgaacgaagcacatgcgtttattaaatgtgtcatggcagtttcactgtcttgggtggtatgggaaggtagatgagagtccaggctccaggacagacagaatgggttcagctctgccacttaccggttgtatgacctcaggcaagccaccctgcctgtctgtgctgtagtttctttcttggtgaaatgaacatgataatggatctactctctaagytgactgtaaagatttagtgaagcaattaggaagtggtaggcccagaaagagtgttcaataaatatcagttgtgatcatgaccttttgctggggttgcatagatgatgctctggttagcaggaatacactggccctgagtggagacttccagctcccccgaccctgatacatcaaaacaaactcacttatccaaagggacactgcccaccttgaccacaaaccctcagggtctccttcaggaggtcagacattcacaagactttcttctggaactaatgaattggcagataggtaag

SEQ ID NO: 421203 - DNA, 540 bp, Homo sapiens
gcggtttgttgggttggagatccatccatttccaaccagaagctcatttcctcccttattctgttgttcaattcctatctccaagtttctacccttcagtgagcctgtaagatctgacaccctggagacagcatcaagatcagagctgtattgcttctattaacttaatgcatactaagtggcaggcttttttgtaattgacattaatcatctattcttacacaaaayagttactctaccaatgcttggtgtctgacctgcactttaggccctacctccatgtgtgctggaaacaggaggagactggttgtgtttttaaccagttctagctcttcttcctgactgataacactctagaaagctctacaggaacactatggggccttccaaatgcaataggaccctgactccatttgccaccatgcaactcgcctcccctggccccgtccccccttttaactgtggaaggctctgtgggctgtcagaggggttctgcacattttatacctgacaggacctctcccagaaacccctgaggga

SEQ ID NO: 421204 - DNA, 540 bp, Homo sapiens
gcggtttgttgggttggagatccatccatttccaaccagaagctcatttcctcccttattctgttgttcaattcctatctccaagtttctacccttcagtgagcctgtaagatctgacaccctggagacagcatcaagatcagagctgtattgcttctattaacttaatgcatactaagtggcaggcttttttgtaattgacattaatcatctattcttacacaaaatagttactctaccaatgcttggtgtctgacctgcactttaggccctacctccatgtgtgctggaaacrggaggagactggttgtgtttttaaccagttctagctcttcttcctgactgataacactctagaaagctctacaggaacactatggggccttccaaatgcaataggaccctgactccatttgccaccatgcaactcgcctcccctggccccgtccccccttttaactgtggaaggctctgtgggctgtcagaggggttctgcacattttatacctgacaggacctctcccagaaacccctgaggga

SEQ ID NO: 421205 - DNA, 540 bp, Homo sapiens
gcggtttgttgggttggagatccatccatttccaaccagaagctcatttcctcccttattctgttgttcaattcctatctccaagtttctacccttcagtgagcctgtaagatctgacaccctggagacagcatcaagatcagagctgtattgcttctattaacttaatgcatactaagtggcaggcttttttgtaattgacattaatcatctattcttacacaaaatagttactctaccaatgcttggtgtctgacctgcactttaggccctacctccatgtgtgctggaaacaggaggagactggttgtgtttttaaccagttctagctcttcttcctgactgataacactctagaaagctctacaggaacactatggggccttccaaatgcaataggaccctgactccatttgccaccatgcaactcgcctcccctggccccgtycccccttttaactgtggaaggctctgtgggctgtcagaggggttctgcacattttatacctgacaggacctctcccagaaacccctgaggga

SEQ ID NO: 421206 - DNA, 535 bp, Homo sapiens
tatttcaacttggccaggttatagtcccaatgatttagttaaacattaatctagatattgctgtgcaggtattttgtagatgtggttgacatcttccatcagttgatcttatgtaaaggagaggtccctgggtaatgcgggtgggcctcatccaatcagctggaaggccttaagggaagacactgaggtttcctgaataagaaattctccctgaaggctgtagcatcagcactagtcacaatagcaaagacatagaatgaacccaggtgcctaccaatggtggattggataaagaaaatgtggtacatgtacaccataaaatactacacagccataaaaaagaatgaaaccatgtcttttgcatcgacgtggatgcagatgaaggccgttttcytaagtgaattaatgcagaaacagaaaacaaaatatcacatattctcacctataagtgagagctaaacattgagtacacatggacataaagataggactccaaaagggggaagaagggagggggacaagggttgaaaaactc

SEQ ID NO: 421207 - DNA, 536 bp, Homo sapiens
ccacttaatgaggcatctgccaggaaagttttaatcctaaccaagctttctcctagcatctccctctccctcttttccctccctcagccctcacccagctgatgtgtgcttaggaaatgcaaactaattttaaaattckctagagcaaaacatgattagaatggttaagtctgctgccaaaaataaaatcagctaatgcattccatatatttagatttccaaaattaagttgaaaggatgcttagttcatccaaagtttggttgatacacatcatcccgtatctctgctagttgaccctactttttctggcagcaataaatttggctgtcctgcaaatggcatcaccttttccacatcccagggcagtatttttcctctctcagcctgctgaaaatggggtcccattccctgtccaagatggtgaagaacctctaccatgctggggagaagcagcaaccaagaaacacttctggctctgtctaaacttaggttctcctcttctttcattccatctattcagctttgctggatggtc

SEQ ID NO: 421208 - DNA, 551 bp, Homo sapiens
agtgatattgacaaagtgaccacatgcccagtgggcttaccaagatcttccataaacctagatattgccttccacaaggaagttctggtgttaaatgttaagaaagcagcatttcaccaatcctatgagagcctgagaaggaatgttttcatgaacaagtaaatttggaaaatggtgcatattgaagacccttcttggagattcacaacacaaaggatcttgtcgaagtgtcaagtcctccagtaaagacccatgtttaactctgtgtaacacaatatttctggagctcattgggccatgggttaataaggacactgctgatgacwtacaaaatatgccttaggatgtgcacagaaaaggcccaagcctgcccaaggagacatgtgaggaggccctgggagcagaaatgctggaaagaatgagtccccttgttgcagcaggaaatctttccctagccccacctcactgagtgaccttgggcccatcccatcttctccagggcctcagaattataggctggctgggcttcgtgctcttcctgacattattta

SEQ ID NO: 421209 - DNA, 532 bp, Homo sapiens
aaatcttgcaaaaaaaagaaaagtggaaaaataaaaaatgcaatgcacccaattctaacaaacccaggcatgaaactttgaagtttctcagcaagtagacgtgatcttgcaactgaagacagatcagtgcaagtgaaaacccagcaaagggttgtgaagatgggagactttgtgtgtaaaatgataaccatagtgctgggcttcaaagatcctgacacagacggtatgattgttcctatgactggctaccacacatccctgtgtcaatgcataggcgaagcgtagatgctctggccttgcgttggagccccagaacgcaggttaggctacctagtactatagaatataaagtgttgaagtgaaacatgatgatttatacagtagcacaactccttagcaatatctggaggcatggggggatgaatatccaggttcccaagacacactaaagatgccatgtagcstaaagcaaagaggggctgaaggtgtccatgctcttctctgatggtctgcaggggctgtgctgggcttc

SEQ ID NO: 421210 - DNA, 514 bp, Homo sapiens
atatttattagtctatcactttaaataagaggaactgaaaatgtatacagattgaaaagtcacaaattttaagccggwtgttttcctttctatgtattttactgaaggtcctcagaaacgtagtatatttaaaagttactgctaattatacagtatgcaaaactgtattactttttaaaagtataaagaatgttggatcaatgaattctaaactaacttaaaacaatttcctgctcaaccacaattaaaaatcatttcactctttccactattcttaaccacaatacatatttgttttgggagagaggtggtttataagcattgaaacagggagaagttcaagttactaaaaggaaagagggtggtaggtctgcttctaccgctgtgctagctgaagaagagccaaacttagcaacttccccacatttagagaactcagtatgaaaccacaagtcttgcaaacaatgactaccctattgcaatgtttgttgttcaatgaatagataagccacct

SEQ ID NO: 421211 - DNA, 490 bp, Homo sapiens
tcaagtaaccaatgggaaacctctagagggtatttgaccccagaaaattccataacagggctcttgagcccctakgctcaggccactcccaccccgtggagtgtactttcattttcagcaaatctctgctgttgtcactttattctttccttgctttgtctgtgcgtttggtccaattcttttcaccgctaacacatctgtgaccctcttttctactaggtttctccagaatcccttgcaattgattaggccactggttatttggcccctttccaaagaacttaccttcactaatgagttgaaccaacctcatctcccatctttatctccatctcctcctccccttccaaagaaccctactttatacctacaactaacttcaattccgtccctctctggttcttttctagccaatgctgttcctttgtctacagaaacttccttgtgaaaacacaccaatacacctaatttaggatacacctaaatttcc

SEQ ID NO: 421212 - DNA, 490 bp, Homo sapiens
tcaagtaaccaatgggaaacctctagagggtatttgaccccagaaaattccataacagggctcttgagcccctatgctcaggccactcccaccccgtggagtgtactttcattttcagcaaatctctgctgttgwcactttattctttccttgctttgtctgtgcgtttggtccaattcttttcaccgctaacacatctgtgaccctcttttctactaggtttctccagaatcccttgcaattgattaggccactggttatttggcccctttccaaagaacttaccttcactaatgagttgaaccaacctcatctcccatctttatctccatctcctcctccccttccaaagaaccctactttatacctacaactaacttcaattccgtccctctctggttcttttctagccaatgctgttcctttgtctacagaaacttccttgtgaaaacacaccaatacacctaatttaggatacacctaaatttcc

SEQ ID NO: 421213 - DNA, 490 bp, Homo sapiens
tcaagtaaccaatgggaaacctctagagggtatttgaccccagaaaattccataacagggctcttgagcccctatgctcaggccactcccaccccgtggagtgtactttcattttcagcaaatctctgctgttgtcactttattctttccttgctttgtctgtgcgtttggtccaattcttttcacygctaacacatctgtgaccctcttttctactaggtttctccagaatcccttgcaattgattaggccactggttatttggcccctttccaaagaacttaccttcactaatgagttgaaccaacctcatctcccatctttatctccatctcctcctccccttccaaagaaccctactttatacctacaactaacttcaattccgtccctctctggttcttttctagccaatgctgttcctttgtctacagaaacttccttgtgaaaacacaccaatacacctaatttaggatacacctaaatttcc

SEQ ID NO: 421214 - DNA, 588 bp, Homo sapiens
cctgagagaatacatcgacgtgtaaagaaaagtcaagatgagagagagagaaataagtacatttcagtttttcacttcctgcatccagtcattcttaagtctcgttctatagctgattttttccacggatatgttatgtgagcaatgaattatccataaattgagtttctgcctcttgcaatggaaagagaaccgtgtagcataggtttctataagtgatcatctcgtagcgaaaatcagactttcattctgctggggttctgttgggggattaggaagctgtgcttctctgccctactttttcactgggcccagtgtatgtcccacctcttctgtgatgcttcccctgattactacaacacactgagatctcattcctcyctgaattcctactgtagtttagggttatggctatgttttcgcaggcttacaaatggaattctagtattaattgagaaaatccataataaaaaggctactgtattaggaaagtctttaaaaggaatttgcatttttattaccccaaacagcatccttatatttttgaaatatagtagtatatttaatatacaggaggatttacatgtg

SEQ ID NO: 421215 - DNA, 588 bp, Homo sapiens
cctgagagaatacatcgacgtgtaaagaaaagtcaagatgagagagagagaaataagtacatttcagtttttcacttcctgcatccagtcattcttaagtctcgttctatagctgattttttccacggatatgttatgtgagcaatgaattatccataaattgagtttctgcctcttgcaatggaaagagaaccgtgtagcataggtttctataagtgatcatctcgtagcgaaaatcagactttcattctgctggggttctgttgggggattaggaagctgtgcttctctgccctactttttcactgggcccagtgtatgtcccacctcttctgtgatgcttcccctgattactacaacacactgagatctcattcctctctgaattcctactgtagtttagggttatggctatgttttcgcaggcttacaaatggaattctagtattaatkgagaaaatccataataaaaaggctactgtattaggaaagtctttaaaaggaatttgcatttttattaccccaaacagcatccttatatttttgaaatatagtagtatatttaatatacaggaggatttacatgtg

SEQ ID NO: 421216 - DNA, 588 bp, Homo sapiens
cctgagagaatacatcgacgtgtaaagaaaagtcaagatgagagagagagaaataagtacatttcagtttttcacttcctgcatccagtcattcttaagtctcgttctatagctgattttttccacggatatgttatgtgagcaatgaattatccataaattgagtttctgcctcttgcaatggaaagagaaccgtgtagcataggtttctataagtgatcatctcgtagcgaaaatcagactttcattctgctggggttctgttgggggattaggaagctgtgcttctctgccctactttttcactgggcccagtgtatgtcccacctcttctgtgatgcttcccctgattactacaacacactgagatctcattcctctctgaattcctactgtagtttagggttatggctatgttttcgcaggcttacaaatggaattctagtattaattgagaaaatccataataaaaargctactgtattaggaaagtctttaaaaggaatttgcatttttattaccccaaacagcatccttatatttttgaaatatagtagtatatttaatatacaggaggatttacatgtg

SEQ ID NO: 421217 - DNA, 638 bp, Homo sapiens
gggactacattttatgtcacaagagagcagtgcccccttttggtgccaaatgccaaaagttctttgagggcaaggacacagtcacttctgcagatcctcaacactgccacataaaatcatttaagcaaagcaaactattaagctaccaatccttcacatggtaaaagaggaacaatttacccacattagcataaacatggatacatttggcaaagatcacttttcatgtatcatgttcttttcttgaacaccaactataggaccttacatgctaacagaaaactgatgtatattaattgagtgcataggccttgttggctctttctaacacaaatctcttgacataaagaaaggaccgggactttctctagaactaatatgtctataatgtctctcatctaatgatatcaaaatgcttttttcgactggcccacggaggtatcagatttcatattcaaatccagatcttgcgtacaactctgtgaaatatgaaaaatagagttcagtaattgtttggatataaaattgtcyaatagaatagggtagaatagaataatccatttattagaaaggaatattatctgtttctccctttcatttccaagaaacaacaaataacatcaactctttgctaacaa

SEQ ID NO: 421218 - DNA, 595 bp, Homo sapiens
ggatggaataggcaaagaagaatgtacagtgctttcagagaagggagtatgttgaggagcgaattggcattggtggctgaacaagatatttaagctattgccaaactataatggaagttctgaattatgagatgatggaagaaaaaggtcagtaggccaaatggtgctggattatgtaaagcaatatataataagaaaaagaattcgatctattcagagtaaggtgtcattataagttaaggagtagaacagggatggtaagataaaaaacatttctgaaaataaatgtgtccacagcgtacgcagtgatgcctgaactaaaaagggtgtaggggtgtggggctgagttgttttacatcataaggacctgaaccgagaagacagtaatgagactggagaaaagggtgtgaaacttttgaaaagtaaaaccatagtgtgatagttaatttcttgtgtcaastggagtgggctacaggttgcccagatacttggtcaaacactacttagggtgatactgtgagggtgattttagatgaggctgacatttaaatcagtagactgagtagagcagattgccccctttaatggggatggg

SEQ ID NO: 421219 - DNA, 536 bp, Homo sapiens
tgtattcagaaacataaaaaagcaagagtaaaasttttgtgacaactttgttccatttataagtcacactaatgactgatttgcttcttagtaattttccatttgtaacattttgtacctggatacacaaatgtaatgcaattgaacaagaaaacaattatctgtctgctggaaataatgtacttatctcattgaaacaattgacttgtttaaaaatacacaggtctgttcagactgcagttacctgtaatttgtaatgaatttccaggaagaattaaaatcctctgatgtaattgaatcagtagttgaaaacactgattgtgaatgataaatttccatgcataattcccctcttatataaacctccatttggagccattttagatttgagaggttttttcaatattctatgagttttggctggatccctggaaaacttcactcaaaggttgtatcttccagtgaaagcttcatgttgacttgtgggttctgtgtcagtggaacgtttcagtactttttggcctggctcaaatgtt

SEQ ID NO: 421220 - DNA, 536 bp, Homo sapiens
tgtattcagaaacataaaaaagcaagagtaaaagttttgtgacaactttgttccatttataagtcacactaatgactgatttgcttcttagtaattttccatttgtaacattttgtacctggatacacaaatgtaatgcaattgaacaagaaaacaattatctgtctgctggaaataatgtacttatctcattgaaacaattgacttgtttaaaaatacacaggtctgttcagactgcagttacctgtaatttgtaatgaatttccaggaagaattaaaatcctctgatgtaattgaatcagtagttgaaaacactgattgtgaatgataaatttccatgcataattcccctcttatataaacctccatttggagccattttagatttgagaggttttttcaatattctatgagttttggctggatccctggaaaacttcactcaaaggytgtatcttccagtgaaagcttcatgttgacttgtgggttctgtgtcagtggaacgtttcagtactttttggcctggctcaaatgtt

SEQ ID NO: 421221 - DNA, 538 bp, Homo sapiens
gagggtcctaagatgatatgtgaagctatggatgaaacaaaaaccccacattctggctttcaaagtcctctaccacctggtcattaacttccttctctccatctccaaatgttcccacaggtgtgcctcccctgaattcagaagctaccatcactgtcctgcaacagaatccttggccttcaaacttacttctgtggtttctcaaatggagggattttgttccactatctctatatcccagctgtctctgtgaacctactacttgacaagctgtcagcaaatgttaggcaaaaaacaataggacatgctggttaagagccaggctctggagtacacagacttggtttctcaccagtctcttccactcattatcaagttggtcaaatgctatgcctcggattcctaatctgcaaaacgatggcatattaaatgagttgtacatataatrctcagtgcctgagcagctaaataaaggttagctgctttttattaataaggtggttaataataaatgagtagatggaataaaagaatgaat

SEQ ID NO: 421222 - DNA, 524 bp, Homo sapiens
cttaggttgcctactaagcctatctagctgactcaggtagtcctaaacactagcccatatggtgcctcttcttgggactggtgtagtggggagcacagccccatgagaggggatgcagcttgatcgccgtaaagtggggagaaacgcagatgccactgcctattacccaatgagtctatgcaatggaaaatcttccacaactgaacatggcagccctgcttaaagggcaatccaatttaattcttgtgggatgattggggaagaatgcacaaatgcacactgtaaggccagactggttccttactgttctgggatcccagctaaggctcctggaaacttcagggaataaaagagtatatgttacattttctgaagtgagcctgtatcaccacagcaaagggttgtctgccagcagttccctcgctctaagcttgtccccagtgggytttccattcccaattataaactagccccaaccttcacctccattaaccttagttgcctgagctttgcttaagacaaag

SEQ ID NO: 421223 - DNA, 587 bp, Homo sapiens
tttggggtagggtggccttcagcaaagtcccacagatccatatagtcacctatatggtaccggtatattattagggaggcattcttatcagtattcctagggaggcattattatcagtaatttttaaacaaagtaattaatatttgaaaaatatacaaatatacaaatatgtgatagaacatatttgtatatttgaaaaataacgagtgaaattaaaattttcataatattagaatttaatacaattagccctctgtatctgcagcttccacatttgtgattcaaccatctgtggattgaaaatattgggaatatcaatacccacagcaataccaatatcaatattaataacaaataacaatgcaacaataaaaaatacaaataaaaatccaatccagtataacaactctttccgtagtatttacattgtattatgtattatgagtgaactgtttaatagaggtgatttgaagtagacaagggcctgtgtgtrggttatatgcaaatactgtgccattttatatcaaggacttgagcattgaattttggtattttcagggggtcctggaaccattccccctaagatg

SEQ ID NO: 421224 - DNA, 648 bp, Homo sapiens
gccatccttgaatattctctctctctctccacatatatatggaaaggaggcaggtgtagaaagaggggaggtggcctggtatgcctggcctcagactcaggcctgcgtgccccagcagaccccattcaagtccccggccaggccctttcagcgtgggcctcatgactcgaagttgctgcagaagaagggaaggyctccttcacggaggctcaggtccatcaaactttgctaacttcatgcttttgttttgactgtctgtttgttgaaggtgattgtacaggtttgcaagggctgctgtaacgaaacaccacacactggcagcttacacagcggaaactgtctcacagttctggggaccagaagtctgtgatcaaggttaagagcagggctgtttcctctgggggtgctgcaggaagagcctgccccatgccctgcccctagctctgtgggcacgctggtgactactaggcattccttgagttcctgcattaccgtccctgtctgtgcattctccctgtgtgcctgtgtcccagtttcccctttttataaggacaccagtcatgctggatgagggcccaccctactccagtacaacctcctcttaactaatgatatcgccaactaccctatttccaaataaggtcctat

SEQ ID NO: 421225 - DNA, 553 bp, Homo sapiens
ttttaaagtgagatataaaattgagtgtatatgtgacaaatttaaaatgctagtatttctttatggcagttaagatttgctgattcaaaaagcaattacaattctaattaaatttattaccatattgtcctagcagcaaaatctacttttttataatactgacatttatattgatgtctaactgttggcttaattacacttaagctattaatagaacatcaactctgcattgtagttctagatagctcgtccatatctgtatagtttgtcagttcaactggtaaaagtctgtgtgctaccgaggaataagtttactgaatggataatctaattcagtcattaaaataaaacscattttgcaatcaacataggtctttctcttttataatgaccaactcagcttcattctgataaagcatattggttagaaattttttcaaaaagctattaagacaagtctaataaaataataacttaaatatttttcttttatataaaaaggttcagatgtagacaacttggagaatgaatagtaacttctagctttctcttt

SEQ ID NO: 421226 - DNA, 633 bp, Homo sapiens
ggttattgtgaaatatatctttgataataagaccgtaaatggaagtgtggtgctttcagtgagtcctgggaattattctgatgaatatcaaacctgaaagatggtcatgggaagccctgaatttgcagctaagccaggcaggggtgtgagtatcctgaagacccctctcctagttggtatctcaagtaagggaagtcttgctgggaactgtgagatcaccaacttgtgggttccgacattttttctgagtacttaatgtcagaacttaaggacgttttctttattttgtgagatccgacactaactttgggtaatttgtgtcagaattgaattgaactgtagggcattgagttaatgtcagaaaattggttttgaaacttaataytcatatagctcttctgtattttgagggtcatacactaacttcttccaagattacattattcattgatggcctcaccatctctacttgctaaccacctttgtcataacatcagtgctctgctatcacctttcgatgacttttatatataagtagacattcttaagtttttaatgtgctcatttatatatctaccacagctaccttggctatctcagctatccactttttgataaccctaataatattgt

SEQ ID NO: 421227 - DNA, 633 bp, Homo sapiens
ggttattgtgaaatatatctttgataataagaccgtaaatggaagtgtggtgctttcagtgagtcctgggaattattctgatgaatatcaaacctgaaagatggtcatgggaagccctgaatttgcagctaagccaggcaggggtgtgagtatcctgaagacccctctcctagttggtatctcaagtaagggaagtcttgctgggaactgtgagatcaccaacttgtgggttccgacattttttctgagtacttaatgtcagaacttaaggacgttttctttattttgtgagatccgacactaactttgggtaatttgtgtcagaattgaattgaactgtagggcattgagttaatgtcagaaaattggttttgaaacttaatactcatatagctcttctgtattttgagggtcatacactaacttcttccaagattacattattcattgatggcctcaccayctctacttgctaaccacctttgtcataacatcagtgctctgctatcacctttcgatgacttttatatataagtagacattcttaagtttttaatgtgctcatttatatatctaccacagctaccttggctatctcagctatccactttttgataaccctaataatattgt

SEQ ID NO: 421228 - DNA, 619 bp, Homo sapiens
tgatgtgacatgccccatcctctcaggaaatgaaaataagaaaaatctcttttctatggctttagtttctccatattgtcaattataaataaaaatgccatgggcacaattgaggcacactctactaaattatccaatataaacacttgagcattctctattttttcttgatttcttagcttccactttctgcatacccactacaactgccttaggtcaggccagaatcatcttttgaatgaattataagaaccaaattgttaacttttatacctttatccctttctaattctttcttcaaactgaaggcagaatgatggctttaaaattggaaaggccacagtatgttaagatactcacattttctctcatrtcctaaaagaaaaagtccaaatacctaaacatagccaagaagaacatctatcatctgggtattctttttctccagcctcaccatgggccaggcctctacgttgactctcatgagcatgctagaagtcatgaactgttctagaagcgttgagctttcactttcatgccttttttacatgcttaaactgcctagaacaatttacctccactcacctcgtcaatttgtggatatctctgagacctcata

SEQ ID NO: 421229 - DNA, 619 bp, Homo sapiens
tgatgtgacatgccccatcctctcaggaaatgaaaataagaaaaatctcttttctatggctttagtttctccatattgtcaattataaataaaaatgccatgggcacaattgaggcacactctactaaattatccaatataaacacttgagcattctctattttttcttgatttcttagcttccactttctgcatacccactacaactgccttaggtcaggccagaatcatcttttgaatgaattataagaaccaaattgttaacttttatacctttatccctttctaattctttcttcaaactgaaggcagaatgatggctttaaaattggaaaggccacagtatgttaagatactcacattttctctcatatcctaaaagaaaaagtccaaatacctaaacatagccaagaagaacatctatcatctgggtattctttttctccagcctcaccaygggccaggcctctacgttgactctcatgagcatgctagaagtcatgaactgttctagaagcgttgagctttcactttcatgccttttttacatgcttaaactgcctagaacaatttacctccactcacctcgtcaatttgtggatatctctgagacctcata

SEQ ID NO: 421230 - DNA, 621 bp, Homo sapiens
actttagaaataattttcacaaattactaaggctgcgtttgaattagaatgagagtgagaaacttcctgaagccagtcttagtgagtctcacatctttctgggttttacctactggaaccctaggagattttcacagtgaagagccaagccagtttttgtttcactcatggtctgggcaagggragggtaacgtttttgaaatatgatttcattctgcatgataaaggcccatttttcagagaaaatatgttttcagagctttatcccacaaagggataaggcgtttagtcaatagcaactctgttagacttcctatcttacataaagttgaggaaaatatttatgaaatatttgtgagggtcagagcctaggaaaacagtccatcttgtctgaatgtttgtgtcctccagaatgtgtatattaaaatcctaattgtcagggtgatgatattagaaggtggggacctacggagttcatgaggtctccatcctcataaatgggactagttcccttttaaggaaaccccagagagcgagccagtgtctttcatcatgtgaagacacagcaagaaggaactgtctataagaatgggccctcaccagacactgaatctgcctgca

SEQ ID NO: 421231 - DNA, 561 bp, Homo sapiens
ccatttctggtactaaattgatcaatcacatcgtgtaaaaattattattctcaacttttctcaaagacgttaatctctgcttgatattcaggtctttttacaaaatataacacttcagtttgtcatttcttcatatgcttgctgtggtaagtaagctgatttattgctgaggaatactaggatcactatttgtaaaataattgatagttataaatctcataataattaamttttacttgaaagttcaagccactcagaagtgtgagaaggaattgctttaaaataatgattaagtcatttagtttttaacaataaaaatagtcctgcaacaagttgaatgctcacatataattaggtcaagataaaacaatctgtctcctctagggatgactgattcctcttcagccttcttaattagtagttttctaaattttctgcttccgggctaacatacattggggaaagggcacccttttcaataattggttcgggaaaaaatggaaaatccgatgtggaagactaaaactggacctctatttctcaccatatacaaaaataaac

SEQ ID NO: 421232 - DNA, 506 bp, Homo sapiens
acattttgtaaaatagaagaaaatgaagagaaattctcaatataaagaaagaaaaatagtatatatatatatatatatatttgataaaatacaaaaattataaacgaactaattgtttgataactgaccataattcttagatgtttggacctgctttaatttacatgttgaccacaatgtttgatatcatttcaagccacgggtcagacagacatataaatgaacactggcmtatgtacagactgttggtattgatatgaaatgtaggataatataatttgatgtagagatataaagatttagagagctgaaatcactcaacccccaaaagtatatcatacgtgctgaaatttatatttttagttcgtactctgtgatttgacttaagcaatccacttctattttaattaccaccgattttaataacttacaattcaatctaatttcaatctacatagaactatcatatattttaccttaaattaaaaatattataccccaaacca

SEQ ID NO: 421233 - DNA, 552 bp, Homo sapiens
ctttaccttagaaggaatatctcaacaggcctcacaccacagaaccctgagaaattttactgaggtagaaggtccctgaatattaktcagatttatttcctatcctgtagcatgcaaatgtctcaccaataagttcagtgtgtttactacttcttgttcactggatccaatcagcataatgtcctcaatttaatggatcggtatgatatcttgcagaagcgaaaagtgataaaggtctccttgaataagattatgacacaaagctggagagttgatatacccctgaggtaggacagtaaaggtatattgctgggcttgtgagctgaaggcaaattgcttctggtgggccttatggacggaatggagaaaaaggcatttgtcaagtcaatggctgcataccaggtaccaggagatgtgttaatttgctcaagcaatgagaccacatctggttaagcagctgtaattggagtcaccacttgcttaagcttatgatagttcactgttattctccaagatccatctgtcttctgcacaggccaaatgaaagagttg

SEQ ID NO: 421234 - DNA, 655 bp, Homo sapiens
tattattctgaataacatttttattatactagaaaaaaagatttttcatactgtcattttgaccaaactcaaaccttatttccttatgccatataaagtttaaaaattattaaaagttaaaatcatgttcatttgttttcaatataagagacattcatcaatatttgtgtaatcacaatccaaattatcttcctgttttgtgggagttcctcattttgtgtctgcaagagaatcagaaacctcccttacttacaaaatccaaaggttatgtgttgtttgctccttatacttctgactgatccattcagaagacatttcacaacaaagaacacaaattcaggagaaagtggtgaamcagtaacaacactgagaaacctaaatacattcacgattttaaacatttcataaaatatttaaaaaccattaaacagggatagatttctttatttgaggcaaatacttccacattgtgctaaaacatctcaactgatctgttatatattatttaggagaaaattttttaaaaaataaaaatttacattaaaagcaaagagggaaagtgtgccatttagcataaatttcatgcaggtaaaacttttttccagttaaagcaattatttgatactttgagttagcatcagcttgaactcacggt

SEQ ID NO: 421235 - DNA, 565 bp, Homo sapiens
agtaatctatatagagaaaaagcaaaacaagagccaatgtatatgtaaaagaatgtaattgaagcccaggtgtaagcacacacagagataaatgcacataataaaattaatattaaaaacaataattcaagatcattctccaggaaataaacaagacccgattctacatggtgaaaggtttcattatgtatcattacataattgaccaagaacattcaagtcaagatatgctgtggtaaaactactatgctttaaaaatttacaaaagcagtagaattaaaatgaaattatttgggatccaggaattcataataagatacttccaaatgaaaaaaaaaatcagacactgcaagaaaaaaatacaaagccaaagtatagtagaatacaatttccaacaggcttaaagtaattgtgagttaaattatatatatatatatacacatatatatgtacatacatgtacatacatatgtacatatatgtgtacatatatgtgtatatatctatatagagagatakagagagatagagagctgcctttaaatatcaaggttataacaatact

SEQ ID NO: 421236 - DNA, 537 bp, Homo sapiens
tggcacattaccagcctcaatggcaatgggcgcaaaactccttctgcttgagagaagcagagaaaaatgtaaaggaatctttgtcttgcatcttaggtaccatcagagccacagggtgtagagcaccaagcaggctcttggatccacaattctacgacatgactcttagacagcatttcttaggcatgccctgggacataggagatcccacgtgcctgaagggtgagtcctggggcaagcagcattcaggacaagctcacttaagagacttagagccttaagcaaacattggtggtagtctggaaatactttctatgacctgtggtggtgatggctgttgggtgagtctcctctgcctttggaaaggggagagaagagyggaaaagacagagtctgatgcctacaatcagcaggcatcagagccaactcagtcccaatacacagaatatcaggtagacttctaaggtttttgactctagtccctgacttccagagggcacttctgggccactgaggacatttgagaccttgctgttc

SEQ ID NO: 421237 - DNA, 606 bp, Homo sapiens
gaagaattctgttgttatgttaatcaatccagaatcgtcaccgagaaagttaaagaaattctagatcaaacacaacatagagcacaggagcttcaaaacaccagaccctggggcctcctcagccaatggatgccctggattctctccttcttaggacctctagcagctataatattgttactcctctttggatcctgtatctttaacctccttgttaagtttgtctcttccagaatcgaagctgtaaagctacaaatggttcctcaaatggagtcccagaggcagtccgtgattaagatctaccacggacccctggacyggcctgctagcccatgctccaatgttaatgacatcaaaggcacccctccctaggaaatctcaaatgtacaacccctggcatgccccagttcagcaggaagcagttagagtggtcatcagccaaccttcccaacagcacttgggttttcctgttgagagggggcactgagagacaggactagctggatttcctaggccaattaagaatccctgggaaggtgattgcatccatctttaaacacggagcttccaacttagcttacaatcgaccaatcaggtagtaaagaa

SEQ ID NO: 421238 - DNA, 606 bp, Homo sapiens
gaagaattctgttgttatgttaatcaatccagaatcgtcaccgagaaagttaaagaaattctagatcaaacacaacatagagcacaggagcttcaaaacaccagaccctggggcctcctcagccaatggatgccctggattctctccttcttaggacctctagcagctataatattgttactcctctttggatcctgtatctttaacctccttgttaagtttgtctcttccagaatcgaagctgtaaagctacaaatggttcctcaaatggagtcccagaggcagtccgtgattaagatctaccacggacccctggactggcctgctagcccatgctccaatgttaatgacatcaaaggcacccctccctaggaaatctcaamtgtacaacccctggcatgccccagttcagcaggaagcagttagagtggtcatcagccaaccttcccaacagcacttgggttttcctgttgagagggggcactgagagacaggactagctggatttcctaggccaattaagaatccctgggaaggtgattgcatccatctttaaacacggagcttccaacttagcttacaatcgaccaatcaggtagtaaagaa

SEQ ID NO: 421239 - DNA, 525 bp, Homo sapiens
gaacagtgctataatataaaaatacaaaagagaaggataaaagtaggctatggaagaaaagagcctttaaaaggtgaactctggcaaagaaattaagaaactactttacatcagaggcaaaggaatgccttaagaagggaaaagaaactgtgaggaaaatgcaattttctctgccagaaagaacttactttgaatgaaatcacattggtttcactaagattatgtmatttcagtggatttcacagcattgcttgtagccatgctaacttgctcagtagacaaagaaaatattaaaagtaaaggcaaagtaagaagtaatctgtgtttattgagcttacttaataatttgaagataataactaaaaattagtgaagtctagttgctgcttttcttagaaagcctctgtaatcacttgaactaaatgttcagaacaaccagataaaaataatttatagaagaaagcagaagaaattaagaatctcataactccagcaatgctctcccagatgcacaagaaaatggtt

SEQ ID NO: 421240 - DNA, 525 bp, Homo sapiens
gaacagtgctataatataaaaatacaaaagagaaggataaaagtaggctatggaagaaaagagcctttaaaaggtgaactctggcaaagaaattaagaaactactttacatcagaggcaaaggaatgccttaagaagggaaaagaaactgtgaggaaaatgcaattttctctgccagaaagaacttactttgaatgaaatcacattggtttcactaagattatgtcatttcagtggatttcacagcattgcttgtagccatgctaacttgctcagyagacaaagaaaatattaaaagtaaaggcaaagtaagaagtaatctgtgtttattgagcttacttaataatttgaagataataactaaaaattagtgaagtctagttgctgcttttcttagaaagcctctgtaatcacttgaactaaatgttcagaacaaccagataaaaataatttatagaagaaagcagaagaaattaagaatctcataactccagcaatgctctcccagatgcacaagaaaatggtt

SEQ ID NO: 421241 - DNA, 525 bp, Homo sapiens
gaacagtgctataatataaaaatacaaaagagaaggataaaagtaggctatggaagaaaagagcctttaaaaggtgaactctggcaaagaaattaagaaactactttacatcagaggcaaaggaatgccttaagaagggaaaagaaactgtgaggaaaatgcaattttctctgccagaaagaacttactttgaatgaaatcacattggtttcactaagattatgtcatttcagtggatttcacagcattgcttgtagccatgctaacttgctcagtagacaaagaaaatattaaaagtaaaggcaaagtaagaagtaatctgtgtttattgagcttacttaataatttgaagataataactaaaaattagtgaagtctagttgctgcttttcttagaaagcctctgtaatcacttgaactaaatgttcagracaaccagataaaaataatttatagaagaaagcagaagaaattaagaatctcataactccagcaatgctctcccagatgcacaagaaaatggtt

SEQ ID NO: 421242 - DNA, 596 bp, Homo sapiens
tgttttgaagaagtttctttccattcgctatcctctctttggtatattcatgtaatctttctcccccaaagcctatttccttacatcattttgaagcaaagatttggcattctttccaactaccttaaactcctcttcaacccccacccccaacattgctattatcatgatcctaatacaagctcttatcttcttytgcttgaatgactccagtagattccagacttgtctttctgcttcccctctgatctattcttccatattgcctctaaagttgtttgcagttaatgattctggaataagtatgtattcattttgaaaataatgaaattgcatcttcacctcacattaaagactcaacacctgatgtgttatacacttaatgtaaaagacaaatctgtaaagctttcagggggatatgggaaactatcttcaaggccttaggataagaaaagctttctttagtaagtcatcaaaagcagaaattagacatatcttagtttattaaaattaataactcatcaaaaagtacatattaataaagtttaaaaacacccaagagtggggaaatctattgcagcccataaaaccagcca

SEQ ID NO: 421243 - DNA, 595 bp, Homo sapiens
gaacacaggcaatgtaatatgactctgctggtagttaggaactgttctctaagcctcaacttcctcctttgtaaattagaaataattattttttttagctcatagattcactatgagaattgaattcaataatatggttgaaaaattttaatgttttattcaaatgtaacaaattaataaatgggtcctagaggtgggtggcagagggtcataagcacaaaaaactaacatgtattaagatgggataggagcgttgatataagtaaatgaatacataaatacataatataagaaatgtcagttactgaagttctgcctgaaattactcytgaaaaaacagtgtagatattgtattcaaggacatattataaaataaggattaaaaataagacaagttgctgcattaaacagtttctcaaacgtgtttctgaagaaccctggagacatgaaagtcagtttctttccttgatctctcctttataaaaaaaaaaaaaagcaactgctaaaaaaaaaaaaaaaagtggtagatttttaagccctggcgtgctcagatgcaccatgagatatgaaatgagaaagctaactgctgaaccat

SEQ ID NO: 421244 - DNA, 549 bp, Homo sapiens
gactttctttacatgtttgtattattgaaaaattttgcaatcaaacctttaaggtttcaaaaaaattttttcttttcttttttttttttttttgagacagagtcccactctgtcgcccaggctgcagtgcagtggtgcaatctaggctcactgtaacctccacctcccagactcaagtgattctcatacctaagcctcccaagtagtaggactacaggcatgtaccaccacactgggctaatttttgtatttttagtagagacggggtttcgccatgttggccaggctggtcttgaactcctrgccttaagtgaccacccacctcggcctccaaaagtgtgggattacaggtatgagccactgtgcctggactatgatttcaaaaatttactataacatatagccttataaatcacagttataattttcttaccattgggaaagaatggagggtaaagccttgaagactaagtgggagctggtcagaacacctatatggcagaggtgttcaagtttcacacgtaatgatgtaatctgaataggaaaaac

SEQ ID NO: 421245 - DNA, 607 bp, Homo sapiens
cctccccaaaaatgtacctcccaagtaaaaataatatttcatgcatctttattttcctttaaatcctaggagcttcctacccacaggaagaatttagtgaacagtttgctgactgacaaaagtttaaaacttcaaggaagcataaatgttagagaaagaaacatggtatggcttgctactgagagtcaaaaaacatcctcaaattgtcaaataagaatttccttaagtaatttttatgrgataatatggggtcagtgaattaataagagcaagggtcagcatcgcccacgtagtaaagttcaatatgaggaaatgtaaagacctaaactaattcccacctctcagtctctggccctgggctagttagcgtttctactccttggggccttcatttgcatgaggagggcctcagcttaacttttaagagtgtcaaagatatataaatgacagtgaaacatttggaatgtacagaccaatgaaaatttgtagtaaacattcaatgtttgagaagagagtaatcacaattatttttattatttttccagtgccccaatccactcccttttcctccatacaaaataaaatcgatctctaaataaactgcaga

SEQ ID NO: 421246 - DNA, 613 bp, Homo sapiens
aacgttttatgcacgttagtacagtaaagtctctgaaaagtccagtggtagagtaaygtatttaactctcaatttctcaagctctatgattcctgcaattattttctccttctttgatgacatctttaatgccttgtagattaggtcttcaggagaatattgagaaaggagatatgaagaaacccgtcaggcaggctgttagggtgattccttggttgaattttttcaaacaaaacaacagcctgaaaaatcaagcttcgtgcacagataagggaacttgcataggtgggcttgcctaacacatgcccacggctacacagataagaaagtctacatgggtaacctgctcagacatgtccacaatggaaaattctatcccttaacacatgtgcagtaaggggaacaaaggaataatggagtaactcaagctaagggtctgcatgtgcactaggaggacagagtggagctacacagttcgcaccttatgcaaatgagatgcccagccctcattggttttttataaaagccttgcattcaaccgtaaaaatggcagtgacaaccctcttccaggtcccctctcacagtagagagctttcttcatttacttattaaa

SEQ ID NO: 421247 - DNA, 613 bp, Homo sapiens
aacgttttatgcacgttagtacagtaaagtctctgaaaagtccagtggtagagtaacgtatttaactctcaatttctcaagctctatgattcctgcwattattttctccttctttgatgacatctttaatgccttgtagattaggtcttcaggagaatattgagaaaggagatatgaagaaacccgtcaggcaggctgttagggtgattccttggttgaattttttcaaacaaaacaacagcctgaaaaatcaagcttcgtgcacagataagggaacttgcataggtgggcttgcctaacacatgcccacggctacacagataagaaagtctacatgggtaacctgctcagacatgtccacaatggaaaattctatcccttaacacatgtgcagtaaggggaacaaaggaataatggagtaactcaagctaagggtctgcatgtgcactaggaggacagagtggagctacacagttcgcaccttatgcaaatgagatgcccagccctcattggttttttataaaagccttgcattcaaccgtaaaaatggcagtgacaaccctcttccaggtcccctctcacagtagagagctttcttcatttacttattaaa

SEQ ID NO: 421248 - DNA, 499 bp, Homo sapiens
ttaaaaccaaaaaccaacatagcttcttaaataagaacaactgagtaaacgtgaacactacaccaactgctaaatgttaaacctgtatccaagtcacaaatatcaaaggcaagcaacacaactaaaattattaatttgatcttaactttgcttggtataagatgtggggtgtcctaatatttagatctatctctgcatgacagttcagattcatgtgcaagaataattcaaatcttccagcaggttaaactagatgtaagaaacatcctctgtctagatttggagtgaaacagccctgcttatagtgatgtctggttgaacctctgaccsatagacgagagaattcttcagatgttgagtatctctcaacatgcaatagctagactatctgcagcaagatcatttgccgaaacacagattcctaggttccccaggccatcttaattggagtctcaaagtatgattctggactatgttttttaacaaatgccatcatata

SEQ ID NO: 421249 - DNA, 555 bp, Homo sapiens
caattactgtaaatgtcaggtgacttgcctacaagacaaagagaatgacacaagggtaagaaagatttgagtcctttccattttaaaagcaatgagtcattggctattattccacatggtggcctaacaatactggagagatttataagaaaaattaaaaagcaatccaggctgtgcaccagaggcaccattcwttgggcatatcctgctaattgttctttctattagctttccagatgaataccattctggcaacagcaaaaaaaaaaaaaaaagattcctgagattatagcccatttcatttctaaaatagtcacattcctactaagatgataaatcagtgtttcaaaagaaatgtgactcattcactgtctggcaggtgaatcattactggattaagagttcctaacaatattctagatgtaataatgtattatagctcttttaaatagtaggtcaagaattatgaaccttgccttttaatccatattgctttaaaaagctattataactaagcacataaaaattaaatacacttttccaggagatgataaa

SEQ ID NO: 421250 - DNA, 559 bp, Homo sapiens
tacccattcctggactcatccctgggcattctgatttaattggactcgaatagagcccaatcatcagagttctttaaaaagctccactatatttctaacatgcagccatggcatagacgtcctgctttatttcaagaaaagcgrgagaaaagccatatacagagacatggtgagctctgttctctgaaggcatgtctgctgctttcctaatggcactggctctgtcatttgatgagatgcctcagtctcagagatgcttgcttctatgtttcttcaccaactatttcatgtatcagaaacatttgcacaaaattatgcaggttgggatcttgttacctcccctcctccttcaatagtcatgatatatatgtagtgcttggcatgcaggtggtatgtataccagttaatgtcttaaaataattgtggtatctggcgaaacttgattttaaggaactcctgctgaaagaatgccacagtgatcattacaatattaatgtcctttcaaaagtataaatcttctctcatttggccttaaattttcttttaagttggcattaaa

SEQ ID NO: 421251 - DNA, 559 bp, Homo sapiens
tacccattcctggactcatccctgggcattctgatttaattggactcgaatagagcccaatcatcagagttctttaaaaagctccactatatttctaacatgcagccatggcatagacgtcctgctttatttcaagaaaagcgggagaaaagccatatacagagacatggtgagctctgttctctgaaggcatgtctgctgctttcctaatggcactggctctgtcatttgatgagatgcctcagtctcagagatgcttgcttctatgtttcttcaccaactatttcatgtatcagaaacatttgcacaaaattatgcaggttgggatcttgttacctcccctcctccttcaatagtcatgatatatatgtagtgcttggcatgcakgtggtatgtataccagttaatgtcttaaaataattgtggtatctggcgaaacttgattttaaggaactcctgctgaaagaatgccacagtgatcattacaatattaatgtcctttcaaaagtataaatcttctctcatttggccttaaattttcttttaagttggcattaaa

SEQ ID NO: 421252 - DNA, 551 bp, Homo sapiens
gtttttcatttacttaaaaggagcaggtgttaacttaggcttccaaaattctttggaaaagggaaatatcctatggaaattcacagagtcctgaaaatcaaaatataatcattttatatctacttgacacgatttttgaaaattctaatgccttggaggtgcactgtaaatgcactgggctaggaaccaggaaattgtcagttttgcttcaggtcccacactatctgtctttatgacttgagacaaatagctttgcccctttgaatctcagatctatcatttgttgattgcaaagttccctttcaattgcaaagtgtttcatctgaatttatatttatgtgaaataaktgtgggatttgaaaaatacaagtctggtgtcatctctgcacatcttccacaatgcaaaacaaggcagagacaataaatctgtaattatattaatctactggttaatgactaatcatataaaattattgggccaatgaaaaagattagtaaagtctctaatctgatattagaaacttctccacaatttaattaattaattttta

SEQ ID NO: 421253 - DNA, 595 bp, Homo sapiens
agagtcaaactgtatcaactcattttagctaaaatttcagacaccagaaaatagaayggcctttttaaaactaagaattgaacgacagtatctgtataaaaatgtgatcatttaagcaatggtacaaggagtctggtgatgtactaagtgtgagtattaaaaaaaaaaatttctgaaactctttcttgacttagtgcccaggcgcaatgtggacagaagggagagatcccatagcctcttagccatgccatattggcatgggtttttgctagtttgcccagtcttccttcagcttctcatgttttgttcagacccaaaggttctgctgacttcaaagggagtttcatatgaagcaagacaaaaacggcaggggtgggggttactgtgaatttcgaattgaactgtggagaataaaatatttttagcaagacacaagataatggatttttttttcatttgagaagaatgatatttttcttctttgtttattcttaccaacataaagcacagtctctgttcctacagtgaagagtcttgaatatgtctttttttctaaataagcatagtgaaaggttgtggtttccctagcaacaga

SEQ ID NO: 421254 - DNA, 671 bp, Homo sapiens
acagatccacataggattatattcagatttggcacttaatatcttaccctttttaaaccacaattccttcatttgcagaatggataatacctacctctgcaagctatgataaggatgaaaaattatgactccaaaagtatctggcattgtgcctgtcacatagtatgtgtgcaataaatgatagctggcagtagatatagttataacatgaaaagaattttggccctgtttctagagctctagtaattgctaygtgaacagagcgtatttttaaagctagtattcccctcataagaaacatcagttgatgggatggggtcaattgagcagttcaagaaagcatctcaccttttatcccattgggagctcacagtacctggagcaaaggtggcagaattgacaggcttaatctatttggaatcttggcagtagaaagcctcctgcttgtatggtggcttctcttgtgttctgtttattttattctattttaagggatacattgaggacattgcctaggatcacaatattgtgaggcatttggatgctgaagaatgagccattgctggccacttatccttggatatacccaaatagattatccatccacagaagttcctgtgaggagacaggggagaggaatgaatggaggaggagcagagatgagtgcagaa

SEQ ID NO: 421255 - DNA, 613 bp, Homo sapiens
cctacagtgaaataggtgcagagagggaaagcaaggctataaccttgcacattcatgaatgatttatttggtggaaagccaagtccwcttgggaactgcatgtatttcataactttgctggtggtaatgaagttctccatttaaactaagtgtgaataatgcaaccatgctgctgcctaaggttttatgagataggcctttattttatcctgatttctcagcagtcacaaaaaagaaaagagagaaagataaagaacaaacttctctttaacaggaagcaagccacttttcctgatcagatttgaagaactgacctttttctaactattgaaaaggaaagagttgtatctgtagaagtgccaaggaaagcaatgtaaaagaatttttttttcagtgtacttgcattggtatagatacataaatgtatttctctacacaaagtttcaatttgaatgagaacatctaataatttactaaaaagctcttttctacatcatgtttgctgtttttcatgatcactcaaaatgtctcctattatctgaacagtagaagtatttctaatacaagctacaaaacagtagttattttcttcaacaccacagtagttgcttga

SEQ ID NO: 421256 - DNA, 613 bp, Homo sapiens
cctacagtgaaataggtgcagagagggaaagcaaggctataaccttgcacattcatgaatgatttatttggtggaaagccaagtccacttgggaactgcatgtatttcataactttgctggtggtaatgaagttctccatttaaactaagtgtgaataatgcaaccatgctgctgcctaaggttttatgagataggcctttattttatcctgatttcycagcagtcacaaaaaagaaaagagagaaagataaagaacaaacttctctttaacaggaagcaagccacttttcctgatcagatttgaagaactgacctttttctaactattgaaaaggaaagagttgtatctgtagaagtgccaaggaaagcaatgtaaaagaatttttttttcagtgtacttgcattggtatagatacataaatgtatttctctacacaaagtttcaatttgaatgagaacatctaataatttactaaaaagctcttttctacatcatgtttgctgtttttcatgatcactcaaaatgtctcctattatctgaacagtagaagtatttctaatacaagctacaaaacagtagttattttcttcaacaccacagtagttgcttga

SEQ ID NO: 421257 - DNA, 567 bp, Homo sapiens
aattgtatgattttgaaaaaagttgtgtttttggtttccccccagagtcagatattaggtatattaaacagtaaattaaattttatttacatgaaaatttttaaaaatccaagtgctaaccaagactttggttttaccaaaatttatattaatgttttttctacctgtatgtttacagattatttcccactgccattctgtaagtaaaacaaaaagagtgaaagaaagaaaaagaaagaaaaaaacaatccagaccagcctggtcaacatggcgaaaacttgtctctacaaaaaaatacaaaaagttagccaggcatggtggcacatacctgtaggcccacctactagggacgctgaggcaggaggatcatctgagtctaggaggtsgaggctacagtgagctgggattgtaccactgcactccggcctgggcaacagagtgagaccctgtctctaaaagaagaagagaagagtagaaaagagaaggaaaaaaaaaatgggagaaagcttagacagatgaagttctcagaatcagctagcccatccaaattataagggcgggttgta

SEQ ID NO: 421258 - DNA, 556 bp, Homo sapiens
tattgacttgtgtatgttaaaccatccctgcatccctaggatgaaacccacttgatcatggtggattatctttttgayacgttgttggattcagttaactagtattttgttaaggattttagcatctatgttcatcaagaatatcggttgtggttttctttttcgttatgtcttttcctggtttgggtattaggatgatgctggcttcatagaataaattagggaggattccttctttctctatctttcagaatagtgtcaaaagaattgataccaattcttttaatatctggtagaattctgctgtaaatccatctggtcctggacttttttatcggtaatttttaaattaccatttcaatcttgtggcttgttattggtctgttcaggtatctaattcttcataatttaagctaggagggttgtgttttcccaggaacttatccatctcttctaggttttctagtttatgtgtctaaaggtgtttatagtatcttgaatgatcttttgtatttcagtggtgtcagttgtaatatcacctgttttatttcttagt

SEQ ID NO: 421259 - DNA, 597 bp, Homo sapiens
tgtatcccagagattttggtaggctgtgtctttattgtcattcagttcaaaaaaattctaaattttcatcttgatttcatttttgactcaatgctcattcaggagcaggttatttcatttccatgtatttgtatggttttgaaggttccttttggtgttgatttccagttttattctgtggtctgagaaactgcttgatataatttctattttcttaaatgtatggaggctagtttcatgacctatcatatggtctatcttggagaaagttccatgtgctgtygaatagaatgtgtattctgcagttgttggatgaaatgttctgtatatatctgttaagtgcatttgttccaaggtataggttgaatccattgtttctttgttgactttctgtcttgatgacctgtctagtgctgtcagtggagtattgaagtcccctacttttattgtgtttttgtctatttcatttcttaggtctgttagtaattttagtaattagtaatttagttttacaaatttgggagctccagtgttaggcgcatatatgtttaggattgtgatattttcttgttggacaaggcctttaccattatataa

SEQ ID NO: 421260 - DNA, 576 bp, Homo sapiens
tttttttttttaaacatagcatacctggttgtaaagcaacatttgttgaaaaactgtcctttctccattgaatttccttcgcatggcctcctcaaaattggggagaattgacacttgaacagtaatgaattttccaatctaccaccatgggaactctccactttacgtcttggatatatgtttaattggagattattctctaatttgagaaaatctagtaactcacatgagcaactattgtctggtacgtagtaagcattcaataaatacttactggataaagtagcagcttaacaaagatactactaattttgctttttctcccyatatactgtcagctagggaaaacctcagaagtaaaggaatgtacacattaccttaaaaaaaagaaaaaacaagtctctatgggatttgccgtaatggttactgagttcagttgtcaaaatgatgttctagcagtaccatggaagggtttgtttcttctttgaataggggaaactaacaagtggctttgtaaggcaggatacagtttgtttttaaaaaggtcctctccctcctcctttctcatttaagttt

SEQ ID NO: 421261 - DNA, 576 bp, Homo sapiens
tttttttttttaaacatagcatacctggttgtaaagcaacatttgttgaaaaactgtcctttctccattgaatttccttcgcatggcctcctcaaaattggggagaattgacacttgaacagtaatgaattttccaatctaccaccatgggaactctccactttacgtcttggatatatgtttaattggagattattctctaatttgagaaaatctagtaactcacatgagcaactattgtctggtacgtagtaagcattcaataaatacttactggataaagtagcagcttaacaaagatactactaattttgctttttctccccatatactgtcagctagggaaaacctcagaagtaaaggaatgtacacattaccttaaaaaaaagaaaaaacaagtctctatgggatttgccgtaatggttactgagttcagttgtcaaaatgawgttctagcagtaccatggaagggtttgtttcttctttgaataggggaaactaacaagtggctttgtaaggcaggatacagtttgtttttaaaaaggtcctctccctcctcctttctcatttaagttt

SEQ ID NO: 421262 - DNA, 595 bp, Homo sapiens
ccccaccactccagcccacattgtatttaagggtatttttccacaggtgggaaaatatcactgtaaccacgtgggatttgaataagaaactttacagatgttttgtygttacctaaattgaatgctatggcttcccagtcagataagtcagaggggaaatgacatcacagacatttgggaaggtaagtaactggtaggcaggcataggaaggagaagatgcaagaggccacagtgaagaaactgtctgaactacttcaagggactcaccaccactgggatgactatgctttgtgtgatacaattcacaggtgttggcagcttattattttatttatttatttatttatttatttttgagatgggatctcgctctgtcaccaggctgcagtgcagtggcaggatcttggctcactgcaacctctgcctcccaggttcaagcaattctcctgcctcagcctcccgagtagctgggattacaggcatgcaccattgtgcctggctaatgtttgtatttttacagacagggtttcaccacgttggtcaggctggtctcaaactcctgacctcgggatctgcccacctcagcctcccaaa

SEQ ID NO: 421263 - DNA, 670 bp, Homo sapiens
attcctggcacacaccaatgttgccagtctctcctcacgcctttttccatgtcaatgccagaaaaagggggccaagaatagaccttagagaaataagcctgcctcacaaaatctgtcctaggacaggtgcaggctgcctttttcagcacagagaactaattagcattcattttctgtaacaagcaagttactaatttgatcaaaaaatccaagtaaatttgcagcttctcttcatcatataatattcatttttatttagcaacatggtcatctcatgctgaatattagttttgagattttacttgactatatgtcttttattcaggaaccgcaaacaccaagkttaatcattaagatggaattaacaaatggctgcagttacctatgagaaatgcacataagagttgttcaataaaacaataaaaaatgtaaaatctacatttgcaccacattttgcaatttatgaaatgcttttaatacctacaatacctattttaaatactcaaaaagcacaaaaacaaaagatggaaatgacataatgaacaacaaactggaaagaaaatgggaaaggatttttattacttctccttttgtctccaaatgtcttgcatgatacttggcacataggaagcactcaataaatgcccacttaataaattatgaatagata

SEQ ID NO: 421264 - DNA, 554 bp, Homo sapiens
catttccatgcctaaaagttactttcattatttggttccttttttttctatagctaacaggaaataaagaaaaagctgacagactgttaagaaatatatacaacattcaaacagcacaaatataagtgaaccataaaaatctcaggaaaattaccattttctcaacaacagttttaattttaaatacttaatattcataggaaatctcctagacacaattacattgacaaggctttatacatttcaaaggaatatgacagaacacttagttaaatgttatattaaagattcattgtaaattaaatattaaaaggtattcaacagatycaactgtggttcaaatccatctgttactacaaactatattttttctttaatttagcattgccatatgccacggcagagcacccaagcttttcttgattttccgtttgaaaaccctccttcaaaatgagtagccatggttaactcatggtatttattcttcactgtagatgatcacagagtcatatttcactaggttcaagtttgaaagaccacagatacaatttaat

SEQ ID NO: 421265 - DNA, 592 bp, Homo sapiens
gactttgccgatgtgactttgtaatgggtagagtatcttagattactaggtgtgccaatataatcacaaggttccttaaacatgaaagacagaggtgtaactttgcgaagaatgaatagagagacacaattttattggctttaaagatagagggaggggccaggcatggtggatcaggccagtaatcccagcgcttttgaaaggcaaggtgggaggctaacttgaggccaggagtttgagaccagcctggacaacacaatacaatcttgtctctacaaaaggataaacattttacaattggctgggtgtgatggcamcctcccatagtcccagccactggagaggccgaggtgggagggtcagttgcctagggcccaggaatttgaggctgctgtgtgctaaggatggtgccactgcattccagcctgggtgacagagatactgactcaaacgaaaagtggagggagagatctactagtcaaggaacatgggcaacctctaaaagctgagaaatccaaggaaataaattctcccctagagaacctttggaaagaaatgtagccctacagacaacttgaatttagagtagtga

SEQ ID NO: 421266 - DNA, 609 bp, Homo sapiens
actaataacaataatcaggatgacaactattatttattgataacctactatatatccagagcctattttaagttaactctcgatatagtttggatatttaccccatccaaatctcatattcaaacgtaatccccaatgctggaggtggggcctggtggaaggtgattggattatggggctggttttctcaccatccctcttggtattgtcctcctgatagtgagtgaggtctcatgagatctggtcatttaagtctgtagcacctcctccttccttgcttctcctctggccatgtgacatgcctgctcccccyttgccttctgccatgactggaagtttcccgaggcctccccagaagctgagctgatgccagcatcaggtttcctgtacaccatgcagaaccaagagcgaattaaagctcttttctttatgaattactctgtctcaggtatttctttatagcaatgcaagaatggactaatacaattctcttaacaggtgggattaacaggtggatatcttctgttgcctattccgttaataggaaatgatgattatgactatgtagattaactctatctggaaagtcacacacatattctttctcaa

SEQ ID NO: 421267 - DNA, 609 bp, Homo sapiens
actaataacaataatcaggatgacaactattatttattgataacctactatatatccagagcctattttaagttaactctcgatatagtttggatatttaccccatccaaatctcatattcaaacgtaatccccaatgctggaggtggggcctggtggaaggtgattggattatggggctggttttctcaccatccctcttggtattgtcctcctgatagtgagtgaggtctcatgagatctggtcatttaagtctgtagcacctcctccttccttgcttctcctctggccatgtgacatgcctgctccccctttgccttctgccatgactggaagtttcccgaggcctccccagaagctgagctgatgccagcatcaggtttcctgtacaccatgcagaaccaagagcgaattaaagctcttttctttatgaattactctgtctcaggtatttctttatagcaatgcaagaatggactaatacaattctcttaacaggtgggattaacaggtggatatcttctgttgcctattcygttaataggaaatgatgattatgactatgtagattaactctatctggaaagtcacacacatattctttctcaa

SEQ ID NO: 421268 - DNA, 274 bp, Homo sapiens
tgaaagtgcaagccctaattattggcatatgtggcgatattgagggtatgcactcaggcctgtgataatcgacttctcatttgctatagaggcaactttttcataccagtttgattatgctttatatatttcttactaagaagaaggaaatgcttgctatataaccaaaagagattcctattttaagmcttttctatgtcacaatgtatgtgtgtgtgtgtgtgtgtgtgtgtgtgtgtgtgtatctgtaaatataatcttagaggtggcagcc

SEQ ID NO: 421269 - DNA, 274 bp, Homo sapiens
tgaaagtgcaagccctaattattggcatatgtggcgatattgagggtatgcactcaggcctgtgataatcgacttctcatttgctatagaggcaactttttcataccagtttgattatgctttatatatttcttactaagaagaaggaaatgcttgctatataaccaaaagagattcctattttaagccttttctatgtcacaatgtrtgtgtgtgtgtgtgtgtgtgtgtgtgtgtgtgtgtatctgtaaatataatcttagaggtggcagcc

SEQ ID NO: 421270 - DNA, 574 bp, Homo sapiens
cctattacacttctcctgtcaactctaattacttatttttgaaataaaaactttgaccttcacaatggtccccagtgccgttcagtgaatgataatctgtttgaatctcttcagctttattagaatttcacaggtctgccatctggtagtaggaaccaaagctcgatcaatatttatacatacaaaatgacacttcctgagaagggatggtttccatgcatggtccatgtttatactagaattacaaacacagccatgacttgtgaatcaataatgattattcctttattaagaaaactgagactttaagcacctgtaagcctttttgtttcaactgttattgactatctttcaaaaatgcattaatacatttgcttgccatggtaaattctgtaaattgaaaaaaaaaattatgattattccatgccatggatgttttagtctttaacagggaagaatcatcatgctatgaaacttagaggacatgaagcttgtgtcaactggtaaaagggaggagagagccmggctggctagataggggtggtgattttaagaccattgcttaccatttgcc

SEQ ID NO: 421271 - DNA, 447 bp, Homo sapiens
agcgatgtgatctctggattgcccattgtggagtagtagtcaaaagttcaggctcagatgctggacaggcctgggttttgtgcgagcttgcgctgggtaagcaaattaacctcagaaaactttttttttgcttatctctaaaatagggacaataataacctcatcttcytaggtcttttgtgagggctaaatgagataatatatgtaaagagattgctatggagcaaacacccagtatatgtcagggtggagatcatttgtttcatttggcaagtactcagaaaatacatatgctgggcatggtgcatgagctatggtttgatgatgttaaaatgaattaaactgtgcagactttaaaatgcactaaatcacatcctcagcagcaacttgcaagggaagtagtttgatgagtcggatggagaaggaatagagaaggaagaccctaga

SEQ ID NO: 421272 - DNA, 447 bp, Homo sapiens
agcgatgtgatctctggattgcccattgtggagtagtagtcaaaagttcaggctcagatgctggacaggcctgggttttgtgcgagcttgcgctgggtaagcaaattaacctcagaaaactttttttttgcttatctctaaaatagggacaataataacctcatcttcctaggtcttttgtgagggctaaatgagataatatatgtaaagagmttgctatggagcaaacacccagtatatgtcagggtggagatcatttgtttcatttggcaagtactcagaaaatacatatgctgggcatggtgcatgagctatggtttgatgatgttaaaatgaattaaactgtgcagactttaaaatgcactaaatcacatcctcagcagcaacttgcaagggaagtagtttgatgagtcggatggagaaggaatagagaaggaagaccctaga

SEQ ID NO: 421273 - DNA, 589 bp, Homo sapiens
ctgtcttcttttgatgtccccatcattttctaaagcacttttcctattttatgataccacaagctattccaggctcatcttgtgctttgcttgctctgaccctggaattagggtgttttaccaatgattcctggttgcttttattacagaatagtatttggaaaccatggttggggagtaaggcatgttattgttattggagtaccattggtttcaggccttctcagtgaacaggactagaaaatgtatgtacatacacatgcacatacatacacatatatacacacatttgtatacatttccatacctatcagtatatatactaaaatccacaagtttatcgcagtacctctaatttcaatttgacataacaagaacctaccccttcrctatttctttatttctaactcttttccattgtggaagttggctaccattataaatgatatgcttgcttatttgttaatcaaggaatatagaaaagtagtattgaaatttctaacccatacccctgtgaaagaaaatctatctgtgtgaagttcttttcatcttcatagagtcaatttactatttccaaggtcatatagat

SEQ ID NO: 421274 - DNA, 534 bp, Homo sapiens
tatagagaaacaaacgagggagagagatagcaaggagcaaagggccttgtaaatgatttatgtgtggccaacctctttgttctgtcccacaccacakgacaagatgattaactggtttgactcatttggtagaacaagcgaaggagaccaatcagagcaagtagaagcaaactccaaggctccagcaacccaaagaactgtcattataaattcactcctcttgcctgctctgttttatgtatgtccctgactaatgccatatttttaatttttgactttgctatttttatatttgccatattataccattacagaaacagaagtgaagtatttgagggtttatacagttgagatatgcatgttcaatagttctattatgttcccaataattacaaatgctcttcctcctctggaaaattgtaaggacacattcccacatctgccatcaacacactagtccccaacatgattcatttatgcttatgttttcatctggggaagacctgggttcctttcaatacaaaaacaaaaagt

SEQ ID NO: 421275 - DNA, 534 bp, Homo sapiens
tatagagaaacaaacgagggagagagatagcaaggagcaaagggccttgtaaatgatttatgtgtggccaacctctttgttctgtcccacaccacatgacaagatgattaactggtttgactcatttggtagaacaagcgaaggagaccaatcagagcaagtagaagcaaactccaaggctccagcaacccaaagaactrtcattataaattcactcctcttgcctgctctgttttatgtatgtccctgactaatgccatatttttaatttttgactttgctatttttatatttgccatattataccattacagaaacagaagtgaagtatttgagggtttatacagttgagatatgcatgttcaatagttctattatgttcccaataattacaaatgctcttcctcctctggaaaattgtaaggacacattcccacatctgccatcaacacactagtccccaacatgattcatttatgcttatgttttcatctggggaagacctgggttcctttcaatacaaaaacaaaaagt

SEQ ID NO: 421276 - DNA, 569 bp, Homo sapiens
gtcattataaattcactcctcttgcctgctctgttttatgtatgtccctgactaatgccatatttttaatttttgactttgctatttttatatttgccatattataccattacagaaacagaagtgaagtatttgagggtttatacagttgagatatgcatgttcaatagttctattatgttcccaataattacaaatgctcttcctcctctggaaaattgtaaggacacattcccacatctgccatcaacacactagtccccaacatgattcatttatgcttatgttttcatctggggaagacctgggttcctttcaatacaaaaacaaaaagtatatctgaagtcaatctttctttctgtagacaggaaataataaattgaaaaaatagaagtttaatggcagacaggaactgtggaagggcatgaaagcatgggaaaagggaagagaaggtaaaaatttacatatcactctttcaataaacaggcaagtagktgggtaggtagaaagcaacatgcactagttctagatgatgctctagaagttgtggggagaagcagaaaagtacc

SEQ ID NO: 421277 - DNA, 578 bp, Homo sapiens
gattgctggactctccaagttttctggtggcaccatgtccccctcatccagatgctggcacccagggtggaagacagtcacagcatgctgggaccagccatggactgagcacagaactgcagcaggcacggaatctgggctggtagtgcgagctgagtgcagcctgcttggmcaagtgggaagaactagcccaacggtgagcctggagctgagtgaagcctgggcagaggcatcactggccgcagagatttctggctggtgaagcagcaccaaaagaatcctgtgtcaattagctggtcacaaagattcaaaagattccccacatatgattggcatcatacttactggaaggcagtcatacaacttaaggagtggagtaatttaaaagtggtgttaatgagccagtttgttgtaatacttggggctgtattttgggaaccacatagagctgtgaatttctctgctaataagtgttcctggaagatttctagttgtttctgctattgcaccttaacagtttgttcaaattctcagggtcccagtgagcagcagaattgagtgaccatcctatgaattgt

SEQ ID NO: 421278 - DNA, 578 bp, Homo sapiens
gattgctggactctccaagttttctggtggcaccatgtccccctcatccagatgctggcacccagggtggaagacagtcacagcatgctgggaccagccatggactgagcacagaactgcagcaggcacggaatctgggctggtagtgcgagctgagtgcagcctgcttggccaagtgggaagaactagcccaacggtgagcctggagctgagtgaagcctgggcagaggcatcactggccgcagagatttctggctggtgaagcagcaccaaaagaatcctgtgtcaattagctggtcacaaasattcaaaagattccccacatatgattggcatcatacttactggaaggcagtcatacaacttaaggagtggagtaatttaaaagtggtgttaatgagccagtttgttgtaatacttggggctgtattttgggaaccacatagagctgtgaatttctctgctaataagtgttcctggaagatttctagttgtttctgctattgcaccttaacagtttgttcaaattctcagggtcccagtgagcagcagaattgagtgaccatcctatgaattgt

SEQ ID NO: 421279 - DNA, 381 bp, Homo sapiens
ctggcacatagtaggtattcaataaacgataatagtccttttctccattactatgatttcaagtgatgccaaaccatgtccaaattttcatgtaaacaaaatcagcactggttttggtcacatgaaaaaataattatctgtgtgcatagatactgaaatttgtagagaaatggaattttagcatcrattgcaagacatcttttgtcattttgtattgcagaggcaattctcctgcttattagtgattgaatccaatgagtggtctcctactaggtatgacagctaagtttccagacattcactgacaatgaaagaatattgtccctttagagaacagtcaaactctctctccgccagacttgattcaaatgtacttggctc

SEQ ID NO: 421280 - DNA, 600 bp, Homo sapiens
cttcatgctgccctccttgacttacatctgcagaattcgcagctcccacggtcaccatttccacttgctttatgatagtgtcaatgttttcctgtatttgttgattagtttttttaagttttctcgtttatctttcccagtaatacataagcttgcaaaggccattaaccatattgggttcaacttatttaaaaaaaatttcttctgtttggcacaatgccagacatattctcttccagtttctcctactgctgtgctgatattcagcctcccatcgccggtttgggtatgagatgctgtcatcagtactttagtagtctatttcatttcatctgaacaatgacccagtgaagcaggtcctttaggagactatgtttacagggattaagcagtgagtccaaggtcacacagatgggtgtggagattcaaactcaggtcwgtgactctgaagggcatgtccatatccattctgctacataaaatcctgtgttcagtacagctttgatggcatcccccagccactaaagtatgagagatctttagtggcacagagtagggttttactgtttggagtaggatgggagaaggtatttattctac

SEQ ID NO: 421281 - DNA, 599 bp, Homo sapiens
ggagtgtctgggttaagatatrgagttgtggagatcaaggttttaatcatgcagatgaaggcttcaggttcttccaaggagcctccagaggcttccaagctcttatcagacataaaaagatgccacactcttagttaattttctcctggatcagggaaaagacctgggaaaggaaggggatctctacagaatgtggattttctccacaagaaacaggtttgcgtggccatttcaaaatatgtcaaagaaatatattttgggctaaaatactttcatttccttcagggcctgctgttatgtgatgctgtactagtgtcaggctggaatttggtgccttattgctacaaagactctgttttgtcagccttaagatctgtgtttgattattaatgctggtcagctgtgcctggacatccaaagggaggagggtataatgaggcatgtctgacacccacttccaatcatggcctgaattaggttttcctgttaactttgtaatgcccttggctgaggggaagggtccattcagttgattggggggcttggagttttatttttgacttacaaatgtatagccagtgactaaccaatggtatttc

SEQ ID NO: 421282 - DNA, 599 bp, Homo sapiens
ggagtgtctgggttaagatatggagttgtggagatcaaggttttaatcatgcagatgaaggcttcaggttcttccaaggagcctccagaggcttccaagctcttatcagacataaaaagatgccacactcttagttaattttctcctggatcagggaaaagacctgggaaaggaaggggatctctacagaatgtggattttctccacaagaaacaggtttgcrtggccatttcaaaatatgtcaaagaaatatattttgggctaaaatactttcatttccttcagggcctgctgttatgtgatgctgtactagtgtcaggctggaatttggtgccttattgctacaaagactctgttttgtcagccttaagatctgtgtttgattattaatgctggtcagctgtgcctggacatccaaagggaggagggtataatgaggcatgtctgacacccacttccaatcatggcctgaattaggttttcctgttaactttgtaatgcccttggctgaggggaagggtccattcagttgattggggggcttggagttttatttttgacttacaaatgtatagccagtgactaaccaatggtatttc

SEQ ID NO: 421283 - DNA, 573 bp, Homo sapiens
agtaacactcagaattcagagtatttcaacctgtaattctacacagatgtgaatctacatccaggctacaattattcaagcatgaagacaaaataaagatattttcaggcatgcaaatctgcaaacattttatcaccaatgaacttcttttcagaaagttattgtaggatatgctccaccaaaaagaagtagaacaagaaaggcaaagatgtgggattggatacacagggattataataggagttactggatacatcaacagaacagcgagaaaagattattgagaacacggaaatacccccacaggaaaacaagctgaaagtgagaatgggactgggaggtctgcagaggaagggcaaggaataatcacttttaataaaacacttttttgcattatattccttttcaaaacatgyatctatatcaactttttaaaaattaaaactgtaaaaaaaaaaggatgttggaaaacaaataaaaaggaaagggagcatagaagaaaaggggcaaaaaagtgggcagagaggagataatttggcaaaaagaagttaagaagatgcaaatggcctcagg

SEQ ID NO: 421284 - DNA, 419 bp, Homo sapiens
ggcaaaaaagtgggcagagaggagataatttggcaaaaagaagttaagaagatgcaaatggcctcaggtcaaagcagaatctacaccacactgtaccatggaggaagatagtatattttgytgaaagaattaatgaatttccttaaagaattaattagcaagttgaatgggaagacaggacgtagaactaaagaaagacacaatgtatatcactgagatgagatcttactacacaaattaaaagcctgcagacattcaaggaaatatcaaggaaggcttgcagaagaggtgatggctgagttggaccatgaagcaccgagaagatgaggatggcaagcagaggaagcagggcctccaggtgcatggagcagcctgggcaaaggcatggacagaaggctgagccagccccctggaggaca

SEQ ID NO: 421285 - DNA, 419 bp, Homo sapiens
ggcaaaaaagtgggcagagaggagataatttggcaaaaagaagttaagaagatgcaaatggcctcaggtcaaagcagaatctacaccacactgtaccatggaggaagatagtatattttgctgaaagaattaatgaatttccttaaagaattaattagcaagttgaatgggaagacaggaygtagaactaaagaaagacacaatgtatatcactgagatgagatcttactacacaaattaaaagcctgcagacattcaaggaaatatcaaggaaggcttgcagaagaggtgatggctgagttggaccatgaagcaccgagaagatgaggatggcaagcagaggaagcagggcctccaggtgcatggagcagcctgggcaaaggcatggacagaaggctgagccagccccctggaggaca

SEQ ID NO: 421286 - DNA, 596 bp, Homo sapiens
ataagtacactttatgtccttgtactttaactaagttattttttctggcatgtatcctgcttagacatgtcccaacatgctcaggcatttcctggcttacagcctacatcccttccttatttggaaatgttattattctcctagtttcccataaacaacctccttcctttctttgttctccatctcacatttacctatttaggaaagttgtaagtttttagccaatcagaatcagtctacattgtgcagtccagctccagccaatggagataggacacagcagtaaggaaccaatgtgtcagggataaaaacctctgcttttctttgttcagggtgctctcatgacaatcaggcttccaagaagcaccctttctgcagaaattaaaattgccttgctgggaaaattcatattcaagtgctatttcctttgtgacactgaaaactgatttctaacaagaatgactagaaagatggtttggtaaataaaaaggaatyatggcctcaattctcacttctctttacagtcgtaataagtgtactcattcttgttgggtgttgtgtcataccatacatctgtgaactagtacaaagactta

SEQ ID NO: 421287 - DNA, 601 bp, Homo sapiens
tggcttataagggcatcataaattaagtaaataagtctaagtaattttcaagctcacatgacctaagtatgactttactaaacaagctagctttaaaattattggtggaataaaaatagaaatgccttcagggttgtcagcatacattctgtctaaattttatgtttgtcttggctagatattttaaaatgtcaatgttaattcaagctaggagctgcttggggagagcctgcctcctattctattcaaagtctcactgagataaatgcatatctgattgcttcctttggaaagtctratcagaaactcaaaagaatgcaaccatttgtctcacacctgtgatctgataggccccaatccccttctctgcctcaagttgtcctgccttctggaccaaaccaatgtattttacctatgttgattgatatctcctgtctctcttgttaaaagtaaaatttaagtacaatgattgggataaattttttaggtaaactttttgtgtaaattaaaatcttaaagttatttttgatgctcatttaatatctgggtctttccaattaggaaagcgttgtgatagggaaaatatgtttctaaagttgtg

SEQ ID NO: 421288 - DNA, 588 bp, Homo sapiens
tgtcctgccttctggaccaaaccaatgtattttacctatgttgattgatatctcctgtctctcttgttaaaagtaaaatttaagtacaatgattgggataaattttttaggtaaactttttgtgtaaattaaaatcttaaagttatttttgatgctcatttaatatctgggtctttccaattaggaaagcgttgtgatagggaaaatatgtttctaaagttgtggaattattcttatctataaatgyccatatctgatagttcaggatttcttgctttttagggtttcactaaagttttaggttactaaggataaacattttagttaacatgtaattgtgtatacaaaatgtgcccagaaagggttatgttattagtggaaaaaagagtaattttgtgcaattcagaaattatctaaaagttagttcaaattacagactgaaaaggttatttatgaaacaatgtagtgagaaatcattaagtagaggagaaagatgtgaaaaaagtttaaataataaaacattctccaaatcctgatagggaattggagacattttgctaattaacattttcataagtaaagctctta

SEQ ID NO: 421289 - DNA, 588 bp, Homo sapiens
tgtcctgccttctggaccaaaccaatgtattttacctatgttgattgatatctcctgtctctcttgttaaaagtaaaatttaagtacaatgattgggataaattttttaggtaaactttttgtgtaaattaaaatcttaaagttatttttgatgctcatttaatatctgggtctttccaattaggaaagcgttgtgatagggaaaatatgtttctaaagttgtggaattattcttatctataaatgtccatatctgatagttcaggatttcttgctttttagggtttcactaaagttttaggttactaaggataaacattttagttaacatgtaattgtgtatacaaaatgtgcccagaaagggttatgttattagtggaaaaaagagtaattttgtgcaattcagaaattatctaaaagttagttcaaattacagactgaaaaggttatttatgaaacaatgtagtgagaaatcattaagtagaggagaaagatgtgaaaaaagtttaaataataaaacattctycaaatcctgatagggaattggagacattttgctaattaacattttcataagtaaagctctta

SEQ ID NO: 421290 - DNA, 546 bp, Homo sapiens
gtcttaattaaagttaaataaaaagtattgcaaaaatgcatcagcagtttggcaattctctttttgatatagttaaacatgaagctggacttagtgtggagccaaatttcacatacatgcttgcattgcttcacactatgtctactgttttgcatggatagtgttggagtacttattggccatgtgctaaaagtggatttcttgattgctcagaatgtatgataatattggtgaacttaagatattgaattgtatmtcagaaataaaatattcaaggctgggcatggtggctcacacctgtaatcccagcactttaggaggccgaggtgggtggatcacgaggtcaggagttcaaggatcaggctggtcaacatagtgaaaccctgtctctactaacaatacaaaaaattagccaggtgtggtggtgggcacctgtaatcccagctacgggggaggctgaggcaggagaatcacttgaacctgggaggtggaggtggaggttgcagtgagccgagattgtgccattgcactccagcctgcgtgacg

SEQ ID NO: 421291 - DNA, 546 bp, Homo sapiens
gtcttaattaaagttaaataaaaagtattgcaaaaatgcatcagcagtttggcaattctctttttgatatagttaaacatgaagctggacttagtgtggagccaaatttcacatacatgcttgcattgcttcacactatgtctactgttttgcatggatagtgttggagtacttattggccatgtgctaaaagtggatttcttgattgctcagaatgtatgataatattggtgaacttaagatattgaattgtatatcagaaataaaatattcaaggctgggcatggtggctcacacctgtaatcccagcactttrggaggccgaggtgggtggatcacgaggtcaggagttcaaggatcaggctggtcaacatagtgaaaccctgtctctactaacaatacaaaaaattagccaggtgtggtggtgggcacctgtaatcccagctacgggggaggctgaggcaggagaatcacttgaacctgggaggtggaggtggaggttgcagtgagccgagattgtgccattgcactccagcctgcgtgacg

SEQ ID NO: 421292 - DNA, 614 bp, Homo sapiens
tcatgtgactttagcaatctttgagaaataaagatgtttttcaagattatgggtggctgggagtggtgggtcacgcctgtaatgccagcactttgggaggctgaggtgggcagatcacgaggtcaagagatcgagaccatccttgccaacatgctgaaacccgcatctgctactgaaaagatacgaaaaattagctgaggcatggtggcgcatgcctgtagtcccagctactcgggaggctgaggcaggagaatcgcttgaacctgggaggtggaggttgcagtgagccaagattgcactactgcactccagcctggcaacagagcaagactccatctcaaaaaaaaaaaaaaaagaaagaaagaaaaaaagaaaaagattatgggtaaaatacaaatgtcttcaaaatgtaaacatgtagtcyaaattatgttcaaatattaggtttgctaaatgctgtaaggtcataaactgtttctttggcttttgaaaattgtttaacttacctgctttccagctaggtaaggtctgggaacatgtggaattggccacaccctagctatgctgcaaatagtcaaaacttatcagaatgtaatttaccaggttttacctta

SEQ ID NO: 421293 - DNA, 584 bp, Homo sapiens
taaacaggattatttgatgtgtttaggtacatgggccaaaatgatgttcaatcttctttaggttatatttttgtgaataatactaatatatattcctaaattgtatgggatttctaaaattctaatgtctaagtatatgctatcaattataattatggttattatgttaagttattgtaaaccacaaaaataatgaaattttcttgccagtgttatgtgcctaatttggataaacaactggtatccaagaggatataagtctaatgttaactaarcatggactcatggagaaacaggatggccatcttgtccttcctgagtccttaaagcttttattattaaaacttctgcattccatgactcatcgtggaaaagatataatgatcccaattgaatacattggtaaagtggcttacaaattactaaaataatttataaccgatgcttgatcccatattcctgggaaaacaattaaagcttcaggtacatttggtcgcctggtgggcaacttaaacattttatagaagtatttcatcccattttaattttcagtgcatgttttctggttgtataaaagctttccc

SEQ ID NO: 421294 - DNA, 582 bp, Homo sapiens
ttatgtggtttaaagtaaaagagacaatgattagaaatgtatccctcatgataggttccatagcaaactttactgtataggccacacttacacaacagactttaaattctcttctgaaagttatgctaaataatagaattagctaaccagaaaagtacctgtgcagctgctggcaattttggcctatggggaattacatcaaatgaagattagagaaattcagtggtaggggattgatgaagaaattgyttagtcaagagagtaaactttatctagctcattatttgatctatttaatttgaagtggtttggtttatggagaccttgggtgaggagcatactgcaaactcttggtattatcctcccagtagtctctctggtgcactgtattctctcaaaggttttaaatacttttactcagccatctctagaatgtcatatggtctcccttcaactggaataacaggggctaaaagaaatgtgcgaccatgaggaccctgtaacctataaatgatgtgctgagaccagaaacccaaaataatggtaactgagagtggcgttaagcccctaagtttgtgtcac

SEQ ID NO: 421295 - DNA, 582 bp, Homo sapiens
ttatgtggtttaaagtaaaagagacaatgattagaaatgtatccctcatgataggttccatagcaaactttactgtataggccacacttacacaacagactttaaattctcttctgaaagttatgctaaataatagaattagctaaccagaaaagtacctgtgcagctgctggcaattttggcctatggggaattacatcaaatgaagattagagaaattcagtggtaggggattgatgaagaaattgcttagtcaagagagtaaactttatctagctcattatttgatctatttaatttgargtggtttggtttatggagaccttgggtgaggagcatactgcaaactcttggtattatcctcccagtagtctctctggtgcactgtattctctcaaaggttttaaatacttttactcagccatctctagaatgtcatatggtctcccttcaactggaataacaggggctaaaagaaatgtgcgaccatgaggaccctgtaacctataaatgatgtgctgagaccagaaacccaaaataatggtaactgagagtggcgttaagcccctaagtttgtgtcac

SEQ ID NO: 421296 - DNA, 582 bp, Homo sapiens
ttatgtggtttaaagtaaaagagacaatgattagaaatgtatccctcatgataggttccatagcaaactttactgtataggccacacttacacaacagactttaaattctcttctgaaagttatgctaaataatagaattagctaaccagaaaagtacctgtgcagctgctggcaattttggcctatggggaattacatcaaatgaagattagagaaattcagtggtaggggattgatgaagaaattgcttagtcaagagagtaaactttatctagctcattatttgatctatttaatttgaagtggtttggtttatggagaccttgggtgaggagcatactgcaaactcttggtattatcctcccagtagtctctctggtgcactgtattctctcaaaggttttaaatacttttactcagccatctctagaatgtcatatggtctcccttcaactggaataacaggggctaaaagaaatgtgcgaccatgaggaccctgtaacctataartgatgtgctgagaccagaaacccaaaataatggtaactgagagtggcgttaagcccctaagtttgtgtcac

SEQ ID NO: 421297 - DNA, 599 bp, Homo sapiens
ttctagaacagaccaggttttgttttttctcttgcaaatctctataatgaaaatttctaagagcggaggtatctgccccctgaagttcccattaaatcttttaaccaaattcatttcctcttgcctagagaccttcaagcttcagataatcatgcaacaaaggttccagccaattccaggtgaagacaccgccccartgccatcaagaagctactccacctccactagacagaacagggtgagagttccatgatccccaagtcaacatgaagcagttacagaaaaaagaccatcagtccctctgcctcccataaagacttatggagatcacatccctcacgggggagatgatgcagaaaaataggttctggaggcagagaacataaggccaattcacacttcagctatgagaggaaatatcctctccatagggcgtaggccaactcaatgactttgtcattttacttcatcctctccatttacatagggcttaccccaagtaaccaatggaatcctctagcaggtatttaaactcccaaaaattctgtagtggggcctttgagcccctatgctcgggcccactcccacgctgtggaaca

SEQ ID NO: 421298 - DNA, 542 bp, Homo sapiens
gaaatgctccttagtaagtgtaacaagttgcaaaaatttaacctagatcacaacttagaaatatagaaaaagtataattaaaaatctttttattgtaacttgtctggccttcctcctaagtcccctacctactagttacaaaaaacaaaacaaaacaaaacatttcactaaatgtccaatccagttaaaaacttaggatctgattagcaaatcacctttaggcagggttcaccctctttttgataaaattgttctactttcagctggcctgcaccctgcccctgcttctctctctgagatgctgtcccacgtgtgggaggggtggggtatggtttgcatgacctcacctggtgaagatgagctgggtggcctgaggacagtgtcctgtkccttctttggtcactgttttttccttctaaagctggttactcttggccttcccaggatgactattcccagaagtttgtatttttgttgaggtataaagtaaaatcattcatgtttcaaggttagtgggagggactcagccaattagctaccaa

SEQ ID NO: 421299 - DNA, 583 bp, Homo sapiens
atgcattttattaatccctcatcctcttcaccccattgcctctcttctccttctaaggcttcttctaatcagactgccatctcttctatacccaataatactaaagtattatacattatattactatatatgtaatatataataataaacaattataaataatatataataataaacaatgataatactamagtattatatattatattatattacaatataaaatattgtaaaagtaaatgatctaagatgaactttaacaattaaaatagaatatcaagctataaatgcctggttgaaatggatcaaatattctgtccacacgttaaacaaaaacaattgttatgcttgtgcacacggccggccagaggcccagattgtcccctttccactcggatggtctcccagtcaaccagacatgggttacatggtaggtctcttctagaattctatgacttgagacaataaatcatgccaagctctctgcgatatcccaaagtccaacaccctgtgggtcacgctcaagggccatccaacttccatctcccaatgtcaatttcacctcgtgtctctcatgacaaag

SEQ ID NO: 421300 - DNA, 461 bp, Homo sapiens
caggtgacctgacaagaaacatgcaggaggctgtgtgcagctgagttgaattctgcctctgcataaaggagaaagaaattaccaggactttttcaatgagagtcgtttcttaaaagatatctgatcggtgcagtgcttcacttccaacttggctgcaagagcttctggaggtggattaagtttggcaacttggaggtttacgcagcgtcacttaagaataagaagactgtgatctcagaagcaacagctgggcagacaagagcatgggctgcagcacaaaaataaaaatattgttgatgttaggaaagtcgatttttctctcatggctccctgaggttacaccagacaggatcccctgggttctatgtttctataccattattgtgctgatgacaataccagaaactccaggtgwgactttctccgggtcacacaacaaagggaagagcttcatatcctca

SEQ ID NO: 421301 - DNA, 566 bp, Homo sapiens
cctgctggtcacgctggccctctgctgctaccagggtgagtacatcagtcatgagtctagctccagcccctgggaagcaccctyttccaagcacgaggtcacctattcaggctggggttaggatctgcacaaaaccaaaattccaaacctttttctgtgcttgttgaacaagcccctcatcaagttcagagctatttcttctactccccagcacctacgaagttttattgaaaatcagtgcaggcaaatattaggaattcttctgcctgagcttcactcctgggtgggatctgtgtcagatgatgtaatgtgaggtctggggtgaatctgggatccgccacttcccagccctttgaccttgggcacaatgctcaccctccctgagcctcctcctatcactggtagttagcgcttctgccaggagaggctatgagaatggagtaagaaagattaatactgtcaaaagagtctagctgtgggctaagcatggcgctcatgcctgtaatcctagcactttggaaggtcaaggagagtgaattgcttgagctcaggagtttgagtccggc

SEQ ID NO: 421302 - DNA, 632 bp, Homo sapiens
aaaaaattcctcagcgtaaggaaaatgatatatttcattatagcatctaccttttactaacctgtgaggcctgacattccataattcagtatttttattcttcactttgtaatcaaagaaaagatatatacataatatatttctagacacatcacaacctaccctaatatatttcaccttaaaacactagtaagaggagcaaaattgtgagatttttgacctagtattagtctctaagtattttctcagggagctaaaaaaagagaaaggccttctttctttccaaggaagttaaagatgtgtttatcaacacatcttcccatcagtacttctttgggaacatgggaattaaactgaatatatccattatatagataaaactgaagcagagaaaagtaccattgttgagaaaataggtcgttgataataacatgaaaaaaaatcctaaaaatcttggcacccaacccatagytcttgccctgccatcacttatttagccctttaaagtaagctaaaataagtttctgtggaatcaattctcatacgaaaatactattcttaaaacagcataggagctggccagtctgccctccaggtccatacaccttgaggctgggacatcccacagtggg

SEQ ID NO: 421303 - DNA, 615 bp, Homo sapiens
gctcatctgtatccaacattgcatttacgatgtatcataatccaaggtttattttatcctcagaagcaactttgcctcacttttaccttttaatgcacttttgtatttgtacctcatgatatccaaacattcaatgaatttttggtacacatgtttcttccacctgttaaatcaatagattatccaagtatatgcataactgcaagtaggtaacctaatttttgctgatacctttattggctattctttactcttttttattttttattttttattttttttggctgctgaattattctgggtgataggacccttacttacaaaacattccaccatttaggatatcctaagactgcccccacatatgcccgcgcatgcacacgaagcactgcctcccacaaaatgagctttgaatttgcaaaaggtacagaaggcctacgggagtcatgactccaggaataaagtctgggcatataattcaccctgagccaaagcaaactttaaaagtgccatttaaaaaccccataatgggtaagtaatgagtgaattagaagtttggtgaattttatgygaaatgaaaataagaaatttcactacacacatagctataattta

SEQ ID NO: 421304 - DNA, 675 bp, Homo sapiens
tggctttcactgtaattcctactcaaaactccctttcactgattatgagcaggttgcttagctaaaatgagaaatacagcaagaagagggatggaaagagctggcttaaactttcccaaagacatcatgaacactgggaacaggtcatacatataccatttttatttctcagtcctcagtattagaatattgtgttcctagaggctttgtgaaaattggaatacattgccatgacctgcacaggatagaggtggttaatatggcttaccttgcttgtagatgtttactcttgatccctaagggaaactggaaggaaagcatgctgtagagaggacctgctttgagagtatgtgtcctctgggacaagtggaatgaaagagaggatagaggcaaagagaaaaaaaggtggagatggggtgagacttgctggtggacagttgcaaagaaaactcatgatgagaataacatcacatttcttgaagaagctgaactgcattgatgggaagttgaggcagagtttgaaaagaagatatactgtctgcaaaaaagaatcaacggagatgtcaggtatcttgatgcaccctgagtctatgagatgcagcttaatttaatttartgatatgagtaggccatttcataagtggtggaaattaccataaagtgtttgcagctaat

SEQ ID NO: 421305 - DNA, 597 bp, Homo sapiens
ccacatacactgctactgcatttatcatggagggtatagggttctgccttgtttatgtgtgaattttttaaaaactagatttaataccatgcaccagcattaattgtatttatttcttttcttggttatgaaaataatcagtcaggcatagtggctcacacctgtaatcccagcagtttggaaggtggaggtgggtggatcatttgaggtcaggagttcgagaccagcctgaccaacatggtaaaaccccatcattgaagataaatgttttatatccatggttaacagatgagatgaccatgaaatgaacaccagtgtactgggtggagcagcttatctattcagtcttckgcactaaaacctgtgaaacaatatcatcttgccttatttactaacaaatacaagtgcctctaaacttagacagtttccaaatcatggaactgatgagcacttagctcctgcagagagctctggatgatgggtcgggagaacaaagacacaatacatcaaaacagcattaacaagtaaacaggttttcaaagctctctacatgcaaatttacacaattatccttttaatttttatcttcatatatat

SEQ ID NO: 421306 - DNA, 597 bp, Homo sapiens
ccacatacactgctactgcatttatcatggagggtatagggttctgccttgtttatgtgtgaattttttaaaaactagatttaataccatgcaccagcattaattgtatttatttcttttcttggttatgaaaataatcagtcaggcatagtggctcacacctgtaatcccagcagtttggaaggtggaggtgggtggatcatttgaggtcaggagttcgagaccagcctgaccaacatggtaaaaccccatcattgaagataaatgttttatatccatggttaacagatgagatgaccatgaaatgaacaccagtgtactgggtggagcagcttatctattcagtcttctgcactaaaacctgtgaaacaatatcatcttgccttatttactaacaaatacaagtgcctctaaacttagacagtttccaartcatggaactgatgagcacttagctcctgcagagagctctggatgatgggtcgggagaacaaagacacaatacatcaaaacagcattaacaagtaaacaggttttcaaagctctctacatgcaaatttacacaattatccttttaatttttatcttcatatatat

SEQ ID NO: 421307 - DNA, 597 bp, Homo sapiens
ccacatacactgctactgcatttatcatggagggtatagggttctgccttgtttatgtgtgaattttttaaaaactagatttaataccatgcaccagcattaattgtatttatttcttttcttggttatgaaaataatcagtcaggcatagtggctcacacctgtaatcccagcagtttggaaggtggaggtgggtggatcatttgaggtcaggagttcgagaccagcctgaccaacatggtaaaaccccatcattgaagataaatgttttatatccatggttaacagatgagatgaccatgaaatgaacaccagtgtactgggtggagcagcttatctattcagtcttctgcactaaaacctgtgaaacaatatcatcttgccttatttactaacaaatacaagtgcctctaaacttagacagtttccaaatcatggaactgatgagcacttagctcctgcagagagctctggatgatgggtcgggagaacaaagacacaatacatcaaaacagcattaacaagtaaacaggttttcaaagcyctctacatgcaaatttacacaattatccttttaatttttatcttcatatatat

SEQ ID NO: 421308 - DNA, 434 bp, Homo sapiens
tgataaatgaataaacactatctgtatgagtaaacacagcagactatgaaggaaaacacatgaccagcacgtgctaacacgtcaattaacttcaaacatagtatgctaaatgaaggaagtcagattccaaatatatgtatatgtccatttctattaagcaaatgggaaatttrtggagatggaatgtcacagcagtattgcttagggctggagatgggagtggggattaactgccagtgcgcaagagagaatttgggtgagggaaacatatttaaattagatcgtggtgatgggtgcacacagtatcaatttaataaagcatcaaattgtagaccttttcagtgggcaaactttatggtgggttcacacccaatataggtgttaagaataaattaatgttacggaaattcttgtcgggtttttaacaagccaag

SEQ ID NO: 421309 - DNA, 633 bp, Homo sapiens
tatctggttttggtttcaagactatactagccatttcatttaattgtacatgtaggrtattctaatttatggaaaactattacatcttccttgatttttttttttttttagaaattacttctagggatctatatggtagagtccatggagaattgttttaattcttcattcatgtcttcagtgggtataggattggtcatattggtcatagttttctgctcggatttcaataagaaacttgtggaagaacctgaagggtgggatctttgagggagcctaagacagagcaagacaagctaagaaggagggcagtgccacagcagaactgccattgatgccccctcgcctagattgcggaagagacatccagctgtagacactgaggtgcaggaaaacaatggagcaccatcagagaaagcagtgcccaggaacaaggaggcactgatggtggcaaggggcaaagacagctgccacgaggctgttcacatgagggtctcaggctgcatagacacccacaccagctgaggggtcctggttttcataaagtgtgtggctcagccaggccaccaacaagcagttcacaaacagtagtaatacgacactttccaaagaccttacttgagtaacacggtg

SEQ ID NO: 421310 - DNA, 633 bp, Homo sapiens
tatctggttttggtttcaagactatactagccatttcatttaattgtacatgtaggatattctaatttatggaaaactattacatcttccttgatttttttttttttttagaaattacttctagggatctatatggtagagtccatggagaattgttttaattcttcattcatgtcttcagtgggtataggattggtcatattggtcatagttttctgctcggatttcaataagaaacttgtggaagaacctgaagggtgggatctttgagggagcctaagacagagcaagacaagctaagaaggagggcagtgccacagcagaactgccrttgatgccccctcgcctagattgcggaagagacatccagctgtagacactgaggtgcaggaaaacaatggagcaccatcagagaaagcagtgcccaggaacaaggaggcactgatggtggcaaggggcaaagacagctgccacgaggctgttcacatgagggtctcaggctgcatagacacccacaccagctgaggggtcctggttttcataaagtgtgtggctcagccaggccaccaacaagcagttcacaaacagtagtaatacgacactttccaaagaccttacttgagtaacacggtg

SEQ ID NO: 421311 - DNA, 329 bp, Homo sapiens
tggatgcaatatactaaaaatcacaagacctaaaatcagtaatatcatgtttcaattagggaactatagaaaatagaggaatgcaatggaaagcaagtaaaagtaataaacaacatcacagaaatcaataaaattaaaacactgaratcatcagaaaatcaataaaaccaaaagctggttctttgatatgctcattacaatgaatgaattgatatgcaggctaaccaagaaaaagaagataacacaaatgaccaatttcagaaataaaagaggagccatctctactgaactgttaggcattaaaaggaatatcatgaacagttctatga

SEQ ID NO: 421312 - DNA, 427 bp, Homo sapiens
caacaaactaactaaataaaaatcagacaactctttaaaaatgggcaaaagacttcaacatatatttccctaaagaagatacagccacagatagtagcacaggaaaagctgctcaggatcattagtcattagggaaatgcaaatgaaaaacacaagcagccaccaatatacacctactaggatgatttaaaggaaaataagtgtgaagaaggacgtaaagaaattgtwaccctgatacattgatggtagaaatggataaagttgcagccactgtgaaaaacagtctgcagtggctcagaaggttaaatatagaacccctgttggacccaggaactctactcttaggcaccccaaagaatagagaacggaaatcaaacagatgtttgtatactaatgtttgtagcatcacttttcacaggagccaaaa

SEQ ID NO: 421313 - DNA, 631 bp, Homo sapiens
gtggtgataactccatcaagactctaaagcatctccccaattcttactggacttgatccatgtcttgaggagacccagctatgacacgcaggcaccacattgtcctacttagtgcctcccttagtgtttcagaacctgtgatttgatcagaaacatgggctttctatgttggtttcacactaaggactatgtgacacctgcaggaagatgtctacatagctacctggattatgagatcatgacgttctcttatgtgagggatggcgtttgggatctctgcaggtgtgggtaattccaggcatagagggtgctggaactcccttgcatggtgaatagtgatctcttcactggctgataaatagaggttgtagttcaggccttcaacattagcaccgtwtgagtaaacattttgactcttcactatgcagcaagtgaaccagggcacatttatttatgtggcttagtttctccatctggcatgtgggctcagtaaacaagctcacaacatatgggcatgatgatgatgaggtgtgaactaatgtaagtaaagtatgtggtctgatttattaaattaagaaaaatggcactgagagttgtgctgggtaaacacaacatttttttcctaggggaa

SEQ ID NO: 421314 - DNA, 427 bp, Homo sapiens
caacaaactaactaaataaaaatcagacaactctttaaaaatgggcaaaagacttcaacatatatttccctaaagaagatacagccacagatagtagcacaggaaaagctgctcaggatcattagtcattagggaaatgcaaatgaaaaacacaagcagccaccaatatacacctactaggatgatttaaaggaaaataagtgtgaagaaggacgtaaagaaattgtaaccctgatacwttgatggtagaaatggataaagttgcagccactgtgaaaaacagtctgcagtggctcagaaggttaaatatagaacccctgttggacccaggaactctactcttaggcaccccaaagaatagagaacggaaatcaaacagatgtttgtatactaatgtttgtagcatcacttttcacaggagccaaaa

SEQ ID NO: 421315 - DNA, 560 bp, Homo sapiens
cccaacaccactctgcatcaactgctgtggagcttggtaccttcagggctttggtacattggctgatgacaatggaggaggaaccctgcaaaatgaagcttctttctatgcacatatgagataaccctggagacacacagaaatgttcaataagcatattttaggagactagagagctgtatgaacaggtgtgtaaaagtcagtaaatcttgattattttgtatccataggctggcagggcttgaggaatctggagttcacagatgcatagtgcatatgccgaaattttatgtatgaattattttaataaataattattcggtgcctagtatgtctggcattatgctaagtcctgaatttataggtctctaaatctagtggtaatgaagaggtatcaataartaacttcgatgatgatgaggaagaagacaatgatgacaactgtcatttgttgagtattaattatatgcatgcattgtgctatgtaatttacatatattattactaatctttgctacagccatacaagatagtgcttgataagtccattttaaaggaag

SEQ ID NO: 421316 - DNA, 584 bp, Homo sapiens
gtagctgggtggctaacctacgttcagaacaatttggttgctgtttcaagctgcattcttccatcagggtctcaacaagaaaaagatggcacactccaattagaagaatttgagaagggtatattttcaaagggaccgttgacaaagatgggagcagagtgtagcaaaaggacaaaggataacaccaggacagagctggtgacagtagaggatagggagagattaccagggcctcgaaatagagaatctatagaaaggtcaccttgagaggagctgtgagcttcagaatgtagagcagtgaccattgatcaagggacacagctagcctggggcaatcatacaggaagaaagtcaggaaaataaataccctagtgccactctttttcattcctstcttctcccaccagggcttcctattggctgaatccagcagaagccaagggtaaaggaacccattgatatagttgtacaatatatgatgaaggctcccccacgtatcaccttggcactgcccattgacattcatgcctactcaatggcttctaactgaaagcacctgcaactctttacttgatggatttcct

SEQ ID NO: 421317 - DNA, 613 bp, Homo sapiens
ggcagtgacacagcctcagcagggagtgtgccttgtaaagctgtctccgtctgaatcagtctgcctaagtggtttcctgcagtccacaaaatgcattcacatgtggtgtctacatcagataatgttgtatcttgtggcttctatggggtctggaagtagtgaacaacataggaaagtgagaagtcattcaaatgctggaaggaagatggcaaagataaagctgcaaacagtgtcactgggaaacaaagattgaggtctgtacagggtgaagctttaggagtgcctgttaaaggctggagtctcagggcatcctagtgacttttctttctcctgcctcttttgtctccttcttacttttccagaaagaagttcctgatgggagcatttttcccatggctactatctcacctgtagtttgagtgctatcctccaagaattagccttccctctttgctaaggaacaatcagagccaatgcactgtggccacagccttgtgaaactcggaaaagatgctgatgcctgaggtgcaaaacacactttcatgtacagtgtyttcttttcttcctataacaatcttataaaattattagggatgaaattattctttctaga

SEQ ID NO: 421318 - DNA, 557 bp, Homo sapiens
caataaagagatcaaactagattgatctaaagtcctttattgccttgtttaagattctaycctaaatggttaaacagagaaggcaagacagttcttgtgcatttggctacataaatgagccacaacatgtactttatggttcagttactttcattttgttgtttcctaggatataatcttctgggctgccttgtcccaaatactgggtaaccctgctctccatctggtacctattctgtgggcattgcagggactttcatttcctgtattccagtctggaatctttgagacccctaatttcaagttggaaggggataaaattggccctgcatttctgaatttagaaaagttaaacattctttagtccatttgtgtcgtgaacacgtacacacacacacacacacacacacacatcacacactccaaacaatgtaattaatatgtaacaaatgccgtgcataatgataacattgattttaacttgtagatttatacaattgagtcattatactattttatacgtaaatctacaaattttgattgtaagaaataaaata

SEQ ID NO: 421319 - DNA, 594 bp, Homo sapiens
gtattctgtttttaggtctttgagaaatcaccacactgtcttccacaatggttgaactaatttacactcccactaacagtgtataagcattccttattctccacaacctcaacaacatctgttattttttgactttttaataatagccattctgactggtgtgagatggcaacatttttttaggacacagaagcagtaactgatttggggaaaacgataaattagacttggccaaaaagaagggcactgtttattaggttgtaatcaggttataggagaaccaatagagatggtgccagaacagagctggtaacagcagagggcaaggagaggytaccacaacctagaaggagagacttttgcagcacacatggcttgtgatcttcagaatgtgatctggtcaaggttgcgtcccacgcctgaggcaatccagtaggaagagagccagggaaataaacagtctaacagcattctcctccatctctcccatttctcaccaggtttctctcttggcagaatccaaccagaagccaaaggaaaggaagccggttgatatgattgcaggagacactgtagggaccccacacacatcac

SEQ ID NO: 421320 - DNA, 704 bp, Homo sapiens
actatttaacattcttgcctcaaattgaccatgaagaacataaactttactacttgttaagaacaattactataatttttccagcaaacaccaagcataacaacatcatatgggaaatacaaatttagtagcttgttaacaacaaaatacaatactgaggctttttgtgctttgtcctacattgaggggtaaggaagcaataaagtggaacaagtaataaaatagctggtactaaactttaaattaggcttaaagaagtatacaagtgtattagtcatcattaaaattattatgaagactacagtgtggagaagtttgtagtttaaaccctttgcttttaaagtaggtaccaattaaaattayagctacaaaataagtggggtggttctgatgaagactttcttcttgaccaaactttcatcaggctccactgagacatttttagaataggccttgggccttatcctcaagcttgtctagacaagttgtagaaaaaaatcttgtcagtttagagaatatcccccatccttaatatctgatctactttgatatctaatcaaattcctcatttcttacctttgatatctggtcacgctgccctggtctgccttcagcaaaaatctcccctcaccttgatgactcctcctagtaattttccatctatgaaaggccaaccccctaaactactcattggtcataaagca

SEQ ID NO: 421321 - DNA, 632 bp, Homo sapiens
gggctaagctgagttatggagatagacacgatgaataatctgagaaaactaatctgttgacaggcaaaaaatatcagaaataaaaaatccatgtagcccaaaaagggaagatggaagtgtgtgtcattgattcccatactttctttgtaagacttcaagcaatcraagctaatgttttcttgtttattttttttttaatcaactggctgtacctcttgcagtttgacttcaattttttatcttttaaaaagctaacttttatatttctgttctgtgtgggttcacttctttgtaaagaaaaagctttgccattaagtatctgtagtgagcagcaactctacaggatctatatgtatactgcacacagtgtaactacttgttgtaacaatttgggcttatagaaaaataaaatcattgaaaagatctctaggatagagagatgcatttcttctttccagtgggatttaataatttctattagcaagaaattatatttccagtattcagatctagatacaaaattactttatgctcagactctttagaataacttagccaggaagaaagtatatattcgaatatagtacagccctctttcattcaaatgtttttattcttttaattttaaggtc

SEQ ID NO: 421322 - DNA, 387 bp, Homo sapiens
gagagggctctggtgtctctttctcttcttacaagaactccagacctgctggattagggcacacccttacatcctcatttaattycagttacctccctaaaggccctaactccaaatacagtcacagtggggtcaggacttcaagatatgaatttgtagggaacaagtcagtttataatagtattcaatagattttgatccttatttttattatactggtaaacaataaatatttgattgttaaatgtatttgtattagttgggatattgaatttttacttttaaaactgttaaaatgtatatatatgaaatagatttaacataatttccattgactagaaagcatagcttgtttaattgtgctgcattttattgcacttcatgtat

SEQ ID NO: 421323 - DNA, 543 bp, Homo sapiens
ttataagattttatttggaaaataaaatctgttaagaataatttggaaaatcactgcagcagaccatttatgcagcagattttgaataaaatcatgacatgtgctgtaccagacttttagattttgatttcagttaatgactaatgttagggattatggtaacatttttaataacccaaagctatttttatatgttcaggcttcttcattcatacttctgtgatattgaaacaaatagcatttccagacagagaaaaaaagccttttatttcaacattttatggagtgtgtracttatatttaggctgttggccaacataggaacaaaaattttgattgaaattgtcaaatagaatcctctcattccagatttctggtaataggaataattgaagtattttgacactcctgaaggtgagaatacaacaaagggaaaaattacaatgaagtcactatagaataaggccaatacatattttattatatagttaacttagttacataagatagcagtagaaatattatatagggctgggcgcggtg

SEQ ID NO: 421324 - DNA, 588 bp, Homo sapiens
cagcaggcttttctgtggacaccagcactggccttcatctgcttgtttgctacgtatttcttaacttatacgtattatttatggttactataggttgtgcaaccttaaattgtcataacaacattgccatattgaagtactaaattgaagtttccaattttttttccaagggtaatatttgttgaaaggacactttcaaatagaacctttatgtgttgttttcttcctctattcctctattcagcaaatatatgttgaatgcctgttgtgtcatagaaatacggctcaacaatggcaatacaacagtgaccaagttagaaagagaacaatgtctcagttcatgacctcgtagttgacacagattattaaaaacacaatctgtgggatgctgtgtaattactgagtttggtaggtcagtgaaattttagtagaggaagtgatgcatcaaagcyaagaacaaaaggatgagtagaagttagctaggaaggaacacaagtggagtgaccatttattaaatgtaacatattctctaatataccacgtgtcaaacttagcctctgaggacacagtagtggaccaaacatacca

SEQ ID NO: 421325 - DNA, 532 bp, Homo sapiens
atgactttcttgaaaagtgtatctattagcaattgctcaaaattcattttaggttcaatatatatcatctatattactgagcaatgtttacttccctttaaaatacactgaaagatatttccttctattcatttacttctaagaaagagtttctcatatcagttataatacatcccagctctactcttcatagttgtgtttaagcagcctcctgtgtgttctgcctgtgattcaggttttatattctttcttttttgtgagccacgtattgattcaagctaaataaataytgcattgtgaaggcatatacacattcagatttcttgtataagactattacaaatctttcctggttgcaactttgtaactttatttttttatattatgaggaccacaaaatgtacataacttcatgtgatctaaaaaataaatctttggtcttctcaaagaaaaacactttcacagactctgtatgacattattttcagacctctcaataatttattttactttgggatacatcatatttata

SEQ ID NO: 421326 - DNA, 550 bp, Homo sapiens
tcccaaagtgtaatttttttcatcccctcactgtcaaatatttgacccgtgtcaggaaatacacaaccrcagtcagcccaaattttcacccatgctcctcttcccaacatggaagcccctcttataccggaaaaataaatgttgtgagagaaatacagcataggatagtatttacagacacatacgtatgaaaaaataatgtgatttttataaacagtgttagttgtgatttagaatgctaccaaataaatatattttatattaatattttaaagtcatgaaataaagatattcactacctcctcacacttcacaaacatccctgagttagtaccgctatctagtatcaccctatactacacctactctattttccataagtaataagtggggaagggatagaactgacagcaagccacttgacgaagaaagcaagaaggcatacaagaaaagtgaacaaagtagaaaaccagctgaaacgttcaaagagaaatttatagaatgctgatattgtgctgagcatgcgttaaacatttcacacattatcaaa

SEQ ID NO: 421327 - DNA, 575 bp, Homo sapiens
ttccatattgctattgcatgctttatattgctcatactactgatcacaacacaaccttccaagtattctacttttatttctgcctatatgctacagtagtagatggtgttagaacattgcccatayttcctcagcactccttgttcttgcccatgcctacgccatcctattaaaacacccgcagttccttgtctgaggtttattttcaacctcacgagaccagcagtactgggagttggtagagctggagagtgaataccctggcacttttgagtgggataacacttaattgtattctatactatctcccaaatttcccccatggaatcaggtttcagcttcctacttgataacctgcacccatgactaacttactttctctgcctcattcctcaatctccttcagttgctttctgagatcatttcccaaataaactactttactcaaatccttgtctcagggtaagcttctgggaaaaccctatccaggacagattccaagaattcctggtcctttaaaggaaaaaggttttttctgttttatttttactggtctatctccaataactaggaca

SEQ ID NO: 421328 - DNA, 408 bp, Homo sapiens
tcagcctggtgcctatgatattctcagagtttattaaattgtgtctttctcctatatactcacatcacccatgtacagatatttatatagagagtacagtatcttaatatttagttctaawtattcagttgtgagtagggcaaggccccctgagatcttctaaagaaggtaattgacactttcataaaatgtcaaaccaagaaacagatgaggttaatagtatattcatctttctaaaagaagaaaaaaattataattttggaaattaaagtgttatcaacttagctttgctttgagaaacaaacgtaaacttcataatttatgatgagtataaaaaggactctgagaaaatactaggggactgtcaggttaaatgaaacactgaagaccttgggagattcaaaatat

SEQ ID NO: 421329 - DNA, 635 bp, Homo sapiens
cacaccaggcccctcccacaacatgtaggaactatgggagctaccagatgagatttgggtggggacacagaaccaaaccatatcagggaggatgtcagtaaagagagactaggaggcaggagggagaaatggaggtaggtctctatgacatgcttagcaagctttttaaccataaagaatcatgattgtttaaatcatcatagaagccagaggaatgaaacaagggtagaagaccaatttattaaatattacctatcagctactatgctaagtatgaactaactcaatgtaacccatttaggctttgtgctactaggctcaatagaacatcactgctgcaaccaaggacacttatgaaaaaaagtcaaataaatattttaatgataaattagttacgttgcaaaacttttcagaaatatatattcttcaacttttattctcaatgtagatttcaaacacagctgctaataaaaacattcaccctaaatccaagatctcttaagcttgctcacaaacagtcctcataggctgcttcttttgtttytccttctagcgcaatcttattatacaggccaacttggttttcctgtgggattattcgactaaagcctagactcctccatcagttcaacaaa

SEQ ID NO: 421330 - DNA, 536 bp, Homo sapiens
cttgtgatttttaacttgatttatagttgtatagaatgaaagggttcatttagaaagtgctagtttcaaaaatataattttagcttcctgtcaccagaattatctactataccacaaatcatttagcctgtatttaaaagtatactgctttcctggcctcagtatagccaaaaatttccattctatactatttactcaatatttattttttaaatatctggttaattgagstataattttcaggctacaagtttcatctctttttagatgttcacttctacatgctctaacaaacatacacagtcatgtgaacactaccaaagttaagagaaaggattttccatcgccaccccactaacacacaaaattcccgcatgcctctttacattcaatcctctctctccacctacagcccctggcaaccgctgatctgttctttgtagctatagttttaccttttccagaatagccgatacatggaatattcaaacatgcattcattataatatggtttctttcctttaacatattggcca

SEQ ID NO: 421331 - DNA, 364 bp, Homo sapiens
acgtcacacaccagggcctgacgtggggtcgggggaggagggaggaacagcattaggagatatacctaatgtaaatgacgagttaatgggtgcagcacaccaacatggcacatgtatacatatgtaacaaacctgcatgtgcacatgtaccctagaacttaaagtataataataataataataaaaagaaaaaagcgaggatgcttgtcttaatggataccaagatttactgttagttgtataaagcccsatggatagatattaaaaaaaagaaaaaataataatgtaggaaagaacttatgatatgctatgggaaaacaatagattacaaaacaatgtacctaatagcctcagaattttatta

SEQ ID NO: 421332 - DNA, 484 bp, Homo sapiens
tactcattatttcaatgactgatgttttgctctcccttcagcctgagtcctctctattttattttgctttccttaatggcccctcacctatcgcttttcttattaatttcctgcttttccttgcttttgctagtctgttggacctctggtaatgtattatctactcaggattaaaaaaaatagtgcattcaatttgaagatcgccgaatgcacagacaaatgtgtttccatctcatcatcacmaaccattttgcacataatcgtagacctttctctgttattcagaatattttagatgtcagaagatgaaataggaggaatatttggattcaagttcatgtaactgaaacagcaatattaaaatgtcattttatgaggtaattaaacaacttgctgaattcaacacaagagacagagataatccatacacttcccaccctaccacactcactacctttcttataacagaaatttgcttaaatca

SEQ ID NO: 421333 - DNA, 484 bp, Homo sapiens
tactcattatttcaatgactgatgttttgctctcccttcagcctgagtcctctctattttattttgctttccttaatggcccctcacctatcgcttttcttattaatttcctgcttttccttgcttttgctagtctgttggacctctggtaatgtattatctactcaggattaaaaaaaatagtgcattcaatttgaagatcgccgaatgcacagacaaatgtgtttccatctcatcatcaccaaccattttgcacataatcgtagacctttctctgttattcagaatattttagatgtcagaagatgaaataggaggaatatttggattcaagttcatgtaactraaacagcaatattaaaatgtcattttatgaggtaattaaacaacttgctgaattcaacacaagagacagagataatccatacacttcccaccctaccacactcactacctttcttataacagaaatttgcttaaatca

SEQ ID NO: 421334 - DNA, 232 bp, Homo sapiens
gtgctgggatggtgaatggggcagagttggcagtttaagagtaatcttcctttacatgaaamtccatctgctttctgtggcgtgttctgccataggtagcttttcccaacagttttcgtcagtttctcctgtttgtgattactccttttaagatcatttccatcaattatccaatcaacgtcagctttcagcaatggcggcttatgttgactttaactgctgcagatgttca

SEQ ID NO: 421335 - DNA, 232 bp, Homo sapiens
gtgctgggatggtgaatggggcagagttggcagtttaagagtaatcttcctttacatgaaactccatctgctttctgtggygtgttctgccataggtagcttttcccaacagttttcgtcagtttctcctgtttgtgattactccttttaagatcatttccatcaattatccaatcaacgtcagctttcagcaatggcggcttatgttgactttaactgctgcagatgttca

SEQ ID NO: 421336 - DNA, 587 bp, Homo sapiens
gctttaaaatgatagcaagcactttgcatatacctgatcattattatagtcagtagggagaaatatttgttctgccatttttttcctattctgcaccccataagttctttaccatattgtaaaacctatacatgctatattctaatcgccccttaaaatatgtcctacttcaacattaatttattttcttgtttgaaatgcrttaagacatcatatagacactcttttgctaaaactataaattcagcttcctaggagctcaacaagtcagcaccaaatattcatgtaattctccaaagttatatagatccacaaaaatactgcattttgcactttgtggaaacagatgcattttgtatgaagtgtttcttcttgtgttagctgctaatctcttcgcctaggaaaccataatcctaccttctcttaaatcctatcctggaaaagaaaccatgtcaagaaaaaaaaaaaaaaagaggaaacttaatacaacttaaggtgaatcagtaagccttaactatgtctacacaaaatcagctccagctgtaacacagttatggtcagagctttaattcaaaacacttaacatg

SEQ ID NO: 421337 - DNA, 226 bp, Homo sapiens
gaagctattttttcatctgatattttgttatatttctaaacaggwtgcagagatgaaagaagtatagagtgaaaacttacgtcatcacaatctagattctattattgatgttattatacatgctttatcacaatctattcatccacctttttatcaactattttttatttaatacatttcaaagaaaatgtcagacatcagtagtaccccccttaaatattttaga

SEQ ID NO: 421338 - DNA, 596 bp, Homo sapiens
tgtctattcaggtcccttgccaattttttataggattatttgttttctttctataccattgtttgagttccttatatattgtggacattaaccccttatcagattatgccttgcaaatattttctcccaacccatagattgtctcttcactgttaattgttttctttgttgtgcagaaccattttattttgatgtaatctcatttgtttatttttgcttttgttgcctgtgcttttggggtaaaatctagaaaatcattgtccaaatccagcaaatccaggtcatatagtttttttcttgtactgtcttcttacagttttgaagtttcaagtcttttatttaagtctttagtccattttaagatgattaagggtccaattttgttctttyatatatgaatatccagttttccaaagaaatatttattgaagagaccatctttttttattttgtattctttctcttagaaatatagtgagttatactgtttaatttttttaaaatgttaagccaaccttacttttctgaaattaaccctacttgatctcaatatattattccttttacatattcctagattgcatttgctaacatgt

SEQ ID NO: 421339 - DNA, 519 bp, Homo sapiens
tatgttccttatttctggcttgaaaaatttctttcaaaatctccagttcaggtccaatagaaagaactctctcaggtagcttttatatgaagattaatctgttacaatgtcagtctcagtggatatatttgcttggtatgtaattcctgtttgaaagttcatccctgccattatgttactgatgttttaccaatgtcttttggacttgatattttctgttgaagctggctttcattcagaggttrtttccctatgtgaaatgtcagacttctatggcctttttcaaaattttctgttgctgtttgttttgcagcagcttgattatgatgtttccaggcattacattatttggattaacctgcttgttcaattttattttatctgaaatttgttcacacatgactgatttaggggtcagagattcagagaaagttacaccaataatttggtgatatctccttgaacatttcctttctgggattctcccctcttttttagccacatgatttgctctgaact

SEQ ID NO: 421340 - DNA, 547 bp, Homo sapiens
catcacaaattaagtgttgtctgatatactgaatcataaagttggacatgaaagaaaacttttgaatgtgaataagcattttatttttacacagaaatggtataatacaccttgatatggtatgacgaatcctaggaagttcaggaagacacaattgaattaataggtatcccatgtctatgtatatctatagtttcaaggagaattttctataatgagttgatggagaaagaagaatgcatgagcctggtttatgaaagaaaattaaaggtagaattacttgaactgacaatgaactcctacaacagagttctactcatttatctgcaataatcaacagcatagaattttcctcacygaagattatttgagtcatggagccttacataaagttttacccggtcactaagcccagcccatgaccctgaccaattgctgaacatagcatgtggccacacctaagcaagaagcccagccagtggccctgaccagtcatggagcatagtctgtggtcctactaaactagggagccaagccggtgacccta

SEQ ID NO: 421341 - DNA, 511 bp, Homo sapiens
cgagagcattttattagacaaagcccctgcattcaaggatttaaagttagagaagttgaagttaaaattgctataaattgaaattgttttaagcctcttatttgttattttgttacatatattatatatatgttaaatatatattatatattgttacgcataaatagaaaactaatatagataagttttaggtttctttactctgtagtcactatgccttcctcaactttrattagtttttctgtctgtccatctgcattaaaacaaacagaaacacactaatttaaatatttgctcgtagtgcaattatttttaaatcactgatctttgtccttggctttctacagatctgttccttcatagtcatataatcagatccagtatctcataattttttttttatggagagaaaaaaatgtgcttacagtgtaaatgtatttaatgttgcaagattttgttcatagcagcacaatgagtcactatcttcaggcaaccgtctgccttagtagat

SEQ ID NO: 421342 - DNA, 590 bp, Homo sapiens
tcatttgctattctgtatcttctttgatgaggtgtctgttaaagtatttatttattttttttatttttttgagacggagtctcactctgttgcccgggctggagtgcagtggctcaatctcagctcactgcaacctccacctcctgggttctagtgattctcctgccttagcctcccggatagctgggattacaggtgtccaycaccacacccggctaatttttccttgtatttttagtagagatggggtttcatcatgttggtcaggctggtctcaaactcctgatgtcatgatccgcccacctcggcctcccaaagtgctgggactacaggcgtgagcctgcatccagccatatatcatgtttaaattgtgtcatttgttctcttattaagttttaagtgctctacgtatagtttggatatcagtcattatcagatatgactgtggcttgtcatttcattctcttgataaagtcttctgcaaaaaatataagtttaataaagtccagtttatcaaacttttttaattcattgtgcctttagtgttatatttaaaaagtcatcaccaaactcaagatcatctaaatttt

SEQ ID NO: 421343 - DNA, 590 bp, Homo sapiens
tcatttgctattctgtatcttctttgatgaggtgtctgttaaagtatttatttattttttttatttttttgagacggagtctcactctgttgcccgggctggagtgcagtggctcaatctcagctcactgcaacctccacctcctgggttctagtgattctcctgccttagcctcccggatagctgggattacaggtgtccaccaccacacccggctaatttttccttgtatttttagtagagatggggtttcatcatgttggtcaggctggtctcaaactcctgatgtcatgatccgcccacctcggcctcccaaagtgctgggactacaggcgtgagcctgcatccagccatatmtcatgtttaaattgtgtcatttgttctcttattaagttttaagtgctctacgtatagtttggatatcagtcattatcagatatgactgtggcttgtcatttcattctcttgataaagtcttctgcaaaaaatataagtttaataaagtccagtttatcaaacttttttaattcattgtgcctttagtgttatatttaaaaagtcatcaccaaactcaagatcatctaaatttt

SEQ ID NO: 421344 - DNA, 567 bp, Homo sapiens
tgactgtggcttgtcatttcattctcttgataaagtcttctgcaaaaaatataagtttaataaagtccagtttatcaaacttttttaattcattgtgcctttagtgttatatttaaaaagtcatcaccaaactcaagatcatctaaattttcttctatatcactttctagtaatttcatatttgtgtgttttacattgaagtctatgattccttttatattaattttgatcaggtatataaggtcagtgtctagattatttttttctttgcatgtactgtccagttggtccagcaccacatattgcaatgactatgtcttagttgaatttcctttgcttctttgtcaatagttgactacagttaggtgtctcatttctactttctccactgtttcatttatctgtttgtctactctttcaccagttttaccctaatttgatcacgtatmtttacaataattcttgaagtcagataacgtcagtccacaaaccttgtcttcttttaattattaattagtatgagatgtcggtttccagattgtcattttccactgtgtgtttttagat

SEQ ID NO: 421345 - DNA, 569 bp, Homo sapiens
tatggaatatcaactctgcctgtgcttcaagccttatatcttttcttcctctgattttgtggccatttcttacccattaaaatgtttttgaaaatcagtgtttctctatttgctttcttgctttgcttttgctatatgttttgattcacgggttttatctatttatttcaactatcacctctttgcagcacctaacacaggacctggcaggcagcaagacctttatacacacgtgcaatttagtaactaacaacacctaactttatagttctaatccttgttcttcttaaaaccgttggagctaatttcccaactaccartcagacatattcactttgaactagggttgccagaaaaaatacaggacttgttaaatataaacatttgataaatattgcacaggatgtacttatactaaaaaatactcattgtttatctgaaattcaaattaaattggatatcatgtatttttatttgctaaattggaaattctggtttgatgcgcactgaaatcttaaagtcaagatgtgcaaaacaaatttatgctatcctactcaaagcagcacctg

SEQ ID NO: 421346 - DNA, 569 bp, Homo sapiens
tatggaatatcaactctgcctgtgcttcaagccttatatcttttcttcctctgattttgtggccatttcttacccattaaaatgtttttgaaaatcagtgtttctctatttgctttcttgctttgcttttgctatatgttttgattcacgggttttatctatttatttcaactatcacctctttgcagcacctaacacaggacctggcaggcagcaagacctttatacacacgtgcaatttagtaactaacaacacctaactttatagttctaatccttgttcttcttaaaaccgttggagctaatttcccaactaccaatcagacatattcactttgaactagggttgccagaaaaaatrcaggacttgttaaatataaacatttgataaatattgcacaggatgtacttatactaaaaaatactcattgtttatctgaaattcaaattaaattggatatcatgtatttttatttgctaaattggaaattctggtttgatgcgcactgaaatcttaaagtcaagatgtgcaaaacaaatttatgctatcctactcaaagcagcacctg

SEQ ID NO: 421347 - DNA, 600 bp, Homo sapiens
attgagccttgcctcaatttgttattaccatgtaggttgacaagttttgattttataattccatcattccttcgacatttgttgatgacttgacatatgttttcacatgttatttattaattaatatatttacatttgtcagtacagactcatggctttctgttctattccatgggttagaatcattggcatcattattcatatacatgtgaaaattatcctagctaatgaaagccctgcttctgtgtctgacattccctgcacaatttttagcacctttgtttctttgttgttcagcaagatgytccagcttcattttgtattactttgcctcatccctggaatcatccatttcttcaatgagacctggttctatttagtggaatatgatatacagaaaacaagatctggggaccaggcatactcattgctactaggctgtcattaattctaagccctttaagtagacataagatctacctacataaaatctgttatgatcttaatgtttgtgtctgcctccccggtacccaaattcatttgttgaaacctaatctaacacgttatggtgttagaaaatggggatcatttgaatccgat

SEQ ID NO: 421348 - DNA, 620 bp, Homo sapiens
aacttggaaattgaaaggattatgatttataatataattaagaagttaattctagatggcacattttccctttcacttatgtttaatgtayacatgggatgtagtacaaaaaagtatctcatgatatgttctgaaggatgcaagtgacactaagcttttcctgtcactccaatcgaagaatggtcatgttccaaatttaacaaatgataaatttgaaatgttttaattgatataatggtcccaataatacatttttgttaaatatttggagcatgctcctgcctacctacattagaatctgtcatacaaagatattcatttaaactcaaatatattttatctcttattttagagtcaaatagggttaggtctaatatgtgtcataatattccactcatggtatattatttctctaagtgctctgttgcttgaacatgtctaaaaccactatattttaaagataaagaagggtaaaaattgactattaaaatttcacgaacaattgaattaatgaacttagttcagaaagtatgaaaatcattatttccttctgtgtctggtatagttgtctcttgagttttgtatcagggaaaaaaaatcaagctgttaatgaaattgga

SEQ ID NO: 421349 - DNA, 561 bp, Homo sapiens
gcctacctacattagaatctgtcatacaaagatattcatttaaactcaaatatattttatctcttattttagagtcaaatagggttaggtctaatatgtgtcataatattccactcayggtatattatttctctaagtgctctgttgcttgaacatgtctaaaaccactatattttaaagataaagaagggtaaaaattgactattaaaatttcacgaacaattgaattaatgaacttagttcagaaagtatgaaaatcattatttccttctgtgtctggtatagttgtctcttgagttttgtatcagggaaaaaaaatcaagctgttaatgaaattggaacttcaagagcattgtttctaacatacagtagggtgaaaataaaggttgatttcctttccaatggcagtggtggtgactgcgtatactggattcaagagatatttgaaaataatagatacaatgaagtaagcaacagatttaacttcagagtgagggagaggaatcagtctataaggactcccagatgtctagcttaagccaacaaccacaacaacaacaa

SEQ ID NO: 421350 - DNA, 542 bp, Homo sapiens
tatgcagacaatataagtgctatctatcatctgtataatgctctctatatatatgaaaataagtgctcactttctctctctacatatatgtataaaagttatacatatgactgtgtctgaccccatagaggcaaatattttaagaagaactgtttgatttctttctttataaagcttaacrcttaatttctgaattaactttagacagtaaaattttcaatatcatttatatagccaacagtgaacaaactaaaaacaaaatcaggaagcaattccacttacaatagctacaaaaaatatctaggaatagaatcaccaaataattgacatatctgtaaaatgaaaaccataaaacactgatgaaagcaattgaagaggacacacatcaaaaatggaaagatatcccatgcccacagattggaaaattagtatcgttaaaatgttcatattacccaaagtgatctacagactcagtggaatccctatcaaaataccaatgacattcttcacagaaatagaaaaaaaatcctaaaatttgtatg

SEQ ID NO: 421351 - DNA, 602 bp, Homo sapiens
ttctatcatgtaggagatgttttaagtaaacacttatattttacactgctttcctattgctagtatgaagttaactggagaaytgtgataagagtaaaaactattataaaacatctatcaacaaatctcaatttgtgtcacttgattgtgttgtgcatatgaggctgcattgccttcctggaatatattttgatgtcaagcctaagcacactctctgatagcacagtgtctgacctattggatatttcatgttcaaagtctgaaaatctcatgttcctagcagtattccacgtatctacaatgttagctattatcatatggcacatgttaaataaacttcaaagattatgtaatggtaacagattgatatgcactcaatgcttatcacaactctgaaaatcccagaaaagtaaagtattgggttagacatatagtgaaactcagtttactcagatttgatgttgtaaaaaatatatagatcctcttcctataaatctctcctgtttttagactcatgaaaccagatgctgtcttttattttttcttttattgctgagttctcacgaccaggtgtgatctcagcagtgtcctggacaagctta

SEQ ID NO: 421352 - DNA, 602 bp, Homo sapiens
ttctatcatgtaggagatgttttaagtaaacacttatattttacactgctttcctattgctagtatgaagttaactggagaattgtgataagagtaaaaactattataaaacatctatcaacaaatctcaatttgtgtcacttgattgtgttgtgcatatgaggctgcattgccttcctggaatatattttgatgtcaagcctaagcacactctctgatagcacagtgtctgacctattggatatttcatgttcaaagtctgaaaatctcatgttcctagcagtattccacgtatctacaatgttagctattatcatatggcacatgttaaataaacttcaaagattatgtartggtaacagattgatatgcactcaatgcttatcacaactctgaaaatcccagaaaagtaaagtattgggttagacatatagtgaaactcagtttactcagatttgatgttgtaaaaaatatatagatcctcttcctataaatctctcctgtttttagactcatgaaaccagatgctgtcttttattttttcttttattgctgagttctcacgaccaggtgtgatctcagcagtgtcctggacaagctta

SEQ ID NO: 421353 - DNA, 528 bp, Homo sapiens
aatattgctaaaatgcctgaatcacccaaagtcttcaacagatgcaacacaattcctataaaagttacagtggcattttttacagaaatagaaaaagaatcctaaaaatttgtatgaaaacacaaaagacttcaaatagccaaagcaatcttgagaaagaacaaaggtgggagcattacattatctaatttcaaaatacatacatatctatcaaaatcaaactctatggtactggtataaaaatctttgcacatacactgaactaatatttgaagaaggtgccaagaatacacaatgaraaaaatagagtctcttcaataagtggtgttgggaaaactggatatccaaaaacaaacaaacaaacaaaccgaagaactgaaattgtaacctatctgaaaccattcacaaaaattaactcctagtggagtaaagaattaatgtcggttctgatccacgaaatttgtagaataaatatcgagaatacgccttttgacattgtcctggttgagacattttcaggttcaaatt

SEQ ID NO: 421354 - DNA, 528 bp, Homo sapiens
aatattgctaaaatgcctgaatcacccaaagtcttcaacagatgcaacacaattcctataaaagttacagtggcattttttacagaaatagaaaaagaatcctaaaaatttgtatgaaaacacaaaagacttcaaatagccaaagcaatcttgagaaagaacaaaggtgggagcattacattatctaatttcaaaatacatacatatctatcaaaatcaaactctatggtactggtataaaaatctttgcacatacactgaactaatatttgaagaaggtgccaagaatacacaatgaaaaaaatagagtctcttcaataagtggtgttgggaaaactggatatccaaaaacaaacaaacaaacaaaccgaagaactgaaattgtaacctatctgaaaccattcacaaaaattaactcctagtggagtaaagaattaatgtcggttctgatccacgaaatttgtagaataaatatcgagaatamgccttttgacattgtcctggttgagacattttcaggttcaaatt

SEQ ID NO: 421355 - DNA, 519 bp, Homo sapiens
tgttaattaactcaatttagccattttacagtctatacacatttaaaatatgtacacaataaatatatacaatttttatttgttaataaatgcaatttgtaaaaaggacttctttcatattttgctatgttaacaactatgatgactaaaatctacaatatcaactttgaagttttttattctcatcactctctatgtttttatgtaattacatttatctccttaatagtgaatctacagattgcattttcatgacagtaaaaggctctctcawaatccttgaattaaaaaagctagctcttacttaacagaagcatgtatatttttcttatttaagaaaatttgtagatcagatatgggcctcatgtgttcagtttccatgcagttgggtggttttgagtgagtttcttttttttttttctttgtttctttttttatttattattattatactttgataagttttagggtatatgtgcacaatgtgcaggtttgttacatatgtatacatgtgccatg

SEQ ID NO: 421356 - DNA, 496 bp, Homo sapiens
aagtgacatcatacagtatttatctttctgtgcctgtcttatttcacttaatataatgtcttccagkttcatccaggttgttgcaaataatgggatttcattattttataagactgaatggtattccattttgtatgtatactacattttgtttatccatttttctatccatggacactgaggttgatgccatatcttagctactgtaaataatgctacagcgaacataggagtgcacatatctctttgacataatgtttttattgcctgtgcatatacactgaaaaatagaattactggattatatggtaattatatttttaattttttgaggaatctctatactgtttttcataatagctatgctaacttacattcccaccaacaatagtcaagggttttcttttctacacatcctcaccataatctgtatttcatctttttaataattgccttctaacaggtatgaagtggcatctcattgtggttttaattt

SEQ ID NO: 421357 - DNA, 531 bp, Homo sapiens
ttcatgtaccattatctatgagtttacaatgataaataatatataattatgtatatatatatatatagttggtgcaaaagtaattgtgatttttgccattaaaagtactatatgttatatgtatatgtatattatatagtataaatgtaatatgatatatggtcatacataggtgtatatgtgtgcatacgtgtgtgtgtgtgtgtgtatggcagaataaataggggtaatatttaaaatatttcacaagttcactggatatataccaattaaaacaaaaactgataatagcacagaagaaggattatacaggacccctgctcactaactctttctccttacaatgatgaattattctggggaatgttgaggaggaagcagggaagcacataaggggctygaaggcagtttaaatatcaagacatttcaatatttaaaaaataaacacagccaaactgaatattgactaaatgtctccacataatcatttccattaacattactgcacaaatgctaaaaatattgtatgta

SEQ ID NO: 421358 - DNA, 530 bp, Homo sapiens
tcaaagttgaaggcttaggcattattacaggtcaaattccaaggcaaattatttatttgatgacgtatggtccaacttaaaattcaactgtcactgaggatttcagggcaaaattgtcattcagaatatgcaaattacatgtaagtcaaatgatttcacatctgtatcccctttcaaaaaatatcttattgaagcaaatattatggattctttactagtattaatcaaagataatatggaatttataaaatgcaattacaatattgtcattatgattagattctgtatattttgagggccagataaattagcatgctcatataaatgtgacattttattgtacagagaataaagtatgaaagcagggtgatgaattttaaaaggttaaaatatctgaatttagatayatatggtgttgtatcacagatcaggttgatcattgtgagctaggcattcactttgagaccttgatctatatttgtaaaatagttaatatagtatttcctacaagagagtgttgtcagaattaa

SEQ ID NO: 421359 - DNA, 583 bp, Homo sapiens
agtgatttcctcgcaagtgaacacaaggtttaataaaggttatcagactcaatgtactttaaactacaagtggaaaatactgtctcatttatttatgtttactaccttttgttgattaattcatagactcttccatgttctcacaacagtgacaacagcccatatctcaaattggttgtaaaatgtggtgctaaaccttgtattatttcagatgatctgtatttataagaaattattatagtaaaactggaagaagttgagagaaggatgctgctgccagagaatatagagcaagggaggaggtaaaagattcagaaaaaaaaaagacagaaacacttgaaatgtgaaattaccacagcataattagtgctagaatctttaaaaatataacagtaagcactatacctaattttacttttcagtcaataattatgatctatgctaatctatggaaactattacatatttacatgcatatgcatctatgtaattgtgaattgaataaaaaggcttttctactaatctctttttcttctacagtcacctcatcatatsatgagaaaaataggaatgttacacctga

SEQ ID NO: 421360 - DNA, 533 bp, Homo sapiens
atgtgatgatggagtatgagaatggaatgtaaccttcatgctggatttgtaaaggaagatgaaaaattatcttcctgtaacaacattgaaattactatttgtcttcaattctatacaaatttatgtaatagataccactacagtacctgggttcaagatgagatgagtttaagatcattttatatattcattcattcatttattcattcactgactcaataaataaatatatggcctgctgtgtataatcacttttgccagtcaagtgaacacaaggacaaataagttacagtctttatatttaagaatcacatgatggtggagtgattcatacttataaagtcacatgaaacaatctgttataggcarttagatacggatgtatgagacacaaatgagggcagttccaattttgtttatagcaagaagagcatcaggaaaagtgtgataaggtcaaaataatttgtaagaagaggaagagttgagtaggtggggatagacctggtggtagcttgtgaagaatattctaggca

SEQ ID NO: 421361 - DNA, 561 bp, Homo sapiens
ttggagctagaatttgaaaaaatgtaatcgcagctaaatttttgaaaggctcaataaaaactaaaatcataatcaattatcagggaacattattaaaaatctcatgttcacttggaaagaaaatatgctataataaaataatattcaaaatgagaaaattgggaaagcagcattgtaggcttcagatagcaaaacagagaacagactatgaagtatagaatacaactaatactattttaaaatgttatatcagtaggtatctgggttgtctatttctgtgtaacaagtaactctaatacttagtggcttaaaacaacaatttattattatctttcttgattctgtgggttacgtggcctcagatgggcagtgcacactgagggtctctcttgtgattgcagttaaatgttcattgaggctgcagccatttgaaccttggctatatttyaaaaccaaatcggcttactcacatggttggcattaaatgatgattgctggctcgatgcttaggtgaggctgtcaactagagcatctttatatgacctctccaagtgccttggg

SEQ ID NO: 421362 - DNA, 390 bp, Homo sapiens
gtaaatgtttgttaggtccatttggtttataatgtaatttaattatgatatttgtttgttttctgtctaaatgctgacagtgggggtgttgatgttcccagcgattattatactggggtctatctttatatttagctctaataatacactctttgtatatttgggtactcttatgttgggtgcatatatatttttaattttatattttcttgctgaattgatctttttgtcrttatgtaatgatcttcatccctttttatgtttctttgtttataatatattttatctggtataaatatatctttttctgtgtgcctttggcatctgtttgtgaggaatattttattccattccttcactttcaatcttatgtggtctttatggtaaaca

SEQ ID NO: 421363 - DNA, 416 bp, Homo sapiens
tgaaaagtcaaaaatttcaaagccttcaaagaatccatttcaggtttttcttataatatttgcaagcargaaagggagctgaaagttgcaggtaggttgaaacagaggtgggccctatatgttgaatgcaagaaagataccaactctgtaatttaggatacgttgttgtaatgttctctgaaatctgagctctagtgatagtcgcaaagtcttccaaacccgtggttgttttggtcactctagtctttcctaagtctacagtggcatagccattgtcttaatcagcttcttggtaatgcattaatgaaatgcacttcatacaccacccacaggctcagatcaggcttaggagattgctttaataagagaatcaggtgtataatggccttatgttgtaggtagattctttctgacaa

SEQ ID NO: 421364 - DNA, 416 bp, Homo sapiens
tgaaaagtcaaaaatttcaaagccttcaaagaatccatttcaggtttttcttataatatttgcaagcaggaaagggagctgaaagttgcargtaggttgaaacagaggtgggccctatatgttgaatgcaagaaagataccaactctgtaatttaggatacgttgttgtaatgttctctgaaatctgagctctagtgatagtcgcaaagtcttccaaacccgtggttgttttggtcactctagtctttcctaagtctacagtggcatagccattgtcttaatcagcttcttggtaatgcattaatgaaatgcacttcatacaccacccacaggctcagatcaggcttaggagattgctttaataagagaatcaggtgtataatggccttatgttgtaggtagattctttctgacaa

SEQ ID NO: 421365 - DNA, 416 bp, Homo sapiens
tgaaaagtcaaaaatttcaaagccttcaaagaatccatttcaggtttttcttataatatttgcaagcaggaaagggagctgaaagttgcaggtargttgaaacagaggtgggccctatatgttgaatgcaagaaagataccaactctgtaatttaggatacgttgttgtaatgttctctgaaatctgagctctagtgatagtcgcaaagtcttccaaacccgtggttgttttggtcactctagtctttcctaagtctacagtggcatagccattgtcttaatcagcttcttggtaatgcattaatgaaatgcacttcatacaccacccacaggctcagatcaggcttaggagattgctttaataagagaatcaggtgtataatggccttatgttgtaggtagattctttctgacaa

SEQ ID NO: 421366 - DNA, 416 bp, Homo sapiens
tgaaaagtcaaaaatttcaaagccttcaaagaatccatttcaggtttttcttataatatttgcaagcaggaaagggagctgaaagttgcaggtaggttgaaacagaggtgggccctatatgttgaatgcaagaaagataccaactctgtaatttargatacgttgttgtaatgttctctgaaatctgagctctagtgatagtcgcaaagtcttccaaacccgtggttgttttggtcactctagtctttcctaagtctacagtggcatagccattgtcttaatcagcttcttggtaatgcattaatgaaatgcacttcatacaccacccacaggctcagatcaggcttaggagattgctttaataagagaatcaggtgtataatggccttatgttgtaggtagattctttctgacaa

SEQ ID NO: 421367 - DNA, 596 bp, Homo sapiens
acctttgcctctgttccagcagtctcatgttttctgtcagcatttatataactgaggcaggttaacttgctaacttacaagcaaggtaaatctcagatcattctcatttttctgacactttctagataaataaaccaacatagaggcttctagaaagatgtgcaaagaaagaagtttgtggcaataatttttttgacatctgtatcaaattgtgccttaattcagatatctctgtcttactcagttaaatgagccaccacattttccttaagttttcttaaattatgtttccatcacttgcaaccaaaaaaaatcccaatttatcccaatatttgagaacaatctaaaaatttaacttaattcgatgcagaaatgggactactgaaagattagattagatatggatttctagcatagctgtgaatttaactggaagcgaatgaaaacaataggatttttccattagactacaatattttacacacatttaattgttgagtattaayatggaatttcattccggtgcattgtatgcatgtactcaactagcaaaaaaaatatgtaggtctttaattgtcattagtttttagaagatg

SEQ ID NO: 421368 - DNA, 600 bp, Homo sapiens
tgagaaacaacagtgagcaagataaatctgctcctggtgctgagggagactacattagtaggggagacagaaaatagtcgacaaattatagtggagacagttatagacataccttctcattgtcaactatattcattcagaccagaaaaaaaaaaaaagagaaagaagaaaaggaagaggggttggaggagaagaaatgaaagagaaatataagaactttaaattatgcccgctattattctcactgataacacatcctgaggcaaacgtgatccagaaaatatgaaatctcagttaccacctgccactcatgtgaacatctcaccactgaatgattgagtgtttttaaggtatgacaactaaacataagctactgtcttcaccttatcttcaactgaattcacagcagtcgggaagacaaagaggttatggcagatttattaaagacagaacaaacaagtacatcctccaatatggtgccttcttrtaagatttctcaaaggtaattttgacgttgtgtgacttctgtttactaaaatgtgtgagctatgtctttgttgcatgatagtgtggtatacagtagaaaagaaaagttccaag

SEQ ID NO: 421369 - DNA, 577 bp, Homo sapiens
aaacaacttgcttctgtatgattttgggtaaacaatgaaattaaggaagaaatcaaataatgaaaacagagacacaatataccaaaatctcctggatgcagcaaaagcagtgttaagaggaaagtttgtagcactaaatgcctatttcaaaatgttagaaagatttccatttaacaatctaacatcactcttagtggaactataaaaacaagaacaaactaaccccaaaactaacagaagaaaataaataaataaaatcagagcagagacaaatgacatcaagacccaaaaattcatacagagaatcgataaaaccaacagttcttctttgaaaggataaacaagatctatagaccactaactaaattaacaaagaaacaaayggagaccaaaataagcaaaaccagaaaacaacaaaggtgacattacagctaatcccacagaaatctaaatgatcctcagagcgtgttacaaacaactctatgcacattacctgggaaatctagagaaaatagataaattcccggaaacatataaattcctatgattgagtcaggacagaattgaaaccctgaat

SEQ ID NO: 421370 - DNA, 577 bp, Homo sapiens
aaacaacttgcttctgtatgattttgggtaaacaatgaaattaaggaagaaatcaaataatgaaaacagagacacaatataccaaaatctcctggatgcagcaaaagcagtgttaagaggaaagtttgtagcactaaatgcctatttcaaaatgttagaaagatttccatttaacaatctaacatcactcttagtggaactataaaaacaagaacaaactaaccccaaaactaacagaagaaaataaataaataaaatcagagcagagacaaatgacatcaagacccaaaaattcatacagagaatcgataaaaccaacagttcttctttgaaaggataaacaagatctatagaccactaactaaattaacaaagaaacaaacggagaccaaaataagcaaaaccagaaaacaacaaaggtgacattacarctaatcccacagaaatctaaatgatcctcagagcgtgttacaaacaactctatgcacattacctgggaaatctagagaaaatagataaattcccggaaacatataaattcctatgattgagtcaggacagaattgaaaccctgaat

SEQ ID NO: 421371 - DNA, 584 bp, Homo sapiens
aatcctctaaccttggcttgtagatggccagcttctctctttggctcatcatgttgttttccctctgtgtgtatttctgtgtccaaattatcactcttataaaaatacttgtcatttttggattcagcctcccctgatgacctgactttaacttgatgacctctataaagaccttatttgcaaataaggtcacatgctttcttttctttttctttttcttttttttttttttttttttttttgkgctacagagtcactctgtcacccaggctggagtgcagtggtacaatcttggctcactgcaacctccacctcccaggctcaagctatcctcctgcctttacctcttgagtagctgggaccacagatgcatgctaccatgccttctaattttttgtatttttctagagatgaggtttcaccatgttgcccaggctggtctcaaactcctgaggtcaagcaatccatctatttcagcctcccaaagtgctgggattaccagcatgagccaccgcgcctggccgataaggtcacattctgaggtactgggggttagaacttccacatatgattttagggacagg

SEQ ID NO: 421372 - DNA, 509 bp, Homo sapiens
ctctctgtcacccaggctagagtgcaatggcacaatcttggcttactgcaacctctgcctcctgggttcaggtgattctcctgcctcagcttcctgrgcagctgggattacaggcacctgccaccatgcccagctaatttttgtatttttaatagagacggggtttcaccatgttggccaggctggtctgagactcctgacctcaggtaatctgcccccctcagcctcccaaagtgctggggttacaggcatgagccactatgcctggcctaccttatcttttgaatgactgtagaatcagtagtgatttcccctttttaaatccttatattggtaatttgtgttgtctctctctctctctcatttgtcagtttggctagagttttatcagttttattaatcgttttgttttgtttcatagattttctttctttctttttctatttctattaatttttgttcttaactttattactttcttccctctgcttgtggtgggtttaatttcc

SEQ ID NO: 421373 - DNA, 604 bp, Homo sapiens
ctctctctctctctcatttgtcagtttggctagagttttatcagttttattaatcgttttgttttgtttcatagattttctttctttctttttctatttctattaatttttgttcttaactttattactttcttccctctgcttgtggtgggtttaatttccacttctttctttggtttcttgaagcggaagcttagatcattgatttgaaatccttcttttctagtatgtttagtgctacacatttccttccccgcactatttgtcctctacctgcacattttgatatgtggcactctcattttaattcagtttaaaatatattctaattttcctgttgttttcttgtttaatctatgggttatctagaaatatgttgtataattttgaagattttagggattttctggatatctttctgttatttatttcattatagtcacagaacatactttgtttgattttagtactcttaaatttattgatacatgttttatagcccaagatatggctcatattggtgaatgttctgtatagatttggaaaaaaattgtgttctgctrttgctgagtagtgttctacaaatgccaattagatcaagttg

SEQ ID NO: 421374 - DNA, 584 bp, Homo sapiens
tgttatacaaggtataatagtaagaaaaagtaagcaaaatatattctttgtttaaaaaaggcttttattacaaatgtgaacctaaatttgcagaaaatgtcacataatatgtatatattacagatatacaggtaaagctggaggaagtgggtattggaaagtgtgtatctgagggagataaaaagtgtgttagagttcctggcttgcattaggagaaactatatcaagctgaaccatatcaacttaccatttttgtaaattaaaaaatggtctgatatcagcaatttcacatgtgcatatagataaaaaaygattctacaaagatatccatgaaaagaagagaaatcaaatactgaactttcaaatcaattgaggggaacaaaatgggtggtatttcacagataaagaaatgaagatatttaatcagttgctttggattggaaccttggtctagtcctgactcccaggactccaaggttacttcagaacaaaaggaaaggacaaaaacaccaagcaaccacaaaacaaagagctaatgaacagaacagagatcctgccatagcccctcccttctttttcctcag

SEQ ID NO: 421375 - DNA, 615 bp, Homo sapiens
ggacctggctttgcatgccagccctaccatttgttaaccacttgaccttgaatttcttgaagaaagagttcttgaaaataatytgtgagcttctaggagacagtgtgggcagtccctggcacataaaatgcaactcacaagcattggtttcctccacttgtctgtaaggcagctaggagggtttccagggcccaataatgggtacataaaaattacctggctgtatcaaaggaaaggataaaaacagattggactattaacttgggtgatgtaaatactgatattttggaatgagtaaaattgctttggataccttaattctgatgggctatcctaaatttcagagaaaacatgtaatgctaggatgtctacatcagacagtagaaagctgctgaaggaagactccggggattatggatgagctctgcctgtaacttgcagtgtggccttgggtaagtcattttaccatttgtggacacctattaaggggattgggctgctatctttaatttcctcctaggtgtaatagtttatgattctagataccagtgtttgtgtactaagcgtgctattttataattgacatcaagtggtattaagtgctgtaacatgatg

SEQ ID NO: 421376 - DNA, 560 bp, Homo sapiens
atctgggcaaggctctatagcagctgttgcaagcgccctgaaagagactaagacacagtcctggccccaaagcgcgtcctcattgaggcagtaggttgtggtgtaaaaccagtggattaggggttggtttggccttttgttcctaacaatgtccaggtcccacaggctagggagggctacattgggtttgtggctaggttctgggggaaccctgagcaatttacaccttttctgagactctggttcctcatctataaatggagtgggtagctccttcaaacacttttgtcaggataaaatgttatgctgaatctgacggcacattggaatgcatgtaagactataccrtatcagatcacagtgataataaggaccttcctccttccctttctctgtgtcttccttccaacccaatccatcacccttccatcagatcacagtgataataaggaccttcttcctttgctttctctgtgtcttccatccaacccaattcatcgcccttccatcagatcacagtgatgtaagcaccttcctccttccctttctctgtatcttcc

SEQ ID NO: 421377 - DNA, 614 bp, Homo sapiens
aattgtgttctagtgtacattttcttctgcaagttgattttttgtttaactttatgcttatgaaattcatccatggtaatatgtttagctctggttcatttgttttctctgttttgtttccctataggaatatatcacaacagacttatccatttttatgatttaccgcctccaaatcattctccacactgctgctagagagatctttgtaaaatgcagatttgatcagaacacttccctgtttaaaatgtgctagtgtcttctctttgccatcaggaaggaaaaaaatccraagttgtttgcatggtataaaaactccttgtgatctgcatataaattccttgtgatctggtcttttgttacctcttcagactcattttttcatctagctgctcataatattttcactttatctttcagcagtttaactgatgtgtttagtgtgtgtttttgtatatttgtgtatgtgtgcattttatttatcctgcctgggttctctctgagcttgttaaatccatggtttgttgtttttcattaattttggaacattttcatccattttttcttcaaatatttcttctcctcctttctctctcctcctcctccttctcttc

SEQ ID NO: 421378 - DNA, 614 bp, Homo sapiens
aattgtgttctagtgtacattttcttctgcaagttgattttttgtttaactttatgcttatgaaattcatccatggtaatatgtttagctctggttcatttgttttctctgttttgtttccctataggaatatatcacaacagacttatccatttttatgatttaccgcctccaaatcattctccacactgctgctagagagatctttgtaaaatgcagatttgatcagaacacttccctgtttaaaatgtgctagtgtcttctctttgccatcaggaaggaaaaaaatccaaagttgtttgcatggtataaaaactccttgtgatctgcatataaattccttgtgatstggtcttttgttacctcttcagactcattttttcatctagctgctcataatattttcactttatctttcagcagtttaactgatgtgtttagtgtgtgtttttgtatatttgtgtatgtgtgcattttatttatcctgcctgggttctctctgagcttgttaaatccatggtttgttgtttttcattaattttggaacattttcatccattttttcttcaaatatttcttctcctcctttctctctcctcctcctccttctcttc

SEQ ID NO: 421379 - DNA, 614 bp, Homo sapiens
aattgtgttctagtgtacattttcttctgcaagttgattttttgtttaactttatgcttatgaaattcatccatggtaatatgtttagctctggttcatttgttttctctgttttgtttccctataggaatatatcacaacagacttatccatttttatgatttaccgcctccaaatcattctccacactgctgctagagagatctttgtaaaatgcagatttgatcagaacacttccctgtttaaaatgtgctagtgtcttctctttgccatcaggaaggaaaaaaatccaaagttgtttgcatggtataaaaactccttgtgatctgcatataaattccttgtgatctggtcttttgttacctcttcagactcattttttcatctagctgctcataatattttcactttatctttcagcagtttaactgatgtgtttagtgtgtgtttttgtatatttgtgtatgtgtgcattttatttatcctgcctgggttctctctgagcttsttaaatccatggtttgttgtttttcattaattttggaacattttcatccattttttcttcaaatatttcttctcctcctttctctctcctcctcctccttctcttc

SEQ ID NO: 421380 - DNA, 596 bp, Homo sapiens
tctaacaggtgtgaggtgctatctcattgtgacactgatttgcattttctgattattagtaatgttgaacatcttttcatattgtggaccattagtgttttcttcagggaagtctctattcaattcctttgcccattttttagatgagtgtgtttatttgtttgtttgctattgagttataacagttccttatatatttacacattaacctcttatccaataaatggctaataaatattttctcccattctgtaggttgccttttcactctgttgattgttttctttgctgggctgaagctttttagtttgatatagtcccatttgtctatttttgcatttgttgcttatgcttttggtgtcatatctaagaaaccattgccaaaatcaatgtcatgaagctttacaaaacagggtaagagaatagagaataataaaggtactgttttaaatagaaaaaaaaaaaacagggartgcttctctaatggagtgacactgaagcagaaatctagataaatgaatgatgaagcaaacactgttagggaaacagtgttcaaatcaaaggaaacagcaagtacaaaggcccagcaaggagac

SEQ ID NO: 421381 - DNA, 554 bp, Homo sapiens
agacaaaaaacaagaacactagagtaatttgaacctctagtaccagctgcaagaacaaacattaaacacagcccagttcccggccagattaacataaattctctcactgaagtcctatatatcagttcctattactcaattcatcaagtttggctttcaacaaaaaaattgccaagcatgtaaaaaggcaatgtgcacacatgtacatgcatgcactgcacacacatttacatacactgtataaaggagcaaagtaagcatgtgaacaagaaccagatatgacgcagatttaggaatgatcagacrtgaaatctaaaataactatgattaatataagagttttaatggaaaaattagataacatgcaaaaacagattgctaatgtaagaagagagatggaaactccagggacgattaaaaataaatccacacccaaatatttctgagtgaaacttcagaacctcaaagataaaaagaaaatcctaaaaggcatcagagagaaaagtcatcttaactgtaatgaaaagacaattaaagtgacagcagaccttagc

SEQ ID NO: 421382 - DNA, 497 bp, Homo sapiens
gggtacatgatcaaaatcatgatatatacaaaaataatgtgatatatgatatgataataagttcaaatgagtttccacaaatcttacagtttaacagaaaattaacaaattcatgtctgtaacacagatcatttgttctttaatgttacaaacagttcagtggcttttaaaaatgtagtaattcaacttagaatgaataacccatgatatcatgttcttggatactaatagaaaagggaaaacagtaacagcttaatgaatctcaaaaaaatatcagtaaccttattcaattatgaaagaacttcttatattataatcataaaacaaaaaagaacaggaaaatgagatattttggcataacttcagaaaacaatggcctggatgtttatcatatgacccagtaatagaactttgtaatgcttttgactratatgacttgaaataattaatcaaagatacaaaattcaaatatgtattattagcttcccaaagctttc

SEQ ID NO: 421383 - DNA, 555 bp, Homo sapiens
gctgagggtgccacagttcaatacaaaaaccattatgcttacttaccatgctacaaagtcctccaaatcacttataagggtgagtctgaacgaatggccccaagcttgcctgcttcattcccaataactccaagcctttctcaggcatgattaaattttcctggcagtcatatgcagcatgcttctcctctctcctgtcttttcaaatcttatagttgccttttcttgctgactacctttcttccctttttyctttatcagcaacacccttcattctggtcatcaacattcacattcccaccatgcttggcacacaccctggggctgagataccctacaaccaatagtgggtctcttggggaagacttagcaataaatcacagtggccccccagtgcatccctctaacttctccttacttcatacctggcaaactctccatcagaatgatttgagattttattctatcctgagcactcataactatgtaactgtaggacaggctctctgtgccagtgccaggatagtggacgtgcctgggatgctttcatttcca

SEQ ID NO: 421384 - DNA, 555 bp, Homo sapiens
gctgagggtgccacagttcaatacaaaaaccattatgcttacttaccatgctacaaagtcctccaaatcacttataagggtgagtctgaacgaatggccccaagcttgcctgcttcattcccaataactccaagcctttctcaggcatgattaaattttcctggcagtcatatgcagcatgcttctcctctctcctgtcttttcaaatcttatagttgccttttcttgctgactacctttcttccctttttcctttatcagcaacacccttcattctggtcatcaacattcacattcccaccatgcttggcacacaccctggggctgagataccctacaaccaatagtgggtctmttggggaagacttagcaataaatcacagtggccccccagtgcatccctctaacttctccttacttcatacctggcaaactctccatcagaatgatttgagattttattctatcctgagcactcataactatgtaactgtaggacaggctctctgtgccagtgccaggatagtggacgtgcctgggatgctttcatttcca

SEQ ID NO: 421385 - DNA, 444 bp, Homo sapiens
tcacaacttactttcccacttgctgttatatgaaaaacacaaagcagtggaataaacagtggatatggagatggaagtttaaaaactcccatsccataccaataaaacatgagtttgtatgagacatgcacctcttcccagctctgtgtatttatttacttcttgaggcttctacttcctcacttataaaatgagtgtttttaaaacctaccttgaaaaggtattgggagctcagtaaaatatctgatacagtacagagctcaagacataataggtgctcagtaaatggtagttcatgataatatgaatcccctttcatcttttcttactttttttctttgatcactagaatctaatattctagatatctaatctccaaaaactaaaaaacatactgcccttacttagatgtgagaactaatttgtggaaacaggatgttgaat

SEQ ID NO: 421386 - DNA, 444 bp, Homo sapiens
tcacaacttactttcccacttgctgttatatgaaaaacacaaagcagtggaataaacagtggatatggagatggaagtttaaaaactcccatgccatacmaataaaacatgagtttgtatgagacatgcacctcttcccagctctgtgtatttatttacttcttgaggcttctacttcctcacttataaaatgagtgtttttaaaacctaccttgaaaaggtattgggagctcagtaaaatatctgatacagtacagagctcaagacataataggtgctcagtaaatggtagttcatgataatatgaatcccctttcatcttttcttactttttttctttgatcactagaatctaatattctagatatctaatctccaaaaactaaaaaacatactgcccttacttagatgtgagaactaatttgtggaaacaggatgttgaat

SEQ ID NO: 421387 - DNA, 316 bp, Homo sapiens
agacaaagccagttaatccacagtggcaaccttgaccttattagatttgcaaacataggcaaaacttaagttgaactgttttttgtaagtgcctaattaaagaaaaaggaaatttaagatcaactaatcagaagatgtcagctaacttatagctatacacctaaggactttccartgggatagaccaaataaggccatttcataactgtaaccaatcaactattttatttacattgtttctgagttcatcgcagaaaagccctctccttgtgtacccttgggggaatccaagccaccttcagtttggtgcttccca

SEQ ID NO: 421388 - DNA, 525 bp, Homo sapiens
tcaagtaactggcttacatgattgtgtgggctgactagtccaaaatctgtagggcccatggactctggaaactctctggcatgagctgctactgcgtccagagatggaatttcttcttcctcaggtaaacctcagttttgcttttgacactcttagaactgattggatgaggcccaccccatattattgaggataatctgcctaaagtcaactgattatagatattaaccacatctacactagaacttgctttttagatggcacttgtgtgggcattttccaaacatcattgaaggaaataaaattcataggagccatttgattgaatcagccaatgtccaggtttcatgttgtgacttcagaccaagtgcagatactctatggccagattcttttaagatctgtaaaatatatttcctgaatgaggttcccaaatcagcatgtctgcattattctggtaagccaatctcttacaaacctgtgaaggaaatacytagtccacaatgggaactattagttcgtcaa

SEQ ID NO: 421389 - DNA, 546 bp, Homo sapiens
tctgtactggggcaccacctaatggagctgtgagaagagggccaccatccgccagaccccagaatggtagatccactgacagcttgcaccatgcttctggaaaaaaccacagacattcaatgccagtccatgaaggcagtcaggagggaggcgcctgcctgcaaaaccataggggcggagcttcccaagaccatgggaacccacctcttatatcagtaagacctggatgtgagacgtggagtcaaaggagatcattttggagctttaagatttgactgtccctaggttcttggaggctgcagctttaagtgaaattgtayaccctataaagaaatcaatttaccataggttagttgatataaacaagagttaagttcttatggcagatagcgtgttgtttcacttaaaagcctcagtttccgcgaacctatcgacaacattaactgagaacttattttaaagcaggttttgaatgtgttatcaaaatggtaaagaatatttaataaattatcaaaatcaagtgatggtcatcaaaagagacatata

SEQ ID NO: 421390 - DNA, 586 bp, Homo sapiens
caaaaaaaaaaaaaaaaaaaaaaggaaagaaattatgctaaatctattccacctgtgctctataaatggaacagcaaagcctgatatgcagcacatgtttacagcatggtttactgaatattttaagcccactattgggacctactgctcagataagattcctttcaaactagtactgctcatagacagtgcacctggtcatccaagagctctgatgaagatgtacagggagattaatgttgttttcatgcctgctaacacaacattcattctgtagcccatggaacagggagtgatttagactttcaagtcttgctatttaagatgtacgctctgtaaggctatagctgtcacagatagtgattcctctgatggatctgggcaaagtcaattgaaaccttctagaagggattcatcattctagatgctattaagaacattcatgatttatgagaaaaatcaaaatatcagcattaacgggagtttggaagaagttgattctaacccttatggatgactttgagggttcaagatttaaggggagaaagtaactgcmgttgtgttgtaaatagcaaaagaactagga

SEQ ID NO: 421391 - DNA, 556 bp, Homo sapiens
tgccttgcattcttgggataaaccccacttggttatgttgtataattctyttaatatatttgctaacactttgtttgttaaatttttttgtctatattcagaaggaatattgacctatagttgtctttttttgtactatctgtttggctttggtatcaaggtagaactagctttatacattcaattgggagtatgctcttcttttctgttttttggaagagattgtgtggaattagtgttaattcttctttaaatgtttggtagaatcctcaagtaaatttatttgggcctggagatatcctttttgggagttttttttaacattatgaatttcatttatttaatagttatagggctattgaaataatctatttcatattggatgagttgtggtaatatatgtttttagatgaaatagatcacttcctcaaagtcgtcaaatgtatgcgtgtattcacagtattctgttattctcctttcaatcccctgtattattcctgatgtttctagttctgctagtctagttgcgtttatctattttctgatcttgtcaaag

SEQ ID NO: 421392 - DNA, 582 bp, Homo sapiens
tttttctttcttcagatgtatgcatttagtgctgtaagtttccttttcagttttagctgtgtcccagacattttatgttggattttcactttcattcagtttaatgtatttttaatttttcttgagacttccttttttgatttatggattatttagatgtatattgcttagtttctaagtatttggaagttttcctctcatcttctgcttttggtcctctgacacatacatattctgtatgattttattttttaaaaactgttgaggtttgttttatggcataggacatagcatatcttggtgtatgtttggtgggcacttacaaagaatgtgtattctgttgttggggtgagtgttctaaaaatgtcagttagaacttatttgtttgtagttaatatgatttggctctgtgtccccacccaaatctcaccttcaattgtaatgcccataatccccacttgtcaagggcatgaccagataaaggtaattaaatcacgggggtggttttgcccatgctgttctcgtgataatgagtgagtctcatgagatctgatgkttttataagcatctggcattttccct

SEQ ID NO: 421393 - DNA, 524 bp, Homo sapiens
gttggtcctctgctttgaaactagctattatctatgtccttgggaagttgtgctattaactcatatcccacaaatgtttccagattgatccaaggctcctagcaagtcacaatgaatgtctttatttttttttaatgcttaagcagctttattgggatacaattcacwtgtcatacggttcacccacttgaagtgtacaagtcagtgatctttagtatatgcaaatacatgcacgaccatcaccacagtcaatgttagaacgctttcaccacctcagaaagatacccgtacactttagctctcacctctactccacgacaccctctcaaccctaaacaaccactaatctactttctgtatccattcatctccatattctggattttcctatgaatagaatcatatgatatgtgaacctttttgtctggcttcttttagttagcacgatctcttcaaggtttattcaacttgtaatatataccaatatttcatttcttttaatgactgaataatatttcattgta

SEQ ID NO: 421394 - DNA, 524 bp, Homo sapiens
gttggtcctctgctttgaaactagctattatctatgtccttgggaagttgtgctattaactcatatcccacaaatgtttccagattgatccaaggctcctagcaagtcacaatgaatgtctttatttttttttaatgcttaagcagctttattgggatacaattcacatgtcatacggttcacccacttgaagtgtacaagtcagtgatctttagtatatgcaaatacaygcacgaccatcaccacagtcaatgttagaacgctttcaccacctcagaaagatacccgtacactttagctctcacctctactccacgacaccctctcaaccctaaacaaccactaatctactttctgtatccattcatctccatattctggattttcctatgaatagaatcatatgatatgtgaacctttttgtctggcttcttttagttagcacgatctcttcaaggtttattcaacttgtaatatataccaatatttcatttcttttaatgactgaataatatttcattgta

SEQ ID NO: 421395 - DNA, 524 bp, Homo sapiens
gttggtcctctgctttgaaactagctattatctatgtccttgggaagttgtgctattaactcatatcccacaaatgtttccagattgatccaaggctcctagcaagtcacaatgaatgtctttatttttttttaatgcttaagcagctttattgggatacaattcacatgtcatacggttcacccacttgaagtgtacaagtcagtgatctttagtatatgcaaatacatgcacgaccatcaccacagtcaatgttagaacgctttcaccacctcagaaagatacccgtacacyttagctctcacctctactccacgacaccctctcaaccctaaacaaccactaatctactttctgtatccattcatctccatattctggattttcctatgaatagaatcatatgatatgtgaacctttttgtctggcttcttttagttagcacgatctcttcaaggtttattcaacttgtaatatataccaatatttcatttcttttaatgactgaataatatttcattgta

SEQ ID NO: 421396 - DNA, 528 bp, Homo sapiens
atatatgcctaataattatccaatttggaaataaagatgtagattataacatacaagaaggacattttattggaaatttattttcccttaatatgagcatgaaagaaagtgagacacatattacctaaacataattaacatttctaaatgcatgaataaatggaaaaattaagcttggtatctggaagtgctacraattatgtaactggaaagaaaatcaaaatgttatctaggctatgattatgttaaaaatttttacctttaaccatatgaggtagaaccatgttcataaaaccaatggtcagccatactaatcattgcatagcttatttgggctgggtaattctgtttaataataaagttgtttaaatttttaaaaaggtaaaattctagtttagtttaatccaaagcataggtataagcctcagcaaaattcagtaataagtataattaaccctaacgatatacataactattataaagtatactactaaagagtactctccacagccacataaaacaattgac

SEQ ID NO: 421397 - DNA, 474 bp, Homo sapiens
aaccaatcttggacttttgaccttccgagctttcacataayacatgtgtgttgttttaagcaacaaagtggtaacttgttacagcagcaatagaaaacgaatatagcacccagcctatagctgctggaaatactggctactgatgagtcatagatatgtctctcactgggaattgtccttaactacaaggaattgtctagtcttgtaggtttttcttcctctcaggggatgcaatgactagttgatacggggttacaaagacctaagttgaaggtaaattacaggtaagcttcttagtctgcccagtcctaccttcactttcttaaaatcgaatatcctgaggtcctttcctaataaaccttctgcatgcaagtcttccttttagagtctatttcctgtgatacatattgattaatgcaaactcagcagaaagagcctatgtctcttcacagacagctacacataaatctttgt

SEQ ID NO: 421398 - DNA, 583 bp, Homo sapiens
atgttgaacagctgtgagtgtatggggtttgggtcagtggaatgaggctrtatttcaaacaactacacagggagaggaagttttagctaggccaaaggtgatgaggtaaactgactttcaaagaacttaggtcaggctttaaaattaatgtcaggaccgcaactatatgaaacaaatttatgacaaagtctacgtgggtgacttctacagaattgacttctgttaggccttagtttttgagtgacaccagtctaattaattgctgttcatgactcatagctatcacagatactgggtttcacatgaatcaacagttaataaaattcataagtattgcaaagaggtcatgaatctgagaagctctattagttttgcttaatttccccctttgtgaaatatggataagttgaaaagcactactcatattcatctttttactttttcttatttactgaacttttattgagtataatcagagaatcttggcacgtatttggcaaaaaatacatctttattactgagctacttgttcagatgatttaaatttaggaccaaaagagactctagaatgattcctatgtgt

SEQ ID NO: 421399 - DNA, 583 bp, Homo sapiens
atgttgaacagctgtgagtgtatggggtttgggtcagtggaatgaggctatatttcaaacaactacacagggagaggaagttttagctaggccaaaggtgatgaggtaaactgactttcaaagaacttaggtcaggctttaaaattaatgtcaggacmgcaactatatgaaacaaatttatgacaaagtctacgtgggtgacttctacagaattgacttctgttaggccttagtttttgagtgacaccagtctaattaattgctgttcatgactcatagctatcacagatactgggtttcacatgaatcaacagttaataaaattcataagtattgcaaagaggtcatgaatctgagaagctctattagttttgcttaatttccccctttgtgaaatatggataagttgaaaagcactactcatattcatctttttactttttcttatttactgaacttttattgagtataatcagagaatcttggcacgtatttggcaaaaaatacatctttattactgagctacttgttcagatgatttaaatttaggaccaaaagagactctagaatgattcctatgtgt

SEQ ID NO: 421400 - DNA, 583 bp, Homo sapiens
atgttgaacagctgtgagtgtatggggtttgggtcagtggaatgaggctatatttcaaacaactacacagggagaggaagttttagctaggccaaaggtgatgaggtaaactgactttcaaagaacttaggtcaggctttaaaattaatgtcaggaccgcaactatatgaaacaaatttatgacaaagtctacgtgggtgacttctacagaaytgacttctgttaggccttagtttttgagtgacaccagtctaattaattgctgttcatgactcatagctatcacagatactgggtttcacatgaatcaacagttaataaaattcataagtattgcaaagaggtcatgaatctgagaagctctattagttttgcttaatttccccctttgtgaaatatggataagttgaaaagcactactcatattcatctttttactttttcttatttactgaacttttattgagtataatcagagaatcttggcacgtatttggcaaaaaatacatctttattactgagctacttgttcagatgatttaaatttaggaccaaaagagactctagaatgattcctatgtgt

SEQ ID NO: 421401 - DNA, 583 bp, Homo sapiens
atgttgaacagctgtgagtgtatggggtttgggtcagtggaatgaggctatatttcaaacaactacacagggagaggaagttttagctaggccaaaggtgatgaggtaaactgactttcaaagaacttaggtcaggctttaaaattaatgtcaggaccgcaactatatgaaacaaatttatgacaaagtctacgtgggtgacttctacagaattgacttctgttaggccttagtttttgagtgacaccagtctaattaattgctgttcatgactcatagctatcacagatactgggtttcacatgaatcaacagttaataaaattcataagtattgcaaagaggtcatgaatctgagaagctctattagttttgcttaatttccccctttgtgaaatatggataagttgaaaagcactactcatattcatctttttactttttcttatttactgaacttttattgagtataatcagagaatcttggcacgtatttggcaaaaaatacrtctttattactgagctacttgttcagatgatttaaatttaggaccaaaagagactctagaatgattcctatgtgt

SEQ ID NO: 421402 - DNA, 569 bp, Homo sapiens
tttgctctcaagtgcatcaagcggtaagaacaccatatgtgtgatattaggaatcttctgttgaacaaacatttacagacatttatcagcactgtactcagatacatttgtttcttaagccatgtttactgacagcctttttttatcttcatttgctatcaagatgtctaagtataaacttatgtttctgcatcaaacctagcaaagggaaaaatttattatttcattcattcattctttcaacaagtagttacgttcattttgtgtgtcaggcactttaataagcattgttaaataagacattgcccataccattaaagcccagtaggcagattcaggtgacgaagtaagtccaaggatttaactgcataartgttccttagaagaagaagggaaagcttttgagtccaggcataacctaagataaggcataataatgatgattaagatttattgagggcttaatcctttcacatcacacagccaagaggaatatctcaaatgttgacaacaacccttcggtctaaatagttattatccacactgtactgaatagaaatttgtagcaa

SEQ ID NO: 421403 - DNA, 569 bp, Homo sapiens
tttgctctcaagtgcatcaagcggtaagaacaccatatgtgtgatattaggaatcttctgttgaacaaacatttacagacatttatcagcactgtactcagatacatttgtttcttaagccatgtttactgacagcctttttttatcttcatttgctatcaagatgtctaagtataaacttatgtttctgcatcaaacctagcaaagggaaaaatttattatttcattcattcattctttcaacaagtagttacgttcattttgtgtgtcaggcactttaataagcattgttaaataagacattgcccataccattaaagcccagtaggcagattcaggtgacgaagtaagtccaaggatttaactgcataagtgttccttagaagaagaagggaaagcttttgagtccagrcataacctaagataaggcataataatgatgattaagatttattgagggcttaatcctttcacatcacacagccaagaggaatatctcaaatgttgacaacaacccttcggtctaaatagttattatccacactgtactgaatagaaatttgtagcaa

SEQ ID NO: 421404 - DNA, 590 bp, Homo sapiens
ttaaaataatcattgtgatattattacttcccataggtaaaagtattaaaatatatggtatattattcttatattaacataaatattaattttaagtatatccattattttaacatgctaggcaccaggggctataaataatttatctatcrtatcttgtgaatacaaatattttaaatcctttgaaataacgaccaatataattagtgtagctgtaagattttttgttcaatcttaacagtatttaaagtgaaactgttccctatttataactgtgctagaaaactaactataaacttgtacacttggtctattccagacaaaatagagtaattgatccgtaaatatgtttggattaaaatattcataccccagatgggtgcaatattttagattgttaccaaacaggcttcatcctaaataaacaaatctcagggtcacacagaacattaggggtcatcttggccagcttcccattaggatgtttgaatatactcaatagcattttctgaagtccaaatttaaatgctgttggtgataagaaactcagtgtcttttcatacattgcattactggacaactctaattgt

SEQ ID NO: 421405 - DNA, 586 bp, Homo sapiens
caccgcagctttaacagtctacgtgattcctgttcatggattaatgagagctttttcttttttctcaagagaatgttatgttggctttctaaagctgcttttaaaagcaaaaggaaataacatctttcaaatgcatatatgaatcccatcattcataattgtaatttcaaaattgcatactagatatgatctaatttcagcctagcatgtatgcagttaatgctggccagtgatctttctgggagtcctgaggtgtggcattaattatgtatattgcttacacctgtgaaaaatcagcctgcccttctggagctaataacaaaattaaatgttaaattctgactgcaccgagagggtcttttcagttatgcctgccatcttttggctaagagtgttccatattyagtcttgctcattttgatgcagattatcatgtattttatgagttggattaaaacagaatgcttttttgaaatcctacagctgccagtctatatagcacattcatgaggaggaggaaactgctgtcctgttatctatggaaaatatgaccaattccattgcaatgatatcgagaaccaggtga

SEQ ID NO: 421406 - DNA, 619 bp, Homo sapiens
ttttgtatttttagtaaagacaggatttcactgtgttggtcaggctggtctccaactcctgacctcaggcgaccccccctgcctcggcctcccaaagtgctgggatgacaggcatgagccactgcacccagcccacttggccatctttcaatagatgtctcaaagacagctgagacttactatgtcccataacaaacctgtagtcttcctcccaacaaacttagtcccaatatttctacaaatggcaccagcatccagttagttatgcaatgcagaaytccaagaatcatccttgtcacctcttatctcccaccatctagttccaatctaataaatgcagtgagtttttagctcccatctactttcttcatctgtataatccatatcatcagtagaagtgtccattacctcaattctggatcacaaaaatagctatctacctaaactttctgcattccctctggctgctctccaatcctttctctgtccttcaatcagtgtgagcttcttacaacacaaattcaaaatgtgaatcctttgtgtaaaacccagcagtggctttccatggctcgaaaaattttttttaaatgccaaaaaaaattatgccaaaatatataaa

SEQ ID NO: 421407 - DNA, 619 bp, Homo sapiens
ttttgtatttttagtaaagacaggatttcactgtgttggtcaggctggtctccaactcctgacctcaggcgaccccccctgcctcggcctcccaaagtgctgggatgacaggcatgagccactgcacccagcccacttggccatctttcaatagatgtctcaaagacagctgagacttactatgtcccataacaaacctgtagtcttcctcccaacaaacttagtcccaatatttctacaaatggcaccagcatccagttagttatgcaatgcagaattccaagaatcatccttgtcacctcttatctcccaccatctagttccaatctaataaatgcagtgagtttttagctcccatctactttcttcatctgtataatccatatcatcagtagaagtgtccattacctcaattctggatcacaaaratagctatctacctaaactttctgcattccctctggctgctctccaatcctttctctgtccttcaatcagtgtgagcttcttacaacacaaattcaaaatgtgaatcctttgtgtaaaacccagcagtggctttccatggctcgaaaaattttttttaaatgccaaaaaaaattatgccaaaatatataaa

SEQ ID NO: 421408 - DNA, 567 bp, Homo sapiens
tgcacggtgcaagcagtcactagatctaccattctggtgtctggaggatgttagccctcttctcacagctccactaagaagtgttccagtaaggactctgtgtgggggctccaaccacattatttcctttccacactgccacagcagaggatctccatgagatccccaccccagtagcaaacttctgcttggacttccagacatttccaaacatcttctgaaatctagttggaggttcccaaaccccaatttttgacttctgtgcactggcaggctccacaccatgtggaagctgtcaaggcttgaggcttgcaccctctggagccatggccgaaattctacattgkcccctttcatctacagcttgagcagctgggatgcagggcaccaagtcactaggctgcacacagcatggtgaccctggacctggcccacaaaaccactatttcctcctaggcctccaggcctgtgatgagaaggcctgaagtgaacacctctgacatgccttggagacattttccccattgtcttggggattaacatttggctccccattacttaagcaaa

SEQ ID NO: 421409 - DNA, 567 bp, Homo sapiens
tgcacggtgcaagcagtcactagatctaccattctggtgtctggaggatgttagccctcttctcacagctccactaagaagtgttccagtaaggactctgtgtgggggctccaaccacattatttcctttccacactgccacagcagaggatctccatgagatccccaccccagtagcaaacttctgcttggacttccagacatttccaaacatcttctgaaatctagttggaggttcccaaaccccaatttttgacttctgtgcactggcaggctccacaccatgtggaagctgtcaaggcttgaggcttgcaccctctggagccatggccgaaattctacattgtcccctttcatctacagcttgagcagctgggatgcagggcaccaagtcactaggctgcacacagcatggtgaccctggacctggcccacaaaaccactatttcctcctaggcctccaggcctgtgatgagaaggcytgaagtgaacacctctgacatgccttggagacattttccccattgtcttggggattaacatttggctccccattacttaagcaaa

SEQ ID NO: 421410 - DNA, 529 bp, Homo sapiens
aattttcagaaagtccaatcaaacattacaatttagaaggcagctgctaataatttctagtgatttaaagggaagctgtgtactacagctgtgggatacttctcccttactgtcatattcatcctcattggtttcaaacaagaatacacattttggtatattctaagcagctggctattctcgttgcctgaaattctttctaatccatacctcaagaagccatcttgaacacacaaacttgaacagtcctagaagtcactttctgtcctggtattccatttgattcctgatcattatgcgaaattatctccattcatttacttacrtatttacttgtttgactccttattgcatcccttctaatttcttcctccacccttgccacgtgtgtatagtggaatataatattcaaaggaacagtaatcttgctgtttttttcaacaacttcatcattggtgtttagtataatgcttgacacttaaaagttactcaataaatatttttaactaattataaataaatgaaacga

SEQ ID NO: 421411 - DNA, 598 bp, Homo sapiens
acccacatatctctcactcaattccattttaccttaccagagtttattttaaaaatctttgataccaacatttgttattttccaaattttatttccctgtcccaggatccaattcaggatatcgcatttatctagtcaccatttctccttagtctcttctggtctgtggcaatttctgtctttccttgtttctcatgttgttactagactttataaatcctggccagacatgtgtaaaatgagtcttaatgtgggattgtctgatgttttcctcattgctaggctggtattatgaattttagggaagaaaactgtagaactgaagtgcccttctcatcctaacatatcagggagtacatgacataaacgtgatgtactggtgatgctaacattgatcacttggttaaagttgtgctgatatgtttctccagtataaagttactatttttccactttgtgtcttctattcattgaaaacaagtcactaaatcaagcccacactcaaggctgggacagaatatgggttaaactaaacttccaggagttgaaacatctatatatagkatgtgaaattttatgatgctgctctgtcctctct

SEQ ID NO: 421412 - DNA, 437 bp, Homo sapiens
gagtagagaagggggaatgtcctccaggttaaagagagagcatataaagaatccttaaactggtaaaaagcttgagttgttagaagaataggcaaaaagtctggtggatgacagtacatcgcaaaaacgtgacaataaaggctgaagatgtaagtagcgaaaaatcactataggtcttgtaggacagtgtatttaggttttattctttgagctatgggatrccatttaagaattttaaattggatatcatttttgtgtttatcaatttctctgcacacatatgcattatttaatatgtatatacattatattagtacatatttttgtatgtatacatatatgtttctagttactgtataacaaatgcagtatactttatgttagtacatataatgttgatatgtatacatacacacatatatttctagctgctgtat

SEQ ID NO: 421413 - DNA, 567 bp, Homo sapiens
atggcctccaatttcatctatatccctgcaaaagacatgatcttgttctttttttatgggtgcatagtattccatgctatataggtactacattttctttatccatgtctttaattgatagacagttaaattgattccatgtctttgctattgtgaatagtgctgcaataaacataagtgtctatgtgtctttataatagaacaatttatattcctatgggtatataacaactaatgggattgctgggtggaatggtattctgtctttatatctctgaggaactgccacactgtcttccacaatggttgaactaatttacactcccaccatcagtgggagtaaattttcaccacaccctccccagcatctgcaatttattgacttttaataatagctaagtaatactttatttcttaagctaggakgtatggtcaagcatattatcagttattcttaaaaacattttgattatttaaaaattcttaaaatattaaataatgagattgtgttaatttgtccatagaattgatgtgtccaaagtattcaaaaaaattcaaatgaaatag

SEQ ID NO: 421414 - DNA, 361 bp, Homo sapiens
acattattttttatttcaattagtctttgggtaaaaggtggtgtttggttacgtaaataatttcttcagtggtgatttctgagattttggtgcatccatcacccaagcagtgtacactgtacccaatgtgtagtcttttatcccttatccacctctcaccctttcattatatcatccttatgcctttgagtccccatagttcattgtatcattcttacgcctttagtcctcatagcttagttcccaattatgtgataacrtacaatatttggtttttcattcctatgtgacttctagaataatactttccagttccatccaggttgctgcgaatgcattatttcattcccttttatggctg

SEQ ID NO: 421415 - DNA, 620 bp, Homo sapiens
aaggatcctcacagggtccacttcgctcccctgctacctccactggagcaggtgctggtatccatggctgcaaaacctgaagacggatcccatcagagaactgtttgcagatactccccagtactggcctggagcctgttagtttcactaggtggctagacccaggagagcgaaaactatcactgcaattcagctcttaggaagccccatccctaggggaaggggagaacaccacatcaagggacaaaaaaaatctctgaacagcagcccttgtgtcccagaacttccctctgacatagtctacccaaataaggaaccagaatggcaattctggtaaaatgacaaaacggttctttaaaacccccaaaagatcacaccagctcascagaaatggatccaaaccaagacgaaatctctgaattcccagaaaaacaattcagaaggtcaatcattaagctaatcaaggaggcaccagagaaaggtgaagtccaacttaaagaaatcaaaaatatgatacaagatatgagaggaaaaatcttcagtgaaatagatagcatgaacaaaaaacagtcacaacttctagaaatgaaagacacacttagaaaaatgcaaaatgcact

SEQ ID NO: 421416 - DNA, 664 bp, Homo sapiens
agctaaattataaattaaatgggagctattactactgataccacagaaatacaaaagattattcaaggctactgtgaacacctttatgcgcataaactagaaaatctagaggagatggaaatcactttttgactcacccatggatgataaatgatcactggatgactggttacacccctttctgacttgtatctttgagtgttagtatattcacactgaatttggaactattctgtttctgaggtgactttgcatatgtcttctctaatttattatagattaattttatattttaactcaccgaaggtactcctacttgtcttatttctaacatttttaaaacctcacatatataaactgacaacagaaaaattactgttgctcttcttaagtgaaataactaaaactactgcaaccatacaggtatgagtattatggaaagttgtttctgttgattattgttgstctaaaaaagagtccgatgataatgttaacagctgctatttcaacttacctagtgaacaataatatttttttcataccatttacaggtccttaaggactaactgacaggcattgtgcaatgcataaatggttcttcttgacactgtaaaaactgacaatcagagagcaagtagttaagcttgtgagtgaagtagtggta

SEQ ID NO: 421417 - DNA, 661 bp, Homo sapiens
caggtgaggtgagagcccttgcaagaagacacccatcatgaagaggacaatacagacgcttccgaaaccaggaagtggacaggaacccattttggccagtgagatactgctggttttgagaacaaggaacagaaactgaaatttctcagacttacgagtggcttygagaatctgccctctctgttcagctgctccatcagcatggttttgaggcccaaaattgccctcagcaagaaagcaaccaaaagcctgccgcagagcctgcagcaggacagcaaccaaaccttccactggaaatacaactgaggaattggccttggtttctccacttccccaaacagaatattttacattgataggaaagcttccaaatcaatcaagttggaagattaaactctagtgttttgttccctaaaacagccagaattgctttattattcatttgtggagacgaaagccacctggcagttgtgtcacatcaaactcctttggagattaaagacaaggacagctatcttgatgggctcaaaagaactagggcaggggtagctcatgtttcaggagccaagagaacacgtgagtggctaaaatctattttttgtattaagcattacattcctgtttgagacaacagtatgtataaataacatttgttgagtgt

SEQ ID NO: 421418 - DNA, 661 bp, Homo sapiens
caggtgaggtgagagcccttgcaagaagacacccatcatgaagaggacaatacagacgcttccgaaaccaggaagtggacaggaacccattttggccagtgagatactgctggttttgagaacaaggaacagaaactgaaatttctcagacttacgagtggcttcgagaatctgccctctctgttcagctgctccatcagcatggttttgaggcccaaaattgccctcagcaagaaagcaaccaaaagcctgcmgcagagcctgcagcaggacagcaaccaaaccttccactggaaatacaactgaggaattggccttggtttctccacttccccaaacagaatattttacattgataggaaagcttccaaatcaatcaagttggaagattaaactctagtgttttgttccctaaaacagccagaattgctttattattcatttgtggagacgaaagccacctggcagttgtgtcacatcaaactcctttggagattaaagacaaggacagctatcttgatgggctcaaaagaactagggcaggggtagctcatgtttcaggagccaagagaacacgtgagtggctaaaatctattttttgtattaagcattacattcctgtttgagacaacagtatgtataaataacatttgttgagtgt

SEQ ID NO: 421419 - DNA, 592 bp, Homo sapiens
caccttgctctaattccaaacaagtttctcatctccatctgagaccacctctgcctgaatttcattgtscatatcattattagcattttggccaaatccattcaacaagtctttagggaattccaaactctcccacatttttctgtcttcttctaagcctccaaactcctccaacctctgtctgttacccagttccaaggttgcttccacatttctgggtattctttcagcagcaccccactcatagtaccaatttactgtattagtctgttttcacactactgataaagacatgccagagattgggcaatttacaaaacaaagaggtttaacggacttatagttccacatggctgaggaggcctcacagttacggcagaatgcaaggaggagaaagtcatgtcttacatggatggtagcaggcaaagagagagaacttgtgcaggggaactcctctttataaagccatcagatctcgtgagacttattcacgatcacaaaagcagcatgggaaagacctgcccccatgattcaattacccaccacgggatccctcccacatcacatgggaattcaagatgagatttaggtg

SEQ ID NO: 421420 - DNA, 592 bp, Homo sapiens
caccttgctctaattccaaacaagtttctcatctccatctgagaccacctctgcctgaatttcattgtccatatcattattagcattttggccaaatccattcaacaagtctttagggaattccaaactctcccacatttttctgtcttcttctaagcctccaaactcctccaacctctgtctgttacccagttccaaggttgcttccacatttctgggtattctttcagcagcaccccactcatagtaccaatttactgtattagtctgttttcacactactgataaagacatgccagagattgggcaatttacaaaacaaagaggtttaacggacttatagttccacatggctgaggaggcctcacagttacggcagaatgcaaggaggagaaagtcatgtcttacatggatggtagcaggcaaagagagagaacttgtgcaggggaactcctctttataaagccatcagatctcgtgagacttattcacgatcacaaaagcagcatgggaaagacmtgcccccatgattcaattacccaccacgggatccctcccacatcacatgggaattcaagatgagatttaggtg

SEQ ID NO: 421421 - DNA, 591 bp, Homo sapiens
tgttttgaaggagaggaatatcaaatactttgtagacatattttaaaactaccacatttggtattaaagattctctctttttaattggatgagtttactaaggctttcataacaaagtactaaaacctgggtgcttaaaacaacagacacttattctctcacagttcggaagctagatgtcctaaatcaaggtttcagcagggccacgagccatctgaaagcttctgggaagaatccttcctagtctcttcctagattcagtttgctcctggcaattcttggaattccttgacttgtatttggaacactccaatctctgcctctgcctctgtctttactacatagctttctattctttgtcttttctatgtgcctgtgtccaaatctctctttcctttttttttttattacactttaagttctagggtacatgtacaaaacgtgcaggtttgttacatatgtatacaygtgccatgttggtgtgctgcacccaataactcttcgtttacattaggtatatctcctaatgctatccctccccatccccccaccccacaacaggccctggtgtgtgatgttccctttcctgtg

SEQ ID NO: 421422 - DNA, 619 bp, Homo sapiens
ttgtgacacaaagtataaatgcttgaggggatagataccccattttccatgatgtggttattgctcattgcatgcctatatcaaaatatcctatgtaattcataaatatatatacctactatgtactcaaaaatttttttaatttgaattttaaaaaagaataaacccatcattaaaaaggaaatgtctgcttgaagtaaattacaaagttttaatggtgattgtaaacaatsttatttgtcatttttcatctgttctaaaattcttttttccacattttgataattcttattaaaattttccacattttaataatttgtattaaaatctgatatattttacaatcggtggtgactggtggtttagattcagtgaaataccgtaaatgaaattatacaacataattatttctgagaatactgggtaaatgtcaattctcctaaaattaatgtataagctaattgttaaatattaagccctcaataacgtgtttttattccccttaagtaaaacttgacaagattattctatattttactgagtagaatatattaaataataaaagcaaaagatgttcagaacaaaataattgtgtgagtgtatctctactcaatataaa

SEQ ID NO: 421423 - DNA, 597 bp, Homo sapiens
aatgttaaaattgtataatattatggtaagtgcaggataaaaatcaagggacatagagaccacatcatgaagtttcttatctgtataaaaacattctagtagtttacaaaagaagaaatagccatgatacagaaaatatttttttaaatactaaaacaactcaaagaacaatttccatattgaaaggactcaccaagtaccacaaagggtgccacacatatgcatatatatatatatgtgcttcaatgtatggcagtgacgtttaagaacaccagtaaaaaaacagaatcctaaaccttcacagaataataggcatcagaaaaaaaattatccctcagcaaaactgatgcaaaaaaatgaagaaatatcttcaaagagatgaaataaaataactttgaaaactgaattcttattccagccaaaataacatatwtaactcaaattaaataacaattaaaacttaaaaaaatatagaatcttgaaaactccattttgttatttgtgaattcttgatgtatttgaattaaggttgttttaaaaaataaatgttacccttcagagataaaaagtaggtaaaaataataacctagcaacacg

SEQ ID NO: 421424 - DNA, 584 bp, Homo sapiens
acaaataaactatgccctgtatgtatccaatcgtaatgcctagaaagagtttttaagctataatgaagggagaggtcatacggacagttcaacagtctcactgaattgaggaaacattactgggtgtccgtggagactaaattataaatctaagagtatgagaaaggataaagytaaactgagaagtccccctccagctttgaaatgactccatatttctgcattcacgtgaagaaactacacaaggataagagaagaatcacacaaaaatattaaaagaataatttccaaacttaagaaaagaccaacagtagttcctattaccaccaatgagactggaagagcaagtaattcaggaagcattgattagaaaagtcagaagtttacgtgagcgatgaaacaaaattagccctagacttaacactgctcttgtctcatataacaaatttgaagagcaagacccagattctcatactacttacaaataatttaatatgcctcccagaaaaaaagcaccagattatttctaggaatagaaatagcacccaaataagtaaagtattaagatttaattaaaaaactat

SEQ ID NO: 421425 - DNA, 584 bp, Homo sapiens
acaaataaactatgccctgtatgtatccaatcgtaatgcctagaaagagtttttaagctataatgaagggagaggtcatacggacagttcaacagtctcactgaattgaggaaacattactgggtgtccgtggagactaaattataaatctaagagtatgagaaaggataaagttaaactgagaagtccccctccagctttgaaatgactccatatttctgcattcacgtgaagaaactacacaaggataagagaagaatcacacaaaaatattaaaagaataatttccaaacttaagaaaagaccaacagtagttcctrttaccaccaatgagactggaagagcaagtaattcaggaagcattgattagaaaagtcagaagtttacgtgagcgatgaaacaaaattagccctagacttaacactgctcttgtctcatataacaaatttgaagagcaagacccagattctcatactacttacaaataatttaatatgcctcccagaaaaaaagcaccagattatttctaggaatagaaatagcacccaaataagtaaagtattaagatttaattaaaaaactat

SEQ ID NO: 421426 - DNA, 584 bp, Homo sapiens
acaaataaactatgccctgtatgtatccaatcgtaatgcctagaaagagtttttaagctataatgaagggagaggtcatacggacagttcaacagtctcactgaattgaggaaacattactgggtgtccgtggagactaaattataaatctaagagtatgagaaaggataaagttaaactgagaagtccccctccagctttgaaatgactccatatttctgcattcacgtgaagaaactacacaaggataagagaagaatcacacaaaaatattaaaagaataatttccaaacttaagaaaagaccaacagtagttcctattaccaccaatgagactggaagagcaagtaattcaggaagcattgattagaaaagtcagaagtttacgtgagcgatgaaacaaaattagccctagacttaacactgctcttgtctcatrtaacaaatttgaagagcaagacccagattctcatactacttacaaataatttaatatgcctcccagaaaaaaagcaccagattatttctaggaatagaaatagcacccaaataagtaaagtattaagatttaattaaaaaactat

SEQ ID NO: 421427 - DNA, 599 bp, Homo sapiens
ggatggcaagaggttagtcaasgggtacaaagttacaattggaagagataaattctggtgttctattgcatggtattgtgattatagtaaataatgtatatttcaaaataactagaaggatttttaatgttctcaccacaaaatgataaatgattgaggtgatagatatgctaattactctgatttgatccattcacaatatacatgtatcaaaacaggccactgtaccccataaatgtgtacaattattatgtgcctattacaaatttttaaatggaaacagggttttcagcatagccatttaaaaaatgtattatataagtaaatttataaattaataaaaataattatttatctaaaaaaattcagaggctgaaataattcatcaccagcaaatgcaaagtgcaagaaatgttagaccacatctttacagaagaaagaaaatgatctgagtggaaatcaaaatccacacaaaataatgaaaagaaccagaaatggtaactacatgggtaaaatatatattctttatattatcaaaggtccaaaggagaatttacagtttaaaacaaagataaaagtaatgtgttgcagagtttatt

SEQ ID NO: 421428 - DNA, 599 bp, Homo sapiens
ggatggcaagaggttagtcaaggggtacaaagttacaattggaagagataaattctggtgttctattgcatggtattgtgattatagtaaataatgtatatttcaaaataactagaaggatttttaatgttctcaccacaaaatgataaatgattgaggtgatagatatgctaattactctgatttgatccattcacaatatacatgtatcaaaacaggccactgtaccccataaatgtgtacaattattatgtgcctattacaaatttttaaatggaaacagggttttcagcatagccatttaaaaaatgtattatataagtaaatttataaattaataaaaataattatttatctaaaaaaattcagaggctgaaataattcatcaccagcaaatgcaaagtgcaagaaatgttagaccacatctttacagaagaaagaaaatgatctgagtggaaatcaawatccacacaaaataatgaaaagaaccagaaatggtaactacatgggtaaaatatatattctttatattatcaaaggtccaaaggagaatttacagtttaaaacaaagataaaagtaatgtgttgcagagtttatt

SEQ ID NO: 421429 - DNA, 593 bp, Homo sapiens
cttcatttcttatgtaggtatttagtgcattaaatttacctctaaatacagctttatttgattgcgatgtacttgatatatatttacatttttatttattccaaagcaccttaaaatatctcttttgtttcttccttgacccatgaattattcagatgtattctatgtatgttccaaataytgggagatttttgagatatacctctgctattgaattctaatttaatcccattagggttaaggagcaatcctaagatagtttaaatacacttaaatgcgttcaaacttattttatggctctaatatgatctattttaaaatatgtttcctgtatacatgaaaagattgtggattcagttgtaggatgtagtgtttcatattgacaattagaacacttttggtcagttgggtcaatttcaccgatagtgttgttcagtgcctcaataaatccgatgactaccttctgacaacttgtcctatctattcttgagagaaatgtattgaaatctctgtctagatttgtagttgtctatttctccttaaagttctatctgtttttgcttatttttattggttccttgcaaacatcaaac

SEQ ID NO: 421430 - DNA, 593 bp, Homo sapiens
cttcatttcttatgtaggtatttagtgcattaaatttacctctaaatacagctttatttgattgcgatgtacttgatatatatttacatttttatttattccaaagcaccttaaaatatctcttttgtttcttccttgacccatgaattattcagatgtattctatgtatgttccaaatactgggagatttttgagatatacctctgctattgaattctaatttaatcccattagggttaaggagcaatcctaagatagtttaaatacacttaaatgcgttcaaacttattttatggctctaatatgatctattttaaaatatgtttcctgtatacatgaaaagattgtggattcagttgtrggatgtagtgtttcatattgacaattagaacacttttggtcagttgggtcaatttcaccgatagtgttgttcagtgcctcaataaatccgatgactaccttctgacaacttgtcctatctattcttgagagaaatgtattgaaatctctgtctagatttgtagttgtctatttctccttaaagttctatctgtttttgcttatttttattggttccttgcaaacatcaaac

SEQ ID NO: 421431 - DNA, 628 bp, Homo sapiens
aacagcaaaaattgaaagcaaactaaatttccagcaacagaaaatttctgagtaatgaaaaaacaattcaacatcatattatggcaataatatcatttagattatatacaatatgtataaaattattccattaaacagaaaaagttctagaaaatataagacaaaatatgaaaaattgttagctttttgacagggagaggargagagtctataagattttatcatttttttcacatgtacttcctgtggaatttaaaataaaaacgttaagagtggaagaaagagtatggaagtgcctcagggtctgggcagtcctttggccttgtagaataggctggatgtatgcgcatgtgtgggaaagcgtgtgtcttcacgcatgtatccgttcatccttgtttaataaccttgtaactacacaggtttatcatcaatgtatttagtgtttcaaatttccagaagaccttactatcaagctaaattttgactagtgcttgagctacgtatgtagtcttgttatagagatcgaagagattcacttatgaaagagaaataaaagttcaatatccattttgagttattggacataagttattgacattctacttcatgacataataggaaattttat

SEQ ID NO: 421432 - DNA, 628 bp, Homo sapiens
aacagcaaaaattgaaagcaaactaaatttccagcaacagaaaatttctgagtaatgaaaaaacaattcaacatcatattatggcaataatatcatttagattatatacaatatgtataaaattattccattaaacagaaaaagttctagaaaatataagacaaaatatgaaaaattgttagctttttgacagggagaggaggagagtctataagattttatcatttttttcacatgtacttcctgtggaatttaaaataaaaacgttaagagtggaagaaagagtatggaagtgcctcagggtctgggcagtcctttggccttgtagaataggctggatgtatgcgcatgtgtgggaaagcgtgtgtcttcacgcatgtatccgttcatccttgtttaataaccttgtaactacacaggtttatcatcaatgtatttastgtttcaaatttccagaagaccttactatcaagctaaattttgactagtgcttgagctacgtatgtagtcttgttatagagatcgaagagattcacttatgaaagagaaataaaagttcaatatccattttgagttattggacataagttattgacattctacttcatgacataataggaaattttat

SEQ ID NO: 421433 - DNA, 628 bp, Homo sapiens
aacagcaaaaattgaaagcaaactaaatttccagcaacagaaaatttctgagtaatgaaaaaacaattcaacatcatattatggcaataatatcatttagattatatacaatatgtataaaattattccattaaacagaaaaagttctagaaaatataagacaaaatatgaaaaattgttagctttttgacagggagaggaggagagtctataagattttatcatttttttcacatgtacttcctgtggaatttaaaataaaaacgttaagagtggaagaaagagtatggaagtgcctcagggtctgggcagtcctttggccttgtagaataggctggatgtatgcgcatgtgtgggaaagcgtgtgtcttcacgcatgtatccgttcatccttgtttaataaccttgtaactacacaggtttatcatcaatgtatttagtgtttcaaattyccagaagaccttactatcaagctaaattttgactagtgcttgagctacgtatgtagtcttgttatagagatcgaagagattcacttatgaaagagaaataaaagttcaatatccattttgagttattggacataagttattgacattctacttcatgacataataggaaattttat

SEQ ID NO: 421434 - DNA, 611 bp, Homo sapiens
ataaaatttagtcattttatacaagtcaggatgcatgatttaattatatgcttactgaaaaaaacattacttgccttaccccaaaaatatttaataatgaacttcaagttcaagatctcaaacaattcaacttcatctattaatatgctcaaccattaactttttcatttaataaatattgagtgtctactacctgaacatttaattttacaattgaaattagaaaaaaacaacaaaaactccaaaatattttcatatgctttccctcatcaatatttttctcatggttataatgacttaactttcttcatttttaattgttgtattttgtttgtaatgcctttttgttgtgtgcaacagagtgtgaactcatgttttgaaagttcacagtttcacattttgtttgcattttctcttacttttctctctgccttgaatgtagtttttytttttcttttcttcttctaatagttccttggtaatggactgacctaaggaaatacagttatgtataacttacagttgttagattagttttgaagttttaggtatgaaattcattaattttagctattgtctaccatctcgtttgaaggttttaaaattaagtg

SEQ ID NO: 421435 - DNA, 538 bp, Homo sapiens
attatttttaccattttaattgatatcattgaatcagaattatcccaaacctttgactggatagaggaccactgaaggatgcagyttcagatgccatccttaaagaagcaaggaagtgatctctctagatgccgatatcctactcatgcaaagatgaggagtgtgtctaaaatatttttgttaatctatatttcttgaattctttcagttccatcagtgaatgtctatctttaattataattatactaattaaaatgtctattatttaaaaataaatcaatgttaatctcaagtgctgatggagatatgaaaaagcaaagtgtttattgtagtggtacatgctatggaatgtaacatatctgatattgtaaccatccattaaatatacattttgaagtagtacagttcctaacctaaagtcatagaatatactgacacatatatacttaatgcataatgatatatcttgaagtaaattacagccattgaaacactacccgttgcaataaaaaatacatttgtataagacaaaggttat

SEQ ID NO: 421436 - DNA, 538 bp, Homo sapiens
attatttttaccattttaattgatatcattgaatcagaattatcccaaacctttgactggatagaggaccactgaaggatgcagtttcagatgccatccttaaagaagcaaggaagtgatctctctagatgcygatatcctactcatgcaaagatgaggagtgtgtctaaaatatttttgttaatctatatttcttgaattctttcagttccatcagtgaatgtctatctttaattataattatactaattaaaatgtctattatttaaaaataaatcaatgttaatctcaagtgctgatggagatatgaaaaagcaaagtgtttattgtagtggtacatgctatggaatgtaacatatctgatattgtaaccatccattaaatatacattttgaagtagtacagttcctaacctaaagtcatagaatatactgacacatatatacttaatgcataatgatatatcttgaagtaaattacagccattgaaacactacccgttgcaataaaaaatacatttgtataagacaaaggttat

SEQ ID NO: 421437 - DNA, 538 bp, Homo sapiens
attatttttaccattttaattgatatcattgaatcagaattatcccaaacctttgactggatagaggaccactgaaggatgcagtttcagatgccatccttaaagaagcaaggaagtgatctctctagatgccgatatcctactcatgcaaagatgaggagtgtgtctaaaatatttttgttaatctatatttcttgaattctttcagttccatcagtgaatgtctatctttaattataattatactaattaaaatgtctattatttaaaaataaatcaatgttaatctcaagtgctgatggagatatgaaaaagcaaagtgtttattgtagtggtacatgctatggaatgtaacatatctgatattgtaaccatccattaaatatacattttgaagtagtacagttcctaacctaaagtcayagaatatactgacacatatatacttaatgcataatgatatatcttgaagtaaattacagccattgaaacactacccgttgcaataaaaaatacatttgtataagacaaaggttat

SEQ ID NO: 421438 - DNA, 538 bp, Homo sapiens
attatttttaccattttaattgatatcattgaatcagaattatcccaaacctttgactggatagaggaccactgaaggatgcagtttcagatgccatccttaaagaagcaaggaagtgatctctctagatgccgatatcctactcatgcaaagatgaggagtgtgtctaaaatatttttgttaatctatatttcttgaattctttcagttccatcagtgaatgtctatctttaattataattatactaattaaaatgtctattatttaaaaataaatcaatgttaatctcaagtgctgatggagatatgaaaaagcaaagtgtttattgtagtggtacatgctatggaatgtaacatatctgatattgtaaccatccattaaatatacattttgaagtagtacagttcctaacctaaagtcatwgaatatactgacacatatatacttaatgcataatgatatatcttgaagtaaattacagccattgaaacactacccgttgcaataaaaaatacatttgtataagacaaaggttat

SEQ ID NO: 421439 - DNA, 581 bp, Homo sapiens
attttattagttacataagtgtttttgagttgtatatgttttggtatgttaattattattataaaatatgcctccttatctctagtaagaccttttgtcttacttacacttatcgtcgggtaagacctgtttttaacataacaactataaaagctataattttataaatgcaatgttacaaattagcaaaaatgtagcagcctgaaacaaggcacatttaytatcttataatctctgggtttcaggagtccagaccccatttagctgggaactctgctaataatctgaatcccatctgctatttggggctctttctcaagcttactgcaggttggcgcagctataagactgaagtcaatgcttttctattggtccttgaaaagcagtcactcagttcctagagggtacccttaggtttcagccaagaggccttcccaaagcagcttaggtcttcaaaacaagcaagacacactctctctgtctctcattctatgtagctctatctccatctctatctctgtctctctctctctatgaaaggtctggaccctcttttcaagggctcatctaacttgtcaagc

SEQ ID NO: 421440 - DNA, 581 bp, Homo sapiens
attttattagttacataagtgtttttgagttgtatatgttttggtatgttaattattattataaaatatgcctccttatctctagtaagaccttttgtcttacttacacttatcgtcgggtaagacctgtttttaacataacaactataaaagctataattttataaatgcaatgttacaaattagcaaaaatgtagcagcctgaaacaaggcacatttactatcttataatctctgggtttcaggagtccagaccccatttagctgggaactctgctaataatctgaatcccatctgctatttggggctctttctcaagcttactgcaggttggcgcagctataagactgaagtcaatgcttttmtattggtccttgaaaagcagtcactcagttcctagagggtacccttaggtttcagccaagaggccttcccaaagcagcttaggtcttcaaaacaagcaagacacactctctctgtctctcattctatgtagctctatctccatctctatctctgtctctctctctctatgaaaggtctggaccctcttttcaagggctcatctaacttgtcaagc

SEQ ID NO: 421441 - DNA, 618 bp, Homo sapiens
ccaatataaaagactacagtttaaacaaatataagacagttaataatgtaaaaggatctactgcacttttaaaattgcaygttaaatagcaaaattaaataaacagtgaaaattgcatgtttcattctcaaagttaaggtcatattgagcatttttaacctggggtagctattaaatatatgcctaataattatccaatttggaaataaagatgtagattataacatacaagaaggacattttattggaaatttattttcccttaatatgagcatgaaagaaagtgagacacatattacctaaacataattaacatttctaaatgcatgaataaatggaaaaattaagcttggtatctggaagtgctacgaattatgtaactggaaagaaaatcaaaatgttatctaggctatgattatgttaaaaatttttacctttaaccatatgaggtagaaccatgttcataaaaccaatggtcagccatactaatcattgcatagcttatttgggctgggtaattctgtttaataataaagttgtttaaatttttaaaaaggtaaaattctagtttagtttaatccaaagcataggtataagcctcagcaaaattcagtaata

SEQ ID NO: 421442 - DNA, 618 bp, Homo sapiens
ccaatataaaagactacagtttaaacaaatataagacagttaataatgtaaaaggatctactgcacttttaaaattgcacgttamatagcaaaattaaataaacagtgaaaattgcatgtttcattctcaaagttaaggtcatattgagcatttttaacctggggtagctattaaatatatgcctaataattatccaatttggaaataaagatgtagattataacatacaagaaggacattttattggaaatttattttcccttaatatgagcatgaaagaaagtgagacacatattacctaaacataattaacatttctaaatgcatgaataaatggaaaaattaagcttggtatctggaagtgctacgaattatgtaactggaaagaaaatcaaaatgttatctaggctatgattatgttaaaaatttttacctttaaccatatgaggtagaaccatgttcataaaaccaatggtcagccatactaatcattgcatagcttatttgggctgggtaattctgtttaataataaagttgtttaaatttttaaaaaggtaaaattctagtttagtttaatccaaagcataggtataagcctcagcaaaattcagtaata

SEQ ID NO: 421443 - DNA, 618 bp, Homo sapiens
ccaatataaaagactacagtttaaacaaatataagacagttaataatgtaaaaggatctactgcacttttaaaattgcacgttaaatagcaaaattaaataaacagtgaaaattgcatgtttcattctcaaagttaaggtcatattgagcatttttaacctggggtagctattaaatatatgcctaataattatccaatytggaaataaagatgtagattataacatacaagaaggacattttattggaaatttattttcccttaatatgagcatgaaagaaagtgagacacatattacctaaacataattaacatttctaaatgcatgaataaatggaaaaattaagcttggtatctggaagtgctacgaattatgtaactggaaagaaaatcaaaatgttatctaggctatgattatgttaaaaatttttacctttaaccatatgaggtagaaccatgttcataaaaccaatggtcagccatactaatcattgcatagcttatttgggctgggtaattctgtttaataataaagttgtttaaatttttaaaaaggtaaaattctagtttagtttaatccaaagcataggtataagcctcagcaaaattcagtaata

SEQ ID NO: 421444 - DNA, 532 bp, Homo sapiens
caggatcaattttatgaggtcagatacaagatattccaagctgagacacttccaatccctccaygctctcaccacaaatacaatgattaaaagaatcatttgcttcaaaaaaaaacacacaatataaataaaatgctgttgaaaaaatcactgttttgatcattataatccttttaaatgtcctattataatataataaaattgtatatttaagccttctaagaaaggttttcacttgatctaaaactgatctaaaataattatctggtgggaggactgagaaaaacaaaaccagaacaacttcttatgattagccacaaaaaaccccaaatatgtatcttgaattaattaagatacttctaatgtatccatactataaacattatgttggcatttgcattatatccttaggaattatatgacctaaaggtattttctcagaatagatgtccacacaagagaaagtgaatggtttggaaaaaatatttagatgaggcacacagctctagaaacattataatggtggaaaagg

SEQ ID NO: 421445 - DNA, 577 bp, Homo sapiens
attcataaaaggttggactatagattcaccttgcctaggttcaaatatcagccttactaatatgtgactgaaaattttcagctatactgtcttactacttgtaacttttgaaagataaaaycctataaggtacactttaatatgtttctcctctgatttgtatttttagattacgtgtgaaaatgaacttgtgcaaacccaaccccatgctgataatccatctaatactgtcacttcagtacctactcactgtgaagaaggcccagtgcataaaagtacacaaatttctttgaaaaggccccgtcaccgtagtgtgggtatgttttgactcttcaatggattaagcaattgaattgatctttcgtatattaaagatatatgaaaagcaaagtctaactcataggtacttatgcttattctctttcaggtattcaagccaaagtgaaagcgtttggaaaaagactgtgtaatgcaactactcagacagaggaattgtggtctagaacttcctctctctttgacatttactccagtgattcagaaacagatacagactgggatatcaagagtgaacaga

SEQ ID NO: 421446 - DNA, 614 bp, Homo sapiens
agcttgtttccattcatattatattagctgtgtgtgggtttgtcatatatggattttaactttattgtgttaaggtacacatcttctatgcctaatttgtggaggtttcttttttttaatcatgaacagatgttaaattttgtcaaatgcttcatctgcaactattgaaataatcatatggtttttcactttctttttattaatatgatgtctcacatttatgcatttgtatatgatgarccatccttgcattccgggaatgaatctcaattataataagtgatgttattgatatgctactgaattcagtttgctactatttctttgagaattttttcatctatcttcatcagggatattggcctatagttttcttactttgttgtctttgtattgtttggaatcagagtaatgattgccttgtaaattgcgtttggaaataattttccctctttaatttcctggaagagtttgtggagagttggtattagtttttatttaaatgtttgttagaattcaacagtaaagccatcagggcctggttttccgtttgtttgtttgtttgtttttttgataaaggactttttattactggggaattaatccattaacct

SEQ ID NO: 421447 - DNA, 539 bp, Homo sapiens
tattactggggaattaatccattaacctttaaagttattattaataggtaaggacttacaactaccattttgttattgttttctggttgttttgtacatcatttcttcttttttgtccctctcttattggtttcctttgtagttaggagcttttctcttatagtttgctttgaccctgtgctctttatttttagtgtatctattataggcttttgctttgtggttagcatgaggcttacaaaaactatcttatagtaacaggttattttaaactgataacaacttaactttaattgcaaaggatggaaaagaaacaaaaacaaactatacactaacaatatcccccattctcacattttgacttttggatattaaaatttacatccatttgatagtgcttatcgcttaaccagttattgtagttattattttttaatatagtttttagtcttcatacaaaagatagataagtggtttatatacctygattactgcattagattattttgaatttttctgtatatttgcttttaccactg

SEQ ID NO: 421448 - DNA, 571 bp, Homo sapiens
ttctgaaacttctttgatccatgggttatttaggagtgttattctataattatttcatttttattatatatttattagttgtcttctttgtaggaatggagtcttgcttttttgtccaggctagtctccaactcctggcttcaagtgaccctcctgccttggcctcccaaagtgctggaattacagacatgagccagtgtacctggcttagaaatgttgtttaatttatagatatttggagtttttcatatatctttctgttaatggtttctatttgaattccattatattcagatatactttttatgagctttatttttaaaaatttgttacagtgtgtgttatgtaagtaaattaattcacctttatgtaagactctgccttagaaattgtttcctaaataattcaaccagtgatattttgttacaaaaaaacaaattacctcaaaataagacttgagagttgaaaacatcagcctagtaaaagtaagaactgcatcacaagtgataggcgaagtatcagtagccgctsgtgtgatgcagcaatgcagttattaaaaccttcactggta

SEQ ID NO: 421449 - DNA, 594 bp, Homo sapiens
tggaagctaaaattgagcagtgacaatgatattatcgaaaaagaaagataactctccctttgttgctctgagcacctgaaagcaaagctctattgtcttcaaatgaggaatcaactctcatttctcaaagctaactattgtaaaaggtttattttcctgctcagatcaattaccggtattgataatggtgaaagtttttagaatccctgtgactgttattttgtttgaaaaatgatttgtaatgtatgtagacttattcatctccaactgttgatgtagcargaagctgaacattttaatataattaatttcccttgtgatgcaccactaagaaacagcctgcaattagagatgtattttcataatactgtgtgtttcctgaactggtattttatatatattaaaatgttcacaatatttctcaaaatcagtttaaatttctccacatttgtcctacagacaaaaaaaatctagtgacttaaagaataattacctaatgttactgcttcaatgaaataaaaatatccattgcacctgatatttaaactcaaaatgtgtaattccttgtacaatttatgactcatagagcaccct

SEQ ID NO: 421450 - DNA, 589 bp, Homo sapiens
acagacaaaaaaaatctagtgacttaaagaataattacctaatgttactgcttcaatgaaataaaaatatccattgcacctgatatttaaactcaaaatgtgtaattccttgtacwatttatgactcatagagcaccctgaatagtgtatatggcgaggcttaaaattttgaagtcaaacaacctgcgtctgggattaaacagcaagttaccaagcccactgtgtggttttcagcaggtcacctaatgtatccagtcaatttctaaatccccacttgggcaaaatactacttttgtcaaggttttctagtacaaaccaaattatattattattgcttcttgaaggccagaaagcccattgtcatgcactgtacctagccatatctgatcaccattccacgattcacaaatcttaacctataaagacatatgagatgattgttatcacaggccagtgtcttaggggccaacaaaagagctcttatacattgagctctcattctctttctgttgttgatagtctaacataaaggcgaaaaaaaagagaactgtagaaacagtaacaaagatatctgtgataatatattaga

SEQ ID NO: 421451 - DNA, 589 bp, Homo sapiens
acagacaaaaaaaatctagtgacttaaagaataattacctaatgttactgcttcaatgaaataaaaatatccattgcacctgatatttaaactcaaaatgtgtaattccttgtacaatttatgactcatagagcaccctgaatagtgtatatggcgaggcttaaaattttgaagtcaaacaacctgcgtctgggattaaacagcaagttaccaagcccactgtgtggttttcagcaggtcacctaatgtatccagtcaatttctaaatccccamttgggcaaaatactacttttgtcaaggttttctagtacaaaccaaattatattattattgcttcttgaaggccagaaagcccattgtcatgcactgtacctagccatatctgatcaccattccacgattcacaaatcttaacctataaagacatatgagatgattgttatcacaggccagtgtcttaggggccaacaaaagagctcttatacattgagctctcattctctttctgttgttgatagtctaacataaaggcgaaaaaaaagagaactgtagaaacagtaacaaagatatctgtgataatatattaga

SEQ ID NO: 421452 - DNA, 618 bp, Homo sapiens
aatattcacaggaataaggtcatagagtgttgtcaaggaaaaacgcaggacatcataaagttgcttaatgaaaagaatctctaatacaggatttggtgaatgagagggagctgaaaggaagtggtcagaatagagtgaaatagataaatattttaccagaagaaatatgcagaatatccttgaaatgtttaagawactaacaaaagaccaacatggtttgagccaagagaggatgagatagacccctgacatagactatagaggaagaagagggaaggccaggtcttgcaggcctgttaggattctgagtttatgctttggtgatagcaggaccttcaagaatgttgagcagaggagtgatttgctaaatcacaatgctttcaaatacttgacttcacaagtgtgacttggactatcctacatgaccgaaataaatggccatttgaataccaaaaattatattattctgatgtattcacaagtcaaaaggggaaagcaatacattttaaaatgtaaaaaagcaattggccctcaagtgccttcccttttttctaaattcagaatagtagaaatctataattgagcataattgtagagaacaaagggggaaaatatgac

SEQ ID NO: 421453 - DNA, 601 bp, Homo sapiens
ttccttccttccagcttccttccttctttccttccttccttcattccttcgtctttctttctttcttctttctttctttctttctttctttctttctttctttctttctttctttttctttctttctttcttctttctttattctttctttctctattaattcgtggcatgatcatttaaagtgatattttaaaacagaagaaagcaaataaatctatatcaaattatataacataaaaattagcattgcatcttatcaccacaatgcttactctgaatttagaaataattgaagtcatctaatgcaggcatctctcattttcctgctctattctttatcgtttctgtgtatctttgttgtcattttcttctctcctgtttcaggaagtgtcccgttcttcaagattagctcttatatattgtttctttctttaaccatttataatacaatattctaccaaatgtttctttatattacatgttcaattttccccttccagtgtgcccttcytcctcagttattacttataatggatacaccttctcccgtaaaaacatggcctaatctacaaacaagaacacttcttccctgtcatttatt

SEQ ID NO: 421454 - DNA, 569 bp, Homo sapiens
ttggtaaattttaatttttatattataattaccatttctaccttaaaatttcactttatatactctgcttgaagatttccttttccctctttcaaatatctaaacttcaaatataatgttgaggcgtaacatttagaaaaaccaagcataccctctacctcccaaatgtgcaggacttgacacaatcaaatattgagtagtcattctcagtgaatagagctaccagaggaaaatagtgtagtttagctaagttttcaatctgaactcaaacaattgctgtctttggaaccttaggtaatttccataaactcgctgagccttggtttctacatctgtaaaaggggataatactgcttgtattattagggtaggctaagttactgagattaaaaagytaccaaaatataatggcttaaaaatatactttattatagagttccgtagtgagtgatcgagggtattaaggcaactgtgtttcatatagtcattcaggtatccaggcttcttccctcgggttactctgccacttcctagggtgatcatgttataggcatggtagaagttgggta

SEQ ID NO: 421455 - DNA, 596 bp, Homo sapiens
gccacaggttttgcatccatggatttaaccaacctggtgactccaggaggatccactgtatgtgttttccttccatgtttggtttaatttgaagatgcagaaccttgtatatggaaagtgactgcactaccccattttctataagagacttgagcatacatggattttggtacgcttaggggtcctggaaccaaccctcaccctgtggatacggagggtcaactatatttaatggggtgttggtaaaagttaaacaaaaagccctgatttgtgaagcacgctaatttctgtggtgtgctcccatcatatctgatttcaagccaccaacctgaaatcactagatgcaaagtttcaaagatgcccactagcctattattacatactgtcaccactatataaaaaaaactcaagataattaataatagtaaaatctagtgaaattattaaggagtgatgagttttgagtatttattgtttttgttttaaatctaattttaaaaatgtttaataatggctgtgtttgacaactgctcacaacattcctgaaaaattaacagtaawctctggaagctcatatgagcttaacttcagcacac

SEQ ID NO: 421456 - DNA, 602 bp, Homo sapiens
tttatttttttatttttttattttttgacgcagagtttcgctcttgttgctcaggctggagagcaatggagcgatctgagctcactgcaaactccacctctcgggttcaagtgattctcctgcctcagcctcccaagtagctgggattacaggcacccaccaccacgcccagctaatttttgtatttttagcagagacagggtttcgccatgttggccaggctggtctcaaactcgtgacctcaggtgatccgccctcctcagcctcccaaagtgctgggattacaggtgtgagccaccaccccccgccaatttatgaagtcttaattgcccacattgtcaagtgaaaaagcagaacaagagaatgttctcaatatctgcttcctattgcaaggygttcctgactttatcacatccttgagatttatcagatgttcctgatgaaatcagttattattagtaacaaatatatatatatttaaattcctatatatttgtttcttgacctacagtaattttgttagtttcaaaaaacatagtgttcaactcaagatggattatgtgcttgttatagtaaatgtatattgatctgattaaaaatgc

SEQ ID NO: 421457 - DNA, 568 bp, Homo sapiens
gtgcctcaacataactttgtgcttctagcatgcaacttgatttatttgatttggggctatgactaactgaatagatgttcctctatctccagggtgaacagctcatccagatttgactggcactgtcaccattgaaaactgaaaaaatcatgtcctaggaaatccatcagtcccattcaaacttggatggttggtcacccgatacttccttgctatrtatcacaagcccaaggacagagagaacatcctagtcttcttgaaacttacacattgctgagcatattaacctgaacacaatagtatgtactcatgctatatgtaagaggtgtttctccaagaactttatatgtattatttcaatcaccacggccacctaagaaaggtattgttattctattttacaaatgaggaaactgacgatcagagaaggtatgttgtctatgcagcatgtttggaaaatggcagggctggaattggaacttaggaggtctgatttctgagtgtattcaatgagggctcagacaaggagttgcagtaagacatagacagatgtttcccatgtttgtcc

SEQ ID NO: 421458 - DNA, 622 bp, Homo sapiens
ctttatatgtattatttcaatcaccacggccacctaagaaaggtattgttattctattttacaaatgaggaaactgacgatcagagaaggtatgttgtctatgcagcatgtttggaaaatggcagggctggaattggaacttaggaggtctgatttctgagtgtattcaatgagggytcagacaaggagttgcagtaagacatagacagatgtttcccatgtttgtcctcaagtcaaattctatttctcttaataaaggaatgtttgttctacattccagttgtggcaatgactagttaataagtgctcggtaaatgctcattgaaatgagactaattgattgataggtgcctaatgtgaagaagaagagaaatggatcaagggtaagggaatcataaaggagaactattaactaattttcaacattgcaagggagaaagaaggataggaatgatgcttctagttagcgcttaaggtaaaattccatctagtctgactgctctcccaagtctcacctcttttcaagcagatacaaactaggcccttttttcatcattttctcagaacatttccaagtattacttctcattattcttatattattccatttgcattttaagca

SEQ ID NO: 421459 - DNA, 561 bp, Homo sapiens
ctgcgttctctattctgtttcattggtctatgtgtttgtttttatgccagcacaatgctgctttggttactatagctttgtagtatatttgaaagttcagtagtgtgatgcctccagttttgttatttttgctctgtattaccttggctatttggggtcgtctgtggctccctgtgaattttaacattgttttttctatttcttcaaggatgtcattggtattttgataggcattgcattgcctctgttgattgcttttggtagtatgatcattttctcaatattaattcttccaatttatgaatatagatgtttttccatttttcagtgacctctctaatttctgttatcmgtattttatagtttcctttgtagagatcattcatcttcttggttaactttattcctaggtattttattattttttgtaactattataaatgggattgctttctggatttctttttctgttagttcactgttggtacataaaaacatgacagatttttgtatgttgatttcatattctgcaagtttactgaatccgcttattctaagagt

SEQ ID NO: 421460 - DNA, 492 bp, Homo sapiens
gctccttgggcatggccttcatgatctgcccagttctgacctacagctcaagcttcctggtctcctctcaactcactgtgtctccttcctacccatatcactccgttcctctcactaagtgacctaagtgttctctcacttcttgggcccatttctctctsgctgaaaggcccttccttccccatctcacctgacatttgcccagtaagctcctagtcattcctcaggcctcagcttgtccatcagttcctctggcaagtcttttctaaactctagaacttgagttagaagcccacctatatgccctccagcagcctgttccactccatcgtgggtattgtcattttctgtttacctgtctctagcttccactagacttcacattaagctgtgtgttcaaagagggtcagtactgcacgcccaggcctcacatagccccttgctcagagctctaaaatcaataagtgtttgatgaatgaaactgcttagggc

SEQ ID NO: 421461 - DNA, 492 bp, Homo sapiens
gctccttgggcatggccttcatgatctgcccagttctgacctacagctcaagcttcctggtctcctctcaactcactgtgtctccttcctacccatatcactccgttcctctcactaagtgacctaagtgttctctcacttcttgggcccatttctctctcsctgaaaggcccttccttccccatctcacctgacatttgcccagtaagctcctagtcattcctcaggcctcagcttgtccatcagttcctctggcaagtcttttctaaactctagaacttgagttagaagcccacctatatgccctccagcagcctgttccactccatcgtgggtattgtcattttctgtttacctgtctctagcttccactagacttcacattaagctgtgtgttcaaagagggtcagtactgcacgcccaggcctcacatagccccttgctcagagctctaaaatcaataagtgtttgatgaatgaaactgcttagggc

SEQ ID NO: 421462 - DNA, 656 bp, Homo sapiens
tactttgctgaatttaaggggtagaccgtaggacaagaaacctgggtcaaacaaacacaacccacatgtgtcaacctttcatcatgcaagtgtctgaacatttcaaagtttattccttacttgtgaattcaaaggtttaaagaaatcttttaatatcaaaactatattctagataaccattaacttaaatcttcattggaaagtgaatgtttcccacacccttctggtttaataaaaacaattcaattttattagtatttttcattggattccttgagaaaaacaattggaaaaaaaaatttctccatttgtgaatccaggccaagcaagcagaagactatgtgaaamaacaaaagatggctctggctaccccgtggagcatcagggctgtgtgactgctgcttctcctcatagggtagctgtccaaacagagggaatttttgaaaaacggtagaagatgaacacagaaccgcaacctgggaaaattcaccaagcatgccaagcttgccaaggaagcttttccttccttcttttgtgttggcaataagcaccacaaagacacacgttcacatgcattaaaatttttcaagacaagttcctatctcaaaaatagcaagttcctagtgggagcagaataaaaggtatgttgattcttt

SEQ ID NO: 421463 - DNA, 198 bp, Homo sapiens
tttgggcatttggttacagtgaatttgctacaaggaatagtattatactattatacaaaaactttcttggggcttgtaaaagcttyctggttttctctctgctcaccgtcaccatggtcagccctactctgtaaactggtctcacttaaagtcagtttcagtctctagctctctagctctgatctgttctcccctgca

SEQ ID NO: 421464 - DNA, 593 bp, Homo sapiens
agctcttggcaatatggccatattcaaaggcataaagaagagagtagaggtgggggtaggtgagagagaaagtggcttaagctaattaagctaattctctctctctctctccctctgcatctctctgtctctgtgtctctttctgtgtgtgtagatagactgataggcagatrtagttagatacagatacagagatatattatttagatgacccagaagactatcactcatatctgattgactggaactgtgttctagtcacagttcaatacacccacaatacaaaagtctagcaaagcaaatatctgggaaaaatgaatgaggttgctagaaattgcttagctaaacatggttcaaacatgtgggggctgagcacattgctattctgcacaaaatcatggttctattggtatgaaagaaggagtggatgattgctgaggggccagccagcagtgtctgatacacgaaccaaccacaattttattgcattttctcttccacactatcatgggagtgtgactcattcatgctgggaggctaccttcccagttctaaagaataaatcatgatttgtaaatgatctaagccaatca

SEQ ID NO: 421465 - DNA, 531 bp, Homo sapiens
aacaaggatggccctcactccagtaccgtgttttttatttccatcttagacttgatccaatgaactttgccttctatatttctatcaacattctgattatgaccactaaagtaatctctaagaagtttcagactttctctacagtgcttctcttcttccaagcccttaatgctccactcatagcagtcaaagctttttctagcctgtgcctccaaattcttccattctccagcyatctaccagttccaaagcctcttctagaattttgatatttgttacagcaacaacccttctctggtaccaattttctgtcatagtctgttttctgcttctataacagaattccacagactgggtggtttttgtaatgaatagaaatttatttggctcacagttctggaggctgggaagctaagagcatgatgctggcatctcgcgagggattctgtgttgtaccataatatggtggaaaggcaagtgatcatgaaggacagacagaaaaaataggactgaactcatccttttgctcaa

SEQ ID NO: 421466 - DNA, 609 bp, Homo sapiens
tttgtttgatactccatcagaggagtaatgagcagggacttagggcaagggaaagaggatatacagagcgattgattggacccacattggcatcaaaaccatcaaggaagtaattaaaacaaatatatagagtgagatttcaggattatctgcatgtttcagttatcaaaagcattcactgttcttcataaacctacataatcaggttggctccaaagctgttttgtttgctttgtccttttcccaacctcattagcctagacaaagacttcacttctgattttagactaacaaagtcaatctgtatgaaacataactggttctacaagtcatacggcagcaaggtcccgcccttagattaaatacaatttaaggccagtaatgaacaagaycattaagtcattttaaggcctcttactcctactgtctaccaaaccagggtgtgtttatttattttcaaatgccagaaaagtccaaagaagcaaatcatgctcaccttaataatgagtgagtcttaaagggtttagcttacaaatgactttgattcatagttatgtcattccctggatatagacctaatgttagaaaatacacacaaacacatactca

SEQ ID NO: 421467 - DNA, 397 bp, Homo sapiens
ttttggtttttgaggtctgccaataatttgtaccatctaagggcatcgggagcagctattttgaccataaccacatggctccagctttccaaattatctgtatcttcagcgtaactttttttttcatttgttttatggaatttttgtgagtctattggtatctttattttagcaacaaaaatttctccaaggaacatcattttggcctccccctcagctttttcctaatagttgaaattgtgagtttaaaatataaatagaatgatctgttcaactttataatgctgcaragaaatatcagtaactgtttagtcagcgatgcaatttatatagataaattagtctggacccagagtctcaatatctcaacctccttcctctccttcctttctccatt

SEQ ID NO: 421468 - DNA, 599 bp, Homo sapiens
gaaataatttaaactttttctccagtggattgttcccaatgtctctttgttaattcttcatcagtcatgtggtatacattatacatggttttgcaatgttaaactgtctctcctatagatattgggatttatttctagcaacaaaactagatttttgtttggaaaagataattgttgaaagagaaaaggaggttataattcaattgccttttcacagctggagagaaattaattttagccagtgttagaaaaattaagttctataacatttcttttgctttgaataaatgcagtattagctttggtggtgagtctcttgtgtacctgtttcattttaacaaatgaragaaactgagagatatttaatgtctagctcaaggacacaaggagttgtgatacaactcaaatctgttgacttctaatccaggacatttttcactacttttcattctttttatagttcttttaattataaaatcaccatagaaaggactaatggtatggactgaatgtttgtgtttccccaaaactcagatgtcaaagccccaaattctcagtgtgatggtatttgcagataggactcctacaaaagtatttag

SEQ ID NO: 421469 - DNA, 600 bp, Homo sapiens
cattccagcagctgatcaagataaaacatagaagtcatctttaatttctctttttctcactctcaatagccaattcatcrgtaagcctacccagctccaccagtaagcctacccagctccacctttagaatatatcctgaaacctaccaattctaattactacctctgctattatcctttctcttgctactgctgcttccactatgccaacccagtcctcctaacatcattacttatctagatgaattagataaccttcagttcccaatcttgtctctttctagtttattttccacacagcattcaagacgagcttttaacaagtcacatcatgtcacatgactgttaagaagtagccagtgactgtctatcatacttataacaaattccagcctccttttatggtctaggtgatctagcgtctacctacctttgtgatttttatctctcgtcatttctttctgtagtttccaaactggtgttcttgttatttttgaatactctaagctcattcttcccttagaacctctacattctctgtttcttccgttggagttccccagataattgcataccttgcttcctcttccattttggtct

SEQ ID NO: 421470 - DNA, 574 bp, Homo sapiens
ctaacatcattacttatctagatgaattagataaccttcagttcccaatcttgtctctttctagtttattttccacacagcattcaagacgagcttttaacaagtcacatcatgtcacatgactgttaagaagtagccagtgactgtctatcatacttataacaaattccagcctccttttatggtctaggtgatctagcgtctacctacctttgtgatttttatctctcgtcatttctttctgtagtttccaaactggtgttcttgttatttttgaatactctaagctcmttcttcccttagaacctctacattctctgtttcttccgttggagttccccagataattgcataccttgcttcctcttccattttggtctcaaacactaccttcttagaggggtcaccctctctgaagtatccccctcatatgccactttaacttgttttattttccttttacctgccatttactaaattatattacacgatcatatgattattgccaatttctcttaatttattgtacgttgcatgaggtcaggattttatctttgctcatggtagaatctcc

SEQ ID NO: 421471 - DNA, 567 bp, Homo sapiens
agacttgggatcaccatggctggaagttgagaccygttggtgctatgtgatttttagatgtgtcccttcccttctctaatttttaatttttaattttcatagctgtaaaatgggagtaaacagccttaatctgtctcagaggattgttatgaggctcagatgtacaaattcatgagaaaatgccttgtaaatttgaaagtgccatataaccgaaaagagggtgctattgtgtgtgacagctacataccatcttgccaccatagactttctattctttaccattctaaagcttaccgtgagccaggcagactaggccagatggaatttggcctctgaaatcctgaagcctgaaattcctctgtttctggagcctggatctccggaagtggaggactgccctagccacaaagctccaccctcctctgatgacatcacacagagtagaaccaatcactgcaattttcttaaagttcctcccactggcaaatttattaatacccaaatagctgagccaagacagtccaactccttgaggacatattacaaactgccacccactctctgtcc

SEQ ID NO: 421472 - DNA, 577 bp, Homo sapiens
gacataattttaggttttgttgaccacgcggtgtctattgcaactattcaactctacccttgtaaagtggaagcagccgtagacaatatataaatgatgggcatggctgtgctctattaaaccgttatttacaaaaataggaatagtttggatttggcccataggctatagttttctgatccctggtctagtctcaccactccgggtttgtattttgtggttaatctagattgggctcatctgggtggctctaccttgggctgtgagtccagctgggctgctgtacacactgcacatgaagtttagatctgctctgtgtccatcctggggtcccggctgaagargcatgctctattcctggcagactattggagaccaagagaacaacccaaagcttacaaacatatttaaaccctccttagataaccatttgctaatgtttcgttggccaaagcaacttatgtgatcaagtccaccatcagtaggtggggaagtaaagtagggccatagtgagaggcaattttgaatcttgtgatgacgggcatggacatatgattttaatgcaaagagggtgtga

SEQ ID NO: 421473 - DNA, 613 bp, Homo sapiens
gtggactgacttgctttggggaattacaagtaagacatcactacctgtctagagcagatcacagcaatcttgtccttcctatttcctttagagtagctgtatcttattttctttatgtctttgacacctagcycaaaacctgtcaaaacacaagagcttaataagagttattgattggctaaaaggattgagaactggatagtggaaggatggatgcatgcatgtatgtatacaaggatggaggaagaagggtgggagggagaaacaaacaaaggtgggagggaggagaaatcactttggggtctcctagagcttgctgtttacacacaaacttgcgtcaagttctcagaagcattttttaaaatccatagatataaaataatgggtagtatctcagcaggtgaataatgcaagatgcaatgactgtattcacaggatgcaccaaaatccatgccaactaatggacaaaggagggaggcaatggaaagcctgactctgttggaagatgtgaaaggactgtgtcagcatctgtgccaaccagcatgactggctccctaggtgtcagtgattaacctaaagccacagcctatttgcagagacaagcctccctggg

SEQ ID NO: 421474 - DNA, 597 bp, Homo sapiens
acccttcccccaacataggtcaggtccccctccctttactaggtgctcttacagacatgtacttcccctgtctaactttcaccagcatttaattatatcattttatttattgtctaccatcccaactagactctagccctagcaccaagacatgcccgaacatagaagatactcagtaaatatttgctgaatgattgactggttattgattgattaatatctacttgccagggaggttgtgagacttagagatgcatactgtatataaaatacttaacaaagtgcctgggatatagtaagtgcttcataaagaacagtaataagagtattactaataaaggattctgtgttctctctctctctctccctctctctctcctcctctacccctctctctgtactatctcatttaatcctcacaacaacatctacaaaggcattggggttgttcccagcagaaaaatgaggaaattgaagctcagggaagtgaaatgacttgcccaatactgctaagtggcaagttcagagcctctsgctgtgggctgtcctagagggatcagagaagaggcattaggacagggacttgaaggtgagtga

SEQ ID NO: 421475 - DNA, 597 bp, Homo sapiens
acccttcccccaacataggtcaggtccccctccctttactaggtgctcttacagacatgtacttcccctgtctaactttcaccagcatttaattatatcattttatttattgtctaccatcccaactagactctagccctagcaccaagacatgcccgaacatagaagatactcagtaaatatttgctgaatgattgactggttattgattgattaatatctacttgccagggaggttgtgagacttagagatgcatactgtatataaaatacttaacaaagtgcctgggatatagtaagtgcttcataaagaacagtaataagagtattactaataaaggattctgtgttctctctctctctctccctctctctctcctcctctacccctctctctgtactatctcatttaatcctcacaacaacatctacaaaggcattggggttgttcccagcagaaaaatgaggaaattgaagctcagggaagtgaaatgacttgcccaatactgctaagtggcaagttcagagcctctcsctgtgggctgtcctagagggatcagagaagaggcattaggacagggacttgaaggtgagtga

SEQ ID NO: 421476 - DNA, 552 bp, Homo sapiens
gtgtacaagaagcatggcaccagcatctgcttctggtgagggcttcaggctgcttccattcatggtggaagggagccagcatgtgcagatcacatgatgagggaggaagcaagagagaaagggaaggtgccaggctgtttgtaacaaccagcttttggagaaactctcaagggaattagcagagtgagaactcattactgggaggacagcgctaagctattcatgagggatctgcccccataactcaagcacctcccatcaggccaacttctaacattgaggaccaaattttaatatgaggtttgggtggtcaaatatmcaaactatggcaccacagttatctttgcttcttccaaccatctttagtaaaacacatttttatattcctactgattcattcacttattcaacaaatgtttattgagtgcttactatgtgttggtcccattcaaggggctggagatgcaccagggaatgtaacagacaaaatctctgtgtttggggcactcatatgcttgagggtggcgggagacagataatagacagacgaat

SEQ ID NO: 421477 - DNA, 552 bp, Homo sapiens
gtgtacaagaagcatggcaccagcatctgcttctggtgagggcttcaggctgcttccattcatggtggaagggagccagcatgtgcagatcacatgatgagggaggaagcaagagagaaagggaaggtgccaggctgtttgtaacaaccagcttttggagaaactctcaagggaattagcagagtgagaactcattactgggaggacagcgctaagctattcatgagggatctgcccccataactcaagcacctcccatcaggccaacttctaacattgaggaccaaattttaatatgaggtttgggtggtcaaatatacaaactatggcaccacagttayctttgcttcttccaaccatctttagtaaaacacatttttatattcctactgattcattcacttattcaacaaatgtttattgagtgcttactatgtgttggtcccattcaaggggctggagatgcaccagggaatgtaacagacaaaatctctgtgtttggggcactcatatgcttgagggtggcgggagacagataatagacagacgaat

SEQ ID NO: 421478 - DNA, 494 bp, Homo sapiens
gggaataattttttaccaagagaaggcaatacactgtcagctaaggatacagcctacatctgaagtggggcccaaatcatggtctctcccagaggaattatctcttgtggaacttcagatgagcactcggccatagagtctgaagatgggaatgcaagtccttcatctttgtgaccttgagcaaagtcacttggcctctctgaggctgagttatcacctgtaaaatgggaccaagaacactcacatactttcctgagatgctctaaggttactcataacagcaggtacaatttacagagcacttactaggtgcccarcactagaaaaaacttttatcatctcatttatttcttacaatgctcctatggagtagttactattcttaagctcattttatggataaggaaaatgaggttaactgagatggagcaacttgtccagggctatatggctaggaagacttgatggccaagaaaagacttgatggcaggctg

SEQ ID NO: 421479 - DNA, 619 bp, Homo sapiens
tttcttactgaatctctgtgaaatagccatcactggcattgaatttccgttttccaaatagggaaactgaggcacacaaaaactgtctctagtttctggaaccaatgctaaaaacattttcagtcatatcccccatgagtggaagcactgggtggtcagtttggcagggccttcttgagtgaggaatggaactgctatttctaggtttgcctctgtgtaggtaaataactgcagcaggaagacagatattcacttagcctttactttaattatccatgttcaaaacctcctcaccctattcctaagctgctccttctgccttcagtttttccccattccacacatctcatggcaacactcccagattcycctgtgtacagcaaagtcctgatatgtgatttctttgcccccaaaacatcctttgacttctcttcacttatttttaatacagcatctgtaatcaaacaccaccagaaatgatcttggctcacattttgacaccagcacttaccaatgatgtttttggtctacttccttaacttctctgaatctcagttttctcatctgtaaattgggaataagcctagagttgatatgagggtgaagaagaatattttaa

SEQ ID NO: 421480 - DNA, 610 bp, Homo sapiens
ctggtgatacctcagtggataaatcagattctctctctatccatatagtgttcacattcttgctttaatgtgctctttggggttgcaaaaaaagggagcactctcaggtttgataatagggattattgaaaagattcatataaatgtgagaaatgagatcaaattatctccacaattatggtgggtccaaagctccaaaagccccaggaagaacctgaataaatatcttgaagtctgaacctagttggttctttttcccctcattcttttgccattcatatgtccttaaaaaaccgaatacaactggatcaattaccatccaataatgagtctttgttgaccactttcactaagttatgctgtggtcacaaacaactccaaaatgtccatgggttacaaccacagatatttatttgttgcctgtgtacatgtcatctgcaagttttccttgagtcggagttcagctctgtcttatatccayatcttcattattccagaactgaatgaaggacagtcccattctcagtcatgagtcagaagaagagcagcagtattagaatcactgttagctcttaaaattccttctctaggcatgaaattaatatctatg

SEQ ID NO: 421481 - DNA, 502 bp, Homo sapiens
tgggggcggtttcccccacattgttctcagggtagtgataagtctgttgagatctgatggttttaaaaatgggagttcacccacacaaggtctcttgcctgccgccatgaaagacatgactttgctcctcatttgccttctgccatgattgtgaggcctcccagccatgtggaactgtgagtcaattaaacctctttcctttataaattacccattctcagaatgtctttattagcagtgtgcaaaggactaatacattacccaagagaaatgaaaacatatgttcacacaaagacttgtgttcatgctttgtwtataatagcaaaaaactggaaacaacccaggtgtccaccaatggaagaatgcataaataaactgtggaacatccatacaataaaaaactatacagcgatataaagggatgaactgttgcttcaggattttatgtgaagttcaaaaacaggcaaaatgaatctacagtgttagaagtcagaagaactga

SEQ ID NO: 421482 - DNA, 468 bp, Homo sapiens
aaaatccttttacttgttaatatttatttttctgagacagggcctctctctgttgcccagcctggagtgtagtggcatgatctcagctcactgcaacctctgcctcccaggctcaaaccatyttcccatgtcagcctcccgagtagctcagactacaggtatgtgccaccacatccagttactttttgtttgttgtttgttttttttttttttgcttttttggtagagatggtgtttgccatgttgtccaggctggtttggaactcctgggctcaagcagtatgctagcctcggtctccaaaagtgctgagattataggcataaggcactacacctggacagaaaagtcttttgatgaaattcaacatcccttcatgttaaaaactctcaacaaatgaggcagtgaaggaacatacttcaaaaaatgaagccatctatgaaaaacccacagcaaacatcatattgaac

SEQ ID NO: 421483 - DNA, 552 bp, Homo sapiens
agatggtgtttgccatgttgtccaggctggtttggaactcctgggctcaagcagtatgctagcctcggtctccaaaagtgctgagattataggcataaggcactacacctggacagaaaagtcttttgatgaaattcaacatcccttcatgttaaaaactctcaacaaatgaggcagtgaaggaacatacttcaaaaaatgaagccatctatgaaaaacccacagcaaacatcatattgaacaggccaatgctggaagcattccccttaagaactggaacaagacaaagatacttattcttgccactcctattcaacatmatattggaagtcctagccagagcaatcaggcaaaagaaagaaataaaaggcatccaaataggaagagaggaaggcaaactatctctcttcaaagactatatgattttatacctagaaaaccctatagcctctgtccaaaagctcctagatctgataaacaactttgccaaggtttcaggatacaaaatcaatgtacagttggttttttgaaaagttaaacaaaattgacaaa

SEQ ID NO: 421484 - DNA, 530 bp, Homo sapiens
gggcaaggctgccgtacccacacaggtctgctgagggcaaagcaggtgtgctttctcttttgctagacagasgagaataactgacagttccttttattctctaactctctcaggatgaagtacaaaactcttcagaaaaagcttagcattgcaaaaccaagcatcctggaatgaaactgtaatgaaactgtaaaaaatacatttcaaaagaacataacaaagttttttttaatgtctttccattgtttttcttttttccttattataaaagcaattcatgttcactatgaaaatttggaaactacagaaaaatataaagaagaaaataaaaatcactctaatcttattacacaaagaaaattgctgttaacatttattttatctctcaacagtcttttttgtatgcctaaatgtacatacatatatatttttaacataattgggattgtcttgccaaattgccttccagaaaggatgaactaatttacattcccaccagcagtgttggaacatatatccctcaccctggc

SEQ ID NO: 421485 - DNA, 574 bp, Homo sapiens
tttattttatctctcaacagtcttttttgtatgcctaaatgtacatacatatatatttttaacataattgggattgtcttgccaaattgccttccagaaaggatgaactaatttacattcccaccagcagtgttggaacatatatccctcaccctggccagtagagaggttttttcttttttaattttawttttaatttttttattttttgtctttgcaagtgtaatatgtttaaaaggcagtcttattgtttccatttgcattttttgatactgaaagcctgacttaatacaaattttcaaagcttattagacatgtatatttattctactgagaattacatcttttgttaatcttttattggagttttagttttcttttatatgtcattgatttgtaagagctctttacatatgacagaggtttttatttgtctatgctagatggggaaacgaacactttctccttcatcctttatctttattaaaatttattcttaagaagttggtgtttggctttctatttagcttatgatttttggaggagcaaaaaattttaagtttttaaaacaatc

SEQ ID NO: 421486 - DNA, 574 bp, Homo sapiens
tttattttatctctcaacagtcttttttgtatgcctaaatgtacatacatatatatttttaacataattgggattgtcttgccaaattgccttccagaaaggatgaactaatttacattcccaccagcagtgttggaacatatatccctcaccctggccagtagagaggttttttcttttttaattttaattttaatttttttattttttgtctttgcaagtgtaatatgtttaaaaggcagtcttattgtttccatttgcattttttgatactgaaagcctgacttaatacaaattttcaaagcttattagacatgtatatttattctactgagaattacatcttttgttaatcttttattggagttttagttktcttttatatgtcattgatttgtaagagctctttacatatgacagaggtttttatttgtctatgctagatggggaaacgaacactttctccttcatcctttatctttattaaaatttattcttaagaagttggtgtttggctttctatttagcttatgatttttggaggagcaaaaaattttaagtttttaaaacaatc

SEQ ID NO: 421487 - DNA, 665 bp, Homo sapiens
cacattctggttcaatggatctaaagttaactcctggcattcacagttttcaggtatttcaggtaattatgatggctggtctgctaccaccaattttcacttagattattataaaagcctccyagttggtgtccttgattcccttctcattcctctatgatctatttttttcacacagcagccaagtgattctgttaaaatatgagttagaatcaccgggctgctcaaaatctttggtgattcccatctcactaggagaaaaagctcaagtctttacaagggccttcataatttggatgcccactacctctcttactattctctccctggtttactgtacctgggccatactggccttcttgttgtgccttgaacacttcaggcacatcctagcctcagaacatgtgctattgcagttctttcttctcaatgggctctcctcccagatttctgcaaagctcacacactcacaggcttctggtcttttctcaaaggataccttttcagtaggctcttccctgaccaccctattaataagtgcacctttttcctccctctttcactctctgcactcgggacactctctgggattccacaccggttgatttctctccaaatcactccatatctccgtatctaacttaatatatgttccacttattaat

SEQ ID NO: 421488 - DNA, 605 bp, Homo sapiens
taacgccccagagaactactctgttgttasgctgtaacagggaaatgtgttgagcatccaggctgctaaagaaattttgccccagcctgccttgaatttttgtaggtaaacctgacactacaggaaaagtttgggacaagtttagcaagcatattctactcaagtctggtgagaaaactgtaattgttagatttgattttttaagcaataccacaggatggctagaaggattcgatgaattggcaaatgtgaaacatggagcccttgtacctaatggctgtccattagataccagcagtgtcagaatgtgatgcagacaggaacattttcaaggactggggagagttattaaattgcatttgctgtttgttctccttcactgaacacatatttattgagcatgcactatgtgccaggtgctgggccagacataggtattcagcaggaccagacagacttcatttttgccttcaggggaattccctccttttgtactcatgcaactgcaatgcttccagggttaggcaggatttcaggcagcctggttattcaggtagcatgcttatcttcagagctgtgggttttctgtctagaattaaactaca

SEQ ID NO: 421489 - DNA, 613 bp, Homo sapiens
gaccccgtctctaaaacaaaaattaaataaaataaaaaaaattagccagcatggtggtgcrtgcccgtagtcccagctactcaggaggctgaggcaggaagttcacttaaacccaggagactgaggttacagtgagccatgatggagccactgtactccagcatgagtgacaaagtgagagcctgtctctaaaagataaataaataaaataaaatgttccctttacagtagtccctctcttatctgcagtgacccacagtcaagtgcagctcaaaaatattaaataaaaaattccagaattaacaacttatgttttaaattgtgttctgttctgagtactatgacaaaatctcacacctttccactctgttccacccaagatgtgaatcctcccttcgtccatcatatccatcgtacacgccaactagtcacttagtagctgcttccattcctccagaggcacagcttctccaccccaccacccagtcaccttacttctagccatgatttctccatctttctacatgccccgaccttcagtactaaattttgcttccaccattatgtgtctctcttctctcttacccagatcatgcaagtggaaagccccttc

SEQ ID NO: 421490 - DNA, 613 bp, Homo sapiens
gaccccgtctctaaaacaaaaattaaataaaataaaaaaaattagccagcatggtggtgcgtgcccgtagtcccagctactcaggaggctgaggcaggaagttcacttaaacccaggagactgaggttacagtgagccatgatggagccactgtactccagcatgagtgacaaagtgagagcctgtctctaaaagataaataaataaaataaaatgttccctttacagtagtccctctcttatctgcagtgacccacagtcaagtgcagctcaaaaatattaaataaaaaattccagaattaacaacttatgttttaaattgtgttctgttctgagtactatgacaaaatctcacacctttccactctgttccacccaagatgtgaatcctcccttcgtccatcatatccatsgtacacgccaactagtcacttagtagctgcttccattcctccagaggcacagcttctccaccccaccacccagtcaccttacttctagccatgatttctccatctttctacatgccccgaccttcagtactaaattttgcttccaccattatgtgtctctcttctctcttacccagatcatgcaagtggaaagccccttc

SEQ ID NO: 421491 - DNA, 613 bp, Homo sapiens
gaccccgtctctaaaacaaaaattaaataaaataaaaaaaattagccagcatggtggtgcgtgcccgtagtcccagctactcaggaggctgaggcaggaagttcacttaaacccaggagactgaggttacagtgagccatgatggagccactgtactccagcatgagtgacaaagtgagagcctgtctctaaaagataaataaataaaataaaatgttccctttacagtagtccctctcttatctgcagtgacccacagtcaagtgcagctcaaaaatattaaataaaaaattccagaattaacaacttatgttttaaattgtgttctgttctgagtactatgacaaaatctcacacctttccactctgttccacccaagatgtgaatcctcccttcgtccatcatatccatcstacacgccaactagtcacttagtagctgcttccattcctccagaggcacagcttctccaccccaccacccagtcaccttacttctagccatgatttctccatctttctacatgccccgaccttcagtactaaattttgcttccaccattatgtgtctctcttctctcttacccagatcatgcaagtggaaagccccttc

SEQ ID NO: 421492 - DNA, 613 bp, Homo sapiens
gggtaagcaagttaacattaattaactttttctttcgaagttttgtattctaaacctgataaagtcaaaattccataagagggcattcacaattcttccaaatgcaaccctgacctactggcctggataatgctttgcaatattagccaatgttttccctgcatcattttctttaatactttggacctttccttaacaattcagctagactagcagttcttgaacctgactatagttagaacctactggggaggagctttcagaacaataccaatatctgtgccccacctcagaccaatcaaatcagagcctcagccagtagacttctgcatctgtattcaatgttatggctcagwgtgatagtaacatgcatctgtggcggaggactctgagctagacctttctagatcgcccaggaaagaaattacaaggtaggaatcaggacaaaaggggtctgttgtcagcttttgagtgtcaaaagcctagctttcaaaagaaatgaacagaacacaggacctaaacaaaaattttgtaaaatgcacaatggataagagcaaagattctccatcatgaccaccaccatttctacatcctaaatccacaccctgaaaat

SEQ ID NO: 421493 - DNA, 545 bp, Homo sapiens
acttcagatatctattctttggaggttattggagaactgtacaagtggtaatggcttggaacaatggtgtggatttagcgctaatttaatcctatcctgtcttcctcacttcttgggcagaattcccactgaagtcagtagtggtcttgtgtgcagacagactgccgagaacaagaggctgctcatttagagtaacgggaagggacggtttctttccttttaaaacatccctctgtaagaaagacttagtcakaacagttctttaatctttaaccactagtccaagtagttgagagcactttttgcaaaaaccttcgaaagaaaattcgtggatgaattgagccacgtccctcgaactcttcatatatctacgttgcatggtgatccttaaaaaagattaaaagtgattttaaaaaatcagttaaagctataatttcagtaaaatttttcctaacttttgtaaaaaatgtaaactgccagggagcattttgtagcaactaagtgtgtatatttcaaatctgaaatttaagtccaagtagaaagaa

SEQ ID NO: 421494 - DNA, 583 bp, Homo sapiens
tctgtgtttattttaagtattacaaatgttgattatatcttgttaaataacatgagttgattagaaaaaattctttttggctgggtgcggcggctcatgccagtaatcccagcactttgggaggccgaggtgggcagatcgtgaggtcaggagtggccagtactggagaccagcctggccaatatggtgaaaccccgtctctattaaaaatacaaaaaattagcagggtgtgatgggacctgtagtcccagctactcaagaggccgaggcaggagaatcacttgaacccgggaggcggaggttgcagtgagccgagatygtgccactgcactccagcctaggtgacagagcgagactccatctcaaaaaaaaaaaaaaaagaaaaaagaaaaaattctttttaattttaatatcaggactatttctcttgaacatgttgttttttacctaatgaatgttgaacatttaacttgtgtctttgggttagaattggttacttgaaaacttagaatccagtttattgcatacttcaatttagaatataggacataatgctattctttttgtgcacttacctcatacc

SEQ ID NO: 421495 - DNA, 583 bp, Homo sapiens
tctgtgtttattttaagtattacaaatgttgattatatcttgttaaataacatgagttgattagaaaaaattctttttggctgggtgcggcggctcatgccagtaatcccagcactttgggaggccgaggtgggcagatcgtgaggtcaggagtggccagtactggagaccagcctggccaatatggtgaaaccccgtctctattaaaaatacaaaaaattagcagggtgtgatgggacctgtagtcccagctactcaagaggccgaggcaggagaatcacttgaacccgggaggcggaggttgcagtgagccgagatcgtgccactgcactccagcctaggtgacagagcgagactccatctcaaaaaaaaaaaaaaaagaaaaaagaaaaaattctttttaattttaatatcaggactatttctcttgaacatgttgttttttacctaatgaatgttgaacrtttaacttgtgtctttgggttagaattggttacttgaaaacttagaatccagtttattgcatacttcaatttagaatataggacataatgctattctttttgtgcacttacctcatacc

SEQ ID NO: 421496 - DNA, 524 bp, Homo sapiens
cacattgcaatgcttgcgtccttcagtagcacgagcacaatctgtccagccatcctggcacaaagtgagctttggagtcagtcagaaccatttgcattcctgtgcagcctgttaccagctgagtggttttaagcaatttacttcacctcccaatccttcagtttctttatttgtrcaatgggcataatagtaaccgttctgaaaataaagtgagataatctatacgaagtgcttagcacagtattgggcacgcagacaatgttaaatagatggtaactattattattaatgataaatactccattcccactactgccatcacagctgttgcttttcttaaaatcccttgacttctttgacgttagcatcctacacccatacaccactctgccattcataagcatatttctgagaccttaaacttagttatagctatcacgacaacttcccattctagttgccatttacttcgtttccactactgctaatgctccggaacctcacccaggcttggcctctttcaa

SEQ ID NO: 421497 - DNA, 582 bp, Homo sapiens
aattctactcattctaccacagttgataaagagaaccagactgagccttctaactccaacccagttctcccattatttagtttgtgctcctagacacatcacttaacactgayagtaaaagtgatgagaccataataaattgtctctcaggtcccttcttatcctaacaaccagcaaatccaagtgaactgccagagagagttctggtacatcacccttaggggattctagaacaccaggactgggtttaattttcatgcaaagatttagacacaaatgtaaatgagggaagagagactacctaaagttaaacgttctttcaagtaaacttttatgtgtacatcacacttttttttcattgctttatgtattaaaatatatttattgaatctctactatgtggcaggaattgaggacacaaagacggaagattccctcaaagacctttcaattctggttgggaaagttagatttctaaacaattacactaacttgttatagtttctacagtagagatataggggataagaggataaaatgatcatttctactttggagaaaaaaggcctttatttttaaagt

SEQ ID NO: 421498 - DNA, 582 bp, Homo sapiens
aattctactcattctaccacagttgataaagagaaccagactgagccttctaactccaacccagttctcccattatttagtttgtgctcctagacacatcacttaacactgacagtaaaagtgatgagaccataataaattgtctctcaggtcccttcttatcctaacaaccagcaaatccaagtgaactgccagagagagttctggtacatcacccttaggggattctagaacaccaggactgggtttaattttcatgcaaagatttagacacaaatgtaaatgagggaagagagactacctaaagttaaaygttctttcaagtaaacttttatgtgtacatcacacttttttttcattgctttatgtattaaaatatatttattgaatctctactatgtggcaggaattgaggacacaaagacggaagattccctcaaagacctttcaattctggttgggaaagttagatttctaaacaattacactaacttgttatagtttctacagtagagatataggggataagaggataaaatgatcatttctactttggagaaaaaaggcctttatttttaaagt

SEQ ID NO: 421499 - DNA, 550 bp, Homo sapiens
ccctgtcccagtccgccccaccccagggggagcagcagcttcaccttgtgcttcccagtgctctccaggctcactctcatgggcgggctccagtgactaaagcattccccacccttggaatgtctcatcttctacctctcttcttattcattttggttttgtggggagaggggaaggatcagggggccaggccagcagctcaagggccacagggagatgggtaatgtgcctgtttttttaacacaacaaaaaagcctacctccaaaatcccctttttgttcttcctggacctgggcattcagcctcctgccctgaactgaattgggagccttgccacctgccctgtgtatcctggctctcagctcrtggggaagccacacagacatccctttcttcccctgcatgctcgctagcagctggtaaggtcttcacactctgattcctcaagttttctgcttagtggcactgacattaagtagtggggggccagtgcatgccagcataccctggagtagccttcccccttggacgcaggcaggccctaactcac

SEQ ID NO: 421500 - DNA, 610 bp, Homo sapiens
taaactggggtttcttgctgcttaatcttgtttattatagtgattatttcaacatagtttctttaaaaaattactcagtattgtaacaacttaatattgcaccattaaacttggtaaaaatctattaaaatctgaaaaattaatgcaataaataataggaaatggaactagccagttagctcatactgagaaacccctgagagagaaaactactgcatctcattacaaccactgaagcggtgaggtaggaattaaaatccctcaggaaagaacacctcacttggaagactgactgtttttaccctttggcccaatttaygagccagatttgaatttctgtttgattgtgggtgataatctctttgaccaggcacatttccacattgcctttccccttgtttaactagaatgtctctagggaatgctaacaaattgttaaaaatcaaatcaaaattaaaatgaaagaaatatcaaaagaaaaaataaattattttgggtcattctaggaaatatctagtctgtgagacacagtttagctggggagaagatatacataacaagagaagagttacctagccatataagattttagatttgatgtactgaagaa

SEQ ID NO: 421501 - DNA, 547 bp, Homo sapiens
gcagttatagttcactgaaacctcaaactcctgggttcaattgatcctgccacctgagccttctgagtagctaggactacaggtgcttaccaccacgcctggctacattattattgttttatagtgacagagtcttgctatgttgcccagagtggtgtcaaactcctggcttcaagcaatcctctcacctcggcctcccaaagctctgggattataggcatgagccaccacgctcagtcccccgagtgttttttgtttgtttctttgtttgtttgagatggagttttgctcttgttgcccaggctggagtgcaatggcgcaatctcggctcaccacaacctctgcctcctgggttcaagtgattctcctgcatcagcctcccaagtagctgggattgcaggtatgcgccaccatgcctggctaattatttttagtagagatggggtttctccatgttagtcaggctggtctcaaactcctgacctcaggtgatccaccygcctaggcctcccaaaatgctgggattacaggcgagagccaccgctcc

SEQ ID NO: 421502 - DNA, 611 bp, Homo sapiens
atttgggtggaaggaatgagtcaatatgctcatacctctttttgagaaataagtagatataattagagcatatggatacagcaagggatccttaattctcaaataatctggggccataactttataatctacttagagaattcatttaaaataacaaatatattatcatttgataatatatttgctggtttagcatttgaatgaaattaacaagttaaaaaggaagctttcactatctttatcactctaattttagaagaggtttgtaattacagatacaatgcagtttgttttagctagtgctattgactttaaataccagactgtgattcatttkatttaataaagttcaggggaaaaaaatcaaagttttcattaccaatttccttcaatctataaaaggaaagccaccatctcattacaaactttgtatttattggaaaggacttggcttgtggctagttatcactggcattagacagcaccatttgtattgtcttgaaggaaaaattcggaacattatctctaaaatgcaatttaccgcagtaattgctgcatttgcaaatttaccaggcagtttcatgtaaaatatatcaataaacttagtaggg

SEQ ID NO: 421503 - DNA, 421 bp, Homo sapiens
ctccaatggcaggcacaggtatggcccaraagactcgaaggagaattttatttcagattccacctcttaatccactaagatgctgtcaatagcattgattcagtagctcgatagagaaaatttggcaaatcctaattcctaatttttcctaggaggaaatgaagaaaaatacctcagtgaaaacacattcctggtaattaaatctcattacaagctaaccagaaagtgaagaggagaaatattataaaaacgtattttctggccaggcatggtggctcacatctgtagtcccagcactttgggaggcccagaaaggcagatcacttgaggtcaggagttagagaccagcctggtcaacacagtgaaaccccgtctctactaaaaatacaacaaaaaaattagccaggcgtggtggtgggca

SEQ ID NO: 421504 - DNA, 458 bp, Homo sapiens
cttctgttccatacttgctgaaatttatgagtgtagggcttctagtcactcaaatttctccttcaagttcctctatatttgagtatcttaaattctttcttagtctcttgagtaaaaccagcactgcctatatacacacacttaacaatatacatattttgataattaaatactccatatagatagtggaccattataccctgagcatcttgagggcggtgactggaagaagggcaagaaagaaaggaggagggctaaatcactgtggaggcatgggagttccatccctgtggttaattcactgctaggtgaatttkgcctctcatgtttagagacttcattgactcaccgtttgagtcgagtattttagttctcagagtggcattacagtttagatgctttaaaatgctttgaaagaaaaccctactccaaggttttgactcataaaacagggaagc

SEQ ID NO: 421505 - DNA, 620 bp, Homo sapiens
  misc_feature (1)...(620): n = A,T,C or G
aatgttttccaccattaacccattgagcagagcttgtgaggcaaacagattagctgtagataaaataacgaaattacttcttttcctctgaatattrgtatggcattatgagttaaatttacaaccctacaacacatatttgagaaactactattgctagaaactgcaagaaataaaagagaatttggtttctgcttcaatgaggctgttcacaaatggaaaattatctgaaattatcttctgtcccctaactaccacccacccccgttcctccttacttctgcatccattttttcttgccttggtaaatatcacttacatggagaatatagggaatatttttgaataaccacagtaataataaatgctttctttgcaccagacattgtacatgcaatttacgtatattattttattccttatgataatcctgcaaaaaagcagttttcagacttgtaaagattttatagttgcttatacggagacccaggaagatcaagtcatgctccatttcagatgaggtttcagaggcagtctgtatgccaggcctgcctgggcccaggcagcnncaggtccaggcccaggccccggccctcacattttgcaaagctgttgtttga

SEQ ID NO: 421506 - DNA, 449 bp, Homo sapiens
gttacttccttttatctacagtttttaaaagttactaccttaccaaataatgggtcattttccatgacagtcaaaaaaataatcaaacataagcttttggatggtcatggcaattttaattatgctgtgctttcatacaaaactattgttaggagacatccaaacatatacctcaattgtccattgyggctcggcagatggtggtagaagggagacctgtcatttaaatgaggcaccattttcatcaacatgctcattggttatgaagcaaagataagctacatctgagtcattactttctggcctaggatataaaaaatgatccattcatctatgtagttccacactagatcctttttataattccgtatgtttacctgaaaaagctgcactgtgtcatttataattgagccatgcagaaagattagacacagtcctatttattttct

SEQ ID NO: 421507 - DNA, 448 bp, Homo sapiens
tactcataaaaacatgtcagtccattcttagatcaaggaatcccagctgcaaatgaatgagggtccctgaaatgatgttgtcaaccccttgcagccattggcagcaaagacacccctatagtagcaccctgaatacttatatataactataattgattacatttaactttataygatttgtagatcaatgatgactgcatgtttatgcaaagtgtctccgtaaagaaatgagactaattttcttcttgaataacttgtgaagacagaagagcaatcacattgcagcaagaatctatggcagcatgtttcaacgagcagcagcagtatttccaagttcagccagtcaactgtcatatgctaacagctgcagtgaatattgctttatgtcggaacaaaaatgggtgatcacttaaagtaaaaaattaatgtggagttctatgtgataaat

SEQ ID NO: 421508 - DNA, 568 bp, Homo sapiens
atgcactctttgggaataggctaactgcttactggctttactttagtttcttagttggaaccaacagatgattttaagattgaaaaaagaaatgcttgggtatatagctggggattatgatcagatcagctcccagcttatccattttaaatctccatttagccaaagctaaacacattttggattagctgccttttgaggttatcttggtccctgctgccttccattagtattgactgtactttaattttttwtaaaaaaaatctagtgtcgatttagattgaggtctgtgcagtaaaaaaggatcacctttccacgtagggaaagagattaagcatctggatcatagagctatttattaaaacggacgatttctgcctaaatccacatgaacttatgactatcagcatgatttaagtaacgagactgctgactcgggaaatcagagtcttttgccattcattgactgactgagttaagcataaaactgaaatgattttatggaccattctttttggcaatgtcgatcctaaatctgatatgaaatggggctgccattacaattgtt

SEQ ID NO: 421509 - DNA, 568 bp, Homo sapiens
atgcactctttgggaataggctaactgcttactggctttactttagtttcttagttggaaccaacagatgattttaagattgaaaaaagaaatgcttgggtatatagctggggattatgatcagatcagctcccagcttatccattttaaatctccatttagccaaagctaaacacattttggattagctgccttttgaggttatcttggtccctgctgccttccattagtattgactgtactttaatttttttwaaaaaaaatctagtgtcgatttagattgaggtctgtgcagtaaaaaaggatcacctttccacgtagggaaagagattaagcatctggatcatagagctatttattaaaacggacgatttctgcctaaatccacatgaacttatgactatcagcatgatttaagtaacgagactgctgactcgggaaatcagagtcttttgccattcattgactgactgagttaagcataaaactgaaatgattttatggaccattctttttggcaatgtcgatcctaaatctgatatgaaatggggctgccattacaattgtt

SEQ ID NO: 421510 - DNA, 559 bp, Homo sapiens
cctctcagcaactttgagagtgctgtggattgaattacatccctccaaattcatatgtcaaagccctcaaatccaataggatcatatttgaagattgtatttgggaggtaactaggcttagatgaggtcatgagggtggggccctcataatgggattagtggccttgtaagagacatcaaagcacttgtttgctctctctctccaccatgagaggacacagtgagaaggtggccatctgcaggggagtaaaagatctgcaggggagtaaaagagtccccaccagaaaccaaattagccgacatttgatcttgtacttcatagcctccagaactgtaagaaataaatttctgttgtttttttttgttttgttttgttttttgttttttgagatggaaaggagtcttgctctgtcacccaggctggagtgtagtggcacgatctcggctcactgcaagctcygcctcccaggttcatgccattctcctacctcagactcctgagtagctgggactacaggcacttgccaccacgcctggctaattttttttttgtactttt

SEQ ID NO: 421511 - DNA, 641 bp, Homo sapiens
ctcacaaaatgaagttttgactttccagatgaataaattagactgcagatcactatgttcatccacatggaaataacgtcactataaaacaagcttccaatggaaaaaaatagtgttttccaaggataatagattattatggaatgtttacaattaaataaacagaagcataggcaatccatcaaaactaggtatttcacattttagttgatataaaggtcataaggctatttaaatctgcaaaaacaatagtcaggcactgggagaatatgttaaaaacaagaaagctagagatgaataggcttaggagacattttgcggaactcaaaagtcttagtttcctaaaatttacactccagagtaaacggaaaatgtgaaaaagtgagcatgccttcctgctgtaattacagcgggagattaaacagagttgagcagcagctaggatattcatatcaccatcactkcaagaaccgccaggagaattccatgtagcatggactacaattatgtggctaattcaagaagcgattgttgtatttgattctcaactcagaaattaggaatttatcaaaagtcattatctggcagggataaaattaataatctcttgagatcttcctgtagtaacactgttaataggc

SEQ ID NO: 421512 - DNA, 575 bp, Homo sapiens
tttttttttttttttttttttttttttttgagacagagtctcactctttttgcccacrctggagtgcagtggtgcaatctcagctcactgcaacctccaccccctgggttcaagcgattctcatgcctcagcgtccctaatagctgggattacaggcatgtgccaccacaccagctaattttcatatttttagtagagacggggtttcaccatgttggccagactggttttgaactcctgacctcaagtgatccacccaccttggcctcccaaagtgctgggattacagacatgagccaacccacatggtccttagaccactttttaactgtcaccatattaggcagctcctactgccagaacaaaatcccatagactgggtggcttaaacaccaacatttatttctcacagttcttgaggctagaagtccaggatcagagtctcggcaggtttggtgtctcctgaggcctctctccttggcttgtggacatccgccttctccctgtgtcctcacttgacctttcctgtatactggagtatccctggttctcttccccttcccagaaggacccag

SEQ ID NO: 421513 - DNA, 580 bp, Homo sapiens
cttggcctcccaaagtgctaggattacaggcatgagtcaccatgcccagcccctctctgttttatcatttgtcaaatggagatactatgaatactttcttctttggttgttgtgaggattaaataaaacataaagtgcaattaagttcttagcatacttcccagagcatagaaagttctcaattaactttcagtttttcttattttgtgctgatgttattatttccatcattatatgttttaacttcatgctataattcaatttggttcaccaagtactgtgcaatcaaagatattctagttctagtagaagacatcaaacaaatgtaagtgtacttttccaatttggaaaaatatggtatttgagaaactgctaaatagaacctaagctaaatatagtaaagtggtgagtggtcaggaataagacagttatcatacaaggtgttatggaagtaatcaagcttgtgatgaaatggaaaagccctctaactkgagtgacagtgaggtgatagccttaacaatgcatttgctttgtcatacaaaataacataaagaattttaaataagtattggctatcaca

SEQ ID NO: 421514 - DNA, 604 bp, Homo sapiens
tgatccacctaccttcacctcccaaagtgctgggattacaggcgtgagctaccacgcctggcccacatcctgcttctaaccatacttctagtatcctatatcatatctaagagttgttgcttcctattttggaagggagataaaagcttaaaggtgagctgaatatgagaatcagcagattakttctgtaagtgccagttattttaaaaaatactgattatagtaattaaagccttctcacagttcatataataccttaaagatggtgacttaacaatttattcgaaacaatcagttagtaaatattttctattgaatatattcagggcattcatcatacctgagtcattgggaaatacatttaaagtaataaggactaggaaatgaaatcactgtaagattataataatgtcagcagtgaatcatttatcagaagccacttttatttcaaaagcttgttccaactttttgaaatgtcagagtttaatttctaggataaagtaaaaatatctgtaataataaaaataatgacttaccaagagtgcacaaaaccgtcatgcaagaaatgaaacaaatacaaataagtgtcagatgttacaaaagt

SEQ ID NO: 421515 - DNA, 597 bp, Homo sapiens
tgcatatactatgctaggacctgcacttccaatatgttgttttattaattttcctgctgttcctyttctccttgtgcatcatgttgactcaaatgaagtgaaactgttaaatagtacattataactattgttttgcataaactattgaatgtttttatcttccttttgaaaatgtaaatctgagattaatatttttattatccaaattaattaaaaaagcatattctgttatattttcattctccctgaatagttacattgtttgagctttcttaatatttgtttagcctagcatttccctataacattatatattaacatactaatctggagacccagacatttttatccagcaatgcaatatagagcctttgaacttcaaccaaactaaaacatttaataagaacctaagtttcgcaccccagctcccttttattttttaagtatatggtggtgacagtaccagaccttattattttaattctaccatgtgtagatttaatttttcaacaaaacattatgtggaatattaagaaggacaaaatatatttggctttagagagtttgcagcatagggagttatgaaaatacacaagt

SEQ ID NO: 421516 - DNA, 597 bp, Homo sapiens
tgcatatactatgctaggacctgcacttccaatatgttgttttattaattttcctgctgttccttttctccttgtgcatcatrttgactcaaatgaagtgaaactgttaaatagtacattataactattgttttgcataaactattgaatgtttttatcttccttttgaaaatgtaaatctgagattaatatttttattatccaaattaattaaaaaagcatattctgttatattttcattctccctgaatagttacattgtttgagctttcttaatatttgtttagcctagcatttccctataacattatatattaacatactaatctggagacccagacatttttatccagcaatgcaatatagagcctttgaacttcaaccaaactaaaacatttaataagaacctaagtttcgcaccccagctcccttttattttttaagtatatggtggtgacagtaccagaccttattattttaattctaccatgtgtagatttaatttttcaacaaaacattatgtggaatattaagaaggacaaaatatatttggctttagagagtttgcagcatagggagttatgaaaatacacaagt

SEQ ID NO: 421517 - DNA, 642 bp, Homo sapiens
tgtgttagcatgctgttcccgagttatgaggttcaattccacgctgataagcatatttcacctattcaaaaatataatacaaaatattaaatttgttacattaattatgatcatatttataccagactgaataggaggcagggttccctacaggactaaataaactcagtttaataaactaaattcatctactctggctcccacctcctctgtcacccagctgtaagagagactcagacaatcaccagaaccctctctccttcctaagacatgttggtcacagttcctgcacatttttcttgctctccatgacctagtatctgccaaaatataatcgatgttggaaaaatttttacccccagccccatgtaagtatgttgtatttccccaactagtcacagactgaaagctgaggacaagaagcctgcctttcatattgtgagatatgctcccaataatggatactcaccgaatattaactggctgctgatggaacaatgagttttactatacctctttatctaccttgcactcttgttgccartgaacaaaccacatcctggaaaggattttcaaatggagaaaaagtactgaaaaaataaatttcctcatttggaacaaaggtttgatttgctatgtact

SEQ ID NO: 421518 - DNA, 519 bp, Homo sapiens
atgtgcaaatttccttctctttgcacatttttctcgcagtggcggggggaggtgggggaggagggcaactgaaggacctcaaagccggggatctaactcagatctgcaaactgcgactctaaagggttaatgagcaacttgcacccgccacctggccctctcagaggcgtcttgstagagccattgaattacagaccggtttgtatttaatactgaatatgacttgtgtgcacagtcagcgagtattggcataaaggagaggggcaaaaagtgcttttgcagagcctatcacccctcggctctgtaaagtatttcagatccggataattcaacccttactgccaggcaagggcacccaagttcccagagttcctgctgccgcctgcatttattaaagtcgtctgctataacgctcgctggtagccttcaccccgaaggtgagccgggccagccgagcgactaagcaagggaggggcggggtgaagagtgtcaaaggccccccttcatgtacacaaacac

SEQ ID NO: 421519 - DNA, 519 bp, Homo sapiens
atgtgcaaatttccttctctttgcacatttttctcgcagtggcggggggaggtgggggaggagggcaactgaaggacctcaaagccggggatctaactcagatctgcaaactgcgactctaaagggttaatgagcaacttgcacccgccacctggccctctcagaggcgtcttgctagagccattgaattacagaccggtttgtatttaatactgaatatgacttgtgtgcacagtcagcgagtattggcataaaggagaggggcaaaaagtgcttttgcagagcctatcacccctcggctctgtaaagtatttcagatccggataattcaacccttactgccaggcaasggcacccaagttcccagagttcctgctgccgcctgcatttattaaagtcgtctgctataacgctcgctggtagccttcaccccgaaggtgagccgggccagccgagcgactaagcaagggaggggcggggtgaagagtgtcaaaggccccccttcatgtacacaaacac

SEQ ID NO: 421520 - DNA, 452 bp, Homo sapiens
agctcctgttacattctgatatccaagaactcagtttatgacaagttgactaaacattgtgattaaattttaatttgagtctatcaatattcataaataaccttctatttctctcaaattgtcatctaactgccatctagcttaaaacaaccacccatccccaaagagggcataagggccttatctctcactggttttaattgaaatgacacagctgtcaaggcataattcattatttcaaagagctatataaggcaagtgatttatttctttaagtaactatctaaactattgatgaaacagggtttcwtttgttttaaatcaaatttacattgtcatttccaattctaatagtaatttttcattgtgagtcacctcagtgttatgctttgtgactgctttcaagatgtctattttaaaatccacaagttatctacatcacatgtttagtg

SEQ ID NO: 421521 - DNA, 588 bp, Homo sapiens
gcttattttcagtgttttggataaacttccctttcttattatgaatgttgctcttttcaaaatgyatcgccgtacatcacaaataccccatatttattcctcttaccttttatttgtttgttttataaatgcttcctctgcacttgggggaagacgtccaattgaacctgttaaaaactgaatgccacatgttttaaagtagctaacaatagtctcattaaaaatagtctcttcaaaatgtggaagtataggtactgaaaaagataaaaccactagctgctatatttgcaatttaaaaaaggcaaattcaagatgtgtcagatttaacaaagctactgctggggggccaatttcagagataaaagataaaaggccagcaatccactttacccccagcagttcaatgaaagttgtgtgattcctattgcttcatcaggtaactacaaagtagtttcctcccagtgaattctgtgtttttgtggattctaaaatatctgactgtggaatgagaaaggtttgtttgagtatgataaaggatatctaaaaacccttatgctcagttctgacacatagccattgacaaactaa

SEQ ID NO: 421522 - DNA, 530 bp, Homo sapiens
accattagtgaggtttgggtaggtggttttcccctcacagtgtaaacaaagccactgggaagttcagactgggtagagcccatgcagtgccacaargacactgtagccagcctgcttctctagattccttctttctgggcagggcatctctgaaagaaaggcagcagccccagtcagggtcttatagataaaactcccatcgcactgggacaaagcacctgggggaaggggcggctgtgggccagcttcagcagacttaaacgttcctccctgctggctctgaagagaccagcaggatctcccagcacagcgctcaagttcttctaatggacagactgcctcctcaagtgggtccctgaccccgtgcccctgactgggagacatctcctagcaggggtcaacaggcacctcatacaggagagccccagctggaatctggcaggtgctcctctggaacaaatcttccagaggaaggagcaggcagcaatctttgctattctgcagcctctgctggtgatatccaggcaaac

SEQ ID NO: 421523 - DNA, 588 bp, Homo sapiens
ctgtccatctggagagttttgcattaacagtaaagaggaagtttggcttgtgtttaaaatgatgtcactgcaatgaagtatctcaagttgatgctggcataacagactgccactgtcacagctgttagcagtaatgcattacaaccctgaagttaatcactatttcctgcttccttaggaatatgtgtgtcttctgatcaaaatcatttccgaggagaaattgaggaaaccatcactgaaagctttggtaatgatcatagcaccttggatgggtattccagaagaaccaccttgtcttcaaaaatgtatcacaccaaaggtaaggatgttaagactcattcttagcacatcagaagtgtcttttgaattattttagtgaaacgatgcaggtttarcagtaactatgtacttttttcctactgtcttctccttcgtaggacaagaaggttctgtttgtctccggtcatcagactgtgcctcaggattgtgttgtgctagacacttctggtccaagatctgtaaacctgtcctgaaagaaggtcaagtgtgtaccaagcataggagaaaaggctctcatggactagaaat

SEQ ID NO: 421524 - DNA, 535 bp, Homo sapiens
tggggaaggaagtctaaacactaaagaaatacaggattatcaatcaaacarcaaacacttactgagggtctactagggccaagttactctgctaggtgagaataattcagaaagaggtaaaatacggacccaatatcaaagagcttactgtcttgttagagagccagaacacacacacccccaatataaactaatatcactagaaattatatgataaatgccactatgttcaggtaaagagttggatggaaatactttaaggtaaaattaatgcaaaacattaaagctggatatatgtgctccttgcgctattgatacattttgatatcttcttcactatctgtaaccctattccagatgcctatacccaatttcttaaatctatcctcagttattctggtcctcatgttgtggattgccacctagaggtgctgaaaacagcaaagacttttgcttgggatttcaaaaattctttccttttcattgtttattttttctgccctcccccgcccaccccatagatttgaactcaaat

SEQ ID NO: 421525 - DNA, 535 bp, Homo sapiens
tggggaaggaagtctaaacactaaagaaatacaggattatcaatcaaacaacaaacacttactgagggtctactagggccaagttactctgctaggtgagaataattcagaaagaggtaaaatacggacccaatatcaaagagcttactgtcttgttagagagccagaacacacacacccccaatataaactaatatcactagaaattatatgataaatgccactatgttcaggtaaagagttggatggaaatactttaaggtaaaattaatgcaaaacattaaagctggatatatgtgctccttgcgctattgatacattttgatatcttcttcactatctgtaaccctattccagatgcctatacccaatttcttaaatctatcctcagttattctggtcctcaygttgtggattgccacctagaggtgctgaaaacagcaaagacttttgcttgggatttcaaaaattctttccttttcattgtttattttttctgccctcccccgcccaccccatagatttgaactcaaat

SEQ ID NO: 421526 - DNA, 581 bp, Homo sapiens
atacaggttgctatggcaacacaatcctgctaatatctaatgctcttaaaactttataaatttcctgaatgtaagaaccctggaataagcataacctttacacttcaggtatagctacatattttgaaagttaggtctaaagggaagaatgaagataaattttcatatcagaagtgtatgcttttttataatattcaaatttcactgtaagaagttyagggtccataatcttaaatatgctttattttatgtatcataggaataagttttgagtctactgactatatgtgcatgcttttaaagtacatctggtaagctcagctgaaaatttttcattggaaagatattatgcaatgctgcatcattatcataaataaatgaggttatctgaagtttatatataagcccattgtgttgtatcacagcaaaattaaatacttaaaaataagtttctattaatatcatctacagttccagaactgtgtttacaaatagctaattactgaatcacaataatttctgaaatttttcacacatatgaacttcatttgagataagcaattgttaaattaaaaaaactc

SEQ ID NO: 421527 - DNA, 581 bp, Homo sapiens
atacaggttgctatggcaacacaatcctgctaatatctaatgctcttaaaactttataaatttcctgaatgtaagaaccctggaataagcataacctttacacttcaggtatagctacatattttgaaagttaggtctaaagggaagaatgaagataaattttcatatcagaagtgtatgcttttttataatattcaaatttcactgtaagaagtttagggtccataatcttaaatatgctttattttatgtatcataggaataagttttgagtctactgactatatgtrcatgcttttaaagtacatctggtaagctcagctgaaaatttttcattggaaagatattatgcaatgctgcatcattatcataaataaatgaggttatctgaagtttatatataagcccattgtgttgtatcacagcaaaattaaatacttaaaaataagtttctattaatatcatctacagttccagaactgtgtttacaaatagctaattactgaatcacaataatttctgaaatttttcacacatatgaacttcatttgagataagcaattgttaaattaaaaaaactc

SEQ ID NO: 421528 - DNA, 581 bp, Homo sapiens
atacaggttgctatggcaacacaatcctgctaatatctaatgctcttaaaactttataaatttcctgaatgtaagaaccctggaataagcataacctttacacttcaggtatagctacatattttgaaagttaggtctaaagggaagaatgaagataaattttcatatcagaagtgtatgcttttttataatattcaaatttcactgtaagaagtttagggtccataatcttaaatatgctttattttatgtatcataggaataagttttgagtctactgactatatgtgcatgcttttaaagtacatctggtaagctcagctgaaaatttttcattggaaagatattatgcaatgctgcatcattatcataaataaatgaggttatctgaagtttatatataagcccattgtgttgtatcacagmaaaattaaatacttaaaaataagtttctattaatatcatctacagttccagaactgtgtttacaaatagctaattactgaatcacaataatttctgaaatttttcacacatatgaacttcatttgagataagcaattgttaaattaaaaaaactc

SEQ ID NO: 421529 - DNA, 299 bp, Homo sapiens
tacttaacatttatttacacgtgcctaaaactagtttttctgagttttctgagtaccataaaaattcgcagcactcttgcatctagaacaagcawgacatatattgtaagtcccacatgtgccagggccattgcagccacatcctgcagtctgtcaccaattcttatcatgaaacctggaatgtttgaggtcctcaatatttcttgatgaacagactgcattttgctgaaaatattgttgaataatttatgatacattgttatataaaatgagttaactcatgagttttggagtaggtt

SEQ ID NO: 421530 - DNA, 299 bp, Homo sapiens
tacttaacatttatttacacgtgcctaaaactagtttttctgagttttctgagtaccataaaaattcgcagcactcttgcatctagaacaagcatgacatatattgtaagtcccacatgtgccagggccattgcagccacatcctgcagtctgtcaccaattcttatcatgaaacctggaatgtttgaggtcctcaatatttcttgatgaacagactgcattttgctgaaaatrttgttgaataatttatgatacattgttatataaaatgagttaactcatgagttttggagtaggtt

SEQ ID NO: 421531 - DNA, 475 bp, Homo sapiens
tcttaatcttcttcaaaatgattaaggcaaagatgatgataaatcacttattataaataaattrtttcctatatatcaaagtatatagcaatgtctggtttcagactgtataaaaataaatttaaagtaagcaggatggctgccatacttttaacaactttctagactggctgactaaataactgtgtctgttgagatagtctgtcaaataagatgaaagaaatggcacttataaattgttgcttgctgtagctgaaggtttccaatatatttttctggtactttgtaatatcagagaactttctgtgtcaatctatatgggtttttcttttggttgttgtttaaaaaaaaaaaggttctgctttgcttattcttgaaacaaacaaaataatacaccttacattgttgaaattgctaatgattttcccccaaaggcttacaagtaaatggccaaaacaatgagcaacaatcagct

SEQ ID NO: 421532 - DNA, 547 bp, Homo sapiens
tgaataatggaaagtgacagcaaagaacagagaactagcaatggcttccccttaaagaccttcctatgaactatctttaagtgttggtattagctaatggtcaataattaataatacaagcraaagtgtttgctttagaatcttcttcgttgctattagagaaaaacaatgtgctacttgtgttctgtcctagatgggagaggcattctttagaaaacaattaaaataaaatgcaaaaaagcctgaagactagactaagtctagatgatgtgagagagtggatacttacttttgttgtggaatgcagagaataagatgagtcaatgctataagattgctagtcagattacttacagattgaatttctaaatatgcctaaatgctgagtcaaactgtagtgtatttccctttccatgtacattagtggttctcttattggtctgttttaagtctgataacatcagccctggcttgtaatcttattttacttttgccattcagcctcaacaatagttattagttaaatgtctttatgaatattttacat

SEQ ID NO: 421533 - DNA, 630 bp, Homo sapiens
taataaagggtaataatgacttagaatgtataagattttccatcataaaaataatctactataccatgttacaaaactcacaaataaacagtaagtatgtttttaaaaattaaactattttaatacaaagattgtgtttatgggtaaaatgcagtgattcagctttgtaatttatttataatgcaagatttttgagtgcgttgagactgtttgcttatatacaaagttatccttttttaacccatcataattgtgatgctctattcattatatcattatttataactgctatcttagttattttaaagagtggactttgctaattagctctttttgcatactctgtttccctctgattcctgcttcctttttattccaggcttagtgcagtcttgcttttatttgtattgacctttggcatttcaattttctgtttgctttttaaatcttagctaattagaggatttcaaattcttcacaataaagaagttctcrcacagaacgtgtaattagaatatctgatgacaagaactgggattttaatactccagggttgaaagatcatacctctgagcagcattttcccccaggatgttttgcatttgagcaattaacctcacattcaggaca

SEQ ID NO: 421534 - DNA, 622 bp, Homo sapiens
caacctttaattaaagacctcacagaaacattacagtccatttaaattgcagaataaatttgtggcaaataagggcttttctcactgaactatgtataacacatccatcaggccaacaataacaagaacagacatatgggagattttgctaaaatgtaaagccccaactttttcagggtcgagtttttctttctgcaggtwataaaaataaataaaatcacacgcatccagaaaaaaacacattgctgtttgtagaagtgacacaatgggcttctgtgatgcagtataactgacatttataaataaaatattcacatttaatactgaaaattattttttaccttacttcaacctattaaggtaggtaggtaggtaggcagacagatctatatatagataaatagatagatagagctttatcctctgttctaatttatcagattctcctcattgcattatgttatatgcaaatttgatccatgtatcttttaagtagttcatgagaagagggagtgttcggtgtagcagaaagagcactgatttccgagtctggaaagctgggattgaatccagctccatcaggaaatctatcagccttagttctattgctgctatggcaaat

SEQ ID NO: 421535 - DNA, 528 bp, Homo sapiens
gcttgttatctgctctgagtgacttttacttctgtaggaccaattaagtgtatcttacataaaagattcaaaggatgttagagtgacttcaaggtttttttttcctgcaaaccatcttgacaaaagtaccaaagtatatttatatctatatagctattcatgtgtttgtgcttggagatgttatcaaaaaaactattgcatgctcaaactttttctatgtatttgaatataatctttatttgtttctgcagctataacacctatcccattaatagacatctttacactaatacttcaacataaatgctaraaaagctctttgctgtgtggctagacagatcaattcttgcttcattgattatttcaatgagagtctaaaagcatatccttgtgttactgataatttcatctgtggtggtctttatttggttcaatttctaatatttgcaccaagagacaggcatatatgggacatgttgaatagtctaaatagaaacttcagagttctaggataatttttactagttg

SEQ ID NO: 421536 - DNA, 592 bp, Homo sapiens
aacatataaattttgggtggaagacataattaagtccatagcaatggggaagctatgtttcaatttattgtgttttagaaaggtaaaaacactttttaaagtaccagttttcattaccttaacttaccattgaatattacattaaatctaattagaatcataaagtttcagttcctataaatattatttctacacatgyacaccttgaaaagatgctaactcttttaaaagttattcacattttacatcagcagaaaatgacagtattttctctttaaaaaatatttttaaggcaaccacaaaatgcaggtgtagttgcaactaaataggatgactggtgtatggaaagactgatttcacaggtgattccaggcagcctcatacagagttttttcctaaggtttttattctgttactaccacccattacaaatatgagaagtacagaaggtaaaagataagtaaatgtggtttattctggatttttaaccaataaaattttttgctacatacagagggagaaagctctttagcgtcttacatacggagtgtcaataatcctcatgcagtctagatgacatattttagactac

SEQ ID NO: 421537 - DNA, 638 bp, Homo sapiens
aggtgttaaattcatttcttattagtgcttcaccctccctgcttcctattcagtggcaataatccaaccaggtgattttcggttgtgttgtctctaacatctggtgaattcccagtatgatcataacagagcgatcagctatgcttggtccaccatccaggagcagcaagtaatagcttctgatttcaccggaaaatttgtaactacattggattgctataaaatttaaaatgcatcctttctttatattactatttttacwtataatttacatttcaattaccttcacctagttctttcctagcattaaaaaagtctgcaattcatccatgattcccaccaagacatcaaaaatcctatgggcttatgtatcattccctgctgaatttcaagttgaagatacaaaccaagcaatacaatgctgtcagttgaggattgcatctgaatcaggtgcagctcttacagcaaatgattccagatctggactcctggtgaacctgcactgactaggcagccacaaactcagtaaaagattagcagaaacaggagatctacctgcttccagaaatactttcctctggttctcttcctgcagttcgtgcaagactcacattgctgagttcgttcaataaatccca

SEQ ID NO: 421538 - DNA, 643 bp, Homo sapiens
gctggcagcaactgatgcatgaacaatgggtctctgggaattgaaatggccatgttatcttataattctcagaagtttcaaacacctgcatctatgcatctgtgagttgttggttgcttgttgtgttagctcttwctgcaggtgcactgcactatatctaattattattattttgttgttgttgttttgagacggagtctcactccctcacccgggctggagtgcaatggcatgatctcagctcactgcaacctctgcctcccaggttcaagtgattctcctgcctcagcctcctgagtagctgggattacaggtgcgtgtcaccacgcctgggtaatttttgtatttttagtagagatggggtttcaccatgttggtctggctggcctcgaactcctgacctcatgatccgcccacctcagcctcctaaagtgctaggattacaggtgtgagccaccactcatggcctatctaattttaatgaaaagataacttcgtcttttatattcagtattatttaagaaccagccactggaaggtggccactcccaatgatttatggtacctactgtctagtgtgaaagactttgacacttttagactgtgttagaccatggaccaatttcctctatctttatctggg

SEQ ID NO: 421539 - DNA, 549 bp, Homo sapiens
aaaggtgaaatagatatgaaactgtgcaagaaaatagtgggctatccactcccaagttttgacccaggacaagcccagaggaacttgcccttgtccaccttagatgaagcagccttagtatctacttaaaagcagggtacacaatgacttttaaaagaaaatggaacatttaaccaggactaaaccatcttaatgtttgtcactgggaacaaagctaatggaactcctcaggcatgggtgaaagattktaagtatttatttacatatcccacactcgcaatagactatgagttcctcaaaatcaggggctttgttttattgatccttttttccccagaactcttaaaactgcctggcacaaaggattactagaaatatttgttgaatgggtgattaataagtaaatggatgactagattttgtggtacaaatcctttttgtatttgtagagtataaggattgatttttaaatatgggatttcagttaaattaatatatgtaaaaaccatttgtctctacttctatcacagtgagcacaagattcagcaa

SEQ ID NO: 421540 - DNA, 631 bp, Homo sapiens
tgtttatgaaacaagattaaccatgagatgactgttaaggctggttgatggagccttggggggaattcatcatactcttctctctacttttgtacatacttgaaattttgtataatatcatttgtatatgtacatgcatgtatgttttaaatatgtataaatcataggtacatatgtatatatgttagtctgtgatttttatacatgtgtgtatacatttgtttatatgtatataatacatattcatattggtaagacgttgaggtaagtttctctctacccaacactggacttcaactttttctgatgaaagtcttaatgtctgtcatccttgctgagatgttttcatgagtgattcattctatacccaccatatgtcagaccccatgttaggggatcactgatgaggttgctgccttcatggagcttacattctagaggaggagmcagacatttatcaagcacacgaatgaataagcaagataagcccagaatgtgatcaatgctttgaggaaaataaacagagaaatcagatagagataaattgcagaaagcactcgaaggaaggtagccagagtttctctttatgaaggtgacactggagccaagccctgaagaatgaaaatgagac

SEQ ID NO: 421541 - DNA, 505 bp, Homo sapiens
tagtgttgccttctgttaaaaaattaaataaatacagcttgcactagagcaaaggtcattaaaaattcaatcattttgttttcaaattagacataaagttcttctttgaagaatcaaaaaatcataacaatgattttttcataacaatgaaagggacttcagagacacaattaactcaacccagtgtctttaaaccctatttcctctaaacttctttgaactagttccactgaaaactccttcagtcaactagtccattgcatattcattgtaacaataatatttgatgaataatactatgtgccaggtacagcattacttgaaatgaaaataagaggagtacaaaaccacatgtatacttgttacatgattcacatatccttaaaattttacccaaatgcttcaatttctgtgtgacagatagatggatatagatagatagatagatagacagayagatagatagatagatagatagatagatagatagatagatagatgatag

SEQ ID NO: 421542 - DNA, 567 bp, Homo sapiens
tttattccatataagggccaaaacatattgttatgtattgacactgaaatataataggcaacttttacaatgctaggcacataggaagtgcctaatacattatcattgattgactgacatgtaaatgaactgtgtgattctttatgatctttcacagattgggaagctctgaaaacacattacttattcaaaaaagaactgaaagatcagtccctgaatgagcagctctattgttctgtccaactgtctttggcctaggtgagaggatatttaacttagatttaactggtcttcagatgtgtctacttgamcttccatgtcacaaatggagcagaaagcaagatatgcacagagcagaaaagacaagtcaatatctgacctccaaaatcaattcagggaaacattttcagtacttaactctgtattgttcaagttcctgtgcaaagaaaataaactaggccttctcctggctctgtaggaggtcataatgcatagagttctagtctctagaataaatctatctattgaagaacaaggtgattgtaatacattagtagttctcccctt

SEQ ID NO: 421543 - DNA, 594 bp, Homo sapiens
tttccacctctctcttttttaacttttattttaggtttggggtacatgtgtacatgtgcaggtttgttatacaggtaaactgcatgtcacggggggtctggtgtatagattattttgttaccctggtatttaataatgagcatagtacttgataagtagttttctgatcctccccctcctcccactcttcagcctcaagtaggtcctagtgtctgttgttcccttttttgkgtccatgcagtctttgtttttctgtttgtgtgttaatttcctaagaacgatggcctccagttccatccatgttgttgcaaaggacatgatctttttcttttttatggctgcttagtattccatgatgtatatgtaccacatattctttatccagtttactgttattgggcatctaggttgattccatgtctttgttattgtaaacagtgttgcaatgaacatacatatgcatgtgtctttatgatagaatgatttatattcctttgggtttatacccaataatgggattgccagattcggtaatctgaatggtaattctgttttaagttctttgaggaattgccaccctgttttccacaaggg

SEQ ID NO: 421544 - DNA, 368 bp, Homo sapiens
accccattcacacctccaccaccaaagaaaactgactaggctcctaccttcattaarctgtaacaagtcatccccatccttctgccagggaagcatcagtgaaagccaaaaaaagctgggatgttctcctccactgagtgaccttttactatggggtcaacggagtagtggagaccacatggggagtcttcactttcacccaaccctgaggtattaagatgcccctcaccctgcctgctgagttggtatcagagaaggcctaatggagagtcaggactttcacccatactcactagtaacaaagtaacctcgtccctgctgaaagtgtcagggagaccatataagaagtaaagacaaatccctcctac

SEQ ID NO: 421545 - DNA, 368 bp, Homo sapiens
accccattcacacctccaccaccaaagaaaactgactaggctcctaccttcattaaactgtaamaagtcatccccatccttctgccagggaagcatcagtgaaagccaaaaaaagctgggatgttctcctccactgagtgaccttttactatggggtcaacggagtagtggagaccacatggggagtcttcactttcacccaaccctgaggtattaagatgcccctcaccctgcctgctgagttggtatcagagaaggcctaatggagagtcaggactttcacccatactcactagtaacaaagtaacctcgtccctgctgaaagtgtcagggagaccatataagaagtaaagacaaatccctcctac

SEQ ID NO: 421546 - DNA, 430 bp, Homo sapiens
cccttgcccagcagtaacaaagaacacccctgcgccactgtcagtggggatcaagtgggcaagctggacttycacccacacttggcaataatgacatgatgcttttctttcccttctagaaggttttcagagaatgcctgctataccaaagatttaaataagctcaaaataaccaatatttccagaattcaatttaaaaaattactcatcatattagaaaattctcagctagaataagaaaagacaatcaacagatgccaacactgagatacagacattgggattatcttgcaagaattttaaaggatccacaattaaaatgtttcaccaattatgaatatgttggtacgaatgaaaaaaatgcaaagtattagctaaggaataaaagatataaagaagaacaaaatgatatttttagaactaaaatata

SEQ ID NO: 421547 - DNA, 551 bp, Homo sapiens
cagttaaataaattgaattaagaaattttaaactcttcaaaaaggcattcccaggcccaaatggtttcacaggagaatacgaccaaatgtttaaattaaaataacaccaattctacacaatttcttctggaaaacagatgagagggcaacatggcccaatyaattcattttgtgaagccagtgtcacccttattccaaagacagtacagaaaatgaaaactgcagaccaatattcttcgtaaatatactgcaaatggatttcagcaatatgtaaaaagaattttataagaccgtgttggatgtttattccagggaggcaaagctagctcaatattagaaaatttagtgtaggcaggcaagatggctcatgcctgtactccaagcactttgggaggctgaggcaggtggatcacaaggtcaggagttcaagaccagcctggccagcatggtgaaaccgcatctctactagaaatacaaaaattagccgggcatggtggcacacgcttatagtcctagctactcgggaggctgaggcaggaggatcacttgaa

SEQ ID NO: 421548 - DNA, 551 bp, Homo sapiens
cagttaaataaattgaattaagaaattttaaactcttcaaaaaggcattcccaggcccaaatggtttcacaggagaatacgaccaaatgtttaaattaaaataacaccaattctacacaatttcttctggaaaacagatgagagggcaacatggcccaatcaattcattttgtgaagccagtgtcacccttattccaaagacagtacagaaaatgaaaactgcagaccaatattcttcgtaaatatactgcaaatggatttcagcaatatgtaaaaagaattttataagaccgtgttggatgtttattccagggaggcaaagctagctcaatattagaaaatttagtgtaggcaggcaagatggctcatgcctgtactccmagcactttgggaggctgaggcaggtggatcacaaggtcaggagttcaagaccagcctggccagcatggtgaaaccgcatctctactagaaatacaaaaattagccgggcatggtggcacacgcttatagtcctagctactcgggaggctgaggcaggaggatcacttgaa

SEQ ID NO: 421549 - DNA, 486 bp, Homo sapiens
tatgtattaatcaggttctccagataagcaaaatgaatatagaatagaatagataaatagatagagatatagagatcgattgatagattagatagatggagatttaaagatgtatttaagaggaaatctgttatgtaaattggctcayataattatagaggctgagaagttccattatttgcaagctggagaaccatgaaagccattagtgtaagtctcaatccagttctgaagatctaagaaccaggagcatagatgtctgagggcaggagaaagtagataacccagcttaaatagagatagtgaatccactctccctccacttttttgctttactcaggcactcaaaggattggacaatgcccatccacactggtgacaataattttctttactcattctgcctattttaatgttagtctcttccagaaacatcctacaaacacacctagaaataatatttcagcagctacatgggcattcttt

SEQ ID NO: 421550 - DNA, 486 bp, Homo sapiens
tatgtattaatcaggttctccagataagcaaaatgaatatagaatagaatagataaatagatagagatatagagatcgattgatagattagatagatggagatttaaagatgtatttaagaggaaatctgttatgtaaattggctcacataattatagaggctgagaagttccattatttgcaagctggagaaccatgaaagccattagtgtaagtctcaatccagttctgaagatctaagaaccaggagcatagatgtctgagggcaggagaaagtagayaacccagcttaaatagagatagtgaatccactctccctccacttttttgctttactcaggcactcaaaggattggacaatgcccatccacactggtgacaataattttctttactcattctgcctattttaatgttagtctcttccagaaacatcctacaaacacacctagaaataatatttcagcagctacatgggcattcttt

SEQ ID NO: 421551 - DNA, 571 bp, Homo sapiens
taagtcatatacatactgctagcttctttcccatttattatttaagttttccaacaacgttgtgagagatacattattatactcattawaaaaataagaaaattgagattttggaagtctaagataacttggtacatccataaagttagttaaattatgaattcttgatatgtttgattctgtacaaataagctatttttatttctatttatgagagaaaaagatagtacaatttaattaaaaaccataatatgccaggagcaagatggtggataggaggcagggctactgtgcatctcccatttggacggacagaacagagtgtagaggctctcattgtgaacttttcttccaagaaccactgcaggaatggaccaggaaaatcaaaagaattcacagatcctttgaaaggaatagcatgccactgcaaacttcacaagacaaacaaaaaactgtgagtccctgaagtgtgagaggaggaaaagtttgcctctgaacacatattccccactgaggaatctgaaaatccaaatcacaggagaagaatttaaccttacctagagctagaaaa

SEQ ID NO: 421552 - DNA, 444 bp, Homo sapiens
caagtaaaagagagagcttcaaagctcacagtcaaggctttcaaattaacccaatcaaaaaatttttttaaaaagagttttaaaaattaaacaaaacctccaagaaatctgcaattatgttaaatgaccaaacctaagaataattgttgtttctgagaaggaatagaaatctaaaagtctgrgaaacttatttgagggaataattgaggaaaacttccctagccttgctaaagatctagctatccaaatacaagaagctcaaaggactcctggtaaatttatcacaaaaagttcatcacctagccacgtagtcatcaggttatgtaaagtcaaggtgaaggaaagaatcttaacagctgtgagacaaaaacaacctataaaggaaaacgtatcagattaacagctgatttctcagaagaaactttacaagccagaaggcagtga

SEQ ID NO: 421553 - DNA, 644 bp, Homo sapiens
cttacaagtgtcttaaactggatggagcctatgttgagaaataaaagaaaattttaataataaaatacatgttattaaagatgcttgagtttgcaggttgacttacagaaaatacatattttatggtaaagtatgacttcttcccctagtgtcatagccaaatgaaaatgatgtcacctaaccactgtggaggtctacatggttaaacagaactgtgctaatggactattgtcaggaggatgtttattggtgtttcacagagtctgcgatgatgctgcatagatggaaattctattttcaaccctgactctaaacaggaagtaatagtttttcctagacaggtttaagtttcccatggccacattacactgaataccaaccccygcaaagacaaagcatatacagcctgcttacattagacaaatacagacactacattaattgtttgtttttgtcaagatggcagattagaggctttccacatacctcagccacttggaaatagcaagatggtacacagagatcaactctgtgagctttaattcaagaaggaaaatgggaattcatcaaaattgtgaaggacaccacagatcctggatgctggcaaacagcccccattacagtgtgcatctgataaaagtgag

SEQ ID NO: 421554 - DNA, 599 bp, Homo sapiens
ataagaaacttccaaactattttccaaaatggtgtcactattttacatcctcacaagcaatgtataagagttattccacatcctcaccaagacttaataatgtcagtttttttatttgtttgtctttaatcctagccattctaatatacaaatagaaaaatctcattgtagttatcatttgtatttccctaatgactaatgatttcagcatcttttcatgtcttccaacttggttctttttcaaaattgttttgtctactatacctcctttgtttttccatataaattccagaatcagctcattagtttctataaaaatatcctatcataattttgattgtgatttcattgactctatagatcaatttgggaagaattaagatctgaacaaaattgggtcttccagtacatgaatatggcttatcttttatttaggtctttgatttcattcatcagtatgttattgttctcagcatgtagatcctgaatatattttstaagatttatatgtattttatattcttgtagtggtacttattaaatttcaatttctcatttttcattgctagcctatcaatagtttaattttcaaagatgtt

SEQ ID NO: 421555 - DNA, 545 bp, Homo sapiens
catggtgtcctgactacattctagagcttattatctttttccctatttctgatcccccaaaatatgggttgcttttttatcttccactttgggctgcttcatttgcttgayattatcaagaggaaaatgataatgcattctataggtcactgactcctttatttcttatgctgtgttcagaacagaaagcctgcacattttcaattaaacaattccagaatcacaagacgaggtaacattgtttatgtagagactgggctgggaatactaacaagcttggcacatcaattcatggtaaaatcctgcatatccagtaattctaaagttcaccttgaagtttgtattgcattttgtcattctgtttaaatgtgtgtctttgccaaaagagagcaatggaactttttactgcattctattagtaatccttaaagaccaaaaattaaagtcagtacaaaaccacagctttgtcaaatgctaaatttcagtggtatatatttttttggtccagaacatttttctttcattatttttttctttattaatgc

SEQ ID NO: 421556 - DNA, 562 bp, Homo sapiens
acaaatggccaacaaacagatgaaaaaatgttcaacaccactaatgatcaggggaatgcaaatcaaaactgcagtgtgataccaccttactcctggaagaatggccataataaaaaaatgcaaagaataataggtgttggcatggatgtggtgaaaagggaacatttttaacgtggtgggaatgtaaactagtacaaccactatggaaaacagtgtggagattccttaaagawctaaaagtagaactaccctctacccagagaaaaagaagtcatatgaaaaagatacttgcacacacatgtttatgcagcagaattcacaattgcaaaaatatggaaccggcccaaatgtccatcaatcaatatgtggataaataaattgtgatatatactgtagaatactagtcagcgataaaaaaggaatgaaataatggcattagcagcaacctggatggaattggagactattattctaagtgaagtaactcaggaatggaaaaccaaacattgtatgttctcacttataagtgggagctaaactatgaagatgcaaaggcataaga

SEQ ID NO: 421557 - DNA, 619 bp, Homo sapiens
gttccagaatttaatttttaaattggctttatacttctctttcccacagaaagagtattaaaaatactgcatgtgttctcaacctaaaccacaaataacttgttcaattaatagtgtgcctacatcrgagtatttttgaggggtaacggaacataacaaagtgaattctttagagtcagaaccagattggaatcctggctctgcacttcccagttaagcaaatcatttaaagtcagtgatcttcagtttcctccagtgaaaaatagaaatcatagcatttatttcccaaaggtgtctcaagaattatctgagataatgtaagtggtcatttcttccttcctgtcaaccccactagcctcctatttatcctaggttttgctgccttacctagtattttcaaactagagaagtttttttggtgtttgctctatagcacaattatagtattaattaagctataaaaatgggcttgcctaattttaatcatagccccaagcatcacctgaaacatgaatatagcttcaactctggagaagcaggagaacagagccgcaaagctcctgccatgacctttggtggcgatgactcatatcacagtggccatccatactcatcaatg

SEQ ID NO: 421558 - DNA, 592 bp, Homo sapiens
tggtatatataatttactcttgaaatgggtaattgaattgttgctgaataaatatgagatgatatattgaaatagatacagtttgcaaatataaataagttgggtatatgtaactggtttcacaaccctgtgagaacatatatgataccattaacattaacagctatatctcaattgctccaatatccaaaccattttgtgtggcttcagtctactgtcaaatgttgtttccctgggtgaggtcagatgcctctagcatgacggaatcccatgtgccctggaagaagacttctcatgtgctcgtgactattcctgaattattgrcttattcctctatcactacctgtgatactggagtcttctgggtgacaggtactttctgctgtttcccccttttaattctccactggacctcaaagcagcactgtataagcttagagcctcatcacatttttgatgttaactgtaagatttttcccttaacccttcattttcagaggtttaaaactggttaatcagttcaatgaaggggacaacacaacatctatccctttcactgcctttatgaatactcctttcacaagtatcattg

SEQ ID NO: 421559 - DNA, 487 bp, Homo sapiens
agaaaatatggtagaaaaaaatgcgtggttaaaaaatcatatgaaataatcaaacactattttctattcaaacaagaatcaaacaagaaaatgaaagaaaaaagtcacttaaatgtataacaggaacgacaaatgaaaatctaggagaaacaagatataatcagaacctttgtgaagaaatactcaagtctctactgagaaacataaaaatgaataatagaaggatacatcttattattggtaagacagagtattacaaagttgtcaatgtcatcaatcacaacaaaaactacaaataggttcccatttctttttttatctaagaaacatttattattatggcaaaatatatgcaatatgaacttaccattttaaccatttttaagtatgcaattcagaggcattamgtacattcacattgctgtacaaccatcaccactatccatctccagaatattttcatcttgccaaactaaaattctatatc

SEQ ID NO: 421560 - DNA, 530 bp, Homo sapiens
tatcctacacttttttatttcacatctcatcttctaaataaagcttctgataaccattccaggttacgatgatctcaccaagccctaatttctcacttcctttattttctgaattaagcaaaccacctaaatgtaaacataaatgcatctaatgtaatgctatatgtaaatattatatgtaaatgcatctctctaacaaacyacatgtgcttcaaaggaagaaaatcactttgttcctcatttgatttctcctacatgcttcacatattatcaggcacatggtagagatatagatgtagatatacatatattatatacatatatgtatataaataagacaagcacttatataattcaatttatcatattaattaatacattttttcattatgttgatattaatccataagattcattcaggagtatgatcacttattcactctgtgatttttgagcaagttgcttaacctccctatgattagttttctcatatgtaaaatgaaaacgataatagtactttccttatttcg

SEQ ID NO: 421561 - DNA, 635 bp, Homo sapiens
atctgtgcagctgtgggcatgtctccaggcacaacaccctgtgctagttcccttatcggtgcctgcagcttgaattttttcccaggctgctttttatgttatgtggggatgaggaactgacccatgggccgggggctctccaggaccctttccttgttatctacctaaggcaagctaactaactcctttcagwgggagaagcaggcacatcttacatggtggcaggcaagagagggggatgaaggaagaacttccaaacacttataaaaccatcagatcttatgagaactcattcactagtatgagaacagcatgggcgaaactgcccccatgatccaatcacctccctccctcaacacatggggattacaggtccctcctgtgacacttgggaactacaatttgagatgagatttgggtggggacacagagccaaatcatatcactctcccaactagaaacaactgaaatactcgtcagtaggagaatggatacataaactgtgaaaattcatacaatggaatacagatggttcctgacttaacaatggtttggctgacttatgatttttgaactttaaggtggtatggaaaccatactttaagtacccatacaaccattctgcttttcacttt

SEQ ID NO: 421562 - DNA, 643 bp, Homo sapiens
ttaactatacacttgcatttctctattcagacactatcacctgctatatctgagtttccgctcctaaagtcatatcactggtagagcaatctgtgtcagatctccctgcctcagagaatttgcatgaatttactgtgctacaygctaccatgatattctcagcaatttaagtcacacaactatcttgtgaaaaataatttacttattaactatacacaattatattaattgtataagtagtctcctggcagttggtgtgtatgcatagactaggacacttttttctcctgtccttgatctttcctctattcctcaacctctattctcatgaacttcagaccactgagaaaataaaatatttttttaccttgttccctagttaaaccccaaaccacattcagtgactctttctgattatgccccagaaacttctagaacaaacctcccatttaaaagatacgcttttaaattgttatttctttaaaatttctctatattttccaaggataccatttctgtacaattaccaatgtttttcaattcatcctctttccaccaactgccaattctaagcattccccctccagctgggatcttgactgctgtattcatctctactcatgtctagtcctcctggtttcct

SEQ ID NO: 421563 - DNA, 336 bp, Homo sapiens
gaaataattactgtgtccatttatttattgtctgttgcctgcccatgccatgtaaactcaaagtgagtgaggatcactggttttcctggtccctagaatagtctggcatgtagcagactctttaaaagaatgtggtgacaattcattttgtcaattttttcctctcttgactttcatcaagatgactaagcttggagaaaatgagaagaaaataaaagaaatcaagaaataataatctcaagacaaatagaacagttctagattcaaatgtttaatatgaaataaaaagtaaagagytgagtgttattcttgaatgagatctatgcaagtcatgtg

SEQ ID NO: 421564 - DNA, 563 bp, Homo sapiens
agagggggacagttttgaatgccctaaattttctaaattataccctttgattcaaaacctttactttcatcaaatgcactttatattcttatatatggaggaaaccttggggcagcagagttagttcatatacagagagaaaatctttgcaccaaggttagattaactgaaagaaaaaacatgtagagaatatgtgtctataaggagactgaagccagtgataaagcrgttttgaaatggtcagaacccagacaacatgtttaagcctgaaagtctgaaatctgggacagcacagagatcttttggtaagtaggtcagtggaagaaaaaagacttttgcagtgtacatcatggtctcaaatgagtatgcttggatttgcatacttacgtaaattcaaaaccctttttttcttttattttttaattgacagataatactgtatgcatttatagtgcacaacatgatgttttgtagttcatatacgttgtggaattgtcaaatctagctaattaacatgtgcattacttcacgtagttatttttgtggtaagggcatataacata

SEQ ID NO: 421565 - DNA, 621 bp, Homo sapiens
gtaagttttcaaataccatagttatttaaracaacagacaaaaggaagaacatgttttaatttctacagcatctttctaggatctagtgttgtttcataacagttagtgcatgaggtggaaaggagtgggagaggattattttggggatagttcttcttccctttcctgatatgtgtaaacatcaatccacatcaactttaccagttgtcccgtggccctggcacccaccccagcaaaatgaagccctaaggagaaattacagaagatagcagggaggggggttgagaagccagtgtattccttgtgcttcctgtgtccagactaaggtcccgtgaccacctttgcttgcagaaggctgagctctcctgagtaagaactcaagtttttttccagtcttcaggtttctgagtaattttgcctttgggtacacaagaagggattaacggacacattagcacctcttctccaaactccacatcagctgttatccgaaacagctcacatttccattgcaaccttacagccagagggtcaccttgtttcctgtcaatctgtcactgtgaggatctgtttttttgccattcttttatgaagttggagaacttgaggctgcaggagct

SEQ ID NO: 421566 - DNA, 593 bp, Homo sapiens
aaacaaacatccttgtaacataatcacacatgagatggccacaagatctgagtagtatgaaaggtctgattaccttgcaggtactacttccctccaggacagctccctctcatcctttgctcctatgtcatttggcaggcaaagagttggggataaagggctaatactgaggttaaaaggagggaaccactggaagtcctgagcaaagggggtttggggtagaagaaaagagtaggatgaggggtatgagggtccttaaccaactttagggagttgaccaactgagtgaactgaaagtcaacaactgtgatattgcaacagtatgagaaatgtgtgcccaaggcagtgactagggttcagacaccaccctggactcccaagtcattcctaccttatatttttgtaattctttccagatatttgtcaaactaagatttaggccatgtaggacaaggattgatctgttccctgtcatcctcaatgggaacacagttctggaggctccacatacattcagtttacygactctacaagcacatgttaagcatcaagtatctgaatagggctctgaaagccacagatagcacaattct

SEQ ID NO: 421567 - DNA, 593 bp, Homo sapiens
aaacaaacatccttgtaacataatcacacatgagatggccacaagatctgagtagtatgaaaggtctgattaccttgcaggtactacttccctccaggacagctccctctcatcctttgctcctatgtcatttggcaggcaaagagttggggataaagggctaatactgaggttaaaaggagggaaccactggaagtcctgagcaaagggggtttggggtagaagaaaagagtaggatgaggggtatgagggtccttaaccaactttagggagttgaccaactgagtgaactgaaagtcaacaactgtgatattgcaacagtatgagaaatgtgtgcccaaggcagtgactagggttcagacaccaccctggactcccaagtcattcctaccttatatttttgtaattctttccagatatttgtcaaactaagatttaggccatgtaggacaaggattgatctgttccctgtcatcctcaatgggaacacagttctggaggctccacatacattcagtttaccgactctacaagcrcatgttaagcatcaagtatctgaatagggctctgaaagccacagatagcacaattct

SEQ ID NO: 421568 - DNA, 534 bp, Homo sapiens
gccaaagttatgctggccaaaaagaacaaagctggaggaatcacattacctgtcttcaaattatactacagagatatagtaacaaaaatgacatgatacctgcataactggtgtatggtctatgacatatagaccagtgaaacagaatagagaacccagaaatgaatccatactttacactgaactcatttttgacaaaggtgccaagaacatacactggggaaaggacagtctcttcaataaatgggaaaattaaacatccatatgcagaagaatgacactagacctcctagctatggcaaaatacaaaartcaatttaaaatggattaaatatttaaatctaagacttcaagctatgaaactactacaagaaaaaagtgagtaatctcttcagaacattggagtgggtaaagatttcttgactaatacctcacaaccacaggtaaccaaagcaaaaatggacaaatgggatcacttcaaattaaaaagcttcctcacggcaaagaaacaatcaacaaagtgaagagacaacc

SEQ ID NO: 421569 - DNA, 601 bp, Homo sapiens
tttaaaagcatacatactttcaaaattcagtgacagaaagaaacccagattgtaatgatgtttygataggctttaacaggtacaaagagaaataattttttttttaatgtgaagaatcattttcaaaaaaatgaaatgggcagtaataattttcccacccccaaagttactgccttttaaaattggttattgtatataaaacataaagaaatccagtgaaatgtaacagtgattgctgtttttcaaaatatggcacttaatcaattttgattttttaaactttgttgattttcttattgcatatttgatttctgttttcaaaaattacattttattgtgtatatttgaggtttaccaacatgatgttgggaagcatacggatagtaaaatagttactatggttaacaaacctacacagtgacttttttggtgataagagcagctaaaatctacttatttaacaaaaattccaaatataataaaattttattaactatggtcctcatgttgttcattagatctctagacccattcatcatacatatctactactttgtattctttgacctacatcttcccgttccctctgccctgcccttcc

SEQ ID NO: 421570 - DNA, 648 bp, Homo sapiens
ctgaaatctgggcactttagaggtgaataaatgctaaccatgtatttaaaaaaaaattaatggagaagtttaaatccagttttagaatrccaaccagatttcactctcagaacctatcagactttttctgctacttagtaacctaataaaaactttgcagtctatgcctcttctaagggcagctcaaaaggcacgtgtacaatcctgtccttagtaagtttaattaacatgatgtaataaattttagcagaaagtgcattattccaaacagtttctttttccaagcatgttggccagcaacctttgttgaaacaaaggaaccagccacctgcacttctaagcacaaattaagcacaaagagccagtgttccagaggctgccttctacctggccagtacagccagaaggcaatgtttgcccaggtttcatatacagggtcttctcctgatcaaaggaataggagcaaacactgcatgcccctgtgagtcctgaaggtaagtttctaagaggagggcatcattctcctgaagaacgctgaatacctgtctttaattaaagtataagagagcctgttctgacttatttgtataaaaagttagaatttcaaaataagccagagacagaggattttaatcgcatatttaggag

SEQ ID NO: 421571 - DNA, 543 bp, Homo sapiens
atgtggtggcatttgtgttttattttactttaggattttaaawaattttctactgtaattagaacattatcaaataggcatgagatatttcttccttctctagcactgctgtttaaatacaaatatatttttatgatgtctttgatgccaagatactgggatttccttgggtttcatatatatttctaaaagataattggaagggccgatatttaacaagatgtaaagatcccatggcataaagagaaaagggaaccctggaaggaacatcatgtttgtcacaggatctgggttcctgtggaatagcagacgaggcagaattgagaatgatttgaaaaaaaaaaaaagagaacaaacattgcaagttgctggtaggcttatgaagttaatgctagtgggatacctttgttcacactgaactgacttcgtaaatcacagccccatttcaggcacatgaaccctgtccaccacccctcattctagcttcagtcatcagcatccactactctttgaatcttatgtgtttatgagaattacatgaaa

SEQ ID NO: 421572 - DNA, 543 bp, Homo sapiens
atgtggtggcatttgtgttttattttactttaggattttaaaaaattttctactgtaattagaacattatcaaataggcatgagatatttcttccttctctagcactgctgtttaaatacaaatatatttttatgatgtctttgatgccaagatactgggatttccttgggtttmatatatatttctaaaagataattggaagggccgatatttaacaagatgtaaagatcccatggcataaagagaaaagggaaccctggaaggaacatcatgtttgtcacaggatctgggttcctgtggaatagcagacgaggcagaattgagaatgatttgaaaaaaaaaaaaagagaacaaacattgcaagttgctggtaggcttatgaagttaatgctagtgggatacctttgttcacactgaactgacttcgtaaatcacagccccatttcaggcacatgaaccctgtccaccacccctcattctagcttcagtcatcagcatccactactctttgaatcttatgtgtttatgagaattacatgaaa

SEQ ID NO: 421573 - DNA, 543 bp, Homo sapiens
atgtggtggcatttgtgttttattttactttaggattttaaaaaattttctactgtaattagaacattatcaaataggcatgagatatttcttccttctctagcactgctgtttaaatacaaatatatttttatgatgtctttgatgccaagatactgggatttccttgggtttcatatatatttctaaaagataattggaagggccsatatttaacaagatgtaaagatcccatggcataaagagaaaagggaaccctggaaggaacatcatgtttgtcacaggatctgggttcctgtggaatagcagacgaggcagaattgagaatgatttgaaaaaaaaaaaaagagaacaaacattgcaagttgctggtaggcttatgaagttaatgctagtgggatacctttgttcacactgaactgacttcgtaaatcacagccccatttcaggcacatgaaccctgtccaccacccctcattctagcttcagtcatcagcatccactactctttgaatcttatgtgtttatgagaattacatgaaa

SEQ ID NO: 421574 - DNA, 543 bp, Homo sapiens
atgtggtggcatttgtgttttattttactttaggattttaaaaaattttctactgtaattagaacattatcaaataggcatgagatatttcttccttctctagcactgctgtttaaatacaaatatatttttatgatgtctttgatgccaagatactgggatttccttgggtttcatatatatttctaaaagataattggaagggccgatatttaacaagatgtaaagatcccatggcataaagagaaaagggaaccctggaaggaacatcatgtttgtcacaggatctgggttcytgtggaatagcagacgaggcagaattgagaatgatttgaaaaaaaaaaaaagagaacaaacattgcaagttgctggtaggcttatgaagttaatgctagtgggatacctttgttcacactgaactgacttcgtaaatcacagccccatttcaggcacatgaaccctgtccaccacccctcattctagcttcagtcatcagcatccactactctttgaatcttatgtgtttatgagaattacatgaaa

SEQ ID NO: 421575 - DNA, 562 bp, Homo sapiens
tctatacattagaatattgtgttgaatttacatttattytactatttctcacgtgtataacattttattataaactattaaatgttgtggtcaatcagagagagagagaaagagagaaaagagtgacacagagagacccagcaatgattacgaaaaaattaacttttccagttatattcaaaatagtgtaacatgtatgtaacaagtcttttaagcatgtaattaaaagttctatacctgattcttgttttaatttcctaaaataagaaggatcctttacttttaactgagatagaaacccaatgctgacagtccatttgcttatatagattcattgattgcaatgtaggtggggaattcacggttactagagttacatgggcttcatataaaagcttagatttttaaaatattcaagtataggccatttgaaaacaaaacctctgagaaaggaattctgaatattttcctttcacattacagttagagagttattctgttgcaaaaattaatttgtatgtttaaaatgataaattatagtgatttcatcactttcataaca

SEQ ID NO: 421576 - DNA, 562 bp, Homo sapiens
tctatacattagaatattgtgttgaatttacatttattctactatttctcacgtgtataacattttattataaactattaaatgttgtggtcaatcagagagagagagaaagagagaaaagagtgacacagagagacccagcaatgattacgaaaaaattaacttttccagttatattcaaaatagtgtaacatgtatgtaacaagtcttttaagcatgtaattaaaagttctatacctgattcttgttttaatttcctaaaataagamggatcctttacttttaactgagatagaaacccaatgctgacagtccatttgcttatatagattcattgattgcaatgtaggtggggaattcacggttactagagttacatgggcttcatataaaagcttagatttttaaaatattcaagtataggccatttgaaaacaaaacctctgagaaaggaattctgaatattttcctttcacattacagttagagagttattctgttgcaaaaattaatttgtatgtttaaaatgataaattatagtgatttcatcactttcataaca

SEQ ID NO: 421577 - DNA, 567 bp, Homo sapiens
aggaaatccacccccttatacacaacgtttttttttttaaaaaaaaaaaaaaaagaaaactgaactctctcatccatcttttttattctggctctatcccctaaaatcttatagacttggagccatgataactgaatattcaatttttgcaaaatggaatgaacagaaaatattatactttacatctctggtcacaccctaatgccatttatatgaacatataaaggaggagattattcacatctgaccacagtttccagagcttgaaggagacttgaaaaatattacatcatacctaatcaactcttcaagtcagagcttgattttagctgcctagaattgcagttgtsttctgctgattggggcaaggttcagccagtttgggtgagttattgcaatagaaggaatatgctcccttatacagaattatataaatcaatagagtcatatttattttgctagaaatatatctaaaacagacttaccaaattgttcaatccatccgtgtctggagttactgtttctgtagtttttcatttacataatacatttttctgtatttttgct

SEQ ID NO: 421578 - DNA, 567 bp, Homo sapiens
aggaaatccacccccttatacacaacgtttttttttttaaaaaaaaaaaaaaaagaaaactgaactctctcatccatcttttttattctggctctatcccctaaaatcttatagacttggagccatgataactgaatattcaatttttgcaaaatggaatgaacagaaaatattatactttacatctctggtcacaccctaatgccatttatatgaacatataaaggaggagattattcacatctgaccacagtttccagagcttgaaggagacttgaaaaatattacatcatacctaatcaactcttcaagtcagagcttgattttagctgcctagaattgcagttgtcttctgctgattggggcaaggttcagccagtttgggtgagttattgcaatagaaggaatatgmtcccttatacagaattatataaatcaatagagtcatatttattttgctagaaatatatctaaaacagacttaccaaattgttcaatccatccgtgtctggagttactgtttctgtagtttttcatttacataatacatttttctgtatttttgct

SEQ ID NO: 421579 - DNA, 593 bp, Homo sapiens
taacttctaatataaagagttaaataactgaaatwttaagtttaattcagaagtgttaacagaagtacatgcagcttatttgtagaacaatgatagatttcacctacacaacatatttgaatataagtcattcacagaatacagtttaaatacaagtgaagacatattccgagaatttgcttaacttacagtaaataaaaatacatctagaaatttatgagagaacaaatataggttgtagaattgtaaagagggatttcaatttggaaaattttcttttatgcaaatatctcactccatctgaattctataacaaaataccataaactggatagcttttaaacaacaaaaatttatttttcacagctctggaggctgggacctccaagatcaaggcactggcagatttggtatctggtaagcatccttatattcggaatctgggatggctctacattctggtccatagaaggtgcctactgaggtgtcttaacatggtgaaaaaagtaaaccagctcccttgggcttcttttataagggcaatagttgcagtcatgaagactccaacctcatcacctaatcacctccccaaa

SEQ ID NO: 421580 - DNA, 569 bp, Homo sapiens
atgttcaaattgcaaaagtaaatacatgtggcatggtttccgcagttgatagtaggtagtaggtagagactttatttaaacttgacatctgtaatgttctcttatgagagatacaggacaagtcattgacccataggttaatccatttatagaacctctgtaaataatattccaagtaaacaccctattgagtctactatttaatggtttctacrttttagcagccacctattaataacaaactatagaaatgatccctgaaagtatactcttaggagccacctattaataaagcacatagatgttatatttacaaagcaagatgtataaatttaaataatgtgaatgaaagtaatggtatagctagaaaaataaaagataggaaatattgcaaataaaccaaaggaagttttgacatgttaattatgttttggacaatcagttagatgctgactacagttgaaagaccaagaaatagaatacaaccaataaaacaattaacaatattttaactaaaaattattgagagagagtctgtgaatagtgtggctgaacttagcataagttca

SEQ ID NO: 421581 - DNA, 560 bp, Homo sapiens
aatgcagtctcacaatcattacactctcccttcccagcatacagattctgtgtgccatgcagccgctgctaggaaggtaggaaaggagtggcaatggcaattcaagactgttttattctgcccttttcagtacctatttcagtaatatgaggttaactagaggaactgtgattgctcacctgatttttggttgttataaagtacatrctttttttgtgtagatggttgttaaatttggtgttcctgtaaggggtagggggaataggtcctctgcccccacccagagaataacctaccttatctttcttggcagatagttctcattaaaaataccttgtcctgaacattttgtgtttattttagtaactgtcaactatatgacaatgaacaaatgtatagaaaagtgaacaatagagaatgacaaatctatttggccattgtatagtgtgtgggaatttacacttactaaaaggttttctgctcgaaagagctatgcccagggttattggatccaaagtttaacattatgcactctgttgatacaaacattttactgaact

SEQ ID NO: 421582 - DNA, 560 bp, Homo sapiens
aatgcagtctcacaatcattacactctcccttcccagcatacagattctgtgtgccatgcagccgctgctaggaaggtaggaaaggagtggcaatggcaattcaagactgttttattctgcccttttcagtacctatttcagtaatatgaggttaactagaggaactgtgattgctcacctgatttttggttgttataaagtacatactttttttgtgtagatggttgttaaatttggtgttcctgtaaggggtagggggaataggtcctctgcccccacccagagaataacctaccttatctttcttggcagatagttctcattaaaaataccttgtcctgaacattttgtgtttattttagtaactgycaactatatgacaatgaacaaatgtatagaaaagtgaacaatagagaatgacaaatctatttggccattgtatagtgtgtgggaatttacacttactaaaaggttttctgctcgaaagagctatgcccagggttattggatccaaagtttaacattatgcactctgttgatacaaacattttactgaact

SEQ ID NO: 421583 - DNA, 580 bp, Homo sapiens
agaggaatatcagttctctttcctctcccatgtcctcctctgactatctttatggggactgaaatgaggcacttttcaaaaaaggtaagcaataattggcccatatctcctttcttatgcaatcctcatttatctttgagatgttatcacacttgatatattcmcattccagttgtcatattaaagcttcttagtcgatgaacttctagattcacttagatttaggagccaggaaaagaaaatatttattctaatatgttgacatttaccactctgatatttatatttcagtaagtataacttgaatgatttatttaaagtattttctaaaaccataaagtaacactgaagacagatcatgaatgatgtattttctattatgtactcagttgccaactgaattttaattttcagaggaatgctatcttaaattactagataatatttatgtcagtaactatattttttttatttttttattgtggaacacataggaaatagcaaagatagtacagaggagtacagtgtacctttaatctggtaacaggcactattttaaaaatctgaatataacacgccc

SEQ ID NO: 421584 - DNA, 597 bp, Homo sapiens
tgttttgctgcttatttctccacatgacatctggtaggaataatggggacaactgttttatcttggaaacatattcacttttattatttaatcccaaaatattcctttctgttagaaaattatccatataaatcttctgattaatgaatcaggtacatgtatttccttattttagcattgttcttatcctggtaatactgcataaattttccaggatcgcttctggctctgaaattatgtaacctatgcaaaatatattcatcatttttcatttaaaaataattcccattgccaaagtctttctacactatgaacttataaattagtatgactctattgaaaagtaaaaatactgctataaaataaagatgctttggaattcacccaaccccaataatattctgtaaagccgccatccaactaaggcccatgagaaagaccttagcataaattgaatttatatctaaaagctccaattagacccctgctgaagtcattatcattaggttttcgattgtgcctagccactaaaatagttgttctcactgtatacaatawatgagaagcaaaactgaatcataacattttcaaaccgga

SEQ ID NO: 421585 - DNA, 595 bp, Homo sapiens
ttgactcctagttggtaggtacagatttcccagagtgaagcttctctttgttcaatttggttcatgatccatcattctacaagttctactcaatagcaggctctcaggctagactatcctagacttacaaacaaagcaacacatgtatcatcattcaccaaaccattgcaatagccttattttttaaygtttttttttctgaacataataacatagacacacttgaaaaaattggaaaatacaaaacaaatatccgtccgaaattctaccagttaaaacatggctagatttctctctattcttgtttctgtgactttttaaaaataaggttgggaatccaatttaaacttaaaatgtttttcaaaaaaacattttaaaattatgcacagttgcagactggaaaacttaagggggtgccttatagtatcaatgttaggagttttatttagtgcatttaacgtaactggcaattgcaaaatccactttgcctgcatatgtgaaaaatatagacggttatcttgtttgctctatgaaattctgcacttgatattcagtatatactccaccttcattaatttcttctgccacaatgttc

SEQ ID NO: 421586 - DNA, 540 bp, Homo sapiens
tttgacacgagttacaagtatatgctatgtattaacatcagataagttgaattaaaaaggtagataagtagaataattgaaagaagacttggcatcctaagcttctattaaggttctgtgacttatcagttgtttgaacttgaacttggatagctattctaaacagatcactctgggtagaataacacaaatgcttctttatccagatacgtagacagacagatagaagagttctcttgagtcaccatctgaaggtaaataacttgcccttaatagatggcacataaggattgtggcacctgggcacttaaagctgaatgtccattgagcagagagtgtacaattctaattacacaagacaatgaatcaaaaactgtctgaattgcatgttgcttctatttctatctagtcagaacttactcttgacagttcagagtgtgattgatgaatgataagaaaacaagttgcctytaaacctttcagatagccatgtgacaatgaagctaaaatttttaggaagcaacccaatagcaaaaaaat

SEQ ID NO: 421587 - DNA, 500 bp, Homo sapiens
agatcaacacttcattcctaagatgttcaaggttgtattcagagaaattccgcattctttatatatgatatcttcaacaattttttttcttacacttcttatgcacaccaagagatattcaagaagagtagctaaaataagccaaataaatgatcctatcaaaactttctggggacggtggttacctagtcaccttatacaaaatcccataaaaaaaatctgctctaaggttacatacatttccaaatatggacaataaataggtgacaaggtttctaaaactgagccttattaggcattctgtttcaccttgtcastgtatcacccagctctgatctctttcttcactgtcatattcttcattcaagtttgcctcacctctcacttaagaattgcctcagctcctagccaatcatcttgcctccagactctccctttttttgtctacccactactttaacagttctcgaaacaaacataatggattatttgcttttttg

SEQ ID NO: 421588 - DNA, 443 bp, Homo sapiens
tctcattgctgtccagtacaaaatcctgagtagcatccttaatttggacattcaatattttattattgatttacaacccaacttgttttcacaacagatctaagtcatstgaaagaaactttgtacattaaaacagcaaaatataaatgtaaaaataacgagagtcattggaaatagaatcagagctggactaggaacaggagatgagcagagaagggtatatcatgttgcttttaaggccaacatcaattcctatccctttgctaagccacagatttgtctcttcctcccagccaaagaagaaaagaaaatgattcaactatatggttatccttttctgtgaagagaaaaatatattatcagttcttcagaagtatatgtttagaatttagatatcaaatttgaacaaaataagagattagttgaatacatgttatctgagt

SEQ ID NO: 421589 - DNA, 582 bp, Homo sapiens
aggagagacacttggataaaaagggcaaagaccaaagttgaagtattggaaatcttagtgaaagttagttaagtcaactaagaatatctctatactaaataaactgagtttcagtgagtggaaataattaaagtcattgatgtaaaggtcaattttaggtcattcctggcactaaatttgaaaaaaaaaaaagtcagagtagctatgtttttttaaggaaatagatgaatgtattttatggatctctgagtttaacatttatactaaaggaaaaaaatcaataaagttatgtcaacctgaaaataactggggaatgtgtattgctgaattaaaaaaagatctataaccacagtttacagtttcatattttgcaattaattagtaaggaaggcaaacacacatttatctagattaggaamgttttcaagtgtgtaagggtctaaggtccagaaggtagtgatccacttcaccttagggagaaaggctaagtgttatgtaatgggaagaggacctcaacttgttggaagactcatctcaaccacctgccaatgatagagaatgaataaacacaaattttcatac

SEQ ID NO: 421590 - DNA, 582 bp, Homo sapiens
aggagagacacttggataaaaagggcaaagaccaaagttgaagtattggaaatcttagtgaaagttagttaagtcaactaagaatatctctatactaaataaactgagtttcagtgagtggaaataattaaagtcattgatgtaaaggtcaattttaggtcattcctggcactaaatttgaaaaaaaaaaaagtcagagtagctatgtttttttaaggaaatagatgaatgtattttatggatctctgagtttaacatttatactaaaggaaaaaaatcaataaagttatgtcaacctgaaaataactggggaatgtgtattgctgaattaaaaaaagatctataaccacagtttacagtttcatattttgcaattaattagtaaggaaggcaaacacacatttatctagattaggaaagttttcaagtgtgtaagggtctaaggtccrgaaggtagtgatccacttcaccttagggagaaaggctaagtgttatgtaatgggaagaggacctcaacttgttggaagactcatctcaaccacctgccaatgatagagaatgaataaacacaaattttcatac

SEQ ID NO: 421591 - DNA, 546 bp, Homo sapiens
tggtgatattattctgagatctttaagatacattacacagatcatatttttaaataatttttttattttactttaagttttagggtatatgtgcatgctgaaacgtaatgtgtatatgtgttatactctggttgtttttctacttgtttgatcctgttttttttaatgaatgatagttactcccagaaaaataatgaacacctgtacatataatttgaaaaagtaacacatattgtaccttttctttcacagatgactaaaacaataaaattaaacttagacaagcacatcttttattatgaataaacgttgttgagaatgkgtttcaaactgaccaaaaatacttctaccttcgtttacatattcatgcatcattttcaaagaatatttgcaagaacttgagagaatcttcccagtgtttttttaaaaaaattgaaccactttttcttttaatgctgacttagtaatactttcaaacacccccacccacatttgactttagagaagacgttttagaagaaggggaacattttttgctcactgcaa

SEQ ID NO: 421592 - DNA, 492 bp, Homo sapiens
gagccaactaaaaagaattagctagaagattttgtaatgattagtcartaataataactaggaaaaaaataatggcagtgataacctcagagctgtaaccaaaaagcaagatacttaactgttacaagcagtgttttcttattcataattgcacattacagaacacttttcttctaaagatttcagagtgatttatgatttaagaataatgccaggcatcatgccaattttaatttgaagggcagagggaagagagaaagaatacttcagaaattaccttgttctctaaaggcatttctgtcacttttgcttctttttaagggaaacacccctggatctcttcagaaatcaaaacacagactaaaaatagaacattctaaaaatgtgtgccagatgtatcatatctagggcttttctcaccccagggtatttgccaactcccacttgacacttcccaaatatttttagcacttcaaagtctcttacttattg

SEQ ID NO: 421593 - DNA, 632 bp, Homo sapiens
ttaatcattattacttttaactaaaagaaaaacacatttgagagacatttgcactaaatcatatcatttcagagatttcagaaggcaaacattgtcaaccatatttttgtctctacagcatcatataactagggtgaacatttcaatgaatggtccattttgaacaagttgaatcagttactttgtctttgataaacacagtcttcattatataaaattttaattggatgacaaacattatagacttattttccatttatgtagagaacaaaaaaattagaagacaattgtccagaagtgacctgaatttaatttttaagtgaaactcatcaataagcagattttaacaaggagaatgacttaatggcatcttggtccactgatgagaaatcattatcagagagttctatggcagatacccccaaagcaacgctacagaggagctcttatgtacaattaagttcagtaaggaacactcactctctctcatttccctttatgctgtgagtcagctcacgtcacacacaatgccayaccagaaagcctgcaaccatcttatctttgcttccagatgccagtaatgaaattctaatattctatacctcataattaaataagaatattaaatgagg

SEQ ID NO: 421594 - DNA, 446 bp, Homo sapiens
gcccactttttgatgggttcttgttttgtttaagttccttgtagattctggatattagacatatgccacttgcatagttggggaatatttactgccattctgtaagttacctgtttactcagttgatagtttcttttgctgtgcagaagtttttgaatttaattaagtctcacttgtcgatttttatttttgttgcaattccatttgaagacagtcataaattctttcccagggccaatgttcagaaaagtgtttcctagcttttcttctaggatttttataatttgaggtctgacatttacatctttcatccttcttcagttaatttttgtatattgtgagagataggggtctagtttcattcttctacatgtggctagccaggtaacccagcatcayttattgaacaaggagtcctttaacaaaattggaaaataaaattatat

SEQ ID NO: 421595 - DNA, 568 bp, Homo sapiens
attccacttcaagtgttgctcatttgtcctcaggaaagaaaccctcttcaagtcacatgtttttcattttgtaactagagggagagtattagcaggggyaatcgtgaaagaaaaaacaaatgaaggagcaggagagagcacgccaaacatggaccctatcggcaacttaaaaaagtcctataaaatcctctctgtaagccattttagattaccctttacgggctaaattcaagacaaattttccatgagaagattcatttccatttccaaacttctttttcatttctcagtgttcattacctgacgtgctgagtttgaaggtgaactgatataagggaatttgcaaagggatagataagcagagcatatgtccacaaacccacctattctctagcagcctggtaggcacattcaataggaggcagaaggactttctctcagaccccagacttcaactactatcaatgcttttggttcagtttccgtttttggaaaagtctacaagtttcccatggcaactttgctcagtcagctctatttacagcctgccactttagcaatacttata

SEQ ID NO: 421596 - DNA, 598 bp, Homo sapiens
cagttgtgtaacatcatctcattctcatcctgcctggcatcacttccatttgcctggccctgagattgtacatctcaataaccacattaccatttaaggtacctaacctcaggttctgttttccaagaaaccttgaccaagacaaaaatagaagccatagcagagataaggcagtatatattcgttgtctcattcattgcaacaaaatttgattgcatgcttaagagcttattayactaggcatttgaaacatgtaactgaatcagaaatagtccctactctcaagacattgttagaagtgagaggtataaaaacaaacaaatacgagaaaatgttccacatgttaagaaaaaatatatgaaggcagtagcattgaattacaaaaagaaagcagtcatttctacccaggatgaatgcaggtgtgtgtttctgtggtggggatgggcagagagcaggagagaagacatcaaattcttcccaaaagaattaactgctgagcagagttttaaagtgtgattttgtacaataaacttcagacataaaggagacagagccccaccctacagacacttgcagtctagtggaggagacaggcacg

SEQ ID NO: 421597 - DNA, 606 bp, Homo sapiens
tactgccagaagcaatctacagattgaatacaattcctatcaaaatactaacatcattcttcaaagaactaggaatgatgtcagagtacgtgtagcagtaagtttttgaaaaccactaaattaacagtgagcaccttttagatgmtcaaggcttgagaaagaataattgaacttttgagcttaagcctcttaggtggattgtgcaataccagtagaagtaccaattgagcagactgctatctgggtggcctctcagaagcctgaactcagactggcatgactgatacctagggtggaaatgattggaaagagattaaggatccctacaacttaagtgcttgaatacccaaaagacaaagctagagaagctgaatgttctaggtccaaacatcaaaccaggaaacgtcactagaaataattcagaagcaggacaaatgtagaaataaattctgaggcagagaggaagggaataaaaagaaggggcaccaaaggggaagtcggcacatctaccacacagagaaccttacaattgcctgtggtttatttggtatatggataaattggtttacttcagatgcttaaagtcatgatacaatttgtgcagtt

SEQ ID NO: 421598 - DNA, 606 bp, Homo sapiens
tactgccagaagcaatctacagattgaatacaattcctatcaaaatactaacatcattcttcaaagaactaggaatgatgtcagagtacgtgtagcagtaagtttttgaaaaccactaaattaacagtgagcaccttttagatgatcaaggcttgagaaagaataattgaacttttgagcttaagcctcttaggtggattgtgcaataccagtagaagtaccaattgagcagactgctatctgggtggcctctcagaagcctgaactcagactggcatgactgatacctagggtggaaatgattggaaagagattaaggatccctacaacttaagtgcttgaatacccaaaagacaaagctagagaagctgaatgttctaggtccaaacatcaaaccaggaaacgtcactagaaataattcagaagcaggacaaatgtagaaataaattctgaggcagagaggaagggaataaaaagaaggggcaccaaaggggaagtcggcacatctaccacacagagaaccttacaattgcctgtggkttatttggtatatggataaattggtttacttcagatgcttaaagtcatgatacaatttgtgcagtt

SEQ ID NO: 421599 - DNA, 541 bp, Homo sapiens
acactatttcaagttttttatatactgatataaaatattccaraatatcagtatagcttcttttaactttattagctattaaaatgtttgagaattaattatataaaagctgtcaaaatgaaaattcttatgttttaagaatgcgacatatttcctattattaagacatatctcaaatctcttttctggaaagagttttgtgcacttgaatcagtgtactgttttcttttcttattcaaatgcatatttctacaaaagtggtgttaacactttatatattaagcaattttcaccagaaagctgacagaagcatgagacaacatattatctattaagatattgatctgttagagaattctagattgctattcctaaaatatttaactgaatagaacctttttcacatactataaagatgtttacaatgatatacttggactctattcaaatgtgatatcacacacagagtttctgatcaatgtttttaaggggcagtaccacaccatacaacctattagttattataccttaaaagtctata

SEQ ID NO: 421600 - DNA, 537 bp, Homo sapiens
gttgagagtagaccagaagtaagcaaaggcaataaaaaggaaaatggcaatccattccttttattcacccaaatccaaatttgtttttattgttgtttttacacctatagaagagtctcacctctccccaagagagatgactgacagtcacatctggttgctgcttttaaggaatagcccaggaaaactgggtgatacacagcttttcaagctccagaaacatataaaagttaccagcacacaacatactcaacacacagtgctggaatatgaacctgtggcccattcagaattggaaaaagtgaaaaacacagagaagtcttttgcctacagaattattatttttccacttcttttgtagagtatargaatttttcctttatggaaataaattcttcagttagtaattatggccatgtctggttctgctctctggaaataattcagtttttgatatcttctgtgacctatctatgccttagccatacccttcaagtcctcatctgagaaaaaatatttcttgaggcatacacagct

SEQ ID NO: 421601 - DNA, 599 bp, Homo sapiens
taagaagtagataagaagttatttattatgggaattggctcacatgattatggagattgaaaagtcccataatatgccacctgcaacctggagaaacacagaagctggtggcatagcttagttcaagtcctaaggcctgagagctagagaagccaatggtgtaactttcagtctgaagccaaacacctaaggcggggttgggggagttaggggaatgccagtgaaaattctgsagttcaaaagctggagaacctggagttctgatgtcaaagaaagagaagatgcatgtcccagcttcaaaatagggaagaaatttggctttcctatgctttttggttctatccagatccacaatcaattggatgacatctggccacattggatggagttggatcttctttaatcaattcactgattcaaatgtcaaacttttctggaaacccccttgaagacatccccagaaataatgctagctatctgggtatcccttaacccaatcaagctgatatctaaaatcaaccactccacaccttagaactcttttagtctctaccctttacacagttccaaagccattttcacatatttaagtgttacaa

SEQ ID NO: 421602 - DNA, 599 bp, Homo sapiens
taagaagtagataagaagttatttattatgggaattggctcacatgattatggagattgaaaagtcccataatatgccacctgcaacctggagaaacacagaagctggtggcatagcttagttcaagtcctaaggcctgagagctagagaagccaatggtgtaactttcagtctgaagccaaacacctaaggcggggttgggggagttaggggaatgccagtgaaaattctgcagttcaaaagctggagaacctggagttctgatgtcaaagaaagagaagatgcatgtcccagcttcaaaatagggaagaaatttggctttcctatgctttttggttctatccagatccacaatcaattggatgacatctggccacattggatggagttggatcttctttaatcaattcactgattcaaatgtcaaacttttctggaaacccccttgaagacatccccagaaataatgctagctatctgggtatcccttaacccaatcaarctgatatctaaaatcaaccactccacaccttagaactcttttagtctctaccctttacacagttccaaagccattttcacatatttaagtgttacaa

SEQ ID NO: 421603 - DNA, 618 bp, Homo sapiens
ctgaattcaaattatactgtaaacctacagtaagcaaaacattatggcattgttaaaaaagatacattaaccaatggatccaaatacataatccaggaataaactcatatatttacggccaactgrtttttaacaaagacgtaaagaacatacaaaaagggaaaaacactctcctaaataagtcgagaaaactggatatcacaagcagaagaatgaaactagacctctacctctcaccatacacaaacagcaactcaaaatatattcaatatttaaatataagcctaaaaattatgaaattatcaaaagaaaacataggggagatgcttgagaacattggtaagcaaaaattttataagtaagacttcaaaagcacagataacaaaaatgaaactagacaaatgagactgtgccaaactaaaaaacttttgcacaacaaaggaaaccatgaatggagtgaagatatgaccaattgtatgggagaaaatatatgcaaactattcatctaacaaatgataaatatctagaatatacaaggaactcaaacaattcaactacagaaaaaaatccaattaaaaattggctaagaatctgagtaaacgtttctcaaaagaagag

SEQ ID NO: 421604 - DNA, 615 bp, Homo sapiens
taatgtgtagctttaaatgtagattacctgtgttaccagcacccagataaagaaatataacactagcacaaattaccttaatgctgagataattttagagatatacacacataaatattttctggataatttcaaaatctccagtcmataattttctctcagaattcctcttagcagataatagctttaaaaaaaagtacatctacattgaaacaggtttagtagttcaactgaaaatacacagaaagaccttcttatgcatagttaagtcatcctttaagtctgtatttttgctttaacatgtatataagtaatcttttttcttctaggtagaggatttcagatttgaaaacagcattttgaacctgagaaaatatttaatatgtttggattgattaaaatctaatgcagttaaaaattagtgtccaagatattgaaaagaaaaagttattttctttgaatgaggcttagtttgcctttttgagaagtttctctccctccttttctctgtttaatgtttcttttattataattttctatctgaatttttggggagcaagcagtgacttgataatttgactacataaattacaatataatgtgatttgttttctt

SEQ ID NO: 421605 - DNA, 605 bp, Homo sapiens
tatcttttgtaatagtttcagtaaaactggtaccaattcttctttgaatgtctgatataattcggttgtgagtccatctggtaatggacttttttgttggcaattgtttaattgctctttcaatcttgttacattttactggactgttcagaatttctattttttgtcagatttaatctaggagggttgtatatttccaggaatttttccatttcctctacattttctagtttgtgcatgtgaagatgttcatagtagccttgaattatcttttgtatttctgtggtattgcttgtaatgtctccagatttatttctaattgagcttatttgtatctacactcttcctttcttggttaatttcactaatgatccatcaattttgttaatcttttcaaagaactagctttttcttttatttatcttttatatatattttgttgttgttgctgttgtttcaatttcatttagttctgttctgatttttgttacttcttttcttctggrtttggattgtttgttcttgtttctctagttccttgaggtatgatattaggttgtctctttgtgctgttttagactttttgatgtaggcatttaacgtta

SEQ ID NO: 421606 - DNA, 480 bp, Homo sapiens
aatcagttccagctttgggtaggattgagttcttctcccatggtctggattttcatatttcccagtggggaatgtgtgctcagaggcaggtttaccccttcacactctggaaacttatagttttttgcctatcttaagaagtagactgtagcctgctacttctttcaaagggtctgtgggttctttcagtttttctggtaagttcctgtgatggttcttgggaaaaatatattcwcagtgtgaatctctgcccactattctgtccttccaagtgggagaggtataacactgcctcctatctgccgtcttgaagagactagtccctcaaaagcctgaatgctgagtagcccatattttacctctgtttaacctaatatcaactgtctatccattttaaactaccatattaattttcttgcaattttgaaataatacttgaagattatgatcaaagcatgaaatttcagttccagacaaaat

SEQ ID NO: 421607 - DNA, 359 bp, Homo sapiens
ccagttgggtagaaaacctttagctacatctgctccaggcaacaccatgaaaatagccatgctctgtctccactctagcatgtgctacagcagcagaggccattggcagaacctaactttcatcccaacccccmctaaatagacggggtcaactatctctggggtgcctctgagctaagtcttgtctttccttctttccttcagtaatctgatcttttcagactggaccagtatggggagctaaataatggttacattttacttaaaatgataaaacattgatgctagtgaattgacataaactatgcatgcatatgcaatccctagaataaccattttaaaaatataaaaaacgatac

SEQ ID NO: 421608 - DNA, 588 bp, Homo sapiens
atgaccttcatctttagtgttaactacagattccctaaccactcttacaaagggagttcagtcaaattgcctagyttacaaataaatccatgaaggcgtttttaaactgcgttaaacactttgaataaaagtatgattatggagggttatttacagaaaaactccgtgaaactgtgttttcacagtttcctcacaccacaacaaggaggaagtttcctccttcctcacaccacaacaatcgtcaacacagaagatttttatgagcaaatgtattggggtttccccccaccaccaagcagtggacaccaactgggtgtcttccagttcaactctgacactatctacctggaaatactgtcagatcccacaggatgagggctcagtccccaagactacctccccacagacatcatcacaagtctgggcctctgaaacttctgactgactggcttcaagttggggttcctacaataccctctttgggtttgattaatttgatggagcagctcacattactaagggaaacacttatgtttactggtttattataaaggatattacagaagatacagatgaagagacatagga

SEQ ID NO: 421609 - DNA, 569 bp, Homo sapiens
caccacacctggctattaaagaccacagctttaatactgacacattgagggattaagtttccaacacatagaatttcagaaacacagtcaaatcataatatttagtaaaactcaaggaaatatgaagaaaactaagcgatgatatatcatgataacatttcttaatataattaataaaaataaattattaaaagcagccataggaaaaaatattacatttagaggaacaaaaatggaaatgacaccagatttcttgctgtaaacagtacaagcaaggagttggtagagcaatacctttaaagaaaattttttttaaactatgaacctagaattttataacrggaagacacatctttcaaaaatgaaggtgtaataaagacattttcagatatataaaaattgaaaaaatttatcaccaacagtctcacactagaagaaatgttaaaggaagtctttatgatagaatgaaaatgttaacagataaatatctgatctatccaaagaaatgaagagcactagaaatgttacaatatgggtacatgtaaaggttgtttttccttattatgtaa

SEQ ID NO: 421610 - DNA, 551 bp, Homo sapiens
gctactttaacatcggtgttgggcagtttctgaagccttttcctttactcccagccattgttttccgtgrtttggtgttaacatctatatctgtctaagccccactcctaactgagccttcctgggctggcagcaatggcaacatccagagacctgggagcctgggagccacatcatgtgttgggggaaacaagtgagtggaaggacaggggaggataatagctggtgtgtttcaaggatggattactggaacagagagtcagagtcagtgattaatacacaatttcttaatcataattggaaagacaaaatattcctagagaataaaaaaatgagtagcagatatgacagcagaagaaatgagaaagagtacgaattatgagttagttttcagtgaccccagtgtttataccattggaccaacctcccatccacgtatttttgaaagctgcaatgcttttaactggataacaaaagactgctgagtaaatgaggatacacacatagctagcaactaaaatatgccctcataagcctatgtatgaatcatt

SEQ ID NO: 421611 - DNA, 568 bp, Homo sapiens
cactgtcatcaatcctggtcttatgcaagcttgggaagagagatacagagaggcatcaagaataatagtccatgtgattttagtaggctaggctgagatcgatgacttcgtaaagtgtcagcttcatcttgttttattttttatgctaacaaatttctcgtttcctcctgtagttttctggttcctatgaacagaagcagaattttttcacaacagaaagtgaagcaacgaagttttgagggttgctcctcatttaatggtgagtcaaagaggcagcatagagaggatatatgaaggttaagagctaaggatgtggattctggagccagactgcctagtttggaagccagctccccatgttagctggctgatcttggcaaagcactcaccttccgcttgcctctaccaataacatagggataatgacagagtcagtttaaggagttgtgaggactaaatgagataatatgtataaaatgcttakaagagcagttagtgcatagaaatggtagtagataagtattaaaggagataaaaaggtggttttttttccagaagaaaaaggata

SEQ ID NO: 421612 - DNA, 620 bp, Homo sapiens
agaattcatatcttaatattttgactcttccaatccttgcacatgttattcccattttaaaagtttcatttctattatttcaacaatgtttgtaattttcagtgtaaagaccatacacatttattcctaagaattatttgtgtccaattgcaaacttctaaaattgtattttattgtgaattgatggtacattggaatataattaattttatttatgaactttgaatcttacaacactgggattattgacataatttctatatttgttttgtagattccttaagggttttgcacatacatattatgtcatctgcaaataaatattgttttatttctttgtctaatctttatgtctatattttttttcttactgaatcacctgggctagattttctaatgcagagatgaatagaaatgatgatgactgaaatccttgccttgctcatgattgtagtaggaaagtgtttattatttcattattgggtatattgttaggtactgtggggcaytgggatttgttaacctgcaggatagaagtaagttgtagaaaatgttttaaaaataacaatgctgaattaaagttacttagagattttattatcataatacgaaagagattc

SEQ ID NO: 421613 - DNA, 541 bp, Homo sapiens
ctctttgttttaccacatcttccagaagtgtgtaaaaatctctagcctgctgatgctgccccctgttttctttactgtcataatttattttttatgtttctttaccrtaactttaaaattttctcaagaaagtcaggaggcaactgcatgtgctacttaaagaaagaggaaagaaattaaagaattaaagaaattaaattaaagaaagaattaaagaaagaggaaagaaacatgaaaggtggtttgccagtcaagacaggtttattttagagaaaacgaaccagagaggagcttctggccaagttaggtcagaggcacactcttttacagactgagaatttttaaggattcagggtgggagagtttatcagaggcttggactgcttctgtgtccctttgttgtgcttatttgggagggagagttgtgtgtctgttcccatacacttttctgcagctgcagcatacccccgagtctgcttttagctttcctatttcagtgcatcctgaaaggaaaggaatgtgcttattaaggcccactgtt

SEQ ID NO: 421614 - DNA, 541 bp, Homo sapiens
ctctttgttttaccacatcttccagaagtgtgtaaaaatctctagcctgctgatgctgccccctgttttctttactgtcataatttattttttatgtttctttaccataactttaaaattttctcaagaaagtcaggaggcaactgcatgtgctacttaaagaaagaggaaagaaattaaagaattaaagaaattaaattaaagaaagaattaaagaaagaggaaagaaacatgaaaggtggtttgccagtcaagacaggtttattttagagaaaacgaaccagagaggagcttctggccaagttaggtcagaggcacactcttytacagactgagaatttttaaggattcagggtgggagagtttatcagaggcttggactgcttctgtgtccctttgttgtgcttatttgggagggagagttgtgtgtctgttcccatacacttttctgcagctgcagcatacccccgagtctgcttttagctttcctatttcagtgcatcctgaaaggaaaggaatgtgcttattaaggcccactgtt

SEQ ID NO: 421615 - DNA, 563 bp, Homo sapiens
cttgtgggttgcgtgggagattctccagggacccttcccttactgtctgcctaaagtaagctggccaactcctttcacttctataaacatttgcatgccggtttctgtgtgacatgagttttaactcaattaggtaaatacctagaagcataattactgagtcatatgataaggctgtttgctttgtaagaaactgtcaaattgcctccaaagtggctgcgttattttgcatttctcctgacaaggaatgagagttcctgttcttctgtgttgtgtctaatttttggtattgtgtagcgatatttcatttttttttaagttctgattttctaatgacaaatgattttgagaatctttctatataattatttgtcatctgtgtttacatgttgaggtgtccgttaagatattttgcctacattctaattgagtcgtttgttttttatygctccgttttaaaagttttttttgtgtgtatattttggatacaagtcctttatcaaacatgtgtcttacaaatattttctcccagtctatagcttttcttttcattcttttaacaa

SEQ ID NO: 421616 - DNA, 597 bp, Homo sapiens
ctaatgacaaatgattttgagaatctttctatataattatttgtcatctgtgtttacatgttgaggtgtccgttaagatattttgcctacattctaattgagtcgtttgttttttatcgctccgttttaaaagttttttttgtgtgtatattttggatacaagtcctttatcaaacatgtgtcttacaaatattttctcccagtctatagcttttcttttcattcttttaacaatgtcactcagaagtttttaattttagtaaaaatattaattttttctctcatgggttgtacttttggtgttgtatctaaaaattcttcaccaaacccaagtgacctagattttctcctgtgtttttttccagagctttatacttttccrtttagacctgagtctatatcctgtcttaacttgattttggtaaaatatgtaatgtctgtatctatgtttacttttttacatgcagcaacacaattgtttcaacatcacttcttgaaaagactatcctttgtccattgaattcctttgttcctctatcaagagttaactattgactatatttgtatgaatctgtttctgggctctccattttgttc

SEQ ID NO: 421617 - DNA, 564 bp, Homo sapiens
ttacaccttaagatttgtccccaaacccatacatggtctcacaaaccctcaatcctggacttctgggagtggcttcacttcctaggctcaaggcagatttaagtggtttataaccccagctggctaagaggcatcctctttcctagttccaccacctcccaaatttaattatccaacagcaagatgagatgaacccatgggaatccaccaagaagcttgatgatctggacatagtctttgatatttcagggtagaaaaaataggcccctgtaagcaccgactcaatgtttttcagccaatctgggcctattcccagaaatgagcckccagtagcttttttcttttctccaagaacagtgggtccacaggtgaagatgtcagcatcaaatgagaatttcaaatgtcagtagaattctaagagggtttctccatcaagaatcagtgagtgtttttttttctgtccatcaaataatgctatagattatatactatgccttgtaccaactctattggtactcatgtccaagagtaatgggaggcagggtggcagcggggtaggagtga

SEQ ID NO: 421618 - DNA, 526 bp, Homo sapiens
ttcatgttgagaaaatgcttcagaatatcactgagacctagcccccattaagtgactcatgaactaatgtttggagataggagaaaatgctgattaatttagttgttataactgtacagacagtccctgacttaagatggtttgacttaataattcttcaaatttaccatgctgcaaagtgaaatgtattcagtagaaatgctatgtcaagtacccatacaaccattctgtttttccctttaggtacagtattcaataaattacaggagatgtccaataatttattttaaaataggctttgtgttccatgattttgcccaatggtaggctaatgtaagtgttctgagcatgtttaaggtaggctggactaagctatgatgtttagtaagttagttgtattaaatgcatattcaacttatgatattttcaacttacaataggcttatcagaacttaatcccatcataagtycaggagcatctctatttgagaaaccttctaacatgatttttctatctttgaagtgt

SEQ ID NO: 421619 - DNA, 514 bp, Homo sapiens
agaaaccttctaacatgatttttctatctttgaagtgtaagatttctttgtatattcttgtggtgtattatctttactgttaacggtgttttgttgttgttgttgttcctttgtcattataggtatttccaagatagactagaagaggctgtattcagttttgctggccaaacaccaatttaaaatgggcaaagtgtttgaatagacattttatcaaagaagatatactaatagttaataagcatatgaaaagattatcaacatcactagtcgtcagggaaatgaacttaaaaccacaagacatcgttttacaccctctaaatggctatatttttttaaggacaagaacaaatgttgccaagaatgtggagaaatttactagaaacacttttctrgtaaaattaaagatgttacagccactgttatgattaaattgcatccctcccgaaattgacatgttgaagctctaacccctagcacctcagaatgtgactatatttgtaggtaggtcctt

SEQ ID NO: 421620 - DNA, 635 bp, Homo sapiens
gctgggaagagtcagatattggtctgcagttctgtctttgtcctgtgctctacaatcagatacaggttaaaattgcttacttaccaagtttttcaccaaaaataaaagttgctgagagttaaccttgtaaatgtgtaattgctgaaagwtaacattgtaaatgtataattataaatgtgtaacatatgaaatatgtaatttagttaacattgtaaatgtgtaattggtgtataaggaaagttgagtgtgtttttggtaaaaggttacgagaagatatgaaaatatcgtttttattaaaggcaatgcaattttgtctagttcagaggtttttaaggattgtgataagctaaaagaataataagacaaaattagcagcatgcttccaaattagcagcatgcttccagtcaaggggctgggtggagtcctgaatcccctgccccagtttcaaatggctccatatacagctgagtctgagctgagcaaagctcctatagtgccacacatacaaaaaatacaaatgcataaaatgctcaaatagagttactagaggccaagtctaaatagagcagggccccagtgacacctgaaaagaggcatagggtggtcagatgcactccaacctgtttgttcagta

SEQ ID NO: 421621 - DNA, 635 bp, Homo sapiens
gctgggaagagtcagatattggtctgcagttctgtctttgtcctgtgctctacaatcagatacaggttaaaattgcttacttaccaagtttttcaccaaaaataaaagttgctgagagttaaccttgtaaatgtgtaattgctgaaagataacattgtaaatgtataattataaatgtgtaacatatkaaatatgtaatttagttaacattgtaaatgtgtaattggtgtataaggaaagttgagtgtgtttttggtaaaaggttacgagaagatatgaaaatatcgtttttattaaaggcaatgcaattttgtctagttcagaggtttttaaggattgtgataagctaaaagaataataagacaaaattagcagcatgcttccaaattagcagcatgcttccagtcaaggggctgggtggagtcctgaatcccctgccccagtttcaaatggctccatatacagctgagtctgagctgagcaaagctcctatagtgccacacatacaaaaaatacaaatgcataaaatgctcaaatagagttactagaggccaagtctaaatagagcagggccccagtgacacctgaaaagaggcatagggtggtcagatgcactccaacctgtttgttcagta

SEQ ID NO: 421622 - DNA, 635 bp, Homo sapiens
gctgggaagagtcagatattggtctgcagttctgtctttgtcctgtgctctacaatcagatacaggttaaaattgcttacttaccaagtttttcaccaaaaataaaagttgctgagagttaaccttgtaaatgtgtaattgctgaaagataacattgtaaatgtataattataaatgtgtaacatatgaaatatgtaatttagttaacattgtaaatgtgtaattggtgtataaggaaagttgagtgtgtttttggtaaaaggttacgagaagatatgaaaatatcgtttttattaaaggcaatgcaattttgtctagttcagaggtttttaaggattgtgataagctaaaagaataataagacaaaattagcagcatgcttccaaattagcagcatgcttccagtcaaggggctgggtggagtcctgaatcccctgccccagtttcaaatggctccatatacagctgagtctgagctgagcaaagctcctatagtgccacacatacaaaaaatacaaatgcataaaatgctcaaatagwgttactagaggccaagtctaaatagagcagggccccagtgacacctgaaaagaggcatagggtggtcagatgcactccaacctgtttgttcagta

SEQ ID NO: 421623 - DNA, 619 bp, Homo sapiens
attagcattgctaatttttttgtttttcagagtccagaaaccttttctgttttgacctatttacagcttttaacagttggctaaagtacacttctgtgagcaaaattttaagcatattactttctttctacctgatttctcaaaaatttgaaagctatttgtaaatatacttaatttaatctgttctctttcataacaggacataattagaaacactggatttttttttaccaatgctttgactggaatagcatgctttcagatacaaacagactactctaagggatcaagatgaacttttagagtcaataaaagccccttggaaaaactggcttcatatcttatctacacagtccctatacagggttcatgrcctgtagtaagtaaagaatgtcactttccaacaaacctaggagccacaagttatcttgggaccttgagaggagaggaattcacttaatccatacaggtattggtaggcataaataaattcatggctgggcttgaggctttaaaaagtctaatccataattcctcataaataagaattccagcaaagccaattttaaagggatcctatatggtagacaactatttttttctgcacttcatgaaaata

SEQ ID NO: 421624 - DNA, 581 bp, Homo sapiens
tcctcataaataagaattccagcaaagccaattttaaagggatcctatatggtagayaactatttttttctgcacttcatgaaaataatcaggccaagcatcataagactaaaacttattttgcaaataaatttgtcctactatgagttgtttttagtaaaaacaggctacagaaagaaaacctatgtttctgaaaaatactacagtatacctgttgttagattctagtcttgttcattgtacttaaatttttattattttctgcaatttggactaaatctttaattctttctttgctacaagtctctaatgcatttgaatctttcttccatttttctaatttggaatcaatgaaattactactaccttatttcttgtaatacaggtgagaaaaacatgtcagactaccactgcctccctcaaagcactaatgatgctttgagtccaacatttggataaattgtgccaaacattaacctttgtttttcttctatttccataaaaatacgtcttattaaaaatctgtttatgtttatcacatacagaggcccaccccgtctgtaacacaacctcctagattg

SEQ ID NO: 421625 - DNA, 602 bp, Homo sapiens
tttgcaggaggtgtcaggaaacaaaacaccctgtcattagagagcttttagtcaagtgttgagtttacactccacacctttgttccagtgacatttacgtgcattgggtcatcatcaatctggagaaactgtgcatctcaggatatcactcacagtgagtcaaagaaaaatacgcaagaattagcaatggaagtagccaactgatttttagggttcttttaaaatcattctatctgctttttttttttsctgttgttcataaaaatcaataactcttagttgtgtctcctgaaagaaagagattgggacataccaaatccctgaatcttgactagcagctgactacctgcctagactcatgagatattaacttagtacagcagatggtcaagcaaatgtccatcttattactagttccatagtaatattgatatgtattttaaatcaatatgtattctcttacaatagtgaatttggtgaactgtctataagccttgatcatacttcttgcttaatccaagaaagattgaattttctgctctgagactctaaactgtaagacccatatcctgatctttgatctctaaggtttattactctca

SEQ ID NO: 421626 - DNA, 573 bp, Homo sapiens
atgtaatttccatatatatatacattttagtgtctggctttaaacttttaaatatttaaatgtctagagaaatatataatttttttttagttcaaagtgttcaaaataaaagtaccacaaatattatttgagattttaaaggaactactttgtacaacctattaattattgagattattttatgtagttgcagatccatatttaggtgatattacatgcctttaaatatcattcagttatgataaatactttgacaacaaagcaaatataagaaatttagaaaactttctttcatttactcttttttacaaatatctaaaagcttataaaaattaaagtgccatactttctatttaatcttatgaaaattcccattagagatttaggaccttatttagggtctgagggatttggccatggtgagattgatcctgccaattctccattgaaatctaaatcacagcaaaagtttgtggggagtataaataagattttgcattataactattgctagaaagtgtcagaaactctttaatttatcattttcttagwcttttgcaaaagtgagataga

SEQ ID NO: 421627 - DNA, 389 bp, Homo sapiens
taaacttacagttcaaatcaattagttatttttatctacctatgtttaagctacccataaactcaatttgtttactctatcacttagaagagttctatttccctaatctcaaaactctgaatttacattttgcaaagaaaagtttcttctgtctgtaattctctcacarttcaaaacctaaattttgccctcatcgtgacatggaattcctaaattggaagcctagagacactattcctctctgctttcttataaaccttcatacacatttgcttcttaacatttgtttctatcatattaaaaaatattaattttgtttggcagtcagtgagtcactatgacaaatgaaaggtgaaaactcatggataaacaaccaattgataagatgc

SEQ ID NO: 421628 - DNA, 368 bp, Homo sapiens
gtaaacacactcaaattttaaagtgcctacaatctaaccaggatctaaaaaggataatagaagtataaggtaatctattctttattcctgcttcttatagtcttaccacagagaaatggctcacagaygaatataaaataaaaagccctctttgagagtgttaccttttcaatactatagaatttcagaggaggatgacacttttaactgaaatttttatggaaagtttcacagaccagggtttttggactactttcctgcacctaaattcagaacaataaagagacaacaaaaacaaggcgattaaggcagatttatacttttattaaagcaaaagtctagactacagtatagttcatgtatgtggc

SEQ ID NO: 421629 - DNA, 601 bp, Homo sapiens
ccggatgtttagcagcattgctggcctctaaccaatagattccttcaattgtgacactcaaaaagcttctggactttgccaaatattcccaggggtggggcgaggggacagaaattgtgcctggttgagaaccactgctctatgtcactgtcatcaatcctggtcttatgcaagcttgggaagagagatacagagaggcatcaagaataatagtccatgtgattttagtaggctaggctgagatygatgacttcgtaaagtgtcagcttcatcttgttttattttttatgctaacaaatttctcgtttcctcctgtagttttctggttcctatgaacagaagcagaattttttcacaacagaaagtgaagcaacgaagttttgagggttgctcctcatttaatggtgagtcaaagaggcagcatagagaggatatatgaaggttaagagctaaggatgtggattctggagccagactgcctagtttggaagccagctccccatgttagctggctgatcttggcaaagcactcaccttccgcttgcctctaccaataacatagggataatgacagagtcagtttaaggagttgtgaggacta

SEQ ID NO: 421630 - DNA, 507 bp, Homo sapiens
tttgtctctgtgtgtcaaataaccctttcctttctcttttaaggacaactaatcattggatttagtgtccaccctaaacctaggatgaaatcatctcaaaatttccaacttaattacatctgygaagaccctctttctaaataaagtcacattcacaggtactggggattatgacttgaccataactactgtaggatggggggggcggtgcataattcagtcctgcagtgtctatcacataatcacatggagttatttagattaaaagagataatgtctgcagcatgctttgcacagtatcaggcacattgtaaataataaacattacatgttgcttttatcacagtcataatcttcacctccctctccaggaagccttcctaatacctcattccaaaaagaatttgaggcaattcagactgccactctagatcacaatcaccttaagagcaggaaccatgcttgttgatatccacttcctctgtattactaagagtgtgtggtaca

SEQ ID NO: 421631 - DNA, 644 bp, Homo sapiens
atcttactcactcatttgttccatgagtttttactgagcttctgtgkgtcaggcactgtggtagaccctcaggctatacccctgaataggacagatacagccctggccctcttgctgagagtagagacgacacttcccagcatcccctgccagtcactcaaataggtttgcaaaaactccatgtttacaacgatgtgggtaacagctaatcccaggagaaaatcatttcatacagcaacatctctaaaaacttgttccttctaataatgtgtcacgggaagaaaacaaaaagcttttgtagccaaattacctgagaatgagtggttttaaagctggcaaactgttttctctactgcaggacttctctgatcctttaccatgtgactgtgctcggtgacttgccagagagcgccagggctgtggtgtgtgggtacacaggcctgcccaactccaggaaatgagcaaagccttgcaaacatgtatgtgatcagacatactctcagcaaagagcgttttgatggacggtgttccacagaaagcacttcagaaagacacctccgtggaggatagtgtctgagttagacctactgtggagatgaaatcccagcctcaccttggccctccttgctaggtatgccattgcc

SEQ ID NO: 421632 - DNA, 644 bp, Homo sapiens
atcttactcactcatttgttccatgagtttttactgagcttctgtgggtcaggcactgtggtagaccctcaggctatacccctgaataggacagatacagccctggccctcttgctgagagtagagacgacacttcccagcatcccctgccagtcactcaaataggtttgcaaaaactccatgtttacaacgatgtgggtaacagctaatcccaggagaaaatcatttcatacagcaacatctctaaaaacttgttccttctaataatgtgtcacgggaagaaaacaaaaagcttttgtagccaaattacctgagaatgagtggttttaaagctggcaaactgttttctctactgcaggacttctctgatcctttaccatgtgactgtgctcggtgacttgccagagagcgccagggctgyggtgtgtgggtacacaggcctgcccaactccaggaaatgagcaaagccttgcaaacatgtatgtgatcagacatactctcagcaaagagcgttttgatggacggtgttccacagaaagcacttcagaaagacacctccgtggaggatagtgtctgagttagacctactgtggagatgaaatcccagcctcaccttggccctccttgctaggtatgccattgcc

SEQ ID NO: 421633 - DNA, 518 bp, Homo sapiens
aatagagatggctgcagaagatggcacagagaggcacaaagaggagaggaaaagaacaggccatccttccaagtacttgggccatctgtgtgcctcactttttgcagttgactcattyccctgcccccaaatgtgtgttaagttgaaaatgtgtgaagtgtgctttaaaatacactaggagagagcttgctacttaagggaacactagggcaaacacatctgatggaaacacatcaaggtctttcccacttcaagacctttggacccactcttcccatggcctctcctcacctggttcactgcagtcctcctgcagggctcagcttcaatgcccttcccagggaagcagtccccagccaaaaaggttaatgggttcctcctccctcttcccatgacatattctgagagcatcggtgcctctgccttgtagtacttttctcaaaggaacataaatgattattccgtgattgtttgtctaccatactagaccataaatgccaggaaggtacaaatgtgtc

SEQ ID NO: 421634 - DNA, 604 bp, Homo sapiens
taccagttgttgccacctggtgattgtcagtgtttcacttcaagtagcaaaggaagggcatcagcttaggcaggaaagccattgatggaggcaaagcagaactataggcactcagttccctgaatccagggcttatctaaagcaagtgtaatccagatacttcacgtactttaagatatgtgaacatgtgaattgacaaaacaaaaacactggaatcactgccatttgactcagttgtcacagtgcactctgtctcctcatctctggctcagcaattgaagcagtctaaggccttgtatttaaaaattgcaaccatagttgtttgttattcttctcagttacttggtctgatacttttcttgttttgctgacaactggtccacacttagctggagcatccatccccygttctctttctctcaccttctcttagagccacatgcttttccctctggttctgactttcacaaggccggtgagagactcccttgccgcatctgttttgactaaactcctacttaatcacttatatcttggcaggactcaaagcccttcccattcgaagcagctaagctattctgacaagcagttggttagtgttaaa

SEQ ID NO: 421635 - DNA, 520 bp, Homo sapiens
aatttggaacatttgaatatgaagcatatatctatctatctgttccattgttttttaccaagaaaaaataatacatragaaaatggtctctcttttccaaagtaaatgtatcaccaaataagacctccattgtcttaatgggtaagcttctccagatacatgttcaattctcaaacctttgggttatcagttcacttagctaggaactgtggagaaatggtgccacattttgaggctgtaacaagactttgtaccttacacaagagaatgcacccatttatcattgggataatattacttcactttcatcttcatgagcatgtttccttgatggatctgggtctattcacaaataccaccttatcttaaggacaataaagttatctgaggccagaaaaggtggagggacttgcccggagtcccacagtaactcatcaagaaggaaagatccttctttacagacggttttgtttccagggcacactgtaggcaccaggctgcctgaatcaaactaagatag

SEQ ID NO: 421636 - DNA, 565 bp, Homo sapiens
ctttcagactcaacgtcacttttcgagatttttgttttcaccaygccaagaatcatggagcctttcaaatctcatactctggattgactattccttctagacgaggctgctacattaggctgcacaagcaggacagtacttgtgcaaagatgcccctggaggtatgcagtgtggcagtcctctttcaatgagataagctaataaggatgtgttggggttttaaatcagtaattcaactagccttgtttgagtaccaactatgtgccaaatagcgtgaaagacattggagatgcaaagattaaaaagcactgagcctaccttcacagaattactacattccttttatttcaacaagaacatattggcttgtctaatcatcccagaggggaaaaaaggggaatttgttcctcgaacaaggtaactctccttcagttttaaacaaagtgggagctgcatatgggggataaaccaaaggatacaaaatgagaaaacccacagaaatgactcaattctgttttgtggttattaaaaataaagaaaacagtggcagccagtgcactgctag

SEQ ID NO: 421637 - DNA, 565 bp, Homo sapiens
ctttcagactcaacgtcacttttcgagatttttgttttcaccatgccaagaatcatggagcctttcaaatctcatactctggattgactattccttctagacraggctgctacattaggctgcacaagcaggacagtacttgtgcaaagatgcccctggaggtatgcagtgtggcagtcctctttcaatgagataagctaataaggatgtgttggggttttaaatcagtaattcaactagccttgtttgagtaccaactatgtgccaaatagcgtgaaagacattggagatgcaaagattaaaaagcactgagcctaccttcacagaattactacattccttttatttcaacaagaacatattggcttgtctaatcatcccagaggggaaaaaaggggaatttgttcctcgaacaaggtaactctccttcagttttaaacaaagtgggagctgcatatgggggataaaccaaaggatacaaaatgagaaaacccacagaaatgactcaattctgttttgtggttattaaaaataaagaaaacagtggcagccagtgcactgctag

SEQ ID NO: 421638 - DNA, 394 bp, Homo sapiens
gcaacaaagcagtccctgtgaccaggtccacctatctccagagctgaccttcctcctcaaacaaaaataggcaactcccaactccaagccttaggggaactttcccatcaatgaagaggtggttccaagagcagaatgtccttgccttctacaaacagagagaggctaatgaaaggcttttttttttttttttaattcattgctcacagctggagttgcggggaattatttcagccagggacttcttttggaaactatctgaagagctgaccggaacaccaagaaatttaagcaatgctactccatctttccggactatttcatggggaatatactcccaccctgacctgaaggaggtgcrtttggtttccagcttgttcacagattctcacca

SEQ ID NO: 421639 - DNA, 562 bp, Homo sapiens
aagcatgtatatttttgagttctacaaattagggtaattttagaccctaaaggttgagtttcccttatctaaaatgcttgggaccagtagtgttttagattttggattttttccatattttgcaatacatgcattatatactgaccttggttaaacatctcaaatttgaaaatccaaaatgccccagtgagcatttcctttgagcatcaggttgatgrccaaaaagttttggattttccagtgtttcagattttggatttgggatgttcaatctgtataacaactacatactttagaccactaaccatgtagaaaaccttgaaagtatgttttgtaaaacaagccaaaatttaactatttacattcgtggtatataacttcaccatcacatgccgtgtgttttgtatcaaaatgatatgattagatgagcttttttgccaatgaaatgtatttttataccaattctgctggcttgttgctgtacatactaagaaaatatgaaaatggagtgttttgccaagtcattatgaagccgtcattttgaaagggcggggcttactga

SEQ ID NO: 421640 - DNA, 609 bp, Homo sapiens
aacaatccagatggccatcaacaggtgaatggataagcaagctatacaatggaaagtagtcagcaataacaaagaattactgatatacacaagaacatggacaaatctaaaaaagattgtgctaagggaaagaagccagacactaaagattaaatactgtatgattccacttatacataaaatttatctacggtgacagaaagtagatgagaggtctcctgggactgaggggctgagtataaaggggcatgaggaaagtttgggtaataaaaatgttctaaatcttgatggtggtggyatttacatgcatgaatacatttgttaaatctcaaactgtatacttaaaatggatgcattttattgcatataagttattcctcattaaaattgatcttttaaaaagcagtcttccctgttatcaatacaagcttcccattctagaactttaccaaagggtttgtctacattcataaatatgaacaacacagttataaatataaatatttcaggctgtctcttgtttctattgactacttctaaagtgctttcacaaggctaatattttaaaccaacacttaagattgggcttagtacaatggatggccttac

SEQ ID NO: 421641 - DNA, 609 bp, Homo sapiens
aacaatccagatggccatcaacaggtgaatggataagcaagctatacaatggaaagtagtcagcaataacaaagaattactgatatacacaagaacatggacaaatctaaaaaagattgtgctaagggaaagaagccagacactaaagattaaatactgtatgattccacttatacataaaatttatctacggtgacagaaagtagatgagaggtctcctgggactgaggggctgagtataaaggggcatgaggaaagtttgggtaataaaaatgttctaaatcttgatggtggtggcatttacatgcrtgaatacatttgttaaatctcaaactgtatacttaaaatggatgcattttattgcatataagttattcctcattaaaattgatcttttaaaaagcagtcttccctgttatcaatacaagcttcccattctagaactttaccaaagggtttgtctacattcataaatatgaacaacacagttataaatataaatatttcaggctgtctcttgtttctattgactacttctaaagtgctttcacaaggctaatattttaaaccaacacttaagattgggcttagtacaatggatggccttac

SEQ ID NO: 421642 - DNA, 609 bp, Homo sapiens
aacaatccagatggccatcaacaggtgaatggataagcaagctatacaatggaaagtagtcagcaataacaaagaattactgatatacacaagaacatggacaaatctaaaaaagattgtgctaagggaaagaagccagacactaaagattaaatactgtatgattccacttatacataaaatttatctacggtgacagaaagtagatgagaggtctcctgggactgaggggctgagtataaaggggcatgaggaaagtttgggtaataaaaatgttctaaatcttgatggtggtggcatttacatgcatgaatacatttgttaaatctcaaactgtatacttwaaatggatgcattttattgcatataagttattcctcattaaaattgatcttttaaaaagcagtcttccctgttatcaatacaagcttcccattctagaactttaccaaagggtttgtctacattcataaatatgaacaacacagttataaatataaatatttcaggctgtctcttgtttctattgactacttctaaagtgctttcacaaggctaatattttaaaccaacacttaagattgggcttagtacaatggatggccttac

SEQ ID NO: 421643 - DNA, 534 bp, Homo sapiens
ttaccttgcctgtgcgttgttttccttatctgaaaaaaatgaggattatagtggtattgatgacatggagctactgtgagtattaaatgcaaagcacttagaatggtgtctagcatattaagcaggggcttaataaatgtaagctattgtcactaattgctcttatttcagatataatgcccttaaaagkttaagagagtctgcaaagaaagggatggggagaaacatgtccatgtgtcagaatgtagcatgctgaatagtatctcagagagatgaacaaagagccaaatacaaaaccaaaaattcactagaaggaacagggagggcttcactgagaacagcaagttcattctagcttcaacaagtgctgatagtttcggtaccattcagggagtggaaaaggatgaggctgaagagatgagcaggagccaaatcattcaggggcttcatgggccacagtaaaaatttggaattagtcctgaggacaacgaggagtcatcactgaagcatgttaagcaggaatgtaataagatc

SEQ ID NO: 421644 - DNA, 534 bp, Homo sapiens
ttaccttgcctgtgcgttgttttccttatctgaaaaaaatgaggattatagtggtattgatgacatggagctactgtgagtattaaatgcaaagcacttagaatggtgtctagcatattaagcaggggcttaataaatgtaagctattgtcactaattgctcttatttcagatataatgcccttaaaagtttaagagagtctgcaaagaaagggatggggagaaacatgtccatgtgtcagaatgtagcatgctgaatagtatctcagagagatgaacaaagagccaaatacaaaaccaaaaattcactagaaggaacagggagggcttcactgagaacagcaagttcattctagcttcaacaagtgytgatagtttcggtaccattcagggagtggaaaaggatgaggctgaagagatgagcaggagccaaatcattcaggggcttcatgggccacagtaaaaatttggaattagtcctgaggacaacgaggagtcatcactgaagcatgttaagcaggaatgtaataagatc

SEQ ID NO: 421645 - DNA, 534 bp, Homo sapiens
ttaccttgcctgtgcgttgttttccttatctgaaaaaaatgaggattatagtggtattgatgacatggagctactgtgagtattaaatgcaaagcacttagaatggtgtctagcatattaagcaggggcttaataaatgtaagctattgtcactaattgctcttatttcagatataatgcccttaaaagtttaagagagtctgcaaagaaagggatggggagaaacatgtccatgtgtcagaatgtagcatgctgaatagtatctcagagagatgaacaaagagccaaatacaaaaccaaaaattcactagaaggaacagggagggcttcactgagaacagcaagttcattctagcttcaacaagtgctgatagtttcggtaccattcagggagtggaaaaggatgaggctgaagagatgagcaggagccaaatcwttcaggggcttcatgggccacagtaaaaatttggaattagtcctgaggacaacgaggagtcatcactgaagcatgttaagcaggaatgtaataagatc

SEQ ID NO: 421646 - DNA, 448 bp, Homo sapiens
tctgaaatgcacatctccctgactccaacatctttccacttactaccgctatccccacactcatcccgaaaggtgtttcttaatccactgctgcggggaaccagtggtggttccagccctcgccacactaagcaccaatcgctgctcctggcttctcccttcctagtctcctgcattcctatacttacatccttcattscagccaaatcttatcagaatagtggatgtggatttctgcccttgcgaggccctgcctcattggtcctcaccccactcctcaagaacacctcaaacctggctcccactgaggcttctccaagactccccaggatgacgttgcaccctcccttgacccccccaggcagcctcctcagtccctccctggggacacaccctgtcctgcgtcacctgcatactcgacttctctctgccacccccaactgtgagc

SEQ ID NO: 421647 - DNA, 596 bp, Homo sapiens
  misc_feature (1)...(596): n = A,T,C or G
ttcctacccagcatagataatgatggttcctggaggccagcagtcagcagatcagacccacggcaaagtgcaccatgcctaggagggcaaggtctcagcagccagaaaaggagcatctcccaagagcaggaggaaccccatcactccctccacttctcagcagggaaataagaggctgagaacaaggtgattagggaactccacagccttgcaatcagcaaagaggtaatcacatgcccatgggacctgagggcatgggaaataatagggcagagtgayttcactcaggtagactgcgcaggagaggagaacagagcaactgacaagggtgagcagaaataaaaggatgaaaacatccctcaagtcacaaactgttcttccagagtcagactctccctccactaagaaattcatctggagggtggctcgccaaagactcactgccacgaattcttgggaggacatgcccggggcctggcccagntgtgccagcagaccctgtacacacttggagtggaccttaggaacagggacacttgatgagggctttagtctgcggctgcaattctccagagacagagtttctggtcagacag

SEQ ID NO: 421648 - DNA, 596 bp, Homo sapiens
  misc_feature (1)...(596): n = A,T,C or G
ttcctacccagcatagataatgatggttcctggaggccagcagtcagcagatcagacccacggcaaagtgcaccatgcctaggagggcaaggtctcagcagccagaaaaggagcatctcccaagagcaggaggaaccccatcactccctccacttctcagcagggaaataagaggctgagaacaaggtgattagggaactccacagccttgcaatcagcaaagaggtaatcacatgcccatgggacctgagggcatgggaaataatagggcagagtgacttcactcaggtagactgcgcaggagaggagaacagagcaactgacaagggtgagcagaaataaaaggatgaaaacatccctcaagtcacaaactrttcttccagagtcagactctccctccactaagaaattcatctggagggtggctcgccaaagactcactgccacgaattcttgggaggacatgcccggggcctggcccagntgtgccagcagaccctgtacacacttggagtggaccttaggaacagggacacttgatgagggctttagtctgcggctgcaattctccagagacagagtttctggtcagacag

SEQ ID NO: 421649 - DNA, 596 bp, Homo sapiens
  misc_feature (1)...(596): n = A,T,C or G
ttcctacccagcatagataatgatggttcctggaggccagcagtcagcagatcagacccacggcaaagtgcaccatgcctaggagggcaaggtctcagcagccagaaaaggagcatctcccaagagcaggaggaaccccatcactccctccacttctcagcagggaaataagaggctgagaacaaggtgattagggaactccacagccttgcaatcagcaaagaggtaatcacatgcccatgggacctgagggcatgggaaataatagggcagagtgacttcactcaggtagactgcgcaggagaggagaacagagcaactgacaagggtgagcagaaataaaaggatgaaaacatccctcaagtcacaaactgttcttccagagtcagactctccctccactaagaaattcatctggagggtggctcgccaaagactcactgccaygaattcttgggaggacatgcccggggcctggcccagntgtgccagcagaccctgtacacacttggagtggaccttaggaacagggacacttgatgagggctttagtctgcggctgcaattctccagagacagagtttctggtcagacag

SEQ ID NO: 421650 - DNA, 554 bp, Homo sapiens
tttgtaaggccccagagcatcctcctcctttgttccctagacacactgtcaaggctctggaaggctctagaaggctgtggaaggctcatggcaactcgatctttcttttaagctgggaaycaggattgggcccaggcttggcacacacagaaggccaacaggctgtagcacaagcctggctagtctcaggcaggtgctccggggctgaatgtctgtgacctaaaacagcctcaatggcactgctgagcagaaggccccgggctgcccaggtggtagaaggccaagctgtcgtttagcatgcacaaggctccccaatttaattgaaatcaacataaaccacactgcacaaaaccattttttttctacaaattgccctctataacaatgcccctaagcaagtcctctctaagacacattggattcctcgtcctgagcacaccatgaaggagaaaaatgcctctactcaccctttgaaacggatgctctttttctacaggttcaaattccagctttgctttgccagtgctgggacgttggctaagtcatttagcctc

SEQ ID NO: 421651 - DNA, 554 bp, Homo sapiens
tttgtaaggccccagagcatcctcctcctttgttccctagacacactgtcaaggctctggaaggctctagaaggctgtggaaggctcatggcaactcgatctttcttttaagctgggaaccaggattgggcccaggcttggcacacacagaaggccaacaggctgtagcacaagcctggctagtctcaggcaggtgctccggggctgaatgtctgtgacctaaaacagcctcaatggcactgctgagcagaaggccccgggctgccyaggtggtagaaggccaagctgtcgtttagcatgcacaaggctccccaatttaattgaaatcaacataaaccacactgcacaaaaccattttttttctacaaattgccctctataacaatgcccctaagcaagtcctctctaagacacattggattcctcgtcctgagcacaccatgaaggagaaaaatgcctctactcaccctttgaaacggatgctctttttctacaggttcaaattccagctttgctttgccagtgctgggacgttggctaagtcatttagcctc

SEQ ID NO: 421652 - DNA, 554 bp, Homo sapiens
tttgtaaggccccagagcatcctcctcctttgttccctagacacactgtcaaggctctggaaggctctagaaggctgtggaaggctcatggcaactcgatctttcttttaagctgggaaccaggattgggcccaggcttggcacacacagaaggccaacaggctgtagcacaagcctggctagtctcaggcaggtgctccggggctgaatgtctgtgacctaaaacagcctcaatggcactgctgagcagaaggccccgggctgcccaggtggtagaaggccaagctgtcgtttagcatgcacaaggctccccaatttaattgaaatcaacataaaccacactgcacaaaaccattttttttctacaaattgccctctataacaatgcccctaagcaagtcctctctaagacacattggattcctcgtcctgagcacrccatgaaggagaaaaatgcctctactcaccctttgaaacggatgctctttttctacaggttcaaattccagctttgctttgccagtgctgggacgttggctaagtcatttagcctc

SEQ ID NO: 421653 - DNA, 518 bp, Homo sapiens
tgttgttgaaaagtcttatgataacctagtattctttggaagtcagtttctctcttttatctagatactcaaagtttattttttcttttttttaaagtcctgtaattttactagaatatgttttggtgttgatttgtatgggtcaatattttcaggtgttctctttcaatatagagttttaaatctttgttatttcagaaatgctttctttagttttcttaactagttttttgaactatagtttttagtatttgttctgaccccttgctttggttttcttcttcagggactcttgttattcatgtgttgggtcttctttgtctatcttcactatttgtcacactcttgaatcttcctactgtttkatttgtcctttttggatttttaaatttcccttctattttccttctcattatcggttgcatttttttcttgtgtttcttctagtttaatcttcatttctaagatggttctttctagttcttttttatatctgtcaactcacttctgtcaactca

SEQ ID NO: 421654 - DNA, 559 bp, Homo sapiens
cacattttcaggtatcttttcagcagtgccccactctactggtaccaatttactgtattagtctgttttcatgctgctgataaagacatatctgagagaaggaagaaaaagaggttaaatggccttacagttccacatggctggagaggtctcacgaacatggcggaaggcaaggaggagcaagtcacatctcacatggatgacagcaggcaaagagagcttgtgcaggaaaactcccattttcaaaaccatcagatttcatgagacttattcactatcacaagaacagcacaggaaagacctttcccytatgattcaattgcctcccaccaggatcctcccacgatatgtgggaactgtgggagttacaattcaagatgagatttgagtggggacacagccaaaccatatcactgctatttcaagtccttaccaatgggttactgaaatgtgaatatatgttttataatctctaaatattatttctgacatctctacttacaagctaataatattttgtaattgaacaaaaggggaaattgtaacctgtaggtaaatt

SEQ ID NO: 421655 - DNA, 491 bp, Homo sapiens
tggtcctttcaaagaaaacttcccagcttcttttaaaagtaaataagtatttaaataagccactacatattgtattttatgttctaactaaagaagttggtttacaaatctttcacaaagtaatatattcacattttaaaagtcgtactagattacctatagatacatggcattttgaaaagctgttaaaatctctagtacatttattttctgtacaaaggtgaatggtctggttttcaacaaaaccattggaatttttattttatatttttatcaagttgagcttcagtgtttcaaaaacaaagctgtttggttgagataagtatgtggaattagtaggggatgggaaaacactttgaaaaagccacccaaggaaaacagatatacrtatacacatacacatagttgtcatctaaagccgtaagtagaaatcaacaacaccttccccgcaaaatacaaatggtttttcataaaatcatttgattctgcaa

SEQ ID NO: 421656 - DNA, 491 bp, Homo sapiens
aaacaagttgtatatgccatgcttctaataagggatattctatttctgaaatgtcaagatcaggaaggaccacagtggtgcctggtctcctcttccaagcaacaccacaattggccaaggcaattagaaaaggctctgcasagtctttgggatgacaccaatacagttgcctaattttctgtcttccagattcctaataaaattgtatagaaaacacaatgtggaaaaggctatatttttaacaggcacaagcaagaagttttatcacaatgctgtcagatactaacaggactggactgaaggagatatagaaaggcaatccatgaatctccttctagaaaaagcagaagtcaataaggacaacctgaaagaaccagatagaagcaggagatggaagtaaaatgttgctggtagggcacttgcagtgacacctgaaattcaacaagaacgtcaacagatgttcctaatgttgccacacacatcaagagggg

SEQ ID NO: 421657 - DNA, 491 bp, Homo sapiens
aaacaagttgtatatgccatgcttctaataagggatattctatttctgaaatgtcaagatcaggaaggaccacagtggtgcctggtctcctcttccaagcaacaccacaattggccaaggcaattagaaaaggctctgcagagtctttgggatgacaccaatacagttgcctaattttctgtcttccagattcctaataaaattgtatagaaaacacwatgtggaaaaggctatatttttaacaggcacaagcaagaagttttatcacaatgctgtcagatactaacaggactggactgaaggagatatagaaaggcaatccatgaatctccttctagaaaaagcagaagtcaataaggacaacctgaaagaaccagatagaagcaggagatggaagtaaaatgttgctggtagggcacttgcagtgacacctgaaattcaacaagaacgtcaacagatgttcctaatgttgccacacacatcaagagggg

SEQ ID NO: 421658 - DNA, 599 bp, Homo sapiens
cctaacgtaatcacttgcttttaacaacaacctctagggtaacaaaacctaagyactgggctttcaagttaggaactaagacctctagataaagtctggatctttgaagacctacacaattaaagggtgggcattacttggaagacaagcctaaggaaattgccccaaatgcaacacaaagagatggaaatcatgaaaaataagaaacatgaaagataaaatgagttactctgagttatgtcaattggatttctagaagagaataataagaatggatattagaccacatttgtagaaattataactgaagatgatccaaaactaattttgtagatatagaatcttaagagttaatgccaacaatggaagacaaaaggtagagatgtaatagcatcaagcatccagtgaaaataactgtctgccaagaattgtgtatacagataaaaagaacaagagcaaattaagagagttgactagcaactgaacaccattaaaagaatttataaaggatatacttcaggaagaagaaacatggtgttaggggcaaagtttgagaggctagaagaagtagggaatgaagaatctagcaaatatgtgaa

SEQ ID NO: 421659 - DNA, 599 bp, Homo sapiens
cctaacgtaatcacttgcttttaacaacaacctctagggtaacaaaacctaagtactgggctttcaagttaggaactaagacctctagataaagtctggatctttgaagacctacacaattaaagggtgggcattacttggaagacaagcctaaggaaattgccccaaatgcaacacaaagagatggaaatcatgaaaaataagaaacatgaaagataaaatgagttactctgagttatgtcaattggatttctagaagagaataataagaayggatattagaccacatttgtagaaattataactgaagatgatccaaaactaattttgtagatatagaatcttaagagttaatgccaacaatggaagacaaaaggtagagatgtaatagcatcaagcatccagtgaaaataactgtctgccaagaattgtgtatacagataaaaagaacaagagcaaattaagagagttgactagcaactgaacaccattaaaagaatttataaaggatatacttcaggaagaagaaacatggtgttaggggcaaagtttgagaggctagaagaagtagggaatgaagaatctagcaaatatgtgaa

SEQ ID NO: 421660 - DNA, 564 bp, Homo sapiens
gttcaaacaagcccaactcacaattttccaggcttctacatacattgttccctcttggatgagccttctctgaccatcaccatcccaggcctatttgggatgttcctgctggatacttgaagagttcccttcttccctgtccccttgctaagcacagtgcgctgtaaatccttctttaatggtcttgtccactgttcctattggactgtagactctgtaaagaccagaatgtggtgattttcctcagacaccagcatgagctcatgaatgagccctacgtttctataacatgcaccaattttccaagcactttcatcttttatctcatttcctcaaacacacasatgggcctttatctggctaacatcattatccttattttatggaagggataaagaagctactgtgaagttaaatgatttgcctaaggccacacagcctgtggcattataaaaataattacaaaaactaacatttactcaacacctagtatatgtgccccactttgtttgaagcaccttacacatgtgaaatcacttcatgtttaccaccatctgtcttggt

SEQ ID NO: 421661 - DNA, 669 bp, Homo sapiens
ttcttccctgtccccttgctaagcacagtgcgctgtaaatccttctttaatggtcttgtccactgttcctattggactgtagactctgtaaagaccagaatgtggtgattttcctcagacaccagcatgagctcatgaatgagccctacgtttctataacatgcaccaattttccaagcactttcatcttttatctcatttcctcaaacacacacatgggcctttatctggctaacatcattatccttattttatggaagggataaagaagctactgtgaagttaaatgatttgcctaaggccacacagcctgtggcattataaaaataattacaaaaactaacatttactcaacacctagtatatgtgccccactttgtttgaagcaccttacacatgtgaaatcacttcatgtttaccaccatctgtcttggtaggcactgttattatgctccttkttaaagaggcgatgtgagaggttaatgagtaacttacccaggtctacaaaagcagcgaggatcagagccaagcgaaacacctgcagtctggctgcaggcctgctctatttcccgacatgcaaccttgcctcttatttggcgctgcaggtaagacacatggtttctggtctcaaagtggtcaatcaaagacagaaatgagatatcaatatat

SEQ ID NO: 421662 - DNA, 569 bp, Homo sapiens
gtggtgggagcaccctttggatgatgaagaaacactacgcaaaacacacacaagggcggaagcatgcttgggtagttgtcaaccaactaatctgaaataaaatgtaagattattccttggagagatcaggggctaggtgaatatagattaaggaggctgctggggccaaattatgtagggactaaatgccagtataaggaagttggattttattctctgggctctaagacatctttaaggtttctgagtagaataatagtacaattgagtgtcacttccagaagatcagtatggcatctgtatatgggataaattagctaagaataagagtgaagagaagaagacaaagagtcttgcttaagtgtgaaggactgaaacaacaggaacctaaacactgatggtgggcagaggtaaagaaacgctcagatttaagaagcattttgagggatttgattaatgaatggaaatctgctaccatttcactagtatgtggagaaaacaggggcattggaaggtgagtaaagggraaatctggaaattaccaatcatatttttaattggaacaatat

SEQ ID NO: 421663 - DNA, 588 bp, Homo sapiens
ctagcatttcttccttccagtcttttttctggacttgtggattttcctctttagttgttacagtgtacatatatactgatagcttctttacattttacattatattataaatattgttcattttactacaacatcttcaacatcttaattgtgacgagtcataataccttgaagaatagatgaggaacatttgtttaaagagtcccttgttttatagccttagtggcagcatgggacaatgaagagaacatggactttgcccagaaattggccttaaatgcaggctcaaccacttttttgctccatggtcaaaggaaggttatttctcttctctgagcctcagtcttcatgtctgtaaaatctgtcatgtgtttagtcaatacgtgatctggaaatggtagctcttatcattaaggctctttccagtttttgcccttataaataatgtaatgtgggacatctttgcacgcataacgcttacagattttctgttattttctttggctagaactccagagtgcaacttctgggtagttctgattaaagrctcttgacttgctgtatcatgttgctttccaaaagaattta

SEQ ID NO: 421664 - DNA, 685 bp, Homo sapiens
tctatttaaaaagtcctgggtgaacttttttcttttttcatcagaattgttcaaagtcttttcaaggactccttcttcatcaaattctatgtgttaagttcccatctgtgtggttcagatttaaatttctctccttttataaaaggcaacatgctgtaccccttaaactacatattttattggacattccatccacacttaatgatagtttcttctttaaataatttttgggtttctcatgtctgtattttatttgtggaaccaacaggwtttaggatacctcctgactggccaatgttatagtctttattgccttatgataaagttcttagtaatcacaggactgtgaacatgtccttgaatagctagtctgaacaaagttaaatgccatgaatttgatacagttactgatgtctacacaaattctgtgtcttaacattgcaccaagaatctaaagcacaccttaaatttatacaattttatttgtcaattgtacctcaataaacgtgtttttaaaaaagcatctaggtaggtatgtatggtcttctgtagattaaagaaaaattcatgagggcataaagaaggctgtattctgtccctgcctttattatttgtttacaggttatttacaaactattagaattttgaatgatacagaaacatagtcttcaatcataaagaagtt

SEQ ID NO: 421665 - DNA, 595 bp, Homo sapiens
cattttgcctatggatggaagtagcagctatgaggatgctcaytgcagacatcctgtaacaggaagtgaaactgacccaggggccccctgctgttttatgaaatccttctcagcctttgtcccaaggctccactcttcacaggcagctgcctggcaaggacgaggtataccagggagttccttggagacacggggcttctgtatcgtccaccttgatctcaaggactcctcagaggttttgtcaaatttccttagattactgggcagtctaggacacttccactcaacctctctccctctttcacttatagccagacttgcctcatgggtctgacagttctcccagctatacctggctccctctctgtttcctttcacaagtatttcctctagtaaaaaccttgcacgttcaatttcatcttgctgtctgacacgagaaagtacacacgtggcctaaaagactgaaagcatttctgcttcctgcaagccctattttgcctatatatacagcctccagaggtttctcccaattttctccagaaaaactgcatggactttaaaaaatccatcttagtaaatttccccacctggccaa

SEQ ID NO: 421666 - DNA, 561 bp, Homo sapiens
ttccacgtgtgaattgcttttggcagctcagagacaactttaaaaacctaaacaccataaagcagtccttgcacttccatatgtaactcaattgagggcaagatttgaaaatccatggctccgtgattggaagcctgtgatcctgcgcctcgatcaaaacttggttttccaaggccttctgtgatcagctgacaatgacaaatagagcaaagagcaaacaacttgggcccaaagcagagggtgtagtgatagcattcttataaatgctgtggctgcttagccactggatcctactwgcttgcctgtctccattgcagctgttaacctatgcaccctctctgttggagctgaggccttaaggatataccaggcactacagacagtaattatctgaggtaaaaatcatctcctttcataatatttaaaaagtaacatgcactttctgattataaaataagcacaactatattgtccaaagcgcttcatgtgcataacttaatctttatgggggaaggactattattttaaccaccttagatatgaaaaactgcaattagagat

SEQ ID NO: 421667 - DNA, 569 bp, Homo sapiens
tggtagcagcagcttttgtgagagcaaattaccagaaatagctcaaatgtccatcggcagcaaaataaattatggtatattccacaatgaaatactacataccacaaaaaaacaaataaaccatactgtacactgcaacagagaggaatctaggttaaattgttgggtggataatccaagtaagatgaaagtgtataaagtacaattycatttgtagaaatttcaaaaaaattcacaattaggtttattggttaactattggctaactaattggttagagacatgctaatatgaaaaactgtaattaaagccatgggggaaaaatacaaaatttagaataatttcctctggggagggtaagaaaaagagattagaaggggacacaggaactcacaggtaagggagggtttccatttctataattgggtggttagcatatgagaattagttgtattattgttctttacatccccacatattttatacatatcattttatatcttctcaatatttaataaaaattctttatattaataaaaaggagtaggtcacaagatggcaaatatagt

SEQ ID NO: 421668 - DNA, 569 bp, Homo sapiens
tggtagcagcagcttttgtgagagcaaattaccagaaatagctcaaatgtccatcggcagcaaaataaattatggtatattccacaatgaaatactacataccacaaaaaaacaaataaaccatactgtacactgcaacagagaggaatctaggttaaattgttgggtggataatccaagtaagatgaaagtgtataaagtacaatttcatttgtagaaatttcaaaaaaattcacaattaggtttattggttaactattggctaactaattggttagagacatgctaatatgaaaaactgtwattaaagccatgggggaaaaatacaaaatttagaataatttcctctggggagggtaagaaaaagagattagaaggggacacaggaactcacaggtaagggagggtttccatttctataattgggtggttagcatatgagaattagttgtattattgttctttacatccccacatattttatacatatcattttatatcttctcaatatttaataaaaattctttatattaataaaaaggagtaggtcacaagatggcaaatatagt

SEQ ID NO: 421669 - DNA, 619 bp, Homo sapiens
aactaggataaattacattttcctgcaagcactcggtaacaataacactcaatatcaacctaatcatattttagcaactggaatacagtagttcccccttatccacagggagtatgtcttaagacccccmgtagatgtctgcaactgtagagagtacagaactcaatatatactttagttttttctatacatacatatctatgacaaggtgtgattgaaaattagcatcgtagcaggttaacaacaatagctaatagaagaattataagaatatactctaataagacttatgtgaatgtggtctctctctccctctctttctctctaaatatgtattgtactgtgctctcccttttattttggtgatgatatgagataacaaaatgcctgtgtgatgtgaacaagtggggtgaatggtgcacgtactgtgatgtggtattaagctactattgaccttcataggatgggtcagaagcaggataatctgcttagggagatcccagatcatcaagctgtgatgatgtggatggctggatgtcagggacagacgatgtcaatgaagaacgggcaggtagtgcacacagcacagacacactggacaaaggatgattcatgcgta

SEQ ID NO: 421670 - DNA, 564 bp, Homo sapiens
aacaatggtcaattctaaacttgtaggaaaccttactttgctggacttactgaggagaaagtatgttgttatctaaaatggtaccttcctaagagattttcagaaaaatgtttgccctatgtcatctttttccatatgtattaattttagaatttatatatccaaataaaatgtttcatcattgattgtatactgattctggaagggtagatattcagccactgcataatcaaagccaggaaacatgtttaaagtcatcgacagtttgaaagaagacctagtttgaaagcagaaagaagtgattatggaattacgcttgtgaggggatagacccatctcctggtaagygctaggtctttggagtatagtattaatgcattttttatattgtatatgttctatatgaatataccttataagtggtgtgaagacccccagctcagtgataacatataaatgacataaatgagctgtcttaccatttgatatagcaattttatcagcgttttatcaagtgggaggagagctcatttattagagactctataatccagacaactaact

SEQ ID NO: 421671 - DNA, 521 bp, Homo sapiens
catcgctcaccttaaggggagtgtgactaacaggcatgaacgctgaaggctgtcaagcccatgctcctccaagcccacactcacctctgcatcatcactggcagccacactgtcccaaacacagggtgacggggatatcagaaacagcacttggagtcacagatgtctgttatgcagttgctgagtgtactgctctagttagtgcctcatattctttcataaagcttgatgaacttaagactgcacagagcctatggtgtctcaggggtttggttgttaaccagaacccaaaaccactgaaatggttgaacagagtgtctgtggcagtgacatattyggtgttcacattgaaactgtgcatacacagtttgcaaaacacatcatgccactcaaggaatgcacattttggccagtttgggggtctgatagcccttctcccagaggtgttcattaagaaaggaccaggcccggtcactgttctgaccttggcgtttcttcccaactttttctccactttgatt

SEQ ID NO: 421672 - DNA, 539 bp, Homo sapiens
tatttgtctgctatgaacaaggaacaaaatcatctaaagtgagaacaagtaggaaaaaaaatcctgcaattttatttaagaaaacattttagaagattaataaaaaaaatttaatgtaaacattgaaatgagcacagctggtttccaaggtaaacaggcagaaaaattgtcttggtccatttgggctcttataacagaaaaccatagattgggtgacttraacaacaaacatttattctcacagttgtggaggctgggaagtccaagatcaaagcacggacatgtcctttgtctggtgagggcccacttcctggttcatagactgctgtcttcctgctgtgtccccatttggcagaagagtcaagggcattctctctcatctcttctcataagaacactactctgatcagaaatgctccactcccatgaccccattacctctcaaagactcccccttttagcaccaccccattcatggctagggtttccaataagaatttaagggggaccacaaacttgcagttcataacagaagttaa

SEQ ID NO: 421673 - DNA, 579 bp, Homo sapiens
aattccattgatttagaaaccctgctgatgccctgcttagatatggaaaattacaactaattgacattgagaaattaatattgaaaatayattttcaaattacaaaaaatattaaaaataattatgcctaattaatatatcacattttccattagtatatctcatgacttcagagtcaaattactaatgtgtcacaagcaatacatgttagaaaaacctcaaaaggaattttctgaatatttaagaaacaaaggtaattcacatcatgtataaaattatccctatctattgaacagccttttcagtctgtgctcatttttttctcttctgtcattaagctttctaagaaaaataaaaaatatatatatgggaaaaattaaagtatgagagtttataaatattgctgtttattcattcggctttagattagtttgtttgccagtgtcttctctcatttttccccactccctgactttttttctcaatgctaatgaatcctgtgcccactgttggcttctttgcaacaaaagccatctggaaaatgccatttattttaaatgaaactcttagccagtcttt

SEQ ID NO: 421674 - DNA, 581 bp, Homo sapiens
tagcataaagcaatctcagagagccaagcaagcatatttgctatatttaraaagcaaactgcattgtacatgagggtacagtgtagttctctctggcgaaacatatttactctgttttcccttcgtaggtaatcctaggttagtaatggttttgagagaatttaataaccttggcaagcaccctcaagagttgggagatattaaacttgaaatggattataaggtctgctgtttttataatattattacttacctgatagctgaagcagctttttgactggcagtatagttctacatgcctattgctcttgtatttggaataatggaatcacttgaataattaaataaaaatgcttgaaaattttctatacaatttaaagagaaattccagctcctagggaagtaataatcatctagataagcatattgcattgtgcatattgtaaaacatctcaagtgacttagaggatctacctaaaaaaatgctaaaagaaaaaaatacatatatgatttaatagtctgtgagctaagtgagcatattttatttctaggcctgattgtgccattaactagctgcataa

SEQ ID NO: 421675 - DNA, 591 bp, Homo sapiens
gtaaaacatctcaagtgacttagaggatctacctaaaaaaatgctaaaagaaaaaaatacatatatgatttaatagtctgtgagctaagtgagcatattttatttctaggcctgattgtgccattaactagctgcataacataaaatgttatttktataaagaggaatatttacctggtgcgtgtgctctggcactagaccatggaatcagtcatgaccagctaatctccagcactggtaatattttgtttcaccttagtcaccatctatgagagccgtattctttatctttccctcccttcaaaaagcagtcaggatgctggcaggaatcagatggcatactcaaatgggagatgagagaggaggttaatcctctgattgtttaccaaggtgtggcaggctgtagggaaatcctgagagaacttgcaggctggattctgagcttctctggatgatcaccaccccaggtctgaggcagaggcaaaggcagtccttattagagggcagtggcaatgaaagaggtggggagaacgggagcaagagagagaaagagaagggagaaaaggtgtgggaatgagtactgcaatccat

SEQ ID NO: 421676 - DNA, 591 bp, Homo sapiens
gtaaaacatctcaagtgacttagaggatctacctaaaaaaatgctaaaagaaaaaaatacatatatgatttaatagtctgtgagctaagtgagcatattttatttctaggcctgattgtgccattaactagctgcataacataaaatgttatttgtataaagaggaatatttacctggtgcgtgtgctctggcactagaccatggaatcagtcatgaccagctaatctccagcactggtaatattttgtttcaccttagtcaccatctatgagagccgtattctttatctttccctcccttcaaaaagcagtcaggatgctggcaggaatcagatggcatactcaaatgggagatgagagaggagsttaatcctctgattgtttaccaaggtgtggcaggctgtagggaaatcctgagagaacttgcaggctggattctgagcttctctggatgatcaccaccccaggtctgaggcagaggcaaaggcagtccttattagagggcagtggcaatgaaagaggtggggagaacgggagcaagagagagaaagagaagggagaaaaggtgtgggaatgagtactgcaatccat

SEQ ID NO: 421677 - DNA, 562 bp, Homo sapiens
gaaggagattaaagatctctacaagaaaaactaaaagacactgctgaaaaaaatcatagatgacacaaacaaatggaaacacattccatgctcatggatagaaggaatcaatattgtgaaaatgaccatackacccaaaataatctacagattcaatgcaattcccatgaaaaactattattatttttcatagaaccagaaaaaataatcctaaaagtcacatggaagcaaaaagagctctcatagtcaaagcaattgtaagcaaaaagaacatatctaaggcatcacattacctgactacaaattatacaaggctataattatcaaaacagtgtagtactgatataaaactggacacttagaccaatggaacaaaatagagaatccagaaacaaagccaaatgtttacagcagactggtatttgacaaagcatgcggaaacataaattaggcaaacaacatcatattcaataaatggtgctgggaaaactgccaagccacctgtagaagaataaaattggatccccaatcctcaccttatataacagtcaacttaagatgg

SEQ ID NO: 421678 - DNA, 562 bp, Homo sapiens
gaaggagattaaagatctctacaagaaaaactaaaagacactgctgaaaaaaatcatagatgacacaaacaaatggaaacacattccatgctcatggatagaaggaatcaatattgtgaaaatgaccatacgacccaaaataatctacagattcaatgcaattcccatgaaaaactattattatttttcatagaaccagaaaaaataatcctaaaagtcacatggaagcaaaaagagctcwcatagtcaaagcaattgtaagcaaaaagaacatatctaaggcatcacattacctgactacaaattatacaaggctataattatcaaaacagtgtagtactgatataaaactggacacttagaccaatggaacaaaatagagaatccagaaacaaagccaaatgtttacagcagactggtatttgacaaagcatgcggaaacataaattaggcaaacaacatcatattcaataaatggtgctgggaaaactgccaagccacctgtagaagaataaaattggatccccaatcctcaccttatataacagtcaacttaagatgg

SEQ ID NO: 421679 - DNA, 565 bp, Homo sapiens
tgctgttctttgcaaaatttcctgtgacaacttcttcttgtgatggatcacagtattttaacaaagggaaaagtatgtacattaaactcctgtttgttagaatttctttattacactttctcttttgtcaactttccaatctcttttgtctcaagagtgttccagttagatgctaaaatgtctgcaatttgggaaaaattaagagatttatttaaaaatattttgtgattgaactttcaaaaataaaaataacagaaaaagaatgtgtacacataactgtacttcttttctggtatatgatataattgaatttttttcaattttgctttcattctaggagctggtttcttctttatctacctggtacttatcatgaaagtaaataatrgttatagaaggcactcattcatcactcagtcatctctgtcataactcaattgctgcaacagtggtaccacttctacacatgctatgaaagaaccagcataatcactctttaaagtcattacagattaaacaaataacagtgaagcacattttggtaaacgtttatttttcttgctct

SEQ ID NO: 421680 - DNA, 629 bp, Homo sapiens
atggcaccaggaaagatagattataagagatgattttggtccccaaatacttaacaatagggaagtgacaccaccattcatcagagtttcatcacatgcactggtactttcagaatttctaaacattgcatcttagcatgtgaaagctctaagcaaactttacttaatgcagtttcccaaacttattttgctttgaaaaacctttttgaatacctcataatctcatctaaatatttctgtagaacagactttagaagttctcgaagcctgtgggctctgtgtgcttagccctgctgctcaagggtaggcagacacctcatctgtatgagaggaaggtctcagcctytcctctcccctgttgcatcttgctgatgttgcacactcttcctggagtgctccttgaagtccccaagaaggcagagcctcaggcaacgtcacatataccaggattctcactgtgttcaaacaagaaatatgcaatacaagaaatatgcaaacaagaaatatgcaatacagcctcactctggaaatcttctaggaagatttttatcttctacattttatctgctaggaaactaaatttcttggaaaaaaaggctaacagatatttgttttcaagatcatatagt

SEQ ID NO: 421681 - DNA, 475 bp, Homo sapiens
gatatcatcagtccacaccgttgtggagcttaagtgacattggatgggacagacaatgaacaagacaacaagcaagaaaagaaacctttacaagccagtgatccccgtggagaaggaaatgaacagagttttgcaatagaaataatgaaggggttatttaggaggttctgttttcaattaagtggtcagaaaactcctcttctgtggcaaattagtagacaatattcagtagacatactaataattctccaaaccttgagaattgagttggtttttccatttacrctggcattctttgtattttgaatacattttgagcagcatgtaactagatataacttcattacaaagatatcatgtacttaatgtgttacaacattcttataacagggttatatgtaaccaaataggttgttattattctttattaaaattttcagggcagccaggttcaatattgtatacccacttaaac

SEQ ID NO: 421682 - DNA, 565 bp, Homo sapiens
gaacagctctaactgctgaaaagttatactgagatcaaatccatttacttctctttttccaatgtgctctggatgagacctcaaagccacagagaaaaagtctcatgtgattttcccaactacccccaaatgactgcacttatcaatatttgcctcctgtttacttacatccgccccatttcctgtaagtatgtctcatagggcataatttaaagccatttccatttttattaccaattcagattaaatccccaagctactcgattccttctaattatgaagggctaattgtaatgcaataatgacagaattatttggcttggtcagaaaatggaatttttgtcccctcwcacccattccacttcactagacatgcagtccaacacggtacttagctttcaatgaccacatctggctgttgttgacaaagacctagtttgctattcaaagagataaaatgatgttcagtgtggaaaagtaagtggttcttattcacagttttaaaatgctacttcatctgtgtatcagtcaggccacatgatatttacatttagtggtcagacaa

SEQ ID NO: 421683 - DNA, 531 bp, Homo sapiens
cggtacttagctttcaatgaccacatctggctgttgttgacaaagacctagtttgctattcaaagagataaaatgatgttcagtgtggaaaagtaagtggttcttattcacagytttaaaatgctacttcatctgtgtatcagtcaggccacatgatatttacatttagtggtcagacaacatgtttgaaacagttttaatcttttctttcattaatttgagatcttgcaccatctttagcaagtcctttgctctccaataacttctatcatttatcttcttcttacgtctgttacttattaaattgtgattgttttttcaagtacaaatgtctgcatagaaatgatgatgcatttgttcagtaacatgccccagggttgcttctctcctaatcagtatatatttagcttccagcaatgagatctcagccagagtctacccaagtgtttagttatgaagagtggtttaacaggaatccagattaagttactaaatcttgacagaactgctgaaggcactttgcttaccaag

SEQ ID NO: 421684 - DNA, 531 bp, Homo sapiens
cggtacttagctttcaatgaccacatctggctgttgttgacaaagacctagtttgctattcaaagagataaaatgatgttcagtgtggaaaagtaagtggttcttattcacagttttaaaatgctacttcatctgtgtatcagtcaggccayatgatatttacatttagtggtcagacaacatgtttgaaacagttttaatcttttctttcattaatttgagatcttgcaccatctttagcaagtcctttgctctccaataacttctatcatttatcttcttcttacgtctgttacttattaaattgtgattgttttttcaagtacaaatgtctgcatagaaatgatgatgcatttgttcagtaacatgccccagggttgcttctctcctaatcagtatatatttagcttccagcaatgagatctcagccagagtctacccaagtgtttagttatgaagagtggtttaacaggaatccagattaagttactaaatcttgacagaactgctgaaggcactttgcttaccaag

SEQ ID NO: 421685 - DNA, 531 bp, Homo sapiens
cggtacttagctttcaatgaccacatctggctgttgttgacaaagacctagtttgctattcaaagagataaaatgatgttcagtgtggaaaagtaagtggttcttattcacagttttaaaatgctacttcatctgtgtatcagtcaggccacatgatatttacatttagtggtcagacaacatgtttgaaacagttttaatcttttctttcattaatttgagatcttgcaccatctttagcaagtcctttgctctccaataacttctatcatttatcttcttcttacgtctgttacttattaaattgtgatygttttttcaagtacaaatgtctgcatagaaatgatgatgcatttgttcagtaacatgccccagggttgcttctctcctaatcagtatatatttagcttccagcaatgagatctcagccagagtctacccaagtgtttagttatgaagagtggtttaacaggaatccagattaagttactaaatcttgacagaactgctgaaggcactttgcttaccaag

SEQ ID NO: 421686 - DNA, 586 bp, Homo sapiens
agttttaatcttttctttcattaatttgagatcttgcaccatctttagcaagtcctttgctctccaataacttctatcatttatcttcttcttacgtctgttacttattaaattgtgattgttttttcaagtacaaatgtctgcatagaaatgatgatgcatttgttcagtaacatgccccagggttgcttctctcctaatcagtatatatttagcttccagcaatgagatctcagccagagtctacccaagtgtttagttatgaagagtggtttaacaggaatccagattaagttactaaatcttgacagaactgctgaaggcactttgcttaccaagttgtttcatttgagtgcaaacattaaacgggggttgaatacaagacaagaactactcactgaaatgtaatttgaaatctagcagatgtattatgttgaaaaatatattagagatacacaatgggattrcacttccaaactaaatatggctggaaaagatgtggaaattaacatccttagtaataagcggcaagttaactattagaaaataggcctacattatgcaaattggagacaaagaggctaaa

SEQ ID NO: 421687 - DNA, 586 bp, Homo sapiens
agttttaatcttttctttcattaatttgagatcttgcaccatctttagcaagtcctttgctctccaataacttctatcatttatcttcttcttacgtctgttacttattaaattgtgattgttttttcaagtacaaatgtctgcatagaaatgatgatgcatttgttcagtaacatgccccagggttgcttctctcctaatcagtatatatttagcttccagcaatgagatctcagccagagtctacccaagtgtttagttatgaagagtggtttaacaggaatccagattaagttactaaatcttgacagaactgctgaaggcactttgcttaccaagttgtttcatttgagtgcaaacattaaacgggggttgaatacaagacaagaactactcactgaaatgtaatttgaaatctagcagatgtattatgttgaaaaatatattagagatacacaatgggattacacttccaaactaaatatggctggaaaagatgtrgaaattaacatccttagtaataagcggcaagttaactattagaaaataggcctacattatgcaaattggagacaaagaggctaaa

SEQ ID NO: 421688 - DNA, 585 bp, Homo sapiens
ccaattaatttttaaaaaaacatgttttgcccaacaattactatgtggtgtatgatatgatagacacaatgggaattgtctctgctattgactgcatgcagaaaactaaagacaacaatattaggactgcatttagcttcccaggccatccatgccaagcagatatttgagttatatrtctaagactttcaataaagtttatataatctatatttgattgaatcaaattaaagagatctttgtggattatcagcataaataaaatgagtacacacaggcttagttaccaggctatgtgtgacactaagaaggtaacttaaagtaatcatatttccagatgtgaggaggaaaatgaattcaactgctatggtctaaatgtttgtgccgccctcaaaattcatatgttgaaacctaatccgcaatgcaacggcattaagaggtagggcctttaggaggtggtaaggtcatgagggcagagcctgaatgaatgggactagtgcccctgtgaaacaggcctggtggagcttgattactcactcattgagggtgcagacagagacatcatttataaagcacagaacaagc

SEQ ID NO: 421689 - DNA, 585 bp, Homo sapiens
ccaattaatttttaaaaaaacatgttttgcccaacaattactatgtggtgtatgatatgatagacacaatgggaattgtctctgctattgactgcatgcagaaaactaaagacaacaatattaggactgcatttagcttcccaggccatccatgccaagcagatatttgagttatatgtctaagactttcaataaagtttatataatctatatttgattgaatcaaattaaagagatctttgtggattatcagcataaataaaatgagtacacacaggcttagttaccaggctatgtgtgacactaagaaggtaacttaaagtaatcatatttccagatgtgaggaggaaaatgaattcaactgctatggtctaaatgtttgtgccgccctcaaaattcatatgttgaaacctaatccgcaatgcaacggcattaagaggtagggcctttaggaggtggtaaggtcatgagggcagagcctgaatgaatgggacyagtgcccctgtgaaacaggcctggtggagcttgattactcactcattgagggtgcagacagagacatcatttataaagcacagaacaagc

SEQ ID NO: 421690 - DNA, 584 bp, Homo sapiens
aggcaacatgacaccagccaggcaaagactccatttgcataataagattagggtggggctaycagcttgcttgtgggctacgtaaacgtcacacctgatccaaccaatctgtgggccctaggtaaatcagacaccacctcctcaagcctgtctataaaatccggtgcactctcctgtgggctggaagtcccattcaggagcgcctctttcttgcaagacagagctgctatcctttctctttcttttgtttattaaacctccactcctaaactcacttcttctgtccacatactcgatttccttgacacgagacgacaagtcttgggtatttaccccagacaacaatgctacttcaatagtaaatagcaataaatagatacttgctgaattaaataactaagctattcattatttaatatctgtcaagtggataaacgttgaaatggctagttttctgctaatgttattttatgaagtaatcattaacagtctaagtttagccattaaaaatgaatgaaacagaacaactcccccctaaaaaaggccaaagtttcttaaacaatgaccactttagattgtatttt

SEQ ID NO: 421691 - DNA, 584 bp, Homo sapiens
aggcaacatgacaccagccaggcaaagactccatttgcataataagattagggtggggctaccagcttgcttgtgggctacgtaaacgtcacacctgrtccaaccaatctgtgggccctaggtaaatcagacaccacctcctcaagcctgtctataaaatccggtgcactctcctgtgggctggaagtcccattcaggagcgcctctttcttgcaagacagagctgctatcctttctctttcttttgtttattaaacctccactcctaaactcacttcttctgtccacatactcgatttccttgacacgagacgacaagtcttgggtatttaccccagacaacaatgctacttcaatagtaaatagcaataaatagatacttgctgaattaaataactaagctattcattatttaatatctgtcaagtggataaacgttgaaatggctagttttctgctaatgttattttatgaagtaatcattaacagtctaagtttagccattaaaaatgaatgaaacagaacaactcccccctaaaaaaggccaaagtttcttaaacaatgaccactttagattgtatttt

SEQ ID NO: 421692 - DNA, 376 bp, Homo sapiens
cactctgccatgctaggtactatcaataatggagggtaagaaataatcaagaacatatggrggaccgccaattcctgggccagcatgtgaggaacttggaagtcatcatttctgttcccacaggaaaaaagcataacaaaatagaaaccaatgacttttcagatccatcagataattgaagtcacagaggaagctggtgctccccaaactggacagacacacaggagggtacagagaatcacaatttactggagcagaaagctctgcaggagctagtgaagctgtgtcatttgtctggggaaatacccgaggtttgttgtctcactctaaggaaaactaagacaaggacacacaaggtgtgggtttaagagcagaa

SEQ ID NO: 421693 - DNA, 376 bp, Homo sapiens
cactctgccatgctaggtactatcaataatggagggtaagaaataatcaagaacatatggaggaccgccaattcctgggccagcatgtgaggaacttggaagtcatcatttctgttcccacaggaaaaaagcataacaaaatagaaaccaatgacttttcagatccatcagataattgaagtcacagaggaagctggtgctccccaaactggacagacacacaggagggtacagagaatcacaatttactggagcagaaagctctgcaggarctagtgaagctgtgtcatttgtctggggaaatacccgaggtttgttgtctcactctaaggaaaactaagacaaggacacacaaggtgtgggtttaagagcagaa

SEQ ID NO: 421694 - DNA, 519 bp, Homo sapiens
ctctattccaaggtactttcacgactggtgaagtgatacaacattatgtgaaatgaaacttggattmattgtaaatgtgtagttcgaaggcatagcaaccaataaaaaatattttaaaataagtataattgatatcctaagagaggagaaaaatagaatcatataaaataattaaaactagagaaggcaagaaaagagtggaaaacaaaaaaataacaagagcgaaaaatagaaaacagaaaaaatagtaacaaataagggagatgtaaaccaactaaattaataattactctaaacatcagttgttaccaacagaaaaacagaacttgtcagagtgaatggaaaaaaaaaaaaaccaaaggaaaaaaaagacttaattctatattgtctacaataaacccaaaacacagatagatttaaagtgaaaaaataaagaaaaaatatctagtgacactaataaaatgaaagtgggagtaactatattcagtacagacaaagcggacttcagaggaagaatga

SEQ ID NO: 421695 - DNA, 519 bp, Homo sapiens
ctctattccaaggtactttcacgactggtgaagtgatacaacattatgtgaaatgaaacttggattcattgtaaatgtgtagttcgaaggcatagcaaccaataaaaaatattttaaaataagtataattgatatcctaagagaggagaaaaatagaatcatataaaataattaaaactagagaaggcaagaaaagagtggaaaacaaaaaaataacaagagcgaaaaatagaaaacagaaaaaatagtaacaaataagggagatgtaaaccaactaaattaataattactytaaacatcagttgttaccaacagaaaaacagaacttgtcagagtgaatggaaaaaaaaaaaaaccaaaggaaaaaaaagacttaattctatattgtctacaataaacccaaaacacagatagatttaaagtgaaaaaataaagaaaaaatatctagtgacactaataaaatgaaagtgggagtaactatattcagtacagacaaagcggacttcagaggaagaatga

SEQ ID NO: 421696 - DNA, 629 bp, Homo sapiens
ccagcactttgagaggccaaggcaagaggattgcttgaggccasggttcaagacctgcctgggcagcatagcaagacctctgtctctaaaaaataattcttttaaagaaaaaattagctggacttgatgacccaggcctatagtctcagctgctggtgaggttaaagtgggaggatcttctgagcccaggagtttgaggctgcaatgagctgtaatagtgtcaatgcaatgcagtccgggtgacagagtgaggcccccatctctaaaaaaaagaaagttgaaaatatggtcactagttgaatatatgttaccaaattttatattttgaagaaaatcttgtctcatccaaacaatcttaattggactctattcagaaatgtagagcctttttagttaagcgaggatagttcctagtttgtcaaattccataagatgtcattcatttcaaaacagatgctggttgagtaagaagcaaaacttcaccagcataggtatgttttaagaagtataaccttgaaccctctcctctcagtctgtttcttgtacatacatatttatcgtcaattgaaaggttttgagcgggaggtggtgattaaatgagactattagcaaagctcaagtcaggacgg

SEQ ID NO: 421697 - DNA, 629 bp, Homo sapiens
ccagcactttgagaggccaaggcaagaggattgcttgaggccacggttcaagacctgcctgggcagcatagcaagacctctgtctctaaaaaataattcttttaaagaaaaaattagctggacttgatgacccaggcctatagtcycagctgctggtgaggttaaagtgggaggatcttctgagcccaggagtttgaggctgcaatgagctgtaatagtgtcaatgcaatgcagtccgggtgacagagtgaggcccccatctctaaaaaaaagaaagttgaaaatatggtcactagttgaatatatgttaccaaattttatattttgaagaaaatcttgtctcatccaaacaatcttaattggactctattcagaaatgtagagcctttttagttaagcgaggatagttcctagtttgtcaaattccataagatgtcattcatttcaaaacagatgctggttgagtaagaagcaaaacttcaccagcataggtatgttttaagaagtataaccttgaaccctctcctctcagtctgtttcttgtacatacatatttatcgtcaattgaaaggttttgagcgggaggtggtgattaaatgagactattagcaaagctcaagtcaggacgg

SEQ ID NO: 421698 - DNA, 629 bp, Homo sapiens
ccagcactttgagaggccaaggcaagaggattgcttgaggccacggttcaagacctgcctgggcagcatagcaagacctctgtctctaaaaaataattcttttaaagaaaaaattagctggacttgatgacccaggcctatagtctcagctgctggtgaggttaaagtgggaggatcttctgagcccaggagtttgaggctgcaatgagctgtaatagtgtcaatgcaatgcagtccgggtgacagagtgaggcccccatctctaaaaaaaagaaagttgaaaatatggtcactagttgaatatatgttaccaaattttatattttgaagaaaatcttgtctcatccaaacaatcttaattggactctattcagaaatgtagagcctttttagttaagcraggatagttcctagtttgtcaaattccataagatgtcattcatttcaaaacagatgctggttgagtaagaagcaaaacttcaccagcataggtatgttttaagaagtataaccttgaaccctctcctctcagtctgtttcttgtacatacatatttatcgtcaattgaaaggttttgagcgggaggtggtgattaaatgagactattagcaaagctcaagtcaggacgg

SEQ ID NO: 421699 - DNA, 660 bp, Homo sapiens
tgggtgattctactcatctattcattcaattaataattgattacatttttggtactaggatatgatactgtgcaaaaagcaatttatgatctagataggtaaactgtcattaattaaatgagataataaatacatgaataattgttattcggttaaaagttatgagtgagagatgtgtatggtgaaagaaactagaagggtcaaggggaaaataatttgatgtgtgaagaaaaagaaactattaactaggtaaggaagaaagaaagagaatattccaggaagaggaaaagcattaacaaatattttgtggtggaaggaaacaaagaggttcataaaaataaaagtccagtgtaatgacattgcagagtacagtttcacagatgtgtgtaggctagatcatttatatagaaagaaaacatataaatacaatttcttctgactgataaaacatatatcaatcctggtttctaatatttcctattctatcatttattggatttacaactcattgttttggcttttcaaaggtgatagaaaggttgtaactaaggacagaaaggttgttttagcaaattttgtttttaatctaaaaagctatcttatygtcctctaataatttccagtctcaacagtgtaactcacagaaattgaaaattatag

SEQ ID NO: 421700 - DNA, 595 bp, Homo sapiens
aatcctctctctttttgggtaatagtcccacatgtaatatactaatgtctaattgacatatgtatgttatacaattgcataaaacatatgcaatcatagaattgtataataattgtataaaataggattagacattaatatacatatctgygctccctacatctaaaactgatgagaagatccacctttcctgaccccagcagccaggcttcaagctgactgaggctcctgaattggatacctcttcctggtacttttaacctggagagaaggcatatttgggatttgtttaggtaggtgttagcatccccattggtctagccatgaagcctccagcctttcttgaggtcagttgtttccacaagtttcctgttagctttttgggtcacttgtatcattctaataacttcctctttgtttaagttatacagagttgttttttatttcctacaatcaggaaactttgtctctgctgtaagaactcagagacaacaacaaataaatggaaaaacattccatgtccatgccaatatcataaaaatggccacactgcccaaagcaatttatagattcaatgctatttttatcaaactac

SEQ ID NO: 421701 - DNA, 620 bp, Homo sapiens
tggtggtgtcatcctttaggagggaaacacagaaagacaagtgggtttgagtgagttcaattcaggacacgttgaggttcagaagcctggaaacaggatgggatattaaagatcctcagtctaacacaataagtagctcaggagtccaagaccascatgagcaacccaatggcccctgccccacccctggcgtctgtaaaactacttaaccaggggcagtggcacatgcctgtagccccagctactaagaaggctgaggtgggaggatcacatgagcccaggagtttgaggctgcagtgagctatgattgtgtcactgcactccagcctgggcaaaagagcaagaccttattttttaaaaaggtaacaagtatagatgaagatgtggagaaaagagaaccttgtactttgttgatgaaaatataaataagtacagacattatgaaaaacagtttggtaagtccctcaaaaaattaaaaatagatgggtgcagtggcttatgcctgttaatccctacactttgagaggccaaggcaggtggatcacttgaggttaggaatttgagaccagcttggccaacatggtgagaccccatctctactaaaaatacaaaaattagcc

SEQ ID NO: 421702 - DNA, 620 bp, Homo sapiens
tggtggtgtcatcctttaggagggaaacacagaaagacaagtgggtttgagtgagttcaattcaggacacgttgaggttcagaagcctggaaacaggatgggatattaaagatcctcagtctaacacaataagtagctcaggagtccaagaccagcatgagcaacccaatggcccctgccccacccctggcgtctgtaaaactacttaaccaggggcagtggcacatgcctgtagccccagctactaagaaggctgaggtgggaggatcacatgagcccaggagtttgaggctgcagtgagctatgattgtgtcactgcactccagcctgggcaaaagagcaagaccttattttttaaaaaggtaacaagtatagatgaagaygtggagaaaagagaaccttgtactttgttgatgaaaatataaataagtacagacattatgaaaaacagtttggtaagtccctcaaaaaattaaaaatagatgggtgcagtggcttatgcctgttaatccctacactttgagaggccaaggcaggtggatcacttgaggttaggaatttgagaccagcttggccaacatggtgagaccccatctctactaaaaatacaaaaattagcc

SEQ ID NO: 421703 - DNA, 642 bp, Homo sapiens
aaagcagttgcattttctacaccaataatgatgtagccgggaaccaaatcaagaagacaatctcatttacaatagctaaaaaaataaaataaaatgcctggaacatatttaaccagggagatgaaagatctctataaggagaactacaaaatcatagatgacacacaaaaaaatggtaaaacttctcatgctcatggattggaagaatcaatactgttaaaatgactgtactgcccaaaacaatttacaaattcaatgcactccctatcaaattaccaatatcatttttcacagaattagaaragacaatcctaaaattcatatggaatcaaaataaagagtgcacataaccaaagtaatcttaagccaaaaaacaaaactgaaagcatcacattatctgacttcagattatattattagggtggtgcaaaagtagctgcggtttttgccattactttcaaggctatagtaaccaaaacagcatggtactggtataaaaatagacacatagatcaatggaacacaacagagaatccagaaataaagccacatacctacaaccaactctacaaagtcacaaaaatatacactgaggaaatgacactctattcaataaatggtacagagaaaattagatagcca

SEQ ID NO: 421704 - DNA, 583 bp, Homo sapiens
tcacacactggggcttgtccggggagtggggggctaggggagggataacattaggagaaatacctaatgtaggtgacagactgatgggtgcagctgtatacttatgtaacctgtatacctatgtaaacaaaactgcacattctgcacatgtaccccagaacttaagtataattaaaaagaaagaaaaattctcacttctagccttttgaaaacatgcaacaaatcattattaactatactcatcctacagtgctataaaatattacattgggttggtgctaataatggcaaaaactgcaattactttgcaccaacctaataactcattcctcctatctagatgtaattttgtgttggttaaccaaccttttcctatcttcccttctcctcgcccttcctagcctctaataagcagagctctactctctcgttatagtttataatagtttacgtctatgagtgcaawtttttttttttttttttttttttagcttacacgtatgagtgagaatctgcggtatttatctttctatgcctggcttattttacttaacaaaatgtcctccagactcatccatgttgc

SEQ ID NO: 421705 - DNA, 608 bp, Homo sapiens
ctgcatgtgccattcagggacctaaggactggcccacctgatgtccctgtccccagcaaaaatgccccacagaaagaaatgcacaaatgcagcctaagacactgataactcacagacactgctgatattaattagagccaaagaaatctcacggagataataccactgcatctacccaggaccagagccatagcactctacccagacaacagtatagacagatctacaagaaaaagtctttccctacaaaagytactccataaaacttgatgagtcaactgttacactagatgcatctagatgcactagattactgtaaggacaatagatacaaaagaggaaggaaacatgacaccttcaaggaacacaataattctccagtaacataccccaaagaaaagaagatatatgaaatgcctgaaaaggaactcaaaataatgatcttaaggaaactcagtgagatggaagagaacacaggtaggcagtacaaagaaaaacaattcatgaaaagaaaataattcaaaatcaaggagatagatatcataaaaataataaaacagaaatcatgaaactgaagaattcaatgaaggaaattcaaaatactgttg

SEQ ID NO: 421706 - DNA, 481 bp, Homo sapiens
aaaaacaattcatgaaaagaaaataattcaaaatcaaggagatagatatcataaaaataataaaacagaaatcatgaaactgaagaattcaatgaaggaaattcaaaatactgttgagagctccaacaatagactacatcaagcaaaagaaaaaagttctgaacttgaagatagatagtttatcttttgaataatccagtcagacaattaaaaaatgattaattttaaaaggatgaagaaagcctacatgacacaygagacaccataaagtaaactaatattcacatgtgggagttccaaaattatcagagatgggaaaatgcaaagaagaactatttcatgaaagaatagctcccaagtattgggagagatagagacatctaaacatagggaactcaaagcatcccaaaaacatttatccccctgaaaaaagtcctcttcaaaaccagcaagagaaaagcttccagtcacatataaggga

SEQ ID NO: 421707 - DNA, 567 bp, Homo sapiens
taaaaattagagcagaaatacatacgtcctcacaaataccattgcgacttcaagtgaaacaacatatgatgaaaacatttttttcctcrtcaactttgtaacaaaatgatgttgaatgaaatggtatcagtccaggatgcgaggtacgtgactttgctgaaagttgcagtttctgagaactaaccaatgacataaaatgagaacttcctataaaaggaactgaaaacaggagaataatagacaaaatcaaccaaaccaaatgctagttctttgaaaagctaatgcaattggtgaagctatagtcaggctaacttagagagagagagagagagaggatacaaattactaatatcagaaatgaaggcgaagccatcactgctgatcccatggacattataagggtaacagaagactattacaagcaactttatgccacaaacttgataacctagatgaatggatcagctacttaaatggcacaatctgccaaactcacaccagaagaaataggcaatctgaataggtctactaaataaattgaatcaataattaataacctttcaaaac

SEQ ID NO: 421708 - DNA, 530 bp, Homo sapiens
gtacaggattggcatccaacgtgaaaaacaacagtgcaaaacagaaactgggatgtgaaggaggcacacgcaggctcagagtggcccactccaaggctgtgggtgattcagaagctgaagacgcaatggcatgtgcactgcacctgtcagtcctaggatggtccttggcagcataaagtggcaaatctgggcgggaaaaaaaaaaacagatttctggccttgtaacaggaatgtagacattggtcctcaagacagtgggaaacattgttgcaacccaggagtcactcaattgttgctaaacaagtcagactctagcaaagtagaagcagttgaagttgtgccaagagtaccaactactcctggtcccatcccaggctgccrtgccgtgatgaactggggaaggaaaatgctggaattagtagacacgatttttgaggtccaagatgatcggggaggttggacctggacagtgtgtctgctgacgggccactttcctcacaggtccaagcacatctcctaaggagagaacg

SEQ ID NO: 421709 - DNA, 584 bp, Homo sapiens
aaaaactggagaaagggagaattccctggctctctgcctgactgcctaagctagaagatcaatctgctcctgccctcagttctcatccttcttagcccttcagacctggttgcaatctacatcattggttctccagttctcaggccttcaaactgcaccactgactttcctggtgacagcattcaggtgacagattgtgggactttccagcattccggtgacagatcatgggacttctcagcctccataatcacataagccaatttttaaataatttacctcattttatatacatatatataatatatacaattaatatgtaataaattataattatgtcattaatatatattaatagtaatatatatgtatatacaataaatatatacctatataatacagattgaatatcctttatctgaaatgcttggtacttgaagtgttttggattttgatttttwaaaaaaaattttagaatattaacctatatttactggttgaacatcccaaatctaaaaatctgaaatccaaaatgtgccagtgagcatttcctttgagtgtcatgtcagtgctcaaaaggtttt

SEQ ID NO: 421710 - DNA, 533 bp, Homo sapiens
ttgttttacattttcctctaaagagggtcaaatttgacatagtgaaattaccrtgtcgctgtgatgtgattcttgttcagctgttttgtttcagactttggggatattttactatgctggaagacatgtgaaggttaaatgggatgaacgtatgttcagatttccctgacggcctaaacacggcctccagtgtcaatgtgcagtcattgtcccggtcttgagcagaggaagattttcttacatcctcagggtcttggttggctacttctccatcagggaatgcatcaccatcaagaccagagtgacctcactgagggtgggaggagtgaatgcatttttgggagaagaccatagcctggccctgctgtgcaatttcctcatgtgctcagttactcagcctctcttgagcccctgggctgtgaggccaggcccagtgctgtgagggatgtagctgtgtgaggaatggtcttagctgcttgcactcataatagtgagtcgtcctagaatttgtgaaaatatggtgaatattacaa

SEQ ID NO: 421711 - DNA, 533 bp, Homo sapiens
ttgttttacattttcctctaaagagggtcaaatttgacatagtgaaattaccatgtcgctgtgatgtgattcttgttcagctgttttgtttcagactttggggatattttactatgctggaagacatgtgaaggttaaatgggatgaacgtatgttcagatttccctgacggcctaaacacggcctccagtgtcaatgtgcagtcattgtcccggtcwtgagcagaggaagattttcttacatcctcagggtcttggttggctacttctccatcagggaatgcatcaccatcaagaccagagtgacctcactgagggtgggaggagtgaatgcatttttgggagaagaccatagcctggccctgctgtgcaatttcctcatgtgctcagttactcagcctctcttgagcccctgggctgtgaggccaggcccagtgctgtgagggatgtagctgtgtgaggaatggtcttagctgcttgcactcataatagtgagtcgtcctagaatttgtgaaaatatggtgaatattacaa

SEQ ID NO: 421712 - DNA, 414 bp, Homo sapiens
cgcctcggcctcccaaagtgctgggattacagccactgtgcctggccacatataggttttaatttatatataaattatgtcagcaagaaactgggaattgactacagtctaaaaatagcaaaatgattaaatgaattatggtacagccrtatatagacttttatgtaactgaaattcagataaatctctaattataatcacagaaagattgttacacgatattgttatgtaagaagagaaagttacaaagtaatatgcagaatatgctcccatttaaaaaaaaatgtgtgagcgtacaggtgagattaaaatgttttgagaaaagacatgcagaagatgctgtagataatcttttgatcatagaattatccttttatttttgctcaactctcctacctaatgttttaacaataa

SEQ ID NO: 421713 - DNA, 604 bp, Homo sapiens
atttgcctggctcatttgttttgacggggtaagcttggttgtgaagaaagcaacacagcttccagccacagcaaccattcacactttgcctcctaccaggacaaagactggttgctttcatcttttgcattgcagaatgctaatgccataactaacacatagtaagaaaatttaaaaatgttcattaagtgttacattgctagagaacacatagttcttttaatattatcggcaaatagtttgaaaaatatcacaaaaggcatctttatcaattaatgatataccatacttaatattggctttcattacactcatgctatatacgaatgctttcactaacaactcaacattcccagtgctgttagtagtttaaggtttctcygcaatgccaggacattcgatgccaacatatgtgagtagtttagtgacttcatttctaggcttcatgccaagaatttctggataggaaacattctcaatatgtcccttatttgtgcagcacctatactttatgtctttgaatttataagtagcttattggtaaaaatttctaagcctgggcatctataccttaacagatttccaagaatttattatttcccat

SEQ ID NO: 421714 - DNA, 604 bp, Homo sapiens
atttgcctggctcatttgttttgacggggtaagcttggttgtgaagaaagcaacacagcttccagccacagcaaccattcacactttgcctcctaccaggacaaagactggttgctttcatcttttgcattgcagaatgctaatgccataactaacacatagtaagaaaatttaaaaatgttcattaagtgttacattgctagagaacacatagttcttttaatattatcggcaaatagtttgaaaaatatcacaaaaggcatctttatcaattaatgatataccatacttaatattggctttcattacactcatgctatatacgaatgctttcactaacaactcaacattcccagtgctgttagtagtttaaggtttctccgcaatgccaggacattcgatgccaasatatgtgagtagtttagtgacttcatttctaggcttcatgccaagaatttctggataggaaacattctcaatatgtcccttatttgtgcagcacctatactttatgtctttgaatttataagtagcttattggtaaaaatttctaagcctgggcatctataccttaacagatttccaagaatttattatttcccat

SEQ ID NO: 421715 - DNA, 601 bp, Homo sapiens
cttggtccattaggaattttattacagttaaatattgctaacaagtagatgatgtcactatatacatctagctagcaaaagccactaaaggaggtaaagtgaggaaaaatcacactccagaagctctcaaatatcttggatgagatgtttgaagaaaaaagaaacttaaaagtcacggataaaaagaaacatattcttagattgtgttttacatatctggttacatgttatttgcaagagctgggactgaaacaaagtgacacagaatgtttaaaattaaagagtcagaaagaatatgtaccaggaaattagtaaccaaaaaaaggttgggataatgrtatttatgtcaacaaattaccaagactgactcaaaaatatagagaaaacctaactataccaataaccagatatataaattaaggcagtgaccaaaattttccctttcttccagcaccctacaacccatattccctcgtcaaggaatctgtctcaaaaaacttcatggacaaactttcaaagaacggagagtcccttcaaggaacagagagtattatactagcagttccagagaaataaaaatagtaatagccactcaccttac

SEQ ID NO: 421716 - DNA, 386 bp, Homo sapiens
gtgagattccctagttctccaaattaatagcatgtggtccatcctaggatacaaaaactttattattggggtcatttgcaattgayatggtccacagcatcagaaaactaggggcagaggagagtcaacttaattgaaatgatactttcaggcaagtgcacagtgggactatgggacgattaagttctcatgaccagtaaatggttgtttcctcccagacataaacagagttgcaattaccatatgagccacctacacaaggatgtaagcctaatacctgacatttgtttagtactgtttgctttgaaaaatcttgcaaaatctttattctttcatttaatgtaaatggcagtggaataaattgacatggtaaatatttacagctt

SEQ ID NO: 421717 - DNA, 490 bp, Homo sapiens
tttcctccaagtgagcatcaaggtgtttgtccttaatctgtgtggttctactaggcctggagtctgctgactttactgttgtttttcttcctttccactgatagaaatttctagaattagaggtagtgagttatgaaacacagagtttgttctataagggtaatggagctatgaaatattttctcttctggtccaaagcacacaaatgagctagaagtctagggcattaggcaaagtccatctgttgagtyaggcatttggccaaaaaaagacaaagatttcctttttcctgcatggacattttcttaaatttaagtactcctagtagaagagtctaaagctgagcggtgatgatgatattgaatgtgctgaagaataatgtctttttttcagtactttattcctgcatattctcatactcaacctcaaccaccaccaagtcttctatgaccttccaaagagccaggcccattttacatgtttcacaggg

SEQ ID NO: 421718 - DNA, 590 bp, Homo sapiens
gttcctcagcatcctgagacaccactagagattccttcaaaggaggactgagagctgtgtaatcctagggagatgttgttaaccaaawaaagccaaatcttgtaaaaaaaaatttgaagagatttattctgagtgaaatgtgaagaccattgtcagaggtgtttgagccagaacaactccatcttgaataggggctaggtaaaataaggctgagacctactgggctgcattcccaaatggttaaggcatttttaggcacaggatgagataggaggtcggcacaagacacaggtcataaagacactgctaataaaaccagttgcagtaaaaaagccggctaaaacctaccaaaaccaagatggtgacgatagggacctctgctcatcctcactactgtactcccaccagcgccatgacagtttacaaatccatggcaacatcaggaagttaccctatacagtctaaaaaagagaggcatgaatgatccacctcttgtttagcatataaccaagaaataaccataaaaatggcaaccacagccctggacgctgctctgtctaaggagtcgccattctttcattcctttagtt

SEQ ID NO: 421719 - DNA, 607 bp, Homo sapiens
caactgttcctcagcatcctgagacaccactagagattccttcaaaggaggactgagagctgtgtaatcctagggagatgttgttaaccaaaaaaagccaaatcttgtaaaaaaaaatttgaagagatttattctgagtgaaatgtgaagaccattgtcagaggtgtttgagccagaacaactccatcttgaataggggctaggtaaaataaggctgagacctactgggctgcattcccaaatggttaaggcatttttaggcacaggatgagataggaggtcggcacaagacacaggtcataaagacactgctaataaaaccagttgcagtaaaaaagcyggctaaaacctaccaaaaccaagatggtgacgatagggacctctgctcatcctcactactgtactcccaccagcgccatgacagtttacaaatccatggcaacatcaggaagttaccctatacagtctaaaaaagagaggcatgaatgatccacctcttgtttagcatataaccaagaaataaccataaaaatggcaaccacagccctggacgctgctctgtctaaggagtcgccattctttcattcctttagtttcctaataaact

SEQ ID NO: 421720 - DNA, 509 bp, Homo sapiens
agccaatataagtcactgttagaaaatactattagaatttttctcctacaaattatatcagataaagaatatacgcatttttagaagtattttccaggctacctgtcttattggttgaatctagtatatgctgatagcactctttcctccttagtgtggatgcttaaccacactttcaatattcagtttgtttttctgtctcggcttttcccttcccacttgaacaaaattaaatatctactttttaacttttgtctttcagagacccacaaaagaagagatactgaggtaaattttcagaataaattagatttgggaaaatgcttattaattaagttatatatagtcaatgtttattgtatattctttatataacattgtgttatatactgggaatttaaagataagtaagscttccttattttcagaaatatcaaatctaataaggaaagcaaacaggtaaagatgatttcatttaatatgctaaagataataacagaagtataaat

SEQ ID NO: 421721 - DNA, 565 bp, Homo sapiens
aaaaagacaataaactaggagaacatgtgtacaacacataaagcaactacactcaatcatattacagtatgtagaacgcaaatacaatgtagcaagaaaaagacagcaaacaagtagaaaaatgagaaaaaggtatagcagaagttcatttaaaaatgtaaataacaaatatgtggaaaggggccaatcttactaaaaatcaaagcgttatcaactaaaacaaatatgggatatrtatttttcaaatagattggtaaaatctttaaagattttcaaaacccaaatttggagcagttttgggacaataaatataatcataaattactgataggagagtcaattttaccaattttttgcagaattttcttgccatatgtttaacaacataaatatgttcattttcaaaatttctctaacagaagtataccctataaagacacttggagaagtgtgcaaagatacatgtgtaaaggtgatcactgaagcatgatttgtaatactgaaaatctagaagctacttaaatatcttgaagaggaggctcattaaataagttttggtagagtc

SEQ ID NO: 421722 - DNA, 599 bp, Homo sapiens
gatttgggaggggccagagttggatgatatgggttggatctgtgtctcctgtccaatctcatgtcgaattgcaatccctcaatgtggaggtgggacctggtggaaggagattggatcgtgggggcagatttcccctaccatattgtcctcacaacagtaagttcttctgaaatctggtcatttaaaagtgtgtagcactctctctcactctctctctgtctctctctctctcaccatgtaagatgtgcctgcttcccctttgccttccactatgagtgtttgtttcctgaggcctccccagagcagaaggtgctatgcttcctgcacagcccatagaaccatgaaccaattaaaactcttttctttatacattacccagtctcaggtatttctttatagcagtgtgcagaataaactaatacaactatcaaaatccaaaagttcctatatggtcaattctcaagaaaaacagttgctttttaagatttattccaagtctcctgacatargatatgctgtcatactattttttttaatcctcccacctcagcccctcaagtagctaggattagaggtgtacaccataccaccatgcctgg

SEQ ID NO: 421723 - DNA, 586 bp, Homo sapiens
ttactcctgctccattaagtgtccattcagtagaggagaaaggaatgaaattacacctggctcacagtgacttgagtctaacccttgagtccaactatttaagagtaagtgttaaggtcagtaccattgatggagaaaatactgagaactacagtttcttgtcttgtatttggtccttacaacattgtgcattgtatttttcatcatrttttacatgcacctgatagctttcctgttacacagtaagcaacctggggtaattcttgcgctgtttttctgtaccccacagtctttttatatggcacgtgccctatgtaactacaatacaaccatcaaaataaggatgttaacgatgacacattattgccctctaatcttcaaccctcatttaaattttgctaatttctcaataatgtcctttatattaaaaatgcatgacacttaaggacatgcctgatgtgacacctgtttacctgatttaacagcttctttctcaatttctattctatgtgaaaactaaacactccacacaaaataaattgcagcttctagccaggtgttagtcttaatacagaggccatataca

SEQ ID NO: 421724 - DNA, 527 bp, Homo sapiens
atttgtctttctagtcctggcttatttcacttaacatartgacctccaggtccatccatgttgctgcaaatgacatgatttcattattttttaatggccaaatagtatcccattgtgtatatatgccacatatgtccattaatctgtttttgttttgttttgtttttaaaggcagggtctcactctgtcacccaggctggagtgcagtggtgcaatcatggctcactgcagtgagtagccgggaccacaagcataccccaccacacctggctaattaaaaaagaattttttttgtagaaatgggggtctcactatgttgcccaaactggtctcaaattcctgggctcaagcagtcctcctgcctcggcctcccagagtgctaggattacagacctagcactgtgcctggccccatacatctgttgatgaacacttaggttgattacatatatttgctattgtgaatagtgctacagtaaacatgcaagtgcaggtatccctttgatatactgatttcttttcctatg

SEQ ID NO: 421725 - DNA, 577 bp, Homo sapiens
gtgggtcttacatccaatgacaaatgtccttataagatacagaaaaggagaagaagaccacatgcatacccacaagaagatggaggcagagactggagtgaagaagccacaagccaaggaatggctggagccaccaggagctgaaagaggcaacgaaggatcctcccctggagacttcaaagggagcatggcccctgctgacaccttgattttggatttctggcccccagaaccatgagagaataaatttcttgtggtgttaagccacatagttggtagcaatttattacagctgccccttggaatctaatgcaccactgttcagcagcaccacacccagcactgaaaacaccaaggtgaggaagggggcccagtgtttccctagacacaatgtcctcaaaagcaagctctatcctgtgaccattcacagaagggacatggagtcacagtaatgaacataggtgtctatggcttccaccaaacctagagaagccttcctcaagtggtcatttcttccatcactctccartgagaaccaggaactcgaatgctcaattctaactcaacggtggatcac

SEQ ID NO: 421726 - DNA, 416 bp, Homo sapiens
actgcccttatgattactatttcctcagaatctttcaaatgcctaagacactctcatacttgtgcatttcytttcaccaggtatcttgttccagttcaccattagtgaaagttttcacaataaccactataacacgctgggggctatgagtactctgctcaccttctatgatggggtcctcattacaagttggccagagggagatacagctcccagactttcactttataatctatttcctggagtcgctcctgacttcatctgtcagaggataggttccctgtgagagatactctaagataaagatttgtatgcaggagatttttgtgggagagagctcttgggaacaacaccagtaaatgatggaaaaactgcagtattagggagagggacaagtggaactgcaacagaatcaa

SEQ ID NO: 421727 - DNA, 607 bp, Homo sapiens
  misc_feature (1)...(607): n = A,T,C or G
tgttgggccattgtaccttcatcaacagtcagtcactgggtgcagactgccccagggaaagaaatacaactttagaagaggtggcttcctgtacctgaggggamttcccagagagaaactcagagctattggcaaccaacgcctgtaacctgggataatgagtgtcctggtcctgaaagcaaggatctgtattgcactccataacattcactgaatcatcactattgaattcactttttagtgagtctagaacactagatatctttcaacatcaccatggtggcaaagatacttggagccgggagagtttttggatgtgtgatcagatgctttcagtaaatgggatctgcacaagaaacggctcatcttaagtgtccaaaaattttacattaccacagctgccttcagtataattcacaattgtttccaaagatccaagacaattactcacttatttcttccccaaaaaatctcttccaattttacaagtgaggaaagaatgtcataatatttagaataatagaatgagttggtatgcttgcagcanagccaatcctacaagtgaacttcttgttaaacagatcttcctgtgaataaatggccgaca

SEQ ID NO: 421728 - DNA, 607 bp, Homo sapiens
  misc_feature (1)...(607): n = A,T,C or G
tgttgggccattgtaccttcatcaacagtcagtcactgggtgcagactgccccagggaaagaaatacaactttagaagaggtggcttcctgtacctgaggggaattcccagagagaaactcagagctattggcaaccaacgcctgtaacctgggataatgagtgtcctggtcctgaaagcaaggatctgtattgcactccataacattcactgaatcatcactattgaattcactttttagtgagtctagaacactagatwtctttcaacatcaccatggtggcaaagatacttggagccgggagagtttttggatgtgtgatcagatgctttcagtaaatgggatctgcacaagaaacggctcatcttaagtgtccaaaaattttacattaccacagctgccttcagtataattcacaattgtttccaaagatccaagacaattactcacttatttcttccccaaaaaatctcttccaattttacaagtgaggaaagaatgtcataatatttagaataatagaatgagttggtatgcttgcagcanagccaatcctacaagtgaacttcttgttaaacagatcttcctgtgaataaatggccgaca

SEQ ID NO: 421729 - DNA, 603 bp, Homo sapiens
aagctgctagcatacaacaggaaaacagtaaagctcggttaatagttttcttaaaataatcagtagaccacatcctagctaaacataatgggaaaatagasaatatttctctctctttgttgcatttttcaagctagattttcttttttacatcccctgcctggtcaaaagcatctggaaaagcagccaagccagtgcccactgtttcccttttgttctcacaaaatagaattgcaaactgagattatgcatacaacctcctgagagtgcaactgtccatccctgaagctgtctctcagcactgagccagcccagtcggcaccactgggcaccaggctctgccagggaagggtttcaatacaaacatcaggcaatgtgggctgccaacccaggcttcatcactaagtgctgtccacgtgttctgtagagacttctatggagggggctattttcttctagaaatattgctggtaaaaaagagtcaataccaggactttagtatccttgtgtagctcatgtctatttcaatgctcttggatttcttcctcccaattgttattgtctctcctagaagcttcctacattgaaccttgatgacagaaa

SEQ ID NO: 421730 - DNA, 656 bp, Homo sapiens
gtttgttttttaatttttgatactataaaaggtaatacgattttttttcctaggctaaaaagcacayaacatgttagaaagaattctgaaatagaggtaatattttaaaatggtgtttaaagtgataaaattcagaatttgaaaacatactaaggtataattacttagttcctcatgacatgaggtcagtgagatattaccatacatattaggatacatgcttactattctatgcaaatgtatgacttcaaggcaacataatttcccacacctttaaaaatcctttctagttagtttcattccttaaaaagtgcattttttataattacagaatgatatttaacacaaagtaaattagatttattttatccatatgccacaaaaggtcaaattccatctgttcatgttctctgctttctaaaatgaatagtgtttagttactgaaagatatacagatgttgacagcctctgggaaacctaaccttttgtctctcaataatttttagatgactattcagtggatatcagcatagatgtgggaaagcatgagttcaatttatggtcagtattggcaccttagtagtggatgtaataaatggaatactaatgttttattcattatgatgtgctccttgttttaatgaacagaagtaagt

SEQ ID NO: 421731 - DNA, 560 bp, Homo sapiens
ttttagttgcttcttcattacttttaatttgtgtttctctttattttgctttttccaacttcagttaatatcatggaaaaaataaaggttaggaagattggtttttttcttggccttactactaaccaatcctctgaacttggatgaattaagtttttctgggtaagagttgattcatttgttaattgaggggattataccaggcgatkgatcttgaaaacatcttgcaactgtgaaagttaaatattttcctttcatcaagctttcgtatttgaaatcacattgcaatttgggttatagaattgctgaaagtgagggaaaactaatgaagaaatgtttaaatcttataggataaggtcctagtcatcctaaaaataggtgcaagtttcatgaacatggtttgataatgctgagatgatgctaatgagacaaagagaagcttccccatggcagatgacttgcaacaaacagaccatgtaacaccgatgcaaataattcattacattcttcaagcatctgcaggatttgtgacttaagaatttgtagacatgattgaattc

SEQ ID NO: 421732 - DNA, 560 bp, Homo sapiens
ttttagttgcttcttcattacttttaatttgtgtttctctttattttgctttttccaacttcagttaatatcatggaaaaaataaaggttaggaagattggtttttttcttggccttactactaaccaatcctctgaacttggatgaattaagtttttctgggtaagagttgattcatttgttaattgaggggattataccaggcgattgatcttgaaaacrtcttgcaactgtgaaagttaaatattttcctttcatcaagctttcgtatttgaaatcacattgcaatttgggttatagaattgctgaaagtgagggaaaactaatgaagaaatgtttaaatcttataggataaggtcctagtcatcctaaaaataggtgcaagtttcatgaacatggtttgataatgctgagatgatgctaatgagacaaagagaagcttccccatggcagatgacttgcaacaaacagaccatgtaacaccgatgcaaataattcattacattcttcaagcatctgcaggatttgtgacttaagaatttgtagacatgattgaattc

SEQ ID NO: 421733 - DNA, 519 bp, Homo sapiens
ggaggggccgaggggtggaaaactatctatttgttgggtactatgctcagtacctgggtgatgggttcattgcacccccaagcttcagcatcatgcaatataccctggtgacaaacctgcacatgcatyccctgaatctaaaacaaaagttgaaaaataaaaattaaaaaaaataatacaactgttatgatgccatacattgtttattaaaaatcttaaaaataataaaaataattgaatatttaatttttgtatgcctgaaaactagcatttaggttaatcttcagtaagcatttaatgaatgactaattttagaatctgattttgtaaattatgtgataatcaacactaaagaaatatgcatataattgctcctgacctgtattaaatttcctcttactgatgtgacatgcacagatttaaggtaaaaggggtaactcaacactgaagcaaataggtctcacaattaagctaatgatctctaatgtttcacagagtttctcaagttaacacatgaca

SEQ ID NO: 421734 - DNA, 611 bp, Homo sapiens
tggtataaagttacaaaataagtgtcctttgaatgctacaataggaaaactgtatttagggcaatttttattttttcatgtttatttaggaaaagcacttgaaattattttaatggaggagaaaattaaagattatttcaatagttttggtacacctatgaacaagctttgaatattgctattgagcaaagcaagggtggtaaaatggcaatttgctttaagccagttgttgtgcaagagctttgggctaagaatcagcagacctgttcacaagttcaccgtgtcacaaattaactgtgtaattctgcactttacttgaatcattactactaaaagatttgaggggggcagatggctcctaaggtcctgttygttctcatatcatcatcttttctccaaaacatgccacacttaagacatgattatcccatcccccatcccctgaactcgtatctcagagggccttgttgacaccttggattgtggtctttcctgttaggtgctctgtgttataaattagttgtatgctttccattatggtcatgggcaggtgtcctcagccctctcctatcgtgattggctgggagcctggaaccagaaactggcccata

SEQ ID NO: 421735 - DNA, 367 bp, Homo sapiens
ccagtatttcctctttgtttttaaaagcttattgggctaaagccaaggtagcagttagaatccagaagaactcagggggaaaggtttatgaatgcatggtgagctcatattatcagttcctattttagtgtttcaaaatctcccatggtgtttgaaagcatcttgataattaaaagaaaatattgcctcataaaaatttcatyttcatttcaaagtaaagcattttttaaaagacttagttttacagaacttggaggaactatgcttacctttcttccctccctccattctttcttcctttccttttttctttctttttcagtttttctttttctacatgtaataaaggtgattgatagaaatataa

SEQ ID NO: 421736 - DNA, 576 bp, Homo sapiens
tacaacttaggctttcattttggagaatgtaagtcacaagtcttggcagcttccatgtggtggtaagcacataggtgcacagaatgcaagaataaagaaagcttggcagcctctgcctagatttcagaaggtgtataagatttcttatacacccttgcttgggtgtccrggtagaagcccattgcaggggaggagccttcagagagaacttctgctagggcagtgtggaggggcaatgtggtgtggaacccctacacaaagtccccaccaggggactgcctaatgaagctgtgagaagggagccaccatcctccagaccccagaatagtagatccactggtagcttttaccctgcacctggaaaagccacaggcactcaataacctgagagagtagttttgagcaatgaatgctacaaagccacagaggcaaagctgacgaaggccttggaagctcactccttgtaccactgtgccctggatgtgggacatggagtcaaaagaggttattttggagatttaagatttaatgtctgccctgttgggttgtgaacttgcatgtggcctgtagtcagtt

SEQ ID NO: 421737 - DNA, 584 bp, Homo sapiens
tattatagctttattatatattttaaatacctaataagtctagtccctccactttatacctcttttccagaattcttctgttttgtatgttcattttatataaaaactttggaataagcttgctcagttgaaaaaaaattgtctagttatttaataatatcaagttaattgtataaattatggtggagaaaattggcattcttgttataactgtaccttcctatccaagaacatggtatgcctttccacctgtctaagtcttctgtggttccctttctcagtgttttaaaaaatgtcttccacagaaagataaatactacatgttctcacttataagcgggagctaaataatgtgtacacatgcaagtagagtgtggaatgctagatggtggagactctggggtgggatgagattggggtggatratgagaaatgagtaaaatgcatgttactccagtgatggatatgctaaaagccctgacttcaacactgtgcagtatatcaatgtaatgaaattatgctttcactccatacatttatataaataaaaataaatctttaaataataaatcttcatatatatt

SEQ ID NO: 421738 - DNA, 653 bp, Homo sapiens
gctacccctgcactttttgctttccatttgcatgaaatatcttctttcatcccttccttttcagcctgtgtgtattcttaaaggtaaagtgagtttcttgtaggtagcatataattggatctttttttttaatccactcaatcacttcatcttttgaagaatttaatcaatttatatttaaagtaatgattgatacataaagccttacttttaacattttgctaattattttctggctgttttggagttcctttgttccttccttcctctcttttggtcttccttcgtgatttgatgttttttgttgttttttttttttgttttttgttttttgtttttttgtagtggcatgttttgattcctttctttttatcttgtgtatttactgtaggtttctgctttrtggttaccacaaggcttacataaaacatcttataattataaaagtttattttaagctaacaatttaactttgactgcatacataaactctacactgtagttttctcccctcattttatgtttttgatttcacaatttatatttttaatattttctattaattacacaatattatagctacatttttaatacttttgtcttttaagcatattagagttacaagtcatttatatatcaccattacagtatta

SEQ ID NO: 421739 - DNA, 556 bp, Homo sapiens
cacttgaggtcaggagttcgagaccagcaaggccaacatggtgaaatctcgtttctactaaaaatataaaaattagccaggcatggtgatgggcacctgtaatcccagctactcgggaggctgaagcaggagaatcgcttgaacccgggaggtggaggttgtggtgagctgagatcataccactgcactccagcctgggtgacagagtaagactctgtctccaaaaaaaaaaaggagtgtatcccttttttctcccaattctgcttgaccggaataaaatgatggcacttatatgtggtgcttaattaaacagaaaaaaatgttctaaatgactamagtcatttcagatccattcattctgtatccccgaacagactggaaactcaaaggcagacactttctgtatgtgccccactacctaacaaaacattttgaatggagtggttactcaaatattacctcccttttccctataatgggaaaggctgtgctaggtactttcacatatccctctcatttcatccttatgacgaaaaccttgctgcagaatattatt

SEQ ID NO: 421740 - DNA, 591 bp, Homo sapiens
ctagtgggaccaagagagaaagaagggagagaaattgaagatagtgagtacagacatttccacaaaaaaagcaagtccagaaactgtgagaatgagaaggatattgtattcatcaaggttttccagagaaacaaaaccaataggaaaaagatagacagctatagacagacatgaagaggtttattataaggaatcggttcacatgattatgaaggttggcgagctcaaaatctgcacagccaatatcccagtttgagtccaaagaccagcagtctgctatagaatcaggaagaactaatgtcccagttcaaaggccatcaggcaggagaattctctctcactcaggtgagagtcggcctttctgttctactcagaccttcaactgattggatgagacccacccaccttatggaaggcaatctgctttacttaagtttaccagtttaaatatcaatctcatccaagaatacyctcacaaaaacactcacaatgtttgaccagttatctagatatcccatggcctagtcaagttgagaaataaaattaaccattacagatattgaaatagaaaatattaaaatcaccaagact

SEQ ID NO: 421741 - DNA, 585 bp, Homo sapiens
gctacaggccttatagaaagccataatgactgatttacataagctcaaattcagtttaatgaagcatggcccattttctttcatcagtcaacatcaggagtgagttataattaagagcctgactctatttctaatgtttgtctgctgatgactttcaagtgtcaccatttgcccttctcctgtcccacatgtgagcacactaataagaaagctygagtattccttcctttggccccagcaggaagttcagaccacataagcctgctccagtgagttgtcactttaccccagcccccaccgcccccatcacaataaaaaccaagccagtctcctttcccctgctttcacaaactattttcagacctgcctgagagcctgccttactcttcttagaaagcttcaatgtgtcagtaataaaccacaacagtttcaatattatattccgattctctactgagcttggagtcttacctaaaacttctacctcaaaagcaataattaaaatgaaagagtccttaatttccacactaggcagtgagaagtagctttcaaaatacaaatgtacaaatggcaaaagataaggat

SEQ ID NO: 421742 - DNA, 603 bp, Homo sapiens
aacaacctgtctaagttttggatcattttcttggctttggcaaccagacttttggctcatgggcttgagttagtagttaagttccagttctattcatttgtctagttttgttataaacacctactttatgtgtttgggagagttgttttttttttttttggtggtggggggttggttgcttggtttaattttattttgccatacttcctgttcacatatgattcattctcccgtttaggcaacactttaggcaatttaggacaacgaataaaaatgtcaatagttttgacttttgagtttctaagacctgggatttagaacttcaaaagcaaattttaaaaaggagatcaggaaagaatgtcagcaagatggtggaataagaggtccccacctgatatccccccacagtagcaacaatttggcagccattcatgttcaaaagtgcctttgtgggagctttggaacaaaagtaggagactgcataaccctgagtagagctcaagaycaaggaaggctgttttgagaatgcacactcatgcccaagttaggctcattgaccatggtcctaactacaaactcagaaatagccccattcccctttgg

SEQ ID NO: 421743 - DNA, 520 bp, Homo sapiens
attttgttctcttcgttgataaacattaacagtgggaatggatgacagggtaagtgttatccccagcggataaaatggtagaagagatagctagagcatatgagtgatgcaatcaagaagtaaatacaagtccgccaaacacatgaggacattatttggagactttttgcttgcatatgttcacataacatttcagctgagtaatgcaagactttaacttatgcatatctgtgggayagaggaatctctcaaagaatgaagagagactttattcaaaagtctacagtggaaaattagtcttcacaatgggcttcctttacagaaaactactgggttggcagtatatattctatcacacatggttttctagggtttgagtcagctggtccaactaggaataacaattacagcactgtgcaacagtaattgcttgctgtggcaatattgaagcaaagtcgtgtgtctccctcccaccccaggaaaaaatttttaacaaaagggtatgactatgacatctttg

SEQ ID NO: 421744 - DNA, 555 bp, Homo sapiens
ccagcggataaaatggtagaagagatagctagagcatatgagtgatgcaatcaagaagtaaatacaagtccgccaaacacatgaggacattatttggagactttttgcttgcatatgttcacataacatttcagctgagtaatgcaagactttaacttatgcatatctgtgggatagaggaatctctcaaagaatgaagagagactttattcaaaagtctacagtrgaaaattagtcttcacaatgggcttcctttacagaaaactactgggttggcagtatatattctatcacacatggttttctagggtttgagtcagctggtccaactaggaataacaattacagcactgtgcaacagtaattgcttgctgtggcaatattgaagcaaagtcgtgtgtctccctcccaccccaggaaaaaatttttaacaaaagggtatgactatgacatctttgactaccatgtcaatgttcatgaacaatgtttcagcatacataaatgaaaggcagccacatgaagagcaacattacaatgtaagaactcctaacaaat

SEQ ID NO: 421745 - DNA, 577 bp, Homo sapiens
taactgcagctttgtttcctttgacctacatctccttatctatcttccaccctgaacccctgatacccatccttctactctttgtttctatatattcaatttttaaaacaagattccacatataaataacattgtgtaatattcgtccttctgtatctggcttagttgacttaaagattcaactatgtataaccatgtccttcaatttcagttgagaactccccctttcacctcactagaacattaagaccatttaacttcaacttctctaccttttatctcaaacatgtattrtatctacttatcttcttattcctttttgttttcttaggaaaactggtacattttttataggtcttattcttttctccatgactgtacaggaacttgttccattaatttactcccacttctttggtatgtttcaactctttccttattggcctctttcttgtaagctacaagtcttccttaccctaaaaataccttcccgtggttctgattatccctgtacacctagtcacaatcttacagttctccttatctcctcttctaagtttctcagaagggcagtaca

SEQ ID NO: 421746 - DNA, 577 bp, Homo sapiens
taactgcagctttgtttcctttgacctacatctccttatctatcttccaccctgaacccctgatacccatccttctactctttgtttctatatattcaatttttaaaacaagattccacatataaataacattgtgtaatattcgtccttctgtatctggcttagttgacttaaagattcaactatgtataaccatgtccttcaatttcagttgagaactccccctttcacctcactagaacattaagaccatttaacttcaacttctctaccttttatctcaaacatgtattgtatctacttatcttcttattcctttttgttttcttaggaaaactggtacattttttataggtcttattcttttctccatgactgtacaggaacttgttccattamtttactcccacttctttggtatgtttcaactctttccttattggcctctttcttgtaagctacaagtcttccttaccctaaaaataccttcccgtggttctgattatccctgtacacctagtcacaatcttacagttctccttatctcctcttctaagtttctcagaagggcagtaca

SEQ ID NO: 421747 - DNA, 522 bp, Homo sapiens
tgaataatgctattatgtctcactttatgaatatggacatagatcagctgttttagataataaaaaatgcacttccatttcaaaaatgtaattctaaaagtaatatttatatgtaatattcagaaaactaatatggttgttaaatatgattgaaatttccaagtagcaaccatagatcatgcataaccagtacatgactggctcaggaccacacaagctgttgaggtccctggcaatcccaatcagaaaatcagtttcaccaagtttttgcttttagacttaattcatttcacaatatattttgtctctatcttatctcgtagcccatgaggttcaaacctatcctttcccttttaatgacaagaggacatttgccctacactatgtyctgttcactgatgcaaacaataatccaaaatcttccttgatcttcatccttaaatttccttctgcaaccacctgttatgagatcagatacttggttttgaaagtagtcaaatggtgatgacatctgtaggcaga

SEQ ID NO: 421748 - DNA, 579 bp, Homo sapiens
  misc_feature (1)...(579): n = A,T,C or G
nnnnnnnnnnnnnnnnnaatttcaaacaattagattaagcaaagtcactcattggtgtcactcaatttcacattcttgttctgagatacttccagatccatttgtaagcatttgcctgtatatatccatatactaaaatatatacacatatattaagacacaaaaatactgaggtttatatatagacatgtataatatatctaagatgttcttgaatgacacaaactggaggaaaaacaatgaatagagcgtgagctccttaatgtaaaatacaaaaaacaaaattattttactaataaatggtttgatactgatatagttaggttttgtgtccccacccaaatcacattttgaattataatccccataatccccacatgtcaagggaaagaacaggtggagrtaattggatcatgggggcagttcttccatattgttctcatgatggtgagtgagttcttatgaggtctgatggttttataattatttgattcctcctgtgttcactcttcttcctgccgccttttgaagatgatttgcttccccttcaccttcctctgtgattctaagtttcctgag

SEQ ID NO: 421749 - DNA, 622 bp, Homo sapiens
aaatcagttttcctgggtacacttctgggaaaagacaaaaccaaggtactgtaatacagctgatgcttgtctcagcctcttaaatgaatcacagtgaataggaaacactagtaagttgttgaaattgatgtgatgtagtcagtaaggaagacactaactaaagagaactttaatatggaaaagtacatctcttctgatccccaatctgaaattaaccagtctgaaatgtgtgttaacccagaataatgcccttttcatatgactgtgaaaaggctgtaaatatcattactatttttttatttcctaaaatatatagtatgattcttttcctgtaaaaaagcaaagtcgcagtcaacaacaatttttaaaarccctctctattacagatattttcctcaggatatagtatttttctacattgtataatgatagttaacataaaggaacagagtctgggataggagagaggcattttcatttctttcctttatttacttttaaaaaacaggaaatcagaggtatggcataattttccaaaatcttttaaaattaaaattaatgaataaatattacttctaattagtcaatgttataatttgttaaataaatactatcacaacca

SEQ ID NO: 421750 - DNA, 599 bp, Homo sapiens
  misc_feature (1)...(599): n = A,T,C or G
atgtgagactgtgagacctgaattaggggcctccttgaaagagcttaagtgtggccattcttgttgatttttctgtatgaacatggaatcagcatgtctaattaaaatataaaacaaatcttttgcttttattgcttttgttttattaattaatttaggaagacttgtcatctgtatgagtttatatcttcctatatacaatcgtcatacctctcaattgttcaaggcttagttttcatccttctgtaggcttcaatttttttttttcagagaagtcttatatgatcctacctatatggggaagggtattttatcttttgtcattattgttgttgtcatattgcttttacaaatggttggtttttgtccagcatttgttctgtcaggtggttctgtgattgattgaaagctcttgcactagcagttccatttcaatgtgarctttgcaactttaggagctcaggtgacattgttcactagtgagttctctttctcccttcttctcttcatttctttgctatcagatttggccagtctcaaccagtgcaagcaaagtgacaccaaaatgtcttaattatttccctgattatttacattnn

SEQ ID NO: 421751 - DNA, 580 bp, Homo sapiens
cttcaccaccaaatacctatgttagaagaccttgagaataaatgattgcctaatagcaaatggcatcctacttcttgactacacttgcacctgaggatacaaaaggacaaggtgtatttaaccttagaatgtctctataagatgaaaacaagtaagtgcaattatctccacttaaagtctaaagttggcaaacacttataagataaatgacttgctcaagactgactaggargaagagttttagtataaaaacttaaactcattatctcttttttacatgggactgaatggaggattgagaatggctctttatgtggaagataacatatttaatatattttcttttgttttaaggcagtattgaaatgaaaaaagaataaacttctagattctgatagtatacatggtaataatgtaatcattttagtaataattaagctatattgggtaatttttgcatgccaaacagcgtactgcatatttacatgttaaatcattccttttatgaaattttaacaatgacaatgatgtaatagcaatgattctatgaagaatctgctaagataaagaagcctaggcc

SEQ ID NO: 421752 - DNA, 580 bp, Homo sapiens
cttcaccaccaaatacctatgttagaagaccttgagaataaatgattgcctaatagcaaatggcatcctacttcttgactacacttgcacctgaggatacaaaaggacaaggtgtatttaaccttagaatgtctctataagatgaaaacaagtaagtgcaattatctccacttaaagtctaaagttggcaaacacttataagataaatgacttgctcaagactgactaggaagaagagttttagtataaaaacttaaactcattatctcttttttacatgggactgaatggaggattgagaatggctctttatgtggaagataacatatttaatatattttctttygttttaaggcagtattgaaatgaaaaaagaataaacttctagattctgatagtatacatggtaataatgtaatcattttagtaataattaagctatattgggtaatttttgcatgccaaacagcgtactgcatatttacatgttaaatcattccttttatgaaattttaacaatgacaatgatgtaatagcaatgattctatgaagaatctgctaagataaagaagcctaggcc

SEQ ID NO: 421753 - DNA, 553 bp, Homo sapiens
attaccaatatgtagggaatgggcagaagaaaatgaggtcactaataacaaatcccccaaaacaaaatgtttcaagataaaggaggaaaaccagaagaaactggtacaactaaagctaagctacaaagaacatttcaaaggatggagtggtaaaatggtcaaatgctatagggaaggmaaatacaattaaaaagaaagtattggctttaaatttaacaacaaatgtgattattctttgatggcttttaacatagaattatttgcaaatgatagtggagtagtgagatggtggccccaagaatcaatgtctccatgggttagtgccatgaaagggaggaaaagcaatagaaacagcaggaatataagttcctacaagtagattgactgtgaaagtgtgaaagagtggagagaactggtagtactttgcctatggttaatattcagtaaattattagtggaaaatggcaagaagaggcatgtgctacttaagcttataatctgttttgatgttcttcactgtccctttatttgttggcaaagcttctcaacttac

SEQ ID NO: 421754 - DNA, 476 bp, Homo sapiens
ggttggcatagcagacatggatgagrgggtggcttgtttctcattggacaatcttttttaaagtgtcctagtaaaccacactgataacaagccctcacgggtaattggcctgctccattttctgtcctctctgaaccaccaaagtttgtttgtctgagggccatgactaaggctgcggcctttctctgatctcgcttttccttttgggcctgttcctcttggccctattatagaacaccgaggttgccaggtttaataatgcctccagattttgttcagggcccagggctcgcttttggagctttctcttgatatctgtggctgactgggtaataaacttatcttttaggatcaattgaccctcgaaggagtcaggtgacaggggagcatatttccttaaggcctcttgtagctgcttgaggaaggcagaaggattttcttcctttcccggagttatggtagacatcattgaatat

SEQ ID NO: 421755 - DNA, 551 bp, Homo sapiens
aaacactttaataccctctgattaggtgccctccatatggcaagacacaactgaaatttagacaataaactctctaggaaaatttagcttaagaaaaagaatgatatgctattaagtagataactcaaaaagaacaatttccttcaatatgggattttactattctaaaacaacagtccagtcttcagataagatggttttccttgagaggagaaattcagagaatgaatttttcatcatatctgtaaatagaaatagaatatgtggtgagttatattaaatatttttgaagaaaagaaaagctcttatggtagaacacgttttactattttctcttcgtattagacargctcacaatgttatttatgctttcctgttactgacatacctatccattgctcttggtttttaagctacaaagacatttttattactaaattgtattttgttttgtggtattactgaagatatggcaatgcaattagaataaaaggctttcacataggttaaaatttggtcattttccttggtttaatgtattagaagggaag

SEQ ID NO: 421756 - DNA, 565 bp, Homo sapiens
ttattcctctctctttttgagttgaagaaataagtttagaatagtttgtcaacattttttaacaagtggcaaacacctttcaagggtaagtggcaaaaaatagaaattcaaatatagctctgtttagcaaaaaatatcaacatataaggagaaaaaaattctatttgragggaaacatagcctgatgagatatagccagttaacaaatttaaaggcatgtaagatattcagatattcagagcactgggacaccagtctatttatatatgaggaagcagaaacaaacagaatagaatcaaatcttgctctttgaaccatactgtcagtgagagtcagggaatttgtaaaataacaaacctgccactggggaaaaaaacaaaacagaacagggatccactgaaaagagattcagttctcaaactatattttaattatgtactcttttgattatatgtttcctttttcaaaattctacatataaatgttacagaggacttaaaacagttgtcttgcttgcaaacggtgacttgctgctgtaccctcagaacctatctgatttttttag

SEQ ID NO: 421757 - DNA, 565 bp, Homo sapiens
ttattcctctctctttttgagttgaagaaataagtttagaatagtttgtcaacattttttaacaagtggcaaacacctttcaagggtaagtggcaaaaaatagaaattcaaatatagctctgtttagcaaaaaatatcaacatataaggagaaaaaaattctatttgaagggaracatagcctgatgagatatagccagttaacaaatttaaaggcatgtaagatattcagatattcagagcactgggacaccagtctatttatatatgaggaagcagaaacaaacagaatagaatcaaatcttgctctttgaaccatactgtcagtgagagtcagggaatttgtaaaataacaaacctgccactggggaaaaaaacaaaacagaacagggatccactgaaaagagattcagttctcaaactatattttaattatgtactcttttgattatatgtttcctttttcaaaattctacatataaatgttacagaggacttaaaacagttgtcttgcttgcaaacggtgacttgctgctgtaccctcagaacctatctgatttttttag

SEQ ID NO: 421758 - DNA, 492 bp, Homo sapiens
ccataaccacgggccaaataatcctcttttctttataaataacccagcttcaggaagtcctttatagtaacacaaattgactgagacaaactttgactaatacagtattcggtactaacagtagttctggatgaacacaattgtaagaactaattttctgaatcagttctggagtttctggaattggctaatctgattagatttaaagacactaatgactctatttccartagtaaagagagcactaatagtctatggtatgatctattcatagagatactcaaaatatctgtactggatattctgaatcaaccaattataggaagcaaggaacaaagtgattctatatataataattttgaactttttttaaactcaggaatttaacgtcaggtggttccttctaatgtcactggacaacatggtgaaataaaaggatgagctgacagattcaattttcagttctagtgatgaataaatgatgtaagagct

SEQ ID NO: 421759 - DNA, 591 bp, Homo sapiens
tattgtttggaaaattaagtcctctctcaaagaatgaaggttttcacctttttatgaaatccttgagttatcactttgattaaataaatgactactttaaaatgacctgtgatcctattttgtgatatcaatcaagtgttttaaaccttcgatatttgacaaactgtccaaaatcaaattattaattatgtctttttctggactaattaatcatttaagatattaatcctttcaatccttaaagtccaaaaactacatatttggttaatttgtataaaaattatacaagaaggattaccaaacagaaaatggtgtttggttttctttgcactgtatttgtataaatatgttattggaatgtgttccaaaattatgggaaactcctataattctgatatgacttagtgtatgttatcagtaataattatacttgttatgttaaatcattctgtgccgcagaggtaacaggttttcttttcaattgtgtctttgactgkggctgccctaaaactttttgtaatccagggacaattattgtcttgttttggtcctctttagaaagtgggtttataatcagctataaaactctaa

SEQ ID NO: 421760 - DNA, 570 bp, Homo sapiens
gcaaatgtcttaagagtttggtagaaagaattttctttcatacataggagtcaactagactggaaagaaaygtgtggagaagtagaatgaaagggtgtcctgatagaaaagtgaatcagagaatgttttatcttaaggccagcctactctcaggatgggatattacagaggggttgtttgctgatcaagcttagggtgggtcgaagtcttggggaaaggagaaaattttaaccacagtttagttaaaaacatttttttcccactggtcaatgaggttaaacacttagctaattatttactaggcaaaggatgggaatgtggagggtctgtttctgcccttgtcataggtaaagggagccacgcatgagtcatatctatggctatgggcaagggtatatctttgcagtgatacatcttctggaacacaaaagggtgaagagatttacttaactttcactgttttccaggagcacagggctcagataaagtttacattatcagtaatgctgcaaaattgtgaatatgctgagatgagaaatcaaatgttaatcatctgttctcctggaagtt

SEQ ID NO: 421761 - DNA, 570 bp, Homo sapiens
gcaaatgtcttaagagtttggtagaaagaattttctttcatacataggagtcaactagactggaaagaaatgtgtggagaagtagaatgaaagggtgtcctgatagaaaagtgaatcagagaatgttttatcttaaggccagcctactctcaggatgggatattacagaggggttgtttgctgatcaagcttagggtgggtcgaagtcttggggaaaggagaaaattttaaccacagtttagttaaaaacatttttttcccactggtcaatgaggttaaacacttagctaattatttactaggcaaaggatgggaatgtggagggtctgtttctgcccttgtcataggtaaagggagccacgcatgagtcatatctatggctatgggcaagggtatatctttgcagtgatacatcttctggaacacaaaagggygaagagatttacttaactttcactgttttccaggagcacagggctcagataaagtttacattatcagtaatgctgcaaaattgtgaatatgctgagatgagaaatcaaatgttaatcatctgttctcctggaagtt

SEQ ID NO: 421762 - DNA, 597 bp, Homo sapiens
taaacacaagaacacatcttgaacagtattaggtttaaatttatttccaaatgacaaactaaaaaaaagtatgcaaagcaaagtagataactttacatgaaccttgcccagcacagtgatttaatgagatgccctttcatttggccttgagttagagcaaaagcaaaactgacaactcaggtggagaagtggtaaatgagaaacgaaacttggcctgtggtttcatgtttaaagcaaaaatacagattcagagcacttgaagatagatgagaatggctaccttatttctaataaaaaagatgtttatgcaattcagacctgacttgtgtatgttaatagaaatagcttaaaaatcggaaaatcagtaaagaattgagtaaaagtcaattcagaactgtataacttagtcctcaggatttcaaatcaatgtgtctttcctataataattcaaacatagaaaagaatactgccaaaaagtttgtaaatttatatttagcatgatacataatattaaaaaaaacaaaatatggttttacctattaaactgacaaagagtgaaacattaaatactaagkttgaccaggattgggtctgcgg

SEQ ID NO: 421763 - DNA, 540 bp, Homo sapiens
tctttgttaaataatccaggtctgtctgtctaactctgtttattgagctgttcctcttcaggaccataattattaatttctcttggaattagtacttttcagaacatatttagggaaattttaccttatcatataactaaaggattgtattasagaatcttggcaaagctttggtggggaactagtttataaggtaagtcctttaggatttcaggtaaaagaaaattcaactcaaacaggcttaaataacaaaagaagtgtacaggttcagttacttggaaggctcaggtgtaggctggttaatctagaagctcagtcatgccaacaaggactccatttttatgttttgttttgtttcattttgcttagttttgactttgtcttttctttttacagtcaaccatgtaaactttattctaagtctggctctcttgtttcatagggtggcttcaatagggcacagagaaagagagagcaatgctgtcttggcattccaaacagcctggttggttggtcacatgcccaccttatagtgaagtc

SEQ ID NO: 421764 - DNA, 542 bp, Homo sapiens
tgggaattgtgggagttacaattcaagatgagatttgagtggagaaacagccaaaccatatcacatgagtaatgatgaagggctacacacacagtaaaaataattacataggcacaatccctgcttcttakaaatgtatgtaatcagactattaaaaaagaaagtaaaatggtataggatatttatagcacattaatataattgacttatagtaaacctaatagaactttatccttcacaatacttcccttctcaattttttcttctatttaacttcatatttaaatacataacctttatttaaagggaaattactgtttttgagatagaaagatttattactctccctcagaaaatatacaccaagaaagtaacttgtttaaggactgatagaaaacaatgaagctcaaaatgtaataattatgagtatgactatgtacttttacatttgaaaaatgtgtattatggataaccaactaataattagctcatagacaatgaaatgccagtggcataatctaaatatatttatttattcatcc

SEQ ID NO: 421765 - DNA, 609 bp, Homo sapiens
attctgtctcccaagctaaatacttaaccaccatataccatgctgctccttgtggatgccctgattccagcaatctctccaaccagataatacattcttcttttatatagagaagcaaataaggctgggagatactacaagagttgactccagtattcccttctaaaagagagcataaactccttccatggaagttaagcaggaagaataaaggtttccaacaactaacatttgyagagacttggaaaatgtgtggcagggtgttaaaagatcaataattagagatgcttagaattataaagcagttgaagtcaaacagcatacttttttatagaatcaacttagtagttctgaacagccatccttgatatcttaagattaagaaaactggacagcacagtctatgaagatagggctaaggattgcgaagggaggtgtcataggaaattatgggagcaagagaaccaaagatgtttgtgaacatacaatgacaatacaagctaagggggggaaagaaacgaacaaaatgcggaagactgggaggggctgaaaggctgcagggcaggtgaggtaaagctcacatactgagacactaacactggaccagta

SEQ ID NO: 421766 - DNA, 494 bp, Homo sapiens
tcaaggacagatgggaattggattttgtctggtggacttgattggcaagggtcgaagaaggctgcttagctgagaaaacagcayatggcctaattatatccacaacacagggatttttcagtcctctctttaaaaatgaactcttccttgcatctatgaagcaatgtgaatcctatcattaacacttccttctttgttgctgacaaaaattaactcctaaacccaccaacagagcttgaaatgtcacagttccctttagagtgacacagacctcttcctcctcctggcaaaatcttctgcatgaatgaaggtggagagagccttagtgaggtgactatctgatgtctcagtgctactcccaaagtcatagtttttcaggcaagggcacaagcagtggacaatggcccggcggatgtagctgtcgaagatatagtaaatgaaagggttgacacagctgttggcaaatgccaagggtccactcacctccataccaa

SEQ ID NO: 421767 - DNA, 494 bp, Homo sapiens
tcaaggacagatgggaattggattttgtctggtggacttgattggcaagggtcgaagaaggctgcttagctgagaaaacagcacatggcctaattatatccacaacacagggatttttcagtcctctctttaaaaatgaactcttccttgcatctatgaagcaatgtgaatcctatcattaacacttcyttctttgttgctgacaaaaattaactcctaaacccaccaacagagcttgaaatgtcacagttccctttagagtgacacagacctcttcctcctcctggcaaaatcttctgcatgaatgaaggtggagagagccttagtgaggtgactatctgatgtctcagtgctactcccaaagtcatagtttttcaggcaagggcacaagcagtggacaatggcccggcggatgtagctgtcgaagatatagtaaatgaaagggttgacacagctgttggcaaatgccaagggtccactcacctccataccaa

SEQ ID NO: 421768 - DNA, 538 bp, Homo sapiens
tctgtctgaaattcagtgttgtacattatgtgaaggttgaagttcattttaactacatggttatccaatacacagttgttctagmaccatttgttaaaagaccgttgaatccattaaatttccttggtgcctatgtaaaaaaaaatctggtgaatattgattttataatatttacagtagtataaatattgaaatactgtagttttattgtaaatattgaaatgttgattgatatctatcaaaaatcatattgaaattagatttggggttgctgtgaatctataaattagtttggcagcttaatgatattgagtcttcatgaagatgaacagtaattcaggctttcattttttgctgtgatgttccatagtttttgttgtaaaggtcttcagtatttttgttacctatattgcatttcaaaaaatatttttatttgttcatgatttttcttacttctttcagcagtgttgtgtaattctcattgtagagatttttcccctccttggttagctgtaatcctaggtattttattcatttt

SEQ ID NO: 421769 - DNA, 614 bp, Homo sapiens
atacactggtgaagctgctagagaacttggcagacattctacttttagaagcactccacttagatttatatatcacattttacataatgaagacttctttcccacctcttactgaagcacaataataataatgataataataagcttcttaaaagaaggatggggatatatcaggaaggtttggtgaattgagacaaatagcaagttaaggatgttgcaagctaaaagatggggatgactacacttctgatacaagttaaaagacttaaaattttgcagcccaaattaaatcctgagtatattgtttgaaagtcccatattctctgcattgttgagggaggcactaaatctcaccatatggctgaattgaacagtcttttccctggattgtactcatgtggagcttcatgtatggctatgatcaacttctcaatcttgaaattaagatacaattttagactgctatttgagamattgtctagcacatgggcaatgtttcttatttttcctatggtttgaaattatcggaaaagcaaaacttcatactcatagactgtttttaattttttttgtttgtttgtttctgagaagggctgacatgttcaagaaaacct

SEQ ID NO: 421770 - DNA, 614 bp, Homo sapiens
atacactggtgaagctgctagagaacttggcagacattctacttttagaagcactccacttagatttatatatcacattttacataatgaagacttctttcccacctcttactgaagcacaataataataatgataataataagcttcttaaaagaaggatggggatatatcaggaaggtttggtgaattgagacaaatagcaagttaaggatgttgcaagctaaaagatggggatgactacacttctgatacaagttaaaagacttaaaattttgcagcccaaattaaatcctgagtatattgtttgaaagtcccatattctctgcattgttgagggaggcactaaatctcaccatatggctgaattgaacagtcttttccctggattgtactcatgtggagcttcatgtatggctatgatcaacttctcaatcttgaaattaagatacaattttagactgctatttgagaaattgtctagcacatgggcaatgtttcttatttttyctatggtttgaaattatcggaaaagcaaaacttcatactcatagactgtttttaattttttttgtttgtttgtttctgagaagggctgacatgttcaagaaaacct

SEQ ID NO: 421771 - DNA, 574 bp, Homo sapiens
  misc_feature (1)...(574): n = A,T,C or G
aaagcttgagcttccagtggaatcattggtgacttctcttctatgatctggataggtaacaggtttgtttkttttttttactgagcacatatgaatattatttttaaggaaaaattacttttgtttactgcttttacttggaaaataagcagagtgctggaagcactgggttagtgttaagtgaactgattctgtgcactggcacttaacctttggaggattcagtttgttcctatataaagtaaagggtataaactggatgatttctaaggttcttgatatgtgattctatgaaagaaaattcttggaatgcttagcatataaaggcttatattcttaagtccctgcctacctaacttaaatgagatgttttagaatatgcttagcctatatantgctatactagagcatcataaacaatgtgtataaatagatttacttccaaaccacttttgggtgtgggaccgtattaatattacatttactctaaatattttagcaatatttataccaagaataatattatgatatcagctcagaaaattaaaatttaaagggcactgctagtataaaa

SEQ ID NO: 421772 - DNA, 574 bp, Homo sapiens
  misc_feature (1)...(574): n = A,T,C or G
aaagcttgagcttccagtggaatcattggtgacttctcttctatgatctggataggtaacaggtttgtttgttttttttactgagcacatatgaatattatttttaaggaaaaattacttttgtttactgcttttacttggaaaataagcagagtgctggaagcactgggttagtgttaagtgaactgattctgtgcactggcacttaacctttggaggattcagtttgttcctatataaagtaaagggtataaactggatgatttctaaggttcttgatatgtgattctatgaaagaaaattcttggaatgcttagcatataaaggcttatattcttaagtccctgcctacctaacttaaatgagatgttttagaatatgcttagcctatatantgctatactagagcatcataaacaatgtgtataaatagatttacttccaaaccacttttgggtgtgggaccgtattaatattacatttactctaaatattttagcaatatttataccaagaataatattatratatcagctcagaaaattaaaatttaaagggcactgctagtataaaa

SEQ ID NO: 421773 - DNA, 649 bp, Homo sapiens
  misc_feature (1)...(649): n = A,T,C or G
ttagttttgaaaatactactttccagcaactctaaacattaaaagcagtcatctttgtgaaatgctcaaactttgagatgctcatgagaactgaagacaactgctaaaatctcagattcatgtctctcatctcagcatacagtggggacactaaattagtgctaaggagagtttcaattttttatttttaaataaattcagctaaatttatgttcaataagaatgtgtataagtaactttgtttaaagtctttttaaataatctaataaattggtccaaaaagtaaataattttctgctttaaaacaaacaagcaagcaaatatcagtactcatgtattaatatttatctctctttccatttttgtgtctatcacctattaattaaatttttatggttaagtgctttcctaccatcacctccttaactctttgtctctttaccctgagcyctgacagttttcttcattacacatgtcactgcctggcattcattagtgtgtgcgagtgtgtgtgtgtgtgtgtgtgtgtattcatttgtttgtgtatcatctatatctccacagagaatgcagattttttaaggtaaaaaatgttgttggttttgttaccatcatactcagtactcanaacacatactggtatatgata

SEQ ID NO: 421774 - DNA, 430 bp, Homo sapiens
caaacttaaacttactgttagaagataagttctcgagataaaaggtagcatggtgactatagttgataatgmtaatgtacagtcatgcactgcataacatttcagtccatgacagatataacagtggtcctgtaagattataatggagccaaaaaattcttattgcctagtgccatcacagtcattgtaacattgagagcaacaaattactcatgtgttgatatgatcctggtgcgaagacacttactgcgttgccagtcacttaaaaagcaaaattaaaaatcagaaaaccttagcaatagagaaaagcttacagataagaatataaagaaaaataactttgtacaaatatgcaatgtttgtgttttaagctaagttttattataaaagagtcggaagttttaaaatattgaaaatttataaaatggtt

SEQ ID NO: 421775 - DNA, 430 bp, Homo sapiens
caaacttaaacttactgttagaagataagttctcgagataaaaggtagcatggtgactatagttgataatgctaatgtacagtcatgcactgcataacatttcagtccatgacagatataacagtggtcctgtaagattataatggagccaaaaaattcttattgcctagtgccatcacagtcattgtaacattgagagcaacaaattactcatgtgttgatatgatcctggtgcgaagacacttactgcgttgccagtcacttaaaaagcaaaattaaaaatcagaaaaccttarcaatagagaaaagcttacagataagaatataaagaaaaataactttgtacaaatatgcaatgtttgtgttttaagctaagttttattataaaagagtcggaagttttaaaatattgaaaatttataaaatggtt

SEQ ID NO: 421776 - DNA, 580 bp, Homo sapiens
cagtctatcttgggacttcttccttagtgcttctaagctgtcatgttactttgttcttatttttcaccgagtcttggcagctgtcaagcaagacttgatatagtgacaatacaattaattaataggcttgcacagaggctgggaggatgttggctgcttcctagcacataagttcacctgtcttcacgaagcactaattaactattctgtttggagagtgctccatgatgtgacagaatacaagggccttcagacaagattttgatggagagttttgtctggcttgtccaattgtgcctataaatctcttagggctctaacttccttatgaagcttgacatcacatagactggcacaggcagattcaatgtaacaggctctcctggaagagtgtatctttcctttgggatccttattcctttctgtgattatgcattctgtgttttggtgaatasttacatacctctctacattattagctccatgagactagctcacctttgaatctgtggtacctagcatagtggctgacatatgaaggcatttggtgaacattagttgaaaaaaaattaataaataa

SEQ ID NO: 421777 - DNA, 580 bp, Homo sapiens
cagtctatcttgggacttcttccttagtgcttctaagctgtcatgttactttgttcttatttttcaccgagtcttggcagctgtcaagcaagacttgatatagtgacaatacaattaattaataggcttgcacagaggctgggaggatgttggctgcttcctagcacataagttcacctgtcttcacgaagcactaattaactattctgtttggagagtgctccatgatgtgacagaatacaagggccttcagacaagattttgatggagagttttgtctggcttgtccaattgtgcctataaatctcttagggctctaacttccttatgaagcttgacatcacatagactggcacaggcagattcaatgtaacaggctctcctggaagagtgtatctttcctttgggatccttattcctttctgtgattatgcattctgtgttttggtgaatacttacatacctctctacaytattagctccatgagactagctcacctttgaatctgtggtacctagcatagtggctgacatatgaaggcatttggtgaacattagttgaaaaaaaattaataaataa

SEQ ID NO: 421778 - DNA, 580 bp, Homo sapiens
cagtctatcttgggacttcttccttagtgcttctaagctgtcatgttactttgttcttatttttcaccgagtcttggcagctgtcaagcaagacttgatatagtgacaatacaattaattaataggcttgcacagaggctgggaggatgttggctgcttcctagcacataagttcacctgtcttcacgaagcactaattaactattctgtttggagagtgctccatgatgtgacagaatacaagggccttcagacaagattttgatggagagttttgtctggcttgtccaattgtgcctataaatctcttagggctctaacttccttatgaagcttgacatcacatagactggcacaggcagattcaatgtaacaggctctcctggaagagtgtatctttcctttgggatccttattcctttctgtgattatgcattctgtgttttggtgaatacttacatacctctctacattattagctccatgagactagctcacctttgaatctgtggtacctagcatagtggctgacatatgaaggcatttggtgaacrttagttgaaaaaaaattaataaataa

SEQ ID NO: 421779 - DNA, 644 bp, Homo sapiens
gatggaaagctctccagaggagcttctgcagcaatgctgtggttccacaggatgactgtgaaaataagctcagggttacacagacaccttcacctccatcctttgtgaagggacacatatagtggaaaagggacagatgcttttccacctgactgaacactaaatagaatgaacacatttgaagggagcagagcagtgtgaagactgcctgacagcaacatggcatcgcaaatatggtgagggactgaaatcccttctggtcaggagaakcaaaattccatggatgggaatttacctttccttttaaccctcaggcagtgtggctgcaggaaactgtcttctgaagggacacaaggatcagagagtcaatcagagggtctgtcttctgattatgggtctgagcagtcaagggcaaccccactatggggttgcccagctccttcacctgagtaggggctgcaagtcatagccagggagtggttgctgagcaaattccaatgtgaggtgaaagtaaatgctattgttgtacatcagctagcagctatccttgagggcattgtgaaatgtggcccagctaagctccagcaaattagagaaggcctcacctaagtggcacattaggctcattatttagattcaaaatg

SEQ ID NO: 421780 - DNA, 568 bp, Homo sapiens
ggtctggaatgtgatctgagattctgcatttccaacaagcttttaggggatgaccatgttactgctctgcaggtcacactttgagagaaaggttttaggctgctgtttcttaagctattgtgtgcctaagaatcacctggagagctaacaaagatgcagatccctgaattctattagtaaaaagtctaataaactgttcctatgagaatctggaagtgcaaagcttaattttattattattattattagtagtagtagtagtatactttaaattctgggatacatgtgcagaacatgyagggttgttacataggtacacacgtgccatggtgatttgccacacccatcaatctgtcatctacattagttatttctcctactgctatccctcccctagcctccccctgcaacaggcaccagtgtgtgatgttcccctccctatgtccatgtgttctcattgttcaacccccacttatgagtgagaacatgtggtgtttagttttctgttcctgtgttagtttgctgaggataacggtttctagcttcaaccatgtccctgcaaaggaaa

SEQ ID NO: 421781 - DNA, 597 bp, Homo sapiens
actttatcttaaggtctttgtagttataatcaaattaagagagtttgtaattgattagaaggggctctaatctaattacyggtgtcttataaaaagaggaaaatttggagacagacacacagaaagaataccatcacctccattaaggcagagagtgatgcatctacaagccaaggaaatcaaggattgccgacaaccaccagaaaccaggagagaagcatagaacaaattctccctcacagcctccagactgtgaaggaatacatttctggtgttgtaaggcacccagtttgtgatcctttattatggcagcccttggaaactaatacatgatacgacctgaagattgaatcttgcatgggtccctctggtttttcaacatggaaagacactgactctttatctccaactggtatgcagatttgtcctatttacatattttgatggtaagcttagaactggaactgtagagctggaagcagatttggaacctattttcctttatttctgtgagtcttttactttagaaaaaaatgcattagattaaaagaaaatgaaaaacaaaggccatgtaaataggtaaaaatagactgatag

SEQ ID NO: 421782 - DNA, 568 bp, Homo sapiens
  misc_feature (1)...(568): n = A,T,C or G
tgactctttatctccaactggtatgcagatttgtcctatttacatattttgatggtaagcttagaactggaactgtagagctggaagcagatttggaacctattttcctttatttctgtgagtcttttactttagaaaaaaatgcattagattaaaagaaaatgaaaaacaaaggccatgtaaataggtaaaaatagactgatagaaatacccatgtaaagagagatacggaaaatgtgcttgtatgcttcaatctgcccaagaactggggtctaaggggtagggatcaataaataacactcttttccacacncaagtccagaaacattgagagatatagaacaggagtcaggtawatggatttctaaaatattacctttattgcttatgaagttattgggaggatgtgacttagtgtgaagaccaactagacatgcaagcactttctcttcctgtactcctagtccaatcatagcactcaagggaaaagtcaatctgtagacaagttgcacataccccaaatttctgctttacactgagaatgggagacgaagggagactgacacac

SEQ ID NO: 421783 - DNA, 585 bp, Homo sapiens
aactggaaactgtactttccttgataccaagccagaggtttcttgacttaatcgactaatatttcatagtcagtacttctcactgcagaaatcatagctgtggtcgggatcagagaacagaatccaagagcaaatgaatcttttattacaaatcaaaatagcaaattgactgagaaacatagtatctttgtactcttgagttctatgtaccttctcacagaaacagtgaaayatgtgagttgtatgttatgcatttatttaaaggaaaaacttctcaaaacaaaacatgacattcctaccctcaggctttttttttttttgtctttcatagaatcagataaagagaaagaacatagaatcttggtataaatcattttgtctagtttgaagcagcagctatgagaaataactatttgaacacccacactctcagtctctcatttgctctcttccacttctctacactgacctaaaatctccatacctatgctatggtcacacgtacaagggtccaggtctttatcatttctcatactgttagctcatcttcactctgttccaacaaatgcaagggcagccacacct

SEQ ID NO: 421784 - DNA, 566 bp, Homo sapiens
aaggaaagatacagtctttttcatacaaacaaatcctgagagagtttacccctaccaaacatgcacttcaagaactgctaaaagccgctctaactcttgaaacaaatcctggaaacacatcaaaacagaatctctttaaaacataaatctcacaggacctataaaacaacgcaatttaaaaaacaaaaacaaaaaaccaaggtatacaggcaaygaatagtacaatgaatgaaatggtacctcatatctcaatactaacattgattgtaaatgtcctgaatgctccacttaaaatatacagaattgtagaatggataagaattcaccaaccaattatctgctgccttcaagagcctcagctaacacataaagactcacataaacttaaggtaaagaggtggaaaaagacatttcatgcaaatggacaccaaaagtgagcaggagtagctatacttacaacagacaaaacaacctttaaagcaacagcagttaaaaaagacaaagagggacattatatatgataaaaagccttgtcaaacaggaaaatatcacagttctaaacatat

SEQ ID NO: 421785 - DNA, 597 bp, Homo sapiens
atttcataaagaaaaggggcttgattcaacaagaagacctaactcttctaaatatatatgcacataatgcaggagcaccaagattcatgaaacaagctcttagagacttaggaggagacttaaacaaccacacaataattctgggagactttaacacctcactgacagtattagatcactgaggcaggaaactaagaaagatatacaggacctgaatttgacacttgacaaaatggacctaatagacatctgcacaactctccmccccaaaacaacagaatatacattcttatccctgctacatggcacatattctgaaaacaactgcacaatcaattttcagcaaaaaaaaaaaaaaaaaaaaaaaaaaaagtcatagtaaccacactctcagaccacagcaaaataaataaaagtaaaaataaataataagaaaattgctcaaaatcatacaatgacatggaaattaaacaagctactcttgtatgactttagagcaaacaattaaattaagacagaaatccagaaattatttgaaagtacagaaatacaaaaactctcagagattattacaaacatttctatgcacacaagcta

SEQ ID NO: 421786 - DNA, 597 bp, Homo sapiens
atttcataaagaaaaggggcttgattcaacaagaagacctaactcttctaaatatatatgcacataatgcaggagcaccaagattcatgaaacaagctcttagagacttaggaggagacttaaacaaccacacaataattctgggagactttaacacctcactgacagtattagatcactgaggcaggaaactaagaaagatatacaggacctgaatttgacacttgacaaaatggacctaatagacatctgcacaactctcccccccaaaacaacagaatatacattcttatccctgctacatggcacatattctgaaaacaactgcacaatcaattytcagcaaaaaaaaaaaaaaaaaaaaaaaaaaaagtcatagtaaccacactctcagaccacagcaaaataaataaaagtaaaaataaataataagaaaattgctcaaaatcatacaatgacatggaaattaaacaagctactcttgtatgactttagagcaaacaattaaattaagacagaaatccagaaattatttgaaagtacagaaatacaaaaactctcagagattattacaaacatttctatgcacacaagcta

SEQ ID NO: 421787 - DNA, 537 bp, Homo sapiens
ctctggagctgagttttcaaacacctcgagtctagaagcacctgttttgggggttgaaagcagagactgagagagagactgaaaggctttcctgcagtaaagatccatacatgttaggaaattattttttcagtggttcagaagtaagcaaaagggtatttctcaactacgttagtgttttgtattcacggaaccccaattctgagtgttattaccatggaaaattctcagcaaggcttccaggttgtttcttgagcaaggtagaaataacatacaatctaataagaatggctggggctgggtgcagtggctcacacctgtaatcccagcactttgggaggccgaggcggatagatcacctgaggtcaggagtttgagaccagcctgggcaacatggtgaaactctgtctctagtaaaaatacaaaaattagctgggcatggtggcagrcgcctgtaatcccagctacttgggaggctgaggcaggcgaagcttgaagccaggaggcggaggttgtagtgagctgagatcatgccat

SEQ ID NO: 421788 - DNA, 257 bp, Homo sapiens
gaacagtgtatagactttcatgtcagtttacaacatgcttcwtctcctactacctccaaaaatgacagcttgattataatgtaattatcttctgtcatgaagcttgagcataattttatttccagatgggtttatgttgcttatatttaaactcattactgaaaaagcagtcatggagcaaaatataaataaataacctaaaggcagaccactataaattcctttaaacaggagagtctaagttgaggactacgggg

SEQ ID NO: 421789 - DNA, 520 bp, Homo sapiens
atataaaagttatgtttacactatactataatctcaagtgtgcaacagcattatgtctaaaaattgtacatactctaattaaagaataccaataaaaactctaacaatcatctgagccttcagcaaaccataatctttttgctggtggggtatcttgcctmaatattgctggctgctggctgattaggttggtggttgctgaaggctgaggtagctgtggggaattttttaaaataagatgaaaatgaagtttgctgcattgattaactcttactttcactacaattttttatccacagtagaagctcttccaaaattgtagtcaatcctctcaaacctagccactgctttatcaagtaagcttatgtaatactctaaatccttcactgacatttcaacaatgttcacatcatctttaccaggaataaattccatctcaagaaaaataactttctttgctcacccgtaaggagccactcctcatttattcaagttttatcataagattacaaaagttcat

SEQ ID NO: 421790 - DNA, 520 bp, Homo sapiens
atataaaagttatgtttacactatactataatctcaagtgtgcaacagcattatgtctaaaaattgtacatactctaattaaagaataccaataaaaactctaacaatcatctgagccttcagcaaaccataatctttttgctggtggggtatcttgcctaaatattgctggctgctggctgattaggttggtggttgctgaaggctgaggtagctgtggggaattttttaaaataagatgaaaatgaagtttgctgcattgattaactcttactttcactamaattttttatccacagtagaagctcttccaaaattgtagtcaatcctctcaaacctagccactgctttatcaagtaagcttatgtaatactctaaatccttcactgacatttcaacaatgttcacatcatctttaccaggaataaattccatctcaagaaaaataactttctttgctcacccgtaaggagccactcctcatttattcaagttttatcataagattacaaaagttcat

SEQ ID NO: 421791 - DNA, 520 bp, Homo sapiens
atataaaagttatgtttacactatactataatctcaagtgtgcaacagcattatgtctaaaaattgtacatactctaattaaagaataccaataaaaactctaacaatcatctgagccttcagcaaaccataatctttttgctggtggggtatcttgcctaaatattgctggctgctggctgattaggttggtggttgctgaaggctgaggtagctgtggggaattttttaaaataagatgaaaatgaagtttgctgcattgattaactcttactttcactacaattttttatccacagtagaagctcttccaaaattgtagtcaatcctctcaaacctagccactgctttatcaagtaagcttatgtaatactctaaatccttcaytgacatttcaacaatgttcacatcatctttaccaggaataaattccatctcaagaaaaataactttctttgctcacccgtaaggagccactcctcatttattcaagttttatcataagattacaaaagttcat

SEQ ID NO: 421792 - DNA, 438 bp, Homo sapiens
aaggctactacgaacacctttacccacataaactagaaaacctacaagacatggataaattcctggaaagatacaaccctcctagcttaaatcagggaagaattacataccctgaagagaccaataacaagcagtgatattaaaatggtaatttaaaaattaccaatgaaaaatgtccaaggccagaaggattcacaactaaattctaccagacattcaaagaagaattggtaccaatactattgatgctattccacaagatagagaaagaagaaaccctccctaaatcactctatgaagctagtattacyctaataccaaaaccaggagagaacataaccaagaaagaaaattacagacaagtatccctgatgaacatagatgctgaaatctaacaaaataccagctaactgaatccaacaacatatcaataagata

SEQ ID NO: 421793 - DNA, 471 bp, Homo sapiens
tacaaatggccaacaaacatgaaaaaatgctcaacatcactaatgatcagggaaatgcaaawcaaaaccatagtgtgataccaccttactcccagaagaatgccataatcaaaaaagcaaaaaacacttgatgttggtgtggatgcagtgaagagtgaacacttctacattgctggtgggaatgcaaaccagtacagccacatggaaaacagtgtgaagattccttaaataactaaaattagatctagcatttgatccagcaatcctactcctgtgtatctacccagaagaaagtaagttattacatgaaagttatattatattatagcagcccattcacaattgcaaaaaatgtggtaacaaaacaaatgctcatcaatcaatgagtagataaagaaactgtgatatatttatgtatatatgatggaatactactcaaccataaaaaggaatgaattaatggctttcaca

SEQ ID NO: 421794 - DNA, 471 bp, Homo sapiens
tacaaatggccaacaaacatgaaaaaatgctcaacatcactaatgatcagggaaatgcaaaacaaaaccatagtgtgataccaccttactcccagaagaatgccataatcaaaaaagcaaaaaacacttgatgttggtgtggatgcagtgaagagtgaacacttctacattgctggtgggaatgcaaaccagtacagccacatggaaaacagtgtgaagattccttaaataactaaaattagatctagcatttgatccagcaatcctactcctgtgtatctacccagaagaaagtaagttattacatgaaagttatattatattatagcagcccattcacaattgcaaaaaatgtggtaacaaaacaaatgctcatcaatcaatgagtagataaagaaactgtgatatatttatrtatatatgatggaatactactcaaccataaaaaggaatgaattaatggctttcaca

SEQ ID NO: 421795 - DNA, 548 bp, Homo sapiens
tcacagacagagaacttcagagatgtgcggaatatctcttcttgtcttccaatcagtgaatgtgtttgagaaaactactcagggctagagaaataaaaattagtaaattaaaactgacatagaaatgacaaaaataataaaattaataaaccatgatataaactgatatagttaggctttgtgtccccactcaaatctcatcttgaattgtaacccccataatgcccataatccccacgtgtcaagggatagaccaagtggaggtaattgaatcacggggacagtttcccccatgctgttctcatgatagtgagwtctcaactatatctgatgattttataaggggctcttccccgcactgctcagcacttcttcctgctgcctggtgaagaagattccttggtccccttcaacttccaccatgattttaagtttcctgaggcctctccagccatgcttaactgtgatcaattaaacttcttttctttataagttaccagtcttggacagttctttatagcaatatggaaacggactaatacataaac

SEQ ID NO: 421796 - DNA, 333 bp, Homo sapiens
  misc_feature (1)...(333): n = A,T,C or G
gttgctgtctatctaattccttcattctagtagtaattgttttataaatttgggaggtccagtgttaggtgcatatatatttaagattgtgatatttttcntgttggactagtcctntttatcattatataatgcccctctttgtcttttttaacttctgtttctttacagtttgttttgtttgatttaagaatagcgactcctgcttgcttttagtgtccatttgyatggaatatcttttttacacccctttaccttaagtttatgtgagttcttatgtgtcaggtgaatctcttgaagacagcagattcttggttggtgagttcttactga

SEQ ID NO: 421797 - DNA, 525 bp, Homo sapiens
ttctttaagttggacttcacctttctctggtgcctccttgattggcttaatagtcaaccttctgaattctttttctgtcaattcagaggttttgtcttggtttggatccattgttggtgagctagtgtaatctgttgggggtgttaaagaatcttgttttttcatattaccagaattgtttttctggttccttctcatttaggtagactatgtcagagggaagatttggcactcaaaggctgctgttcagattattttgtcctgtgggtgctcccttgatgtagtcctcttccatttcccctaggaatgaggcttcctgagagccaaacagcastgattgttatttctcccctggatctaaccacccagtgagctactggctttggctggtactggggagtgtctgcaaagagtcctgtgatatggtctgtcttcatgtctctcagccctgaataccatcacctgctctggtggaggtagcaggggtgtgaagtggactctgtgagggtccttagttgtattttt

SEQ ID NO: 421798 - DNA, 592 bp, Homo sapiens
ggacttcacctttctctggtgcctccttgattggcttaatagtcaaccttctgaattctttttctgtcaattcagaggttttgtcttggtttggatccattgttggtgagctagtgtaatctgttgggggtgttaaagaatcttgttttttcatattaccagaattgtttttctggttccttctcatttaggtagactatgtcagagggaagatttggcactcaaaggctgctgttcagattattttgtcctgtgggtgctcccttgatgtagtcctcttccatttcccctaggaatgaggcttcctgagagccaaacagcagtgattgttatttctcccctggatctaaccacccagtgagctactggctttggctggtactggggagtgtctgcaaagagtcctgtgatatggtctgtcttcatgtctctcagccctgaataccatcacctgctctggtggaggtagcagggrtgtgaagtggactctgtgagggtccttagttgtatttttgttaagtgtgctggttttgtgtcggttgacctccagccaagaagaggtgctttcaagagttcatgagctgtggtttca

SEQ ID NO: 421799 - DNA, 565 bp, Homo sapiens
tggccatctgcttggcttctgggaaggcctcaatgagggtacaggcattggataaacattcatgtttcaaaaggaagagggcagctaaaagaaaggggctacaggggcccatgcaggttaaaacccaggagggcagccattacatcttatacctctgaaatatctcttttgactccatggcccacatccaaggtaccactggagaaagaagttggttccctaggctgatggcaactctaactctgtggctttgcatggtttatcccccatggctgcttttttgggctggagtttaatgtctccagcttttccaggcacagtgtttaagctgctggtggatctaccttctcaaatctggaggacagtggctcctttctcatagctccactagacagcaccccagtggggactctgtagggcctccatccccacatttcccctctgcctagccctagtagaaattctttctragggatccactcttgcagcaggcgtctgcctggacatctaggcttttccacacaccctttaaaatctaagcagagggtgccaaccttcaactctt

SEQ ID NO: 421800 - DNA, 647 bp, Homo sapiens
ctcatagctccactagacagcaccccagtggggactctgtagggcctccatccccacatttcccctctgcctagccctagtagaaattctttctgagggatccactcttgcagcaggcgtctgcctggacatctaggcttttccacacaccctttaaaatctaagcagagggtgccaascttcaactcttgcattctttgcaccctccagacttaaaacatgtagaagccaccaaggcttttggcttgcaccctctgtagccaaagctggagccagagaagctgtgatatgaggaccagtgtctggaagctacacaaggcagcagaacccttagcttcacctctgaaaccatttagtcattctagggctcagagcctgtgataggagaggctgcctcaaaaaactctgaaatgccttcaaggactttttcccattgtcttggctctcagtacctaccttctttttagctatgcaaatttctctagaaagcagttgctccacaggctgcttgaattcctcttctgaaaaagcatttttttttcttagccacatggccaggctgcaaattttccaaacttttgtgttctgcttcctgtttagatataaattccaaatttaagtaatttctttgcttctgcatctgagca

SEQ ID NO: 421801 - DNA, 555 bp, Homo sapiens
ggcatcgatggtgcagggcagagacatgcactgagtagctgctgccctcactgaagagaaagtgttcactgacttggcctttccccaggrcctctccctcccctgctttccagaaagcccagttttttgggagctgtacctgaacacctgggaacattccggtgggaaaggcagctcagagcattagcaatggtaagttaccttgttcttcttcctgtggagacaattgatcatatgggtcagcaagacgtaggtgctgtccatttagtccctggttattacagagacctatagctctggattatggaagatctgtgagtggcacaggcattgaggaatcacagcatcattattgtgcatctgcagggaatggcttgaaaatagactggtaataacaaatgtttcaggtcactacaaaatacctttgaatatttaaatatgcttctgacaaagacttttttcccacatgaaacaatgggagcaacgtgacaatcacagaggtgttgttagtataacaaagggattgtcgctcccacaatgtccacttaaataact

SEQ ID NO: 421802 - DNA, 555 bp, Homo sapiens
ggcatcgatggtgcagggcagagacatgcactgagtagctgctgccctcactgaagagaaagtgttcactgacttggcctttccccaggacctctccctcccctgctttccagaaagcccagttttttgggagctgtacctgaacacctgggaacattccggtgggaaaggcagctcagagcattagcaatggtaagttaccttgttcttcttcctgtggagacaattgatcatatgggtcagcaagacgtaggtgctgtccatttagtccctggttattacagagacctatagctctggattatggaagatctgtgagtggcacaggcattgaggaatcacagcatcattattgtgcatctgcagggaatggcttgaaaatagactggtaataacaaatgtttcaggtcactacaaaatacctttgaatatttaaatatgcttctgacaaagacttttttcccacatgaaacaatgggagcaacgtgacaatcacagaggtgttgttagtataacaaagggattgtcrctcccacaatgtccacttaaataact

SEQ ID NO: 421803 - DNA, 698 bp, Homo sapiens
  misc_feature (1)...(698): n = A,T,C or G
tgaaaatcacaatacgtattttaggtaatgggccataagrgattattttaattgtaagaaaatgtacaaaaaatttgctttttacaaattttctatttaatagcaataaaatgaagtgacactaaagtacaaaaaagcctgaacagtatgatttctttgtatcaacagtgaagggctcccttgtatatggagttcccaaacagtaagttttcttaatcctgatcatctgtggccagtgtaaaagaaaggcctgacaggaaaagttaaggagccagctgggtaactccatatgagggaactcttggtgacattcaaaaaactcacacttccactttcaaaatcaagaaacacaccaacccggcccagaggtttctctatatagtgaggaaactctggggaggtggtcaagagactgaaatgattatccaccttcagacacaaaagaagaaatatgtcctcagagttaaccattgtgctattcttccttatccaggagtcgttacagactcccagagcccagtcacaagagttgtccacatccagctcccagtagtgtttcccaaaggagaagaccctggctccccatgcagcanaatagtcagatctgtcagaattcaaaggtccacgtctaaacttccaacttctcacatcctcaaagagcctgatattgtgattggntacttcacattggaagaaaa

SEQ ID NO: 421804 - DNA, 698 bp, Homo sapiens
  misc_feature (1)...(698): n = A,T,C or G
tgaaaatcacaatacgtattttaggtaatgggccataagggattattttaattgtaagaaaatgtacaaaaaatttgctttttacaaattttctatttaatagcaataaaatgaagtgacactaaagtacaaaaaagcctgaacagtatgatttctttgtatcaacagtgaagggctcccttgtatatggagttcccaaacagtaagttttcttaatcctgatcatctgtggccagtgtaaaagaaaggcctgacaggaaaagttaaggagccagctgggtaactccatatgagggaactcttggtgacattcaaaaaactcacacttccactttcaaaatcaagaaacacaccaacccggcccagaggtttctctatatagtgaggaaacwctggggaggtggtcaagagactgaaatgattatccaccttcagacacaaaagaagaaatatgtcctcagagttaaccattgtgctattcttccttatccaggagtcgttacagactcccagagcccagtcacaagagttgtccacatccagctcccagtagtgtttcccaaaggagaagaccctggctccccatgcagcanaatagtcagatctgtcagaattcaaaggtccacgtctaaacttccaacttctcacatcctcaaagagcctgatattgtgattggntacttcacattggaagaaaa

SEQ ID NO: 421805 - DNA, 698 bp, Homo sapiens
  misc_feature (1)...(698): n = A,T,C or G
tgaaaatcacaatacgtattttaggtaatgggccataagggattattttaattgtaagaaaatgtacaaaaaatttgctttttacaaattttctatttaatagcaataaaatgaagtgacactaaagtacaaaaaagcctgaacagtatgatttctttgtatcaacagtgaagggctcccttgtatatggagttcccaaacagtaagttttcttaatcctgatcatctgtggccagtgtaaaagaaaggcctgacaggaaaagttaaggagccagctgggtaactccatatgagggaactcttggtgacattcaaaaaactcacacttccactttcaaaatcaagaaacacaccaacccggcccagaggtttctctatatagtgaggaaactctggggaggtggtcaagagaytgaaatgattatccaccttcagacacaaaagaagaaatatgtcctcagagttaaccattgtgctattcttccttatccaggagtcgttacagactcccagagcccagtcacaagagttgtccacatccagctcccagtagtgtttcccaaaggagaagaccctggctccccatgcagcanaatagtcagatctgtcagaattcaaaggtccacgtctaaacttccaacttctcacatcctcaaagagcctgatattgtgattggntacttcacattggaagaaaa

SEQ ID NO: 421806 - DNA, 573 bp, Homo sapiens
actaaacttagaatgaaatccaacttctttctgcagctcacaaaatcctgcttgttgtggcccttgacacttaaaaatatgatagaaggaaaaatattatagaaaggcagaaagatcgagataagaaaatcacctacagagcagaacaaaaaaataaaataaaagtggaaaatggagaaaaggtaagaaaaataaaacatcagtccaggaaacctaataatatgagcttctttagtgaacagcaaaaacagaaaagagaatattaccaaagaaataattcagaaaaaattgcctagaactgaaaggcataaatttccagattggaaggtccctctactggcccagtataatggattttaaaaagacacagagcaagcacaccaagacatcattgtgaaaatctggaatactgacttctctgacaaaaggtcttaaacatttctagggagaaaaaagcaggtcagatataaagtattggttatcaggaggacattgaatttctcaacaatgctgaaagacaaaaaactggagcaaaaaaaaaamccttaaaattctgaggggagaaattctttc

SEQ ID NO: 421807 - DNA, 570 bp, Homo sapiens
caaaactttaacaggagattgagctgtttttctacatattctaaaattccagaagcaaagagatcgcctgggcctagaaatacagtataaatttagtatagatcattacccactaagaatcagttgatttcatctttggtctctaatttctgatatatggttagaatagtttccaatttaaagaatctcttggagactagggaccagtaaaaggaaaaagatgacaatactagttaatgtcacagcagtagttatttcaaaactttcacaaattgaatgttttatagatcgtgccagataaacatgccaggacttagccaccatccaaaaaccctgtcatcaaaactgaattgtttccccttatggtaataggcctgggaaataaatccataaatttaaagaagcaatgttagataagaaaaaaattttatacttaaaaggataaaaacatacatgtyagatagtgtttagatagcattcatctcgctaattattttttccattctttgcatgtttcttcaagctagcattagtgcaataccacaactttcagccttttatttgaacctc

SEQ ID NO: 421808 - DNA, 589 bp, Homo sapiens
tttcttttcttgtattaattttaggctcagtttkttcttgcttttccagttcattgttaggttttttatttgaattttttctacttttttgatgtaggttattgctataaacttcccttttaattctgcttttgctgtattctataggttttggtatgttgtaaacacaacatactttcattttttcaatgcattttaaaatttttcttaaatttcttcatcaaaccattggttgtacaggtgatgttgtttaaattccatgtatttgtacaattttacaagttcctattgttattaatatctggttttatcccactgtgatcatgaaaagatacttgatacaattgcaattctttacatttgttgagacttattttgtggcctgacatgtggtctatcctggaaaattttctatttggtgatgaaaagaatatgtattctgaacccattgaatgaaatgttttataaattgtaaatttatattataaatttataaatgaaatgttttataaatgtactgttaggtacatttggtctaaaatgcattgtaaatccaatgtttttttgttgtcatcaacgttattgttat

SEQ ID NO: 421809 - DNA, 466 bp, Homo sapiens
tttgtaatttccccagggtctagtgcggtgcctggcacttggtaggtgttcagaaaatgtttgtggaatttaaatgaaagtcaagtaaaggatacagagcaaataaacacaatcacttcttcaaatgattggaagaccccatgttgttagagccctccaggttcaaacacatggaagcttcatggggagaccaggtttcttgtctgacagtgtattttcaacaggccctgtggcaaagaaatctttcttgatattatactgatgattaaggcatgcattacattggctcccaggtattgtgagacctttstaagttataaatgagagaaggtttaattgtactcagcctgagaatcaagatgatcagactctataaggaaagagttccagagccattgcactgatatgtgttagtcacacctgccaatcagaaagcatcactaagtttaggaagatttcatgtgct

SEQ ID NO: 421810 - DNA, 593 bp, Homo sapiens
aatataatctataagccttcttcaggtgtaggctccagaacttgcacactgtgaattctgctggattctatttgtcaaggcaagttacaaggccaaaccaaatacaaagagtaaaacaataaactctactctttgataagaagaaaaatcacgtcccctgtccatgatcatttttgcaagttatccagcaaattttttaaaattttctttagtcttaaccaatatttaccctttttatgacattgatttgtagagaaatagtcgtttatcccaaaaaattctgtatttttctgstgtcttttagactgttgatctttccctcatgtttactataaattgataattagaagaatgattagattttagattcaattttttaggtaagaatacttcaaaggtaatattaaatataataagccacttaatgatatgtctttttcaattttagtgatgctaatattggtcaataggcaagtgttgttagcctgatttccccattaatctttataaaatctttataaaaatcccatcaacctttctaccaatggcttttcacctaattgcctaaattcattaattcattaagaattgca

SEQ ID NO: 421811 - DNA, 526 bp, Homo sapiens
ggatgagacaggatcattgatgttcaggtccctggtaacaggtccacaaatcacagaccctactgtggacccagcagtagctgtgcaacctaactctaatccttcctgattgcaactgaggagggtatcccatcagcctaggaacccaagataaaaagatctttaactactaaaaatagtaaataaaaactggaagagacgktttctacttcaaaggcacatataccattgcaaggctacactgatcatgaagaatcaagcaaacatgacccacagaaaaacaataaagctatagtaaccaatgacaaagaaaaaaaaatcaaagaattttctgacaaaaaaatttaaaataattatctcaaggaagttcaatgagatgaaaaagaatacagacagacaactagacaaacttacaaaaataatacaagaacaaaatgaaacgtttaataaaaagtagaaatcataaaaatgaatcaaatgaaaatcctggagctaaagaatgcaataatggaacttaaaaaaccta

SEQ ID NO: 421812 - DNA, 531 bp, Homo sapiens
tttgtatgcaaaaaaatgaattaatttgtgtgcttaaaattagactgttatctctataagcagttttatataagcattatggtaatcacaagacaaaaacatatagtagatacacaaaaataaagcaaaaattcagagaatactactaaaaaaggtccagtgactcataaagaaagacagcaagacagtaagaaaggagtgaagaaactttaaaaattgtgagaacacaataaaatggcattgctaatgccttccctatgaaaaagtactttaaatgtaagtggattaaattaataagacataaagtggctgaatgaataataaaacaaaaatcaaactatgtgctacctaggrgacactaatcttggtttcaaagacacacaaagggtgaaagggcaggaatggaaaaaatattctatgcaaataaaaaccataagagagtagtggtgactacatttatatcaagtaaaatagaatctgagtaaaaaaatgttgcaagagataaagatcattatataatgataaagggat

SEQ ID NO: 421813 - DNA, 529 bp, Homo sapiens
aacgtgaacacatttccagcaggtgttcagtttttgttttggtttgttttggtttttgcatcatttgcattagtaagatatgtattcacacaattttgcctcagtgccctgcagatatttttatttatttcctgtttatttcctggtatctattactgataacaacagtctgccttttgtctgatactgactttttaaaataatctgtctcttcwgcctgataacttttagaactttcccatgatacatgaatgttgtaatttcattactgtgtgtctagggtgaaatttcaaattcttccattcttcaacttctctttcttagccctcaactctttttctatctctgctgtattctggatgacttcctctgataatctttctgttttacttattcacttcttaatcctgtgtagtctgctgattaaagtgtccttaaagtttcctccatacccataccaatattttttgtttctgaaactagctatttttccccaagtttttccgtcctcttccattatctccatttt

SEQ ID NO: 421814 - DNA, 543 bp, Homo sapiens
tggaacaaggcttttgaagcatatagctgtctgacattacccaaggagccacaactgacatttgtatacccccaccttgacttctggtactttcctcagcaccaaagctcctccactgatgagtagaatctgaccaccagccttcctcctcttcctctacttcctcctcctcctttttctcattctcctcttctcttcccttgctttcttttttccaagtatgatcattacaaaataccaagacattttgaatttccattattgctacactagcaaatctgaattgtaaagtaaaataagtcctgtaaaatgaaatagacctattatttcttgtactgctccatgagctgagagagtgacaaatgggagaccaaaacaccagggcagttggcgttaattaatactaaatttrctgaattaaacaatgaattttaaagaaataattctaagatgtcatttcaattaaggcactgtcactgagataatggatgtgggtggtgtccaggaaggttgatgatggcactgttacaggaagaaaccatt

SEQ ID NO: 421815 - DNA, 645 bp, Homo sapiens
tctgctggcattgaagatcacgccctttgtaatttattttctctgccccctgcctactacatagatatcaggactaataggacagaccaaattgtttcytgtggctctgatttctttaaagaaatatgctcaataaagaaacatgagggataatgaaaaaaattactacttttggcaatcctggacattaaaggaatgcaaacttcaattgcttctctataataagatattgcaagggttttcaatttcgttttccttgtttctatctgttcaagaatccttaattaaatttaatttcacctggtatttttcctttacctaaaaaaagggagtcaaccataaaatcaaccataaaactggctacaacagtttctgccatgattggaaaagcagagagaagatagcatctgatgtacacagccagtgggtactgtgttctcaaggatgttatgaaaatgacaatccctttggccttctgctctagcctaggaaggctgggcatgctggtaccatacttccctgggctcactcccactcttgctttctggcttatactcacatcaccctatgaaagtggctataaaggtcaactggctttgggtgcacctcttatatttttgttgaagattgtattttccaaagttg

SEQ ID NO: 421816 - DNA, 645 bp, Homo sapiens
tctgctggcattgaagatcacgccctttgtaatttattttctctgccccctgcctactacatagatatcaggactaataggacagaccaaattgtttcctgtggctctgatttctttaaagaaatatgctcaataaagaaacatgagggataatgaaaaaaattactacttttggcaatcctggacattaaaggaatgcaaacttcaattgcttctctataataagatattgcaagggttttcaatttcgttttccttgtttctatctgttcaagaatccttaattaaatttaatttcacctggtatttttcctttacctaaaaaaagggagtcaaccataaaatcaaccataaaactggctacaacagtttctgccatgattggaaaagcrgagagaagatagcatctgatgtacacagccagtgggtactgtgttctcaaggatgttatgaaaatgacaatccctttggccttctgctctagcctaggaaggctgggcatgctggtaccatacttccctgggctcactcccactcttgctttctggcttatactcacatcaccctatgaaagtggctataaaggtcaactggctttgggtgcacctcttatatttttgttgaagattgtattttccaaagttg

SEQ ID NO: 421817 - DNA, 543 bp, Homo sapiens
  misc_feature (1)...(543): n = A,T,C or G
nnnnnnnnnnnnnnntcatcatagaaaagcccttctccaataaaaaaaaaaaaaaaagttcaaaaaaacagtataagacgaggaggaggaggcagaaaaactgctgcaccttgattataccccaagcattatggttattccacatactaattacatacatgtgagacaactgagacgattaaaaagtgaattgacttgcccaagatacacaacyagtgagctaatgagtgactgagctgggattggaaatcgagtcttcctaactctataatgtattcctttattatcatgccaagtaggaattttgacagcaggcacattatgaatctgaaggacagaaagccacagaggagctgcacagagatacgagcccacgcccactatgagtaggtatttaccatctcttttgtctccacctggcttcttttcaagctgcagaatccaacatgatcttcactgtagtgtctcagtacctttaagaagccttaattaactgttcttcctagatgaaactccagacattcagactttctaaaaacagga

SEQ ID NO: 421818 - DNA, 575 bp, Homo sapiens
gtacgtgcatacctatgtaacaaacatgcacgttctacacatgtaccccagaacttagagtaaaataaataaataaatgcaaaaaaaagaaagaaagtaggtcttttgatttcgagtctattctcttctgtttccctcacccctcatttccccacttcctttcaaagtgcaagtgrtaacaagagggtcaaaaagaaagagccatatttcagaaatcagaattctcttagtcacagttttcagctgacttttcccaggagaaagagaatgagaagcacctcataacctgcctatctcctggaacctctggagtggggtgtgaaaacacatccttagataacaataaagttatgctttgcattgtgttgcccaatttttaaaaagatcttttttcagaattttatgatgtataatggcaacttgagagaacaagaatttgggttttcgaaggtatagtagccacataattttgcgtaggaaatgctaaacagaaatcagaggatctattttgtagaatatggaaaaatctcaagttaaaggaaagttgctggtcagcatcaaatgaaatagtcaga

SEQ ID NO: 421819 - DNA, 601 bp, Homo sapiens
  misc_feature (1)...(601): n = A,T,C or G
atattattccagtgtcttctaatctcagctatgttatagaacagagattggaaaactaaagcctatgggtcatatctagtctgtcacctagttgtgtaaataaagtttcatggaaacacagtcatactcatttgtttacatattgtttatggctgcttttgtcctgcaacagtaaaactaatagttatamcaaagactatatggcctacaaagcctgaagtatgtactaccctttacaggaaaaaactctgggttcaaaacacctgcaaactctggataaaatgcaaaaaataaatttttagggaggggtgagatggcagaaaattagtcaaaatgacccccaaaaaagaagtcacaaaagtgagtgagcacttaagctagtgaatggccttgacgatacaggatcgtcatacaaagaaacctgcaatcagtgacacccacanaacctggagccctaaagagtgacaaccccaccaggcaaactagcaaagaacctatctcaaaaagagtgacagtaaggaagtttgcctcatttagccttgtttctgagtaaaggggaaacaagtcgcccctaagaatttataaccactacccaaccctc

SEQ ID NO: 421820 - DNA, 574 bp, Homo sapiens
tgaccacgtcacttccctgcttaagtgtctttagtgaccgatcactgtccttacagtaattcaagcctttctgtataacatatggaggcccttcattatctggggcccatttgttcttcagcctaacatgtcatcactaacttacagtattccacatttcagccatcaaaccactgtaccttgaattccctgaactgactccattcttacaaaccttcagccctggtttatgacattccctgaattagaaatgccctttctaactcccccatcccaatattccccacttggttgtctcctattcataacattcatctcactaatcattaccctcagaaagccttctccatcctcaggaatatctaaatcccttctatcagtttctaccagaaggcccctgcacatacctcctccactgtgtttaccacactatagtttatacactcatttgacttcattcactagatattgtatctgtctgtactcccactgcctaggatgrcatctggcacatttaagtattcaacaaatatccatagaacttaaaccacattcatcattaaaatgattgaat

SEQ ID NO: 421821 - DNA, 509 bp, Homo sapiens
  misc_feature (1)...(509): n = A,T,C or G
nnnnnnnnnnnnnnnnnnnnnnagttgatatttgtttgcttctagagcctaagaaccctattgaatgccccaagaaatggagaccctctcatcctcattctaagtcagtggtgtctatgacagtagttgtcaactgggggacaattttgcccctagaaatcatttgacactacctgaagacatttattgtctcaaccagagggggatgagctactggcatctagtgaggccagtgatgctgctaaacatcccgtatacatagttctcccacccccaccaaataattatctgacccaaaattttgatagtactgctgttgagaaactctaagtataaatttaatttctggaatartaaatagtcgccaaggccaaggacaagcctgtcctttaaattccataactgcttgaactccagacatctagtgccactttccactccagcaactcacaccaaatccatgtcagtatatgggctccttgactgcaaccttccttactcccagcact

SEQ ID NO: 421822 - DNA, 509 bp, Homo sapiens
  misc_feature (1)...(509): n = A,T,C or G
nnnnnnnnnnnnnnnnnnnnnnagttgatatttgtttgcttctagagcctaagaaccctattgaatgccccaagaaatggagaccctctcatcctcattctaagtcagtggtgtctatgacagtagttgtcaactgggggacaattttgcccctagaaatcatttgacactacctgaagacatttattgtctcaaccagagggggatgagctactggcatctagtgaggccagtgatgctgctaaacatcccgtatacatagttctcccacccccaccaaataattatctgacccaaaattttgatagtactgctgttgagaaactctaagtataaatttaatttctggaatagtaaatagtcrccaaggccaaggacaagcctgtcctttaaattccataactgcttgaactccagacatctagtgccactttccactccagcaactcacaccaaatccatgtcagtatatgggctccttgactgcaaccttccttactcccagcact

SEQ ID NO: 421823 - DNA, 509 bp, Homo sapiens
  misc_feature (1)...(509): n = A,T,C or G
nnnnnnnnnnnnnnnnnnnnnnagttgatatttgtttgcttctagagcctaagaaccctattgaatgccccaagaaatggagaccctctcatcctcattctaagtcagtggtgtctatgacagtagttgtcaactgggggacaattttgcccctagaaatcatttgacactacctgaagacatttattgtctcaaccagagggggatgagctactggcatctagtgaggccagtgatgctgctaaacatcccgtatacatagttctcccacccccaccaaataattatctgacccaaaattttgatagtactgctgttgagaaactctaagtataaatttaatttctggaatagtaaatagtcgccaaggccaaggacaagcctgtcctttaaattccataactgcttgaactccagacatctagtgccaytttccactccagcaactcacaccaaatccatgtcagtatatgggctccttgactgcaaccttccttactcccagcact

SEQ ID NO: 421824 - DNA, 660 bp, Homo sapiens
gtaatgagcgcccctaaggtgcagattgtggcgtctaagcataayggaagcagcactctccagatatgattgattccaggttttggaaagaaaatatgcaaggcgagtctttgcattttactgtagtagaaaactaaaaactaacaaagacaagtaagatcatttaaaacaaaataggtgccaacttaagggagctcctactggcccaagatgcaacaatttgatcttcaaaatgaataatgattgcaatggaatgaagcacataaaatatataaaaatcttagtttctaattatagtaaaaaatcaaagactaatttaaaaaaaactcatcggtcatcataagagtttactaaagcacaaactgattacttttggattttattattaaggcaaaataagcattcatccagactcttctatatgaactgtatttcagattccatgacacagtttatgaggaagacttccttagagaattattactactaggacttgcagaaagaatgatagaattacagaaattagacttttgcagttctttttttttttacctttattgggttatatttgataaataaaacttgtatatatttgaaacaaacagtgtaacagtttgatatatgtaaacattgttaaacaattgacacaatcaagctatt

SEQ ID NO: 421825 - DNA, 573 bp, Homo sapiens
tgaggctgcaaaaaacaaagacggcagcctgccccttcctttagcagctccatctcagggggatacaaacctattgctggcctgaatgctcctgtaggaggtggctaaagaccccagttgggaggtctcagccaatcaggagaaatgagattggggacatgcttaaagaagccatctagccatgctttcatagagctactgtgctgtgctggggtacctcttctgcccctggtcaggttggactctttaaaggctggaggctggaacaatagcaaaaaagccagcacattcctccctcyaggagctctgtctcaggaacttttcaaatctttgttggccagagaacattggcaggaatgcctggaggtgctgcttgggaagtcctgccaagtgaggagaaacagatcagggtcctgctcaaggagtaatctggccatgcttttgtagagcagctgtgctgtgctggggtaccacttctgccccagttgacttgggctctccaaaggccgcaggctggaacatctaagtttcccaaacagcaaagatggtggcttgcccctccctctggaaact

SEQ ID NO: 421826 - DNA, 592 bp, Homo sapiens
gggtaggtacagaaatccaacctcccaccttgcctgagttacagtcacctttgctgggaagcacagaaccagagtatgtaaagctcctgggtcttcatgtgttcctaaacagctgctctgctgagactccacacagktctgggtcagaccataggccctggtgcattgggttcactagggaatctcctgatccaaaggttgcaaagatctgtgggagaagtgtggtttcccagggttgcaaatttattcactgcctccctgggttgggggggtaggtcaccttggctccatgctactcccaggggagccattgcctgccctgcttttcttccttctctgtgggttgagctgtttccctaatgaatcccaatgtgagtacctggatgtttcagtggaaggtgctgtatttacttgcccttttcattcctctccgtgagagctatgcactgtagctgcttctcattggccatcttggctccctccccagacattcttctgcttcaatttctttactcattattagtctcttctgctttaatctctttattcattattggtctgttcagattttctatttcattatgattcagtc

SEQ ID NO: 421827 - DNA, 480 bp, Homo sapiens
accctcctttgttaaatttagtcttgggtgtttcattttttagtagccattgtaaatgagattgccctctttatttttagctagtttgttattaatatatggaaacattattgatttttatatgttgattttgtatcctgcaaatttactgaattgtttattagttctaagagtttttttggtagagtcttttggtttttctaaatataatatgatrtcatgtgtaaagaggaacaatttgacttcttcatttccaatttggatgccttttatttctttattttgcccaattgctctggctaaaatttctggtactatggtgtgtagtagtgaaagtgggtatcttgtcttgttccaggtcttaaaggaatgtttctctgcttttcaccattcagtatgatgttgtccatgagtttgtcacatatagcccttagcatgttgagatatgttcctttattttattttactttaagttctgga

SEQ ID NO: 421828 - DNA, 586 bp, Homo sapiens
gggaatggggatatgatattcaaaaaatacaaaaccttagttatatagaagaaataaagtttttcaaatatctattacacagtatggtaaatatagttaatagggtattataaatttcagaattactaagacagtaaattccaaatgttctcaccaaaagaatacgtatattagatgatggatgtgtttattatcttgacttaattattwcacggtgtgttcatgaatcataacatcactttttactttttatacaatttacatattgtataaatatatacaactctaatttgtcaatttgcaatacaagtaaaaaaataaataaaattaaacattttcaaaagcttaatgtttaacattcatataaaaagatgctcaacattgttagacattggagaaatgcaagtcaaaagcataagataccagttcacacccaatagactgattaaaatacagccagacaataataagtgttataaaagatgtgaagaaattgaagttcttatatattgaggatagggttgtaaaatggtgcagccactttacagaacaatttgaaaattccccaaaaagctataaacagatt

SEQ ID NO: 421829 - DNA, 597 bp, Homo sapiens
tctggggatggagttcatataccacaggagaccttatatcgtctcagagtgggctgaatttgaaagcccagaatgggatggacaggctgtacatccactaccccggcaccaaactgcaattgagtggggctggagaaaggcagaggctgacagaaaatctccactatgacgttaactttctttgcatatgaaatatacaaagaaatgtgtgtacaaatatacatattaaagagtacacatatttataatgtaaggaataataataaacacccttgaattcaccatcccacttagattattattaagaccatagaaggttcctccaagtgtccctccctagttctactccattctgtctccccctaaaataactcattatttttcatatttaattaatatttgccttgcttttctttatagttttgtgacatatgtatggagtctaaacagtatattatttggtattgtctgtattttatcttttatatgaatggaatagagactatttcctcagcattaaaccttttaagtccatacatcttgttccatctcattgtamttcatgtatttctattgctttacaatattccattgtat

SEQ ID NO: 421830 - DNA, 657 bp, Homo sapiens
ctgtgtcatctctgatgactttgagtagcgttttgtaattctcattgtacagctctttcacctctctggtttactgtattcctaggtattttattctttttgtagcaactgtgaataggattgtgttcctgtagatgcaattttcttgcctttttcagcttctacagggttcctgtattccttggtcctcttgtattttcagagccagcactggtggattgagttattttcacattgccttacttttacctttttacctcccytttccactttgaaggatgctaacgattaaattgagttcattcaaataacccaggacaatctctccatctcaaggtgcttaatttagtcacatctgcacagtccctgttgccttataaagtaacacatacacaggttctagagatcgggatatagacaaagggaggatccattattctggaccccaaagggggctccattattctgccagctgtacatctacaatttaatcacatctgcacagtctctgttgcattataaagtaacatatactcaggttctagggattgagatatagacatcctttgaggtccattattctgcctactacacatctcttttgaaactgtctatagtggttaagagcgtttacataaggtttttacctgtcatatg

SEQ ID NO: 421831 - DNA, 630 bp, Homo sapiens
  misc_feature (1)...(630): n = A,T,C or G
taccttccgttttcacagtactttggaagcacatctctttgtttgtgctttattcatattgtgcactcctcaaaacctctgtctgattaacatgcagattygttttcacccttgagtttttatttttgaattctcttgacaatgaaagccctctttatttttaaaatgggaactatcagtttaaaatattcaagtgacaatgaatccttcctaggatatgattttaaacctatgagaaggagtggagagtgagagctaggaaaggaagtggttgtgacctctttttgaatttacatccagtgagatctggagttttgtcctggctaaagctcactgatacgagcattccagtcctattttatattttccttacattaagaagtattcgttcatcatctattactagtgcttaactcttccacactccctgacctctanacttgtacatctgaatatttgctcagcatctccccttggatctatgcacaccctgagtttaatgtaaacagaacagaactctagactccactctccacagtccctgatacgattctcctcagttcctctcaacctcagtaaagggaatcttcagttacttacttgctcagaaaaaaaaaaaatctaggcatc

SEQ ID NO: 421832 - DNA, 574 bp, Homo sapiens
atggactgagtggtttagaagaggcagaagttcatttctcacagtcctggaggctgtgaagcccaagatcgtggtgccagcagatttagcatctggtaagatcctgctttctggtccatacatggtgccttcttgttgtatcatcacatggcagaagggatgagggcacaagagagctctctgaggcttctttcaggagggcattaattccattcaggagggcagagcccttatgacctcctaacaccatcaaattagtgattagacgtgaacatatgaacagcaacattcgagggtcagggagaggaggaagagcctcaggagagtgagaaagcgyggggtaaaagtgggagaagacccagaagatcatgggtgacagcagccaatgaacaagcgaacttcaggaaggaaggcgtggtcaacagcatgggtcctctggagaacagggagcctggcctctaccatggctcccagctgaggtcaacccctcttccttttccccagaacatgcccagcacgtccctgctgcagcctttgccggtatgtctcttcacccggccttcttcacctactc

SEQ ID NO: 421833 - DNA, 490 bp, Homo sapiens
catgtaaagccacataggtggaacaaaagtcccaagtcgcaattcctgccatatagagcttataatctcagcagggggtcaaggggtaaacgtacaacaaagccacggagagctcaagccccagaggagtggtacccagaagggagggtgcctgggctcctcctggccttgtctctggccatcccggaggtgtccatcaattgcacccacttttcttagcagtaacactaagggtgaggccagacctctacgtatccttcaggtgctaagattttatatctatgaattcaaaactagactgttcacaggatatagtaaygtttttactggacctttatagataaataagattgataagtggagaggcagaatggattgatctgattgggtgagaatgtgaagagcttttgactaaggccacagatttgtgaagacaccatttatttattcaaatacaagtttatttcctttttctttacattagagtagt

SEQ ID NO: 421834 - DNA, 589 bp, Homo sapiens
gatagtaatatatttcttaatattgaataacatttctcttcttagaataaatctcactttaacatggtgtgtgttcccccaaaaattcacagattgaagttaaaacctacaatgtgactgtattggagatagggccttttagatgattaaggttaaatgaggtcrtaagggtgagggcctgacccaataggactgatgtccttataaggagaggaaaagaactccaggctgcacatgcacagaggaatgactatatgaaaacactgtgagaaggtgactgtttgcaaaacagagaggcctcaggagataccaaccttgccggcaccttgatcttggactttctgcctccagaactgtaggaaaataaatctctgttgtgtaagccattccatctgtggtattttgttctggccgcctgctgtggtttaaatgtgtcccccaagtctcatgtgttggaaacttaatccccagatttatatgttgatggcatttggaggtggggcctgggaggtactaggattagataaggtcatcagggtggcccccgtaattggactggtggcttcataaagaggaaaagagatctgag

SEQ ID NO: 421835 - DNA, 572 bp, Homo sapiens
atgttatggttggatcaggtggtaactaaagatctttcaaataagaaaattatgcaaataagtaattctataactggttgtagagacttctttaatagttcaaatgacttccagtggcatgggctgactccatcttgacattcgttgtaagacactcataactacttcaatttagttattactcagatccaaccatctctgtgaaatctacctcccaacactcttcccccagcaaaggtaatttyattattataaaaaatttcaaaacatagcagaaaagcagagagaatggtataatgaacaagcataaacccaacttacgtaacaatttgccatatttctttatctttctttctggactattttaaagaaaattactgttaatattccactctaaataatccagaatgcatacataaaataataatggcttttaaaatatagccacaatagcatcatcccacccaatgaaattaacaatcattctctaacataatttaatacacagcccatattcaaatttccactattttcctaaatatcttttataactattacaatttgttcaaacc

SEQ ID NO: 421836 - DNA, 629 bp, Homo sapiens
taccactcactcagtcacctgataatcatcctctattcttccttcacactctctttccagctataatccatcagcaagacctgtccatgtcccctccttcatttctcaattctgccaacttctcttcaccccatttgcctctattttggtttggaaccgaatcagttcttgactagattatggcaaaggccatttacctgaactctctgctcccttcttatctccaccaatctctcccttagtgccctggatttttgttgctgtctcatttgccacattataatattattattagtttactcttctttctccctgttgggctgtragctatttgaggacaagtaccagatctttcacctctgtatctccagccctagcagtgtacatagcaggagcttaaaaaaaaataaattgctgaatgaattccctcctgctatatattaggccctattctaggtctggggcatgaagggaaatgggactgatgaaatctttgtccttatgaactccagactcatgtaaatgaacataaaaatgagcagttgatctcaaaagctcacttgctgtgtgctgtgtgaaatgtttaaattttattttagtgcacaggtgaccatctgaggtatacacaa

SEQ ID NO: 421837 - DNA, 592 bp, Homo sapiens
aatgccagagatgtgagaggtgcccaaacactggggcttgccctcttttgttgtacatagggccgcttctatggccattgtgtgaagaagcttggactagcctaatgaatgctgacatacacatggccgactcacccttagggctccagccaactgcacatcatcttctggacatgtgagtaggccatcctagaccgcgtatcacccggctgaccagctgactgcagatgcatgagcaagttcagccaagagcagccaatgctgacacagatcagcagcagcacagacctgaccacaggtctgtgagcaatgawcaatggctattatttgaagccactaagttttgggtggtatgttttgcagaaaaagctaactgatgcaaggtggtgactgtcacctccattctagctagtcagaatagtctggaagacgcagattatttcactgaaagttccaattagatgaatcagtaggcacgggatggggtggaaaaaagttatcaaaaattaattgattttcaacctaaggatatttgatatttttggtccttaagtgtagctcattcacttgtagagggaagtaggaagtagga

SEQ ID NO: 421838 - DNA, 355 bp, Homo sapiens
tcaggggcaggcaggcctgatgcaaaagatgatagcaaagatctgaaggattttattgttggtctctctgctactcacaatcaacaggcaaacagatgattagatagtcaaagtgaaaccatttcacatgtgctttatgcccacaaagtcttccctacttgacttggagtcttattttrattcagaagcataaacactttatgtcttagattctaaattctagagtctagtgaataaccaaaagtgaaatttagctctaatcttgagtattttcataagctactaatatcatatgtccctgcctttaactacttgaaagctttatacccctgtagcttcatgtccatctcttttg

SEQ ID NO: 421839 - DNA, 574 bp, Homo sapiens
cttaagtgctgaggacccaattcaattccattgagactgggcaatcctcaggcagttccaccggacagcaagcccaggagcaaaaatatagaagccaacgatacagaaatcaggctatagttacatgagccaagtaagttaaagaactgagtgatttttagtgaatttaattcatatcatagatcatgaaggtacataataattattcccattctccaccatacagatwtgaaagtaagaatcacccagtgctctgttagagctatgcaaagtgagtgaagagttataagcctgaatatgtctgtgaggagtccaactatattaataaattattagccattgtccaattatgacagtggcatgatctgacctctgccaactctccagcttcatcttgttcttcctcactccccttcactcactgctctccagccatataggccctgtctgtgtccatgcaggactatgcatctattgttcagtctggtgtggccctccccacttaccctcattgcctggataaccctttttatattttcaggtacacatggcagcaacccaaacttaagtggct

SEQ ID NO: 421840 - DNA, 643 bp, Homo sapiens
ctcttgggttgtttccagttatggcctactgtgaatggagctgctatgaacattcatacaagtctttgygtggacctgtgttttccatgtagatggatcttaatctttaaaattcaaaattcccaggaatttgagaaaataagagaatgaaggaccaagcactgagatattctatttagagtttggatagaagagaagtctccaaggcagacttggaaagaaaggccagagaagtagaagcaaaccagttaagcatgatgtctctgaagccaagaaagaaaaggatttcaaatgtaggacttgacagctctgacaatgctgctgtgaagcaagataggaggtgaactgaagagtgtcaattatatttgataatgtccaagtgactgacaaccttagcaagatgaatttaggtgaagaagggtggtgaaaaccaaattggagttagcccaaaagcaaataaaaggtgaggaagtgaaataaatgtgtatacaagagttcttagaaaattgactgtgaaagaggtgattgaggggaaggtagagttaggaagaactgttttaaataagagatacaaaagcatgttggaatgatgatgggaaaaattcaatttgggcacagacacagggaaagtgccctatattaa

SEQ ID NO: 421841 - DNA, 646 bp, Homo sapiens
tttccagtagtctcagtaacacataacccacatccttaccattgtctgcctttataacacccactcttaaaacagttgtcccaatagtttgtatgtgtagtattagactcagccagtacatcactcacagttgaaaacactttttatctatttatctaataaacctctgtgtgatttcaaacttactgatgcatgggacagaaacatttgtaaaagtcctcctccacccccaacaattttgtggaactgtggggatgcctcaccacctgaataacccctgcatcctgcaaactacagaaaaacttggaggctttcattgaccacaccaaaaacagagccaagctaagtttgtttttgtagctttcagatttgactacatatcatttttattgttagcattatcaccttgcagttttatagcctcttttttctgagaagttgaaagaatatacgttttcccacttcatgatcacttttcwttttgcagaaaattgaagagaaatagaagataagaagggggaaaaaactacggtaaaacgcaagacaaaaaatgaaaacagaggatgtagtatttggaacaaatcctttctaccaagtattaatgaattcccacaccatgagaaatgtgcttaagcccaattctaac

SEQ ID NO: 421842 - DNA, 617 bp, Homo sapiens
gcataccgtgtgcttggcattgctgtttcacatatattaacttattcttcacaaccaccctatgaggtagatactattttattatccccattttatagatgaggaactgagacactgataaatgaagtaattttcctcttgtcccaaaccactaggaaagagtaaatctaagattcttcctttcatcttcataatcccttcaggtagataagagtatccccaccttacaagtgaggctcactgaagccatgtgattagcccaaggcatcaaataacagcagatctagtaagagaagaaggaggattgggactgggtctctccacacatctgacaggttgtctcccagaaagtgggccatggccatccctcattccrtgaagtattccttcagaggagtcttaactgagttcctggaaaactcaatcgcgaacagtgaaaagagatctattctggataattttggtctggaatacatttccagtcactttgatctgataaatatcagacaagactcagaaatactaatatacacttattaagaattcaatcaactaaaaatcccaacctatagaaagttttgtttacatactattgttataaaacccaaatcacaagg

SEQ ID NO: 421843 - DNA, 617 bp, Homo sapiens
gcataccgtgtgcttggcattgctgtttcacatatattaacttattcttcacaaccaccctatgaggtagatactattttattatccccattttatagatgaggaactgagacactgataaatgaagtaattttcctcttgtcccaaaccactaggaaagagtaaatctaagattcttcctttcatcttcataatcccttcaggtagataagagtatccccaccttacaagtgaggctcactgaagccatgtgattagcccaaggcatcaaataacagcagatctagtaagagaagaaggaggattgggactgggtctctccacacatctgacaggttgtctcccagaaagtgggccatggccatccctcattccgtgaagtattccttcagaggagtcttaactgagttcctggaaaactcaatcgcgaacagtgaaaagagatctattctgrataattttggtctggaatacatttccagtcactttgatctgataaatatcagacaagactcagaaatactaatatacacttattaagaattcaatcaactaaaaatcccaacctatagaaagttttgtttacatactattgttataaaacccaaatcacaagg

SEQ ID NO: 421844 - DNA, 578 bp, Homo sapiens
caaagagatgaagattgcatctcttttctaagtttagcagcacatgcctcagagatgagccagtgctgtcccaccagcttggccctcccttcacttggccctcttccaccccaacctgagaagcccctcactgggcacacaatgaaaaatcctactctagcccattcctttatgtctatgaattaaatactccacagaacaatagagagctatccttatttttaaaggtctttagaaggagaaaccatacctttccaaagtaggtgattttagtggytaccaatttttcctttttttttttaaaaaaaaaaaccctctctcttgtctatttacatttaaactcatttacttctagctatcttctgagagttggggagtatcttctagcattctcagatctgagtaaaatatgcctctgtggttaacatatgtacaggggtcaaatctttggcttctttgagcagctttatagctaatccaagaaatacccacataatggacaaagatgagacagtccatgtgtcacccatatttaaagagtcaagttgctaattaaagaagcaataagataatttatt

SEQ ID NO: 421845 - DNA, 478 bp, Homo sapiens
  misc_feature (1)...(478): n = A,T,C or G
tttggtcttgctttttgctttaattatttttgattattttcttaaagaggagtatttggggagttttttttgttttgttttttgttttttgttttttaccaagcatttcattgcagtgtttaatcacagtactgtgtactcgctgtattgatctgatatgctcagttctggccaggacgtncnnagtgtacacatgcaatggaacaaactgaycaaggtagaaagacagattggagatgagggcaagtgcctggaaactgggctgccatgggcatctgtggccaggctgggatcacactagcagatttcaatgcctttttacatggccttatactaggctggtcctattagcacatgacatgcttaatggtttgttgtttttcttaatttcctggagagaagatccttttgaaaactccaaatttttctaagtttagctaagaggttcctcttagctaatgttcccccccaccccccc

SEQ ID NO: 421846 - DNA, 474 bp, Homo sapiens
ggatatagctcctttaagactgaggtctgttatagaactacaaacatgcctttacataaactgaaacactatttcagtgccaaaggtttcatttgtcttgagaagccaagaatgttcctacaatgtaggacaacttcggatcacacagtgaatctctgtgggaaccatctggtttggatataggttcctttgattttagggctggcttcactacaatgcagtttgcttgctgtgctcagytccttctaaagtgaaaaaagcacaagctggctgtagacagattgggtcagggctgattggcattgaacctgttcttgaagtgtgcagcccccagccagtgggagccgtgtgtgccccatagccaggctctaggaaggccactgagcatggcctttacactgggccctggcacaaggacctcctcctgacttcaaagcacttagtcttctctgctgccataaagccaaaactaac

SEQ ID NO: 421847 - DNA, 548 bp, Homo sapiens
acttttcataaatagttcccttcttgggaaaatgagataagctgtataagcagaaaagtgttaaccaagtagaccgatgaaagctgagttgcgtggagttgcaatgctgctgtgcattctgaggaggttactcaaggaaactccatgtcttcastttaactacctgtctgggtgtctatcttcaaatcattggttaatcaatattcaattcatcaacctattattggttatacttgttagcatcttgaaacatcttttggcttacataaacaaacacacaagttttattactgtaaaaagatttggaagatttttgtttgttttctttttttctcagtacttgggacaacaacacagccttagtgaatacagagtctgtttgaattcatggtctgaaattctaacttcctaccttagctgctcagagtacatgttggagatgggccagtgagtcctctttgcatttggccagtaagtcctctttgcattttcactgtgcaaatcagtggtagaggctaaagtcaaaagcctctggtttttcagtttta

SEQ ID NO: 421848 - DNA, 446 bp, Homo sapiens
ttctgtcttgtgctataggtgcctcagctatgagcctagtgatgagtacggaaataaatccttcttctcctacaagtacatgtcacagtgtggtgtaaggaaagctagaaagatgtgttgtaacatcaggaagggcccatgtagttggcccaagctgtgctggacatgcttaatatcagaaattggaagtggtgcttaagggaaaggagtctgacaaacttagacataaatcactgaaataatgatttttaaaataatcaaatgtattaatagagctaygggaagagtaattgtcctgtattttatatcattccagaagtactagaaaagtaaatatgtatgtcaattatatataatagtaatccagaaaaatcatgtgtctaagaaatgcatctaagaattcacagatgtgatgaggtgaaaattcagccccacatgtcttgttt

SEQ ID NO: 421849 - DNA, 550 bp, Homo sapiens
atgaaaaaattactattccatcatcctgatctttaaggaaatgttgactaggactagaccaaggatggccattatggaaatccacttaatcttcccattggctgacactgaaccaattatatattattacacaatattaagctacaatgcggcatgctaaagattgtcttttcagtcttccagataaaacaaaactccaaggccataaagttattttagctgtgttaagaaaaaaaacttcaaattgaattttttttttttacctaaaatggatattctagtccctgattacaaaaggtatatatctctccctgaaagaagttgcacatctgaaaggaaatagttagtggaaatttagaccacacttagctatagtactacatgcttttctcagcaaccccagctgcattctccagcatccacagtcaccagggaattttcaggcagcttgtaaatgtacaatctcatctccactatgggttatagtatatgactctccccagagtgccaagctatgacatttaatgaayagattataataagaaataaa

SEQ ID NO: 421850 - DNA, 625 bp, Homo sapiens
attctctgtgggaggtgaaatggccccagcttacttcaccccactcttgtgatttgctaggtattttctcacctcaaaaataatgatgtattacatatgacctgggttagcacatttgtgacagatgccaactttttggagcaagtcaggattacttggttttagttttgatgtctgtgagctttatcttttcatcttagagcagtgtgataaaaatatcacaaacaaaaattgcaagatacattcatggaatgaatatgtttacatataaacattttcctgtgttattactgttacaatgaagtcttatttaaaaaaagcaatcaagtaattcaakatcctaagttgctgagcttttatttttggcatctggctattttaggataaaacggcaagtaactttatcgaataactccattctccttcctctcaccactatagtgaaactggtatataaatttttaaagggcagtttataagacatatccttaagtcgtatctattcagcctaatctcatgcaccttttacatttgtatttatgttctaaaataggacataaaacaggattctagaagtgtattttgtgaaataattgtcccatgacatatttgtgaaaaaaagatt

SEQ ID NO: 421851 - DNA, 625 bp, Homo sapiens
attctctgtgggaggtgaaatggccccagcttacttcaccccactcttgtgatttgctaggtattttctcacctcaaaaataatgatgtattacatatgacctgggttagcacatttgtgacagatgccaactttttggagcaagtcaggattacttggttttagttttgatgtctgtgagctttatcttttcatcttagagcagtgtgataaaaatatcacaaacaaaaattgcaagatacattcatggaatgaatatgtttacatataaacattttcctgtgttattactgttacaatgaagtcttatttaaaaaaagcaatcaagtaattcaagatcctaagttgctgagcttttatttttggcatctggctattttaggataaaacggcaagtaactttatcgaataactccattctccttcctctcaccactatagtgaaactggtatataaatttttaaagggcagtttayaagacatatccttaagtcgtatctattcagcctaatctcatgcaccttttacatttgtatttatgttctaaaataggacataaaacaggattctagaagtgtattttgtgaaataattgtcccatgacatatttgtgaaaaaaagatt

SEQ ID NO: 421852 - DNA, 637 bp, Homo sapiens
tctgtgctttcttttccttatctccagtatcttagtccttgggtgtttgaatcttggtagctctttcatttcattttaatttttttgtttggtattttagcccatctagctgctcttggtgagaaggttagtttgatgcaagtctagtctaccagagccaacagtggaaaccaattgttgagtaaccatatattgtagagaagcaatctgataggcctgttgtagattactggtctaatcgtctctggccagagggaatgggataaagtaatacttggaagagctgttctgctatgagcaagggaggctagtctaaggggagaagttgggcaccacaggtattgtcacagtgtctatttcaaccatcatcatcatccttattaatacctcacytttggaaccttatgatttataaaactctgcaatttggtttttttgtctagtgtcaatactctaggatatgtaacagatatctttttaaaatgtatttactttaattgacaaataaacattgtgtatatttatgatgtacaacatgatgttttgaaataggtatactttgtggaaggctaaattgagctaattaacatacttatttctttgtgatgagaacacttaaaatttaccctcagcaatt

SEQ ID NO: 421853 - DNA, 550 bp, Homo sapiens
acatcataattatttgggtctgtgagaggcctttgaattatgcaatatgcagcatygccatggtgatgtgccttgccgtcaaccagcatgttatgatagagccatgttctggttttgttaatggccaaatgttgcataccaaacttctaaaagagattttaaaattcatgctctttggtaaagggtttcagtatatttgagcatgttttggctctctctccttctgcttacctttttctcccccgcttctcagtacagatgagaaaatttaatttgggtccagatgagatttagtaattaatgtacaaagcagctggggtccgctaactcctgggctgtagctgagcagctattttgttgcatttttttttcaataaaataattgaaaatttaaaaacttaaaattcattggcttcttgccgtgttatacttagagtaatcctgataatagatcggtaactatggatttcaccaaggaagggcacaaaataactgacctaagtaatttagaaaacagatgtctttagttggttcaaattctcagaaccag

SEQ ID NO: 421854 - DNA, 550 bp, Homo sapiens
acatcataattatttgggtctgtgagaggcctttgaattatgcaatatgcagcattgccatggtgatgtgccttgccgtcaaccagcatgttatgrtagagccatgttctggttttgttaatggccaaatgttgcataccaaacttctaaaagagattttaaaattcatgctctttggtaaagggtttcagtatatttgagcatgttttggctctctctccttctgcttacctttttctcccccgcttctcagtacagatgagaaaatttaatttgggtccagatgagatttagtaattaatgtacaaagcagctggggtccgctaactcctgggctgtagctgagcagctattttgttgcatttttttttcaataaaataattgaaaatttaaaaacttaaaattcattggcttcttgccgtgttatacttagagtaatcctgataatagatcggtaactatggatttcaccaaggaagggcacaaaataactgacctaagtaatttagaaaacagatgtctttagttggttcaaattctcagaaccag

SEQ ID NO: 421855 - DNA, 550 bp, Homo sapiens
acatcataattatttgggtctgtgagaggcctttgaattatgcaatatgcagcattgccatggtgatgtgccttgccgtcaaccagcatgttatgatagagccatgttctggttttgttaatggccaaatgttgcataccaaacttctaaaagagattttaaaattcatgctctttggtaaagggtttcagtatatwtgagcatgttttggctctctctccttctgcttacctttttctcccccgcttctcagtacagatgagaaaatttaatttgggtccagatgagatttagtaattaatgtacaaagcagctggggtccgctaactcctgggctgtagctgagcagctattttgttgcatttttttttcaataaaataattgaaaatttaaaaacttaaaattcattggcttcttgccgtgttatacttagagtaatcctgataatagatcggtaactatggatttcaccaaggaagggcacaaaataactgacctaagtaatttagaaaacagatgtctttagttggttcaaattctcagaaccag

SEQ ID NO: 421856 - DNA, 607 bp, Homo sapiens
tatgagtctgagctggttgagaacccaatctaactaactttgcaataaactaacacatgatttttggtggrtgcagttcccattccaaatacatttatctttctttgtatttatgagtgtgatagtaatcgatagatctttttcaacaaaaagccacctgatatctacatttcataattcctaagcaagaatcttaggaaacacctctgttaaaatatatgaaaattggtccctggttatctgtcatagcttaactccttatcttaaccatatttccattatctcttttgaaaaggtgcagagcgtgtaattaccttgaaaatggaaattcctggatcaatgccacctctcattcaagaaatgctggagaattctgaaggacatgaacccttgaccccaagttcaagtgggaacacagcagagcacagtcctagcatctcacccagctcagtggaaaacagtggggtcagtcagtcaccactcgtgcaataagacattttctagctacttcaaacattccccagtaccttcagttccaggatttaaaatgcaagaaaaaacatttttactgctgcttagtttttggactgaaaagatattaaaactc

SEQ ID NO: 421857 - DNA, 597 bp, Homo sapiens
ctcggtgtccacaagaggaaaatagccttgttgttcagaagaatcacagattttctagatactgatgtttgagatgaatgtttcccacaggtctttataaagtgagtactgggagaygtcatttaggatgtccttgacatttttcgttgctcttcctcaggacatccctccaggtagttagttattcaatctcatctgttttccaaattgaaataaaaaggcatggaaaagcaaggcaatccttatgaccttagacccaaaagaaataacgatgggcatgaaattgagagagtacaataaagatggcttcctcaaaacaagagttgactctcctcttcattccatttcaaattctatactttaaaatagttctccttcaaataatgcatttatgggtattgtctatttctgtttgatttgcccttttaaagtagaaatcaactttttattttagaacatttttctctttattaaggtataacttacatatcttaatggcacagacttttaagtgtactgtttagtaagttttgataaatatatgcatccttcaaactacctcctaagatcttagaaggaagcatgggggagctttct

SEQ ID NO: 421858 - DNA, 552 bp, Homo sapiens
tttctggtagtcagagctaaaaggggacaagttcagtgacaagactctcggtgtccacaagaggaaaatagccttgttgttcagaagaatcacagattttctagatactgatgtttgagatgaatgtttcccacaggtctttataaagtgagtactgggagatgtcatttaggatgtccttgacatttttcgttgctcttcctcaggacatccctccaggtagttagttattcaatctcatctgttttccaaattgaaataaaaaggcatggaaaagcaaggcaatccttatgaccttagacccaaaagaaataacgatgggcatgaaattgagagagtacaataaagatggcttcctcaaaacaagagttgactctcctcttcattccatttcaaattctrtactttaaaatagttctccttcaaataatgcatttatgggtattgtctatttctgtttgatttgcccttttaaagtagaaatcaactttttattttagaacatttttctctttattaaggtataacttacatatcttaatggcacagact

SEQ ID NO: 421859 - DNA, 552 bp, Homo sapiens
tttctggtagtcagagctaaaaggggacaagttcagtgacaagactctcggtgtccacaagaggaaaatagccttgttgttcagaagaatcacagattttctagatactgatgtttgagatgaatgtttcccacaggtctttataaagtgagtactgggagatgtcatttaggatgtccttgacatttttcgttgctcttcctcaggacatccctccaggtagttagttattcaatctcatctgttttccaaattgaaataaaaaggcatggaaaagcaaggcaatccttatgaccttagacccaaaagaaataacgatgggcatgaaattgagagagtacaataaagatggcttcctcaaaacaagagttgactctcctcttcattccatttcaaattctatactttaaaatagttctccttcaaataatgcatttatgggtattgtctatttctgtttgatttkcccttttaaagtagaaatcaactttttattttagaacatttttctctttattaaggtataacttacatatcttaatggcacagact

SEQ ID NO: 421860 - DNA, 585 bp, Homo sapiens
ggggagaggcagaggacagaaggggcagagagagccggtgtggaaagagtggagataggatgaaggtaggaggtatttatgtgacaccaaatcacccctgcctcccatactcaaaaacaagctccttgaggtcagaaatttcaccttcattgtcttcatagacccccctcagcaaacatagcttcgggctcatgccttcatgaattgactcattcatttattcacatattttctgagcacttactatgtagacactttcaacaaccagtatttattgtgtgctgttttrgatgaaagtcagcatagactaaagggttcctgatgtcctgaagtttatgttcagggttgggagagggtagacacaggcagataataagcaattttacataaatagaaggtggtcatcactgcttagaactgtgctgtataatgtggtagccatgtaaatataaatatgaagctgagcatcatggaggtaaaggggtctattttatgaaaagtggtcacggatggtctgtctggcaaggtaacatttgggcagggacctaaaggaagtgagcaagtgagcaggcagatatcaaagga

SEQ ID NO: 421861 - DNA, 532 bp, Homo sapiens
  misc_feature (1)...(532): n = A,T,C or G
agatggcaaatatttgcagctctgcaggcaacagctccagaaatgccctgtgagctgccttctcatgtaaacccagcagtgggcctttgtctgtgactcgatttcctccttagggagacctagnctgcgaggcctgcaactgagaaacaccaaaaatggtagtgaaagagcattgtatttttcaactaaaccaatttcctttaggatagaggtcaaaaaagctgtgctttgaaattagtcagctgtgggttcaattccatctccaaattgtctgtgaactggagtttccttaagtacaaartggggctgagctgaccttggtagtgtgttatgttcatacatgcttgtacatgaagcatttagtcccaaaccatccaagcacagggtaaatgaaacaaaggacaactagtatacccttatgttttaaggtaaaaagggttttttgaggttttcgagggtagatagatgctcttggcattcctctaacaaacctaaatgtgattatttctcctgagtgactaaaactgtaaaa

SEQ ID NO: 421862 - DNA, 561 bp, Homo sapiens
tagacaaatggcttataattttgccagatgtttgccaaataccgttaagatattaatgtagagaagctctttcatgttgtcarttttagaaatccaaatcattagagaaatggtctacatgtagatataggtgtttatatcacatagttagtttaaatgaaaaacctcactttacagcatttcaaatggtttacgccagtctatatacccctaagtgattcttaatgaggtcctggaaatgctaaagtttctaaggatcttcagaatcaccacatataaatcttgttcagtatagcttttgttctaaatgcattctattaatttttagaaaattggcagtctatgtatgagatatatgctagcccactgttggatatgattagtcaattaactataaccttctttcctaatcattatagatctgaacagtgtcttataactgggagtgtttttcatccatccatccatctgtctatccatccaaatagacatccaagaaagaattgcctgtttatccagtccttctgtctactcattcatccatgcatccatctgtccatc

SEQ ID NO: 421863 - DNA, 533 bp, Homo sapiens
tagtcactgaggctcttgtggggctgttttactgtggtgcccttgattcctaaccccacattgccgtatcatgaaaatgcctgtggaatgaggggactgtgggttttagtgtgtatttctgcagctcccttttataaggaggctctcttctatgggcccaactctgaatcatgatgccgtttgatttacgactstcttcttgaatgcctggagcagaatccctcagttcataaagctgaggacagaagttttaactataatcaaaatgaagactcttgctcttctttacccagggccttctcccaacctgtatctcctacctcttttctctcctcacagacagaccccaaaatcttagcctgcctattttgttgttgcatggaagtcaggatatctaggtcagtttatccaagtagaaagtgctactttactgagttaactctgtgaaaactgctgcctctttactttatagaaacaaaatcccttgtgtgcaggatattatctctggaagttttcaggggcttccaagtaat

SEQ ID NO: 421864 - DNA, 562 bp, Homo sapiens
tcccattaatggatcctggtattccagaggtggtctgtccagagtacaggaaaatgatcatcttcctcgatccatacactggatttcttatagtgcaatctaagactgcattacttattttgtatccccatcacattgatgtcttatacaattgactcttaaacaatattagtttgaactgtgggtccatttatatataaattagagtgaactgtgtgggtccctttatatatgaatttttttcaaccaagtgtggatcaaaaatacggtatttatgggatgcaaaccccacatatacaaagggccaacttctcgtacacacaggttctgcagggccgactgctggacttyagtatgcccagctttggttctacacaggggtcctgaaatcccctgcatataccgagtgacaactgtaaaaggataataatgctaagtccttttcatatgtatttccttagttgattggttattttatttattgacccagtgatttagtaattgatcaattccttccttcactcaccatccagtgaagcatccagccagcgagaccatggaa

SEQ ID NO: 421865 - DNA, 598 bp, Homo sapiens
gtgtagaatgggggtaataatagtgacttcatacagttgtgaggatttaaaaagttaacccatgtcaactacttagaacagtacctgaatctcagcaactatgtagtaaatattagttactatttgttgctaaaccctttattatttggattctgacatkcatactccactgaaactctttttagggaataaaattattttaagtccccaaatacatcaactcaactttagttaaaattggacagagggagaccccaagtccctagacacaatagtatataaacaacttccagataattaccctttgtttaatgtgatatggaaacattatttacacattattttatgttctaaccacttcatagtattttttaaataagggagaaggttgaagaataattataattcagttaccataaaggctgatattattgtttaaattaaatttgtatttatattaactggttttgttcagaacagcagaggactatataatctatatctttaagattatggaaacagcatctcttaacatgcctacatggggaaagtataaatgtgtcatgggacaatgcatttgctcaccaatcttgtaaaa

SEQ ID NO: 421866 - DNA, 598 bp, Homo sapiens
gtgtagaatgggggtaataatagtgacttcatacagttgtgaggatttaaaaagttaacccatgtcaactacttagaacagtacctgaatctcagcaactatgtagtaaatattagttactatttgttgctaaaccctttattatttggattctgacattcatactccactgaaactctttttagggaataaaattattttaagtccccaaatacatcaactcaactttagttaaaattggacagagrgagaccccaagtccctagacacaatagtatataaacaacttccagataattaccctttgtttaatgtgatatggaaacattatttacacattattttatgttctaaccacttcatagtattttttaaataagggagaaggttgaagaataattataattcagttaccataaaggctgatattattgtttaaattaaatttgtatttatattaactggttttgttcagaacagcagaggactatataatctatatctttaagattatggaaacagcatctcttaacatgcctacatggggaaagtataaatgtgtcatgggacaatgcatttgctcaccaatcttgtaaaa

SEQ ID NO: 421867 - DNA, 528 bp, Homo sapiens
atctttgaaaaaacaattctgatatactgattttttttcagcttgtagaatagcgatctgcaatttctaagtggcaatattttgattttgaatattttttctgcaatttacttctactgattggaagttaaatccttttgagtgtcatgattgatttgtggttttaaggagttctctaaaccatgtagaaatgggagccttacaatggcaatatgaggtgtgtcttcttatggattactctgactgttgagaaaaccaaggtacagaaattattctgaggcccagagagggtgaagttctttatgtgcctgttttggggccatggcttttaaaaagttggtgcaatggcttatccacaatttttcagttaaagatgtgtttctaaaaatatagaactataatctcatagttagtttcaaagttgatacagtgcttagagcctagaggtattctggggcttargtactccttttgccttagttcaaaggaaaaacttagcatatccagcacctctctattgttccagag

SEQ ID NO: 421868 - DNA, 630 bp, Homo sapiens
tttaaattatactagagctatctatagtaaccaaaacaacatagtactggcaataaaaaccaaacacatagaccaatagaacagaagaaagaacgcagagataaatccatatatctwcagtgaactcatttttcaaagatgccaagaacatacatcagggaaaggcagtatcttcaataaattgtactggaaaaactggatatccatatgcagaagaatgaaagtagactgtaatctctcatcatatgcaaaaatctacccaaaatggactggacacttaaatggattggacacttaaattggacacctcaaactataagattgctgaaagaaaaaaattggggaaacaatccaggatattgttctgggcaaaaatttcttgattaataccctaagggcacaggcaaccaaagcaagaatggacaaatgggatcacatcaagttaaaaagcttctcagagcaaaggaaacaaagtgaagagacaactaaaaataggggtaaatatttgtaaactatatcagataagggattaataatcacaatatatagacagctcaaattcaacagtaaaaaaatctaaatccaattttaaataggcaaaagacccaaataaacatttctcaaaagaaa

SEQ ID NO: 421869 - DNA, 559 bp, Homo sapiens
atcattaaaaataataattctgtcttttataaccaacatcctatgcccaggtcatttatatggcagcctaatttgaattctataaaatatataaattaygaatttttaatgtattgactccttgaaaatgccttagctttaaaagtgcaaattagggtatgaaaagaaaagcattaaacagaattcagtagtgatttctacttataattaaaattttaaggtagtgatggaatttgtaaaacctagttataatagggtagtagccagccatttttgtatatagcatcagtgtatttgatgattgcttgtcttttctttagattaaaaagacccctgtagtggggaggagggaactctgccagttatcagactattatcccaaacagtaatcactgaaatatccttattcagctagatgcataaaacacatctcaaggtctttttagtctaattgagttgtaatttttgctggtaacaatgcctttcctagtttacccccttcataatgtgaagaactaccatttctatttcttatttctttgctgctgtcatctttgat

SEQ ID NO: 421870 - DNA, 511 bp, Homo sapiens
aaaaacacctgaataatcatggtgtacattttgggctataaatcctataaatcctgtgtaaatgtacttgcccaaatctasagtaggtagaaataaccttttgacaaaaggaaatcccgattttaaatgatgtaaagcagagcctatgttagtccctcccattcttttaaacatctgtgtaaattataaacagtccccaacttgcaggaatttcctttttttggcatttgggatagtggaaaagccatatgcgttcagtagaaatcatactttgagtgcacatacagccattctgtttttcattttcagtacagtattgaataaatttcacgagatactcagcactattataggctttgtgttaaacgattttgcacaactataggctaatgtaagtgttctgagcacttttaatgtaggataggctaagctatgatgtttagtaagttccgtgcattaaatgcatttttgacttaattttttttcaacttaaatagacttatcaggacat

SEQ ID NO: 421871 - DNA, 603 bp, Homo sapiens
tcacttgtataattaatttgctctgctcaagtaacctcgcacatctatcgacctgcacttagtccagctggatgcaatgacaatcaaattaaccacgtggtaattcagaccagtcaagaaaatgaccctcagcaaattgcaggctggagttgattgtgcagtttgtgactatgtatatgtttttccacttctggagacatgggagacaagcctggcaattgacatactgtaagtgggaaaagcttgagattatttttggaaccaatccattgtctactcctgtcttcctgatgccagggaaaggaaataygagtaattgctgtccaagccgaaagctggttttcatggtgagaattcctccttctttggtaatgttcatatgtggggttttaaaaatagcttttataattacagactatactattaaaggtgtgccactcaattaaccatttgcctccatagcatggggatatcccataatgacaggttaatggattccacgtttaataaaaacaaaagggaccattagagttctagtaaagtcagcagcataactctttgctggccatggattccttgttaaactggcctcaaaagcaaatg

SEQ ID NO: 421872 - DNA, 579 bp, Homo sapiens
attgtctaacacactatctataatttctcaataggaataaaattgtagtatgtttaaaaacaggtcttagatatggaaaacttcattttataattgatggcagtttctaatcaaatgattttaggaaaactagttcatacatctgttttattctttctgacttttaaaataagtatattaatatagwttgtggtagtctatgggctttcaatatgatagttattttttgataagtgtttgtaaaccataagatattaaatacttataagacgtttacatagattctatcataaatatagaaaaaataatcccagaaaacatgactattaatcaaaggaaagcctttttgaaagatcagcaataatattttaaaaataaatctgatgataaaaatatttttgacagtttgttttacagaaaaatttagcttagttgaacaagtcatagaacaaacataagcatgtgctgtcttctagtcacatatctctttacctaaaatcaatttttctagtggaatgataaaaatagcatataacattggcactgtgttaagactttctagaaactagaggcaaatct

SEQ ID NO: 421873 - DNA, 614 bp, Homo sapiens
tcgttactggcataattctgcggtttctactttgtgtccatgaagtttctctgcctctgattccttcactgaacccatagttcttctactggctactgcaggaaacacagacacatgcacacacctttctgatatgaagagggcttcattctgcaccaggtttttctgaaggaataaatccataattgggatctagcaggaaagtattttaatgttcagaaagaaaaaataggtctctgtaaaaatattaactatttttctctggctctggatcagctctgcagttttacattttatccatcgcaaacctacattttcacataaaatactatgtatatagttccagttatgtcacttctcatgaaatgtatatgcttttgaatgactggaataattctgagaaatcatatataatgtaaatatatttattatttacaatgtaaggatctgttatgtatatattaacatatggcagtagtcatagatcggtattttcaataagttaactaaaatgttayaggctcaaaagcataaaattaattaattacaatgtaaagggaatattattttaaacaattatattaaatatttatatttggcaaaatctcatgtgt

SEQ ID NO: 421874 - DNA, 539 bp, Homo sapiens
ataactttaagggacaaatatgaagaatgccatggaagcaaccttatgataagtcatttgtttttctgtaacttgccttactgtttatcttgttaagaaacttgttgagcaattctgctgcatctactggcacctgacaggagtatcatcagtcattgcagaggttttggactacaaactcttttacgggattcaggagggatatggatttaaattttaaactggtttctgtcagtgtgacaaatgaacaccasaaaattgtaggacaatggtagaatgtcgaaatgcatgccaaggtaatgggccaatcttcaagtggaatcaacaaaaatagccttaaaatagctccaggttacaccgttattttcattctatctccaaggcataagaacagcatattattaatttttgtaatcactgcattatgttaagaggctgaataatttattcctgagtaattcaatccatagaataataattttaacaaaactgttaatagagcattgattgttagcaaaattttttgagaagtccaaata

SEQ ID NO: 421875 - DNA, 526 bp, Homo sapiens
tatgaacctattgtgcaatcatttgcttattgaatgacattacaagagtttataaagagtgaaaaaatgcatatcaattgacttcgacagtggaatagaaggtacatcacgagttacagtatgtcaagaatgtatgcatcttcaaataatctaagaagttataaatgtatggttgtgtgtttacwaataagctgctagagctttttttaaaaaaaaaaaactttgaatcagactctaaattatcaacaaagtgcagttattaaaaagttttatttctttagatctatttctatgaaaattaagcacaggagaaactagaatattttttcttgtttaaattttgttctctatcaactgtttattgctaagagtgttagtgattcagaagtgtcttcagttttttggaatataaaattattttcccttttgctgacattgttttaaaaatgtgtcttggtatgatagtaactggagtttccgtcaaacaggttgaatttaaatttaaagaaaagatagattatgcaag

SEQ ID NO: 421876 - DNA, 526 bp, Homo sapiens
tatgaacctattgtgcaatcatttgcttattgaatgacattacaagagtttataaagagtgaaaaaatgcatatcaattgacttcgacagtggaatagaaggtacatcacgagttacagtatgtcaagaatgtatgcatcttcaaataatctaagaagttataaatgtatggttgtgtgtttactaataagctgctagagctttttttwaaaaaaaaaaactttgaatcagactctaaattatcaacaaagtgcagttattaaaaagttttatttctttagatctatttctatgaaaattaagcacaggagaaactagaatattttttcttgtttaaattttgttctctatcaactgtttattgctaagagtgttagtgattcagaagtgtcttcagttttttggaatataaaattattttcccttttgctgacattgttttaaaaatgtgtcttggtatgatagtaactggagtttccgtcaaacaggttgaatttaaatttaaagaaaagatagattatgcaag

SEQ ID NO: 421877 - DNA, 567 bp, Homo sapiens
tagcaaaccaaatacaataaaatataaaaggattatacactgtggtaaaataagatttattttaggtgtataaagcttgtttaatattacaaaatcatttaatataatacatcctatcaactggtcaaattctacaagaatattatatcaataaatgtaagaaaaaacatttgaaaaaaaacccaacaaattcacaagaaaaactgtcagcaaactaaaaatagaggagaacttagtcaactygataatgaaaatctataaaaatccacagctaatgtaatacttaataattagaaactagatacttccctgctaagacaaataacaagacaagaatgcctgttctcctcacccttactcaacattatactggaaattctagttaatgcaatgagaaaataaaataaaagctacaaataggaaagaaagatattgtctttatttgcagatgacatgcttgaatatataaaaaaagatttttaaagattaaagaaaagtaaagcccctgccaaaactagtaagtaattaaatcttgtatcataggttgtaggatacaagatatgtata

SEQ ID NO: 421878 - DNA, 465 bp, Homo sapiens
gatattttcttaacatcctctgcaataatttaacaataggaataaatggattttttagttacataatataattttttccaaagtataagtcataaattttactatcatgatttgaaaacwtttataataatgaaacttttatattttaacaaacaattcagctattacttgtaagtatccatggttcagggcttatttaaatattttaaaagtgagttgcattctctttgctgaatttggatttttttaaattacagttttaaagaatgttgatagaaagctcaaatgaagttttcattgaaagaataatttagtgattattggttcaaaagaaactttaatttcagtacatagtactatgtacacaatctaagataaaaaatattttaatgacatcttagaacatggtagaataggaagatctgggaattggtccctcttggaaacactattaagctggcaaca

SEQ ID NO: 421879 - DNA, 547 bp, Homo sapiens
ttatggaatttgttactagtaaaaaatgcaaaagatgtttaaaaagaagagaaataatataggtcagaaagcaasatctacataaataaacaagaagcgtcaaagacaaaaccaatgaaagtaaagtaaatgcttttatttttcttattcttaattgatctaacagataacagtttgttcaaaataattatagcaacaatgtattcaattatgtatggttctgtatatattttatattcattattatatatgagtgaaatgaatgacagcaataatacaagggataagaggataagttaaaattattttcttattataaggtacctatagtacctgtgaaacagtatagtgttatttaaaaagtgtgcttgaattagttgtaaatacatattgcaaactctagggcaactaccaaaaaataggaaaaaaaaagaaccatagttgatattctgagaaaaaagagaaaatggaaaaatataaaatgctcaattaaaatcgcaacaggcagaagaagagtagaaaacaaaattaggaacaaaaatcaagg

SEQ ID NO: 421880 - DNA, 543 bp, Homo sapiens
aaaccaatgaaagtaaagtaaatgcttttatttttcttattcttarttgatctaacagataacagtttgttcaaaataattatagcaacaatgtattcaattatgtatggttctgtatatattttatattcattattatatatgagtgaaatgaatgacagcaataatacaagggataagaggataagttaaaattattttcttattataaggtacctatagtacctgtgaaacagtatagtgttatttaaaaagtgtgcttgaattagttgtaaatacatattgcaaactctagggcaactaccaaaaaataggaaaaaaaaagaaccatagttgatattctgagaaaaaagagaaaatggaaaaatataaaatgctcaattaaaatcgcaacaggcagaagaagagtagaaaacaaaattaggaacaaaaatcaagggcaataaatagaaaatagtaaaaaaaatatggtggatatcaactcaggtatataataaatcaccttggatgtcaatattctaagtataatactttggcagagat

SEQ ID NO: 421881 - DNA, 543 bp, Homo sapiens
aaaccaatgaaagtaaagtaaatgcttttatttttcttattcttaattgatctaacagataacagtttgttcaaaataattatagcaacaatgtattcaattatgtatggttctgtatatattttatattcattattatatatgagtgaaatgaatgacagcaataatacaagggataagaggataagttaaaattattttcttattataaggtacctatagtacctrtgaaacagtatagtgttatttaaaaagtgtgcttgaattagttgtaaatacatattgcaaactctagggcaactaccaaaaaataggaaaaaaaaagaaccatagttgatattctgagaaaaaagagaaaatggaaaaatataaaatgctcaattaaaatcgcaacaggcagaagaagagtagaaaacaaaattaggaacaaaaatcaagggcaataaatagaaaatagtaaaaaaaatatggtggatatcaactcaggtatataataaatcaccttggatgtcaatattctaagtataatactttggcagagat

SEQ ID NO: 421882 - DNA, 543 bp, Homo sapiens
aaaccaatgaaagtaaagtaaatgcttttatttttcttattcttaattgatctaacagataacagtttgttcaaaataattatagcaacaatgtattcaattatgtatggttctgtatatattttatattcattattatatatgagtgaaatgaatgacagcaataatacaagggataagaggataagttaaaattattttcttattataaggtacctatagtacctgtgaaacagtatagtgttatttaaaaagtgtgcttgaattagttgtaaatacatattgcaaactctagggcaactaccaaaaaataggaaaaaaaaagaaccatagttgatattctgagaaaaaagagaaaatggaaaaatataaaatgctcarttaaaatcgcaacaggcagaagaagagtagaaaacaaaattaggaacaaaaatcaagggcaataaatagaaaatagtaaaaaaaatatggtggatatcaactcaggtatataataaatcaccttggatgtcaatattctaagtataatactttggcagagat

SEQ ID NO: 421883 - DNA, 554 bp, Homo sapiens
tcttaaagctttgaaataataaatcttctctgttttttgcatgaatttgccaattgtccatctaggacttcataaactgattaaaccaattctgttctttagcttcttcctctttgtattcctcccatgtacccactgtccaggtgacagaaggtggcactatctcattgccacaggggacataagcttyttagtgaaaaggatgaaaggaagttagatctttacctacaataaaatgagagagagcgagagagagagagagaggaagagagagagaaagagaattagcctcttgaatattaaaaaaaaaaaccctggtaattatgatagcctcaggatatatggaaaacctaaaatgataattatgttatttataatagtttgtaccttttgaatgaatcatctattcaaaacttaattttttttttaatttggctttttacagattctttttctagagtaatttttatagcctttagtgtgctgataagtattaaaacctctaatgtttttccaatttaattgacatggaacatttgtatttgccataactt

SEQ ID NO: 421884 - DNA, 621 bp, Homo sapiens
ctggtaaggtattttgaaattaagttcagagaatcacttttattgacaataggctgatattccaattgacaggcatttttttctggttgtaagaaagttaaattataattgttttcatctacattattgcttggggaaccatttgaaatgtaaaactgttctttattcctttttttcagattccagataacagcatatctatgagatttagaatgtgtaaacatttcagaatgttatctttcaaaaatgatcctatcctttatattcctgatagataaattctacaatttactcccattgttctgctgtgtgatgattttacttctccctttggggataaatataaaacctgaaaggaaacactgacgcttaattttaacacataaaacttatttaagaggaaagagtgattcctacaattttcacaaaattycatcttaaaatatgtatcacttaattgcagttggtaaacagtgaaataacaataaataatgctcatgaatgaataacatgatcttcatttcatgatttgtttaaacctcaaacatatatgacttcattgatttcttgttaacactttaaccttgttatttctatgggccacagatctcagatatacag

SEQ ID NO: 421885 - DNA, 557 bp, Homo sapiens
gatatcagtgatgaccagatacaagcagagatgctcgagctgaatactgcaattggcatactgaagaacacgagtcttgtagtcgcagaaatgatcaagcaggagaccgacttagtgagcttaatgtgatcatacagagaggagaataaagaagaaagatatgataccaatgaggaatgcctgcaggatctagaaaacagcctcaatagggcaaatctacgagttattgtccttatagaggaggtcgagacagagataggggtagaaagtttattcagcaggataacagagaatctcctaaacctgaataaagatatcaatatacaagtaaraagattgaagctgtaataaagtctcccagtaaagaaatgcccagggcctgatggcttcactgttgaattctaccaaatgttcaaagaagaactaataccaatcctactcaaactattccaaaaaatagagaaggaaatacttctaaactcattctatgaggccagtattaccctgataccaaaactagacacacatacaacataaaaagaaaactaccagccaat

SEQ ID NO: 421886 - DNA, 532 bp, Homo sapiens
aatagacaaatttaatatatgtaaataaggattaagtactctaagaagtaaagattgagcactcataaaaattaaagatttaaggtrgggtgtgatggcttacgcctgtaatctcagcactttgggaggccaaggcaggactccttgagcccaggagttccacaccagcctgggcaatatggtaaaactccatttctacaaaaaacttaaaaattagccaggtgtggtggtgcatgcctgtagtcccaactactcaggaggctgaggcaggaggtttgcttgagcccagaagtttgaggctgcagtgagctctggcctgggtaacagagcaagaccctgactcaaaaaaaagaggaaaaaaaaaaaaggaggactttataaggtctatattatccaacatgtacaagaaaacttaggcataattttaatttaaagtaaaggtagactttgtttgataaacaaaaatgtcttcattatgtttctatgaaacagaccagtattttaatgtttaattttcagtgatgtaaagttc

SEQ ID NO: 421887 - DNA, 532 bp, Homo sapiens
aatagacaaatttaatatatgtaaataaggattaagtactctaagaagtaaagattgagcactcataaaaattaaagatttaaggtagggtgtgatggcttaygcctgtaatctcagcactttgggaggccaaggcaggactccttgagcccaggagttccacaccagcctgggcaatatggtaaaactccatttctacaaaaaacttaaaaattagccaggtgtggtggtgcatgcctgtagtcccaactactcaggaggctgaggcaggaggtttgcttgagcccagaagtttgaggctgcagtgagctctggcctgggtaacagagcaagaccctgactcaaaaaaaagaggaaaaaaaaaaaaggaggactttataaggtctatattatccaacatgtacaagaaaacttaggcataattttaatttaaagtaaaggtagactttgtttgataaacaaaaatgtcttcattatgtttctatgaaacagaccagtattttaatgtttaattttcagtgatgtaaagttc

SEQ ID NO: 421888 - DNA, 589 bp, Homo sapiens
atttcgtttaaggttcactactggagactttgtctttaacacatttttttttttcttgagacagagtttcactcttgtcccccaggctggagtgcagcggcatgatctcggctcactgcaaactccccctcccaagttcaagttattctcctgccccagcctcccaagtagctgggattacaggtgcccgccaccacgcccggccgatttttgtatttttagtagagacaggttttgccatgttgccaagctggtctggaactcctgacctcgtgtccgcccaacccttccctcccaaagtggtaggattacaggcatgagcactgtgccgggacaacacattttaatttattgccgtaactgtatattttgcctaatacttccatattgtttttattttctattttttattcactyttcctcctatcactgctctttcttctctcttttcttttttcttcttctgcttcctgtcacctcatacctcctcctcctccttttccatttacctattgctatgtagacaactttttcgtcactgttatccttgtttctcttcaaattattttctaattttacatggttttaa

SEQ ID NO: 421889 - DNA, 552 bp, Homo sapiens
ttattacttatattgttagataggcatattttatttcctccaataggaccccagaaaattattcttcctcagtctatagtaatgatatggaagtaaaatttcagtrattgtgggattttcctcccagcttggcagctagctgagagcaagccccttaactcctttaattgaagtttttccctttcttatgtttgtcaaaatatttgaagtgttatttaaatatagagatagcctttctgcacatttttattcatctgatgatggaaattaaaacctatgtttatttattcatttgatcagtcactcagcagtatttgaaatgcctactgtgtgccatgtacctgttaagtgacagggatgaaactgtggatgagtaaaacctaagccctaccatacagaacattttgcgtcaggaaggaagaccagtatgtaaatatacaattgcagaaaatgtgatggctgacctaacagggctatgggctatgtgagcacatggaaggggaaagtgtcccgggttgagggttcagagagcatcttgaagaaaataatgcc

SEQ ID NO: 421890 - DNA, 552 bp, Homo sapiens
ttattacttatattgttagataggcatattttatttcctccaataggaccccagaaaattattcttcctcagtctatagtaatgatatggaagtaaaatttcagtaattgtgggattttcctcccagcttggcagctagctgagagcaagccccttaactcctttaattgaagtttttccctttcttatgtttgtcaaaatatttraagtgttatttaaatatagagatagcctttctgcacatttttattcatctgatgatggaaattaaaacctatgtttatttattcatttgatcagtcactcagcagtatttgaaatgcctactgtgtgccatgtacctgttaagtgacagggatgaaactgtggatgagtaaaacctaagccctaccatacagaacattttgcgtcaggaaggaagaccagtatgtaaatatacaattgcagaaaatgtgatggctgacctaacagggctatgggctatgtgagcacatggaaggggaaagtgtcccgggttgagggttcagagagcatcttgaagaaaataatgcc

SEQ ID NO: 421891 - DNA, 552 bp, Homo sapiens
ttattacttatattgttagataggcatattttatttcctccaataggaccccagaaaattattcttcctcagtctatagtaatgatatggaagtaaaatttcagtaattgtgggattttcctcccagcttggcagctagctgagagcaagccccttaactcctttaattgaagtttttccctttcttatgtttgtcaaaatatttgaagtgttatttaaatatagagatagcctttctgcacatttttattyatctgatgatggaaattaaaacctatgtttatttattcatttgatcagtcactcagcagtatttgaaatgcctactgtgtgccatgtacctgttaagtgacagggatgaaactgtggatgagtaaaacctaagccctaccatacagaacattttgcgtcaggaaggaagaccagtatgtaaatatacaattgcagaaaatgtgatggctgacctaacagggctatgggctatgtgagcacatggaaggggaaagtgtcccgggttgagggttcagagagcatcttgaagaaaataatgcc

SEQ ID NO: 421892 - DNA, 582 bp, Homo sapiens
ctctgtcatgacatactacatacagagtaacacagtgaacacagttttcatagtaacaaccagcaggaatataccatcaaaattaccatcaaaattaccatcaaaaagaaacactgctcccatttatccttgaatagtgttttatggctgtttaggagaaagtcctaattcagaggaagaagaaaattccaatttgattttctgtgaggcaaccatactattgcagattcaatacacagaatrgtatatttgctcattgattattgatgaatgagcattgattgtgctcttactgtggtacttgtgtacagtatgtgcattgaatacatgacatcacttataagggaataataatttttaaaaactttacagaaaatatatcatattgaactgtcactaacattaccctaaactgaattttgttattgcatattagctgtcacatccttcattccaaatggaaactgagttttttaatttctagtggaaaacacaatgcatgtttaagtccaggtataagaataacaccaaagacttcctggtacaaagagtaatttgttcaattttctgacttgtttcagc

SEQ ID NO: 421893 - DNA, 438 bp, Homo sapiens
taagaaagggaaaggaggaagaaatgaaggaagaaggaaattttagaggcattctttttgaatttctaagaatgacatacaagaaagtatagatatgtgtatataaaagtatataaagtatataaagtgtatatatagatgtatatgatggaaattttaacattacaatacatttattgaagacaagggattagrtacatcagaatgtcatcactaaaagtggatgagtcccaccactcgtggactgcactgttcccaacatggtttgagagatggtctgctttgaggcagagaaatagtgtagataatcctcagggttcttttagcctcttttgttaccatgcagtccttgagctatcttctccatctagactttacaggactggaaccaggtatctaattgtggagggaaatgacggtgcaacattgttgcagatc

SEQ ID NO: 421894 - DNA, 464 bp, Homo sapiens
aagggaaatcacacacacacacacacacacacacacactytataagataacagatgatgaatataaaaagataatgtaggatgatgaactaaaaatgtaagggcttcaaaatctaccaaaaccatctccgattttcagctatgacagtgtgactttggacaagttacatcaacactttggtttattttcctttttttctagagaataggtgtaatagtgcacatcttacattgctgctgtgactaaataatgtcatatgtataaatcacattgcttggtgcctaagccaaagaatccaactgcataatggtgactctcatcattataagaaaaaaaaaaaccaaaaactgatgagttaccctcaaattttagaggagggagaaataattttaagaaatatcatgggagtaaactttatagaacttattattattattattattattattattattattgagaca

SEQ ID NO: 421895 - DNA, 527 bp, Homo sapiens
acaacaacaacaaaaaattattctaccttttggtttaagcactgactgactgataattcttcaaaaaattttcctatttttgaagtgacttagtctgtaacattttagtgtaaattaacataaatttaagttatctgatgactgaagaagttacagccccaacacagaggtgagaaaactcctaactaagggaaaatatttgaagtgtggggggagtaaaagtatggaagtgatgagattagggtatcaaaggcagtttcatctattcacttttattgcctaagactaactcaamcacaattaaaaatataaatttagaaagatgtttcttaaggaatgcttgctttaaaagtaaaaggcaatgtttctgaccagaaagactatgtgtttttctatataataatactacttaaggcaaagtttttgtttctgggataaataaaagacatttgaaatattatctcttggtatagtttagtaccaattttaagcctttcaagaaataggaaaaaggttagaaaggaatt

SEQ ID NO: 421896 - DNA, 582 bp, Homo sapiens
ttcatctattcacttttattgcctaagactaactcaaacacaattaaaaatataaatttagaaagatgtttcttaaggaatgcttgctttaaaagtaaaaggcaatgtttctgaccagaaagactatgtgtttttctatataataatactacttaaggcaaagttwttgtttctgggataaataaaagacatttgaaatattatctcttggtatagtttagtaccaattttaagcctttcaagaaataggaaaaaggttagaaaggaattgtctttctacaaaaacccatttttacaggacagatttaaaaattcatcatgtttgtcaaaatatgacaattatttatcaaacttggtagacttcaggactgtttgatcctatttcatttactttctgtaagccatccctcatcttcttttgacagataaatacaaacaccatttacagacataatttttcccagagcaatcaacattggatttaataatttccagcgattattttttccttttattattattattattttggccctaattccagaatataatggaacataaaagcaggattttgtggcaagc

SEQ ID NO: 421897 - DNA, 310 bp, Homo sapiens
agactaactcaaacacaattaaaaatataaatttagaaagatgtttcttaaggaatgcttgctttaaaagtaaaaggcaatgtttctgaccagaaagactatgtgtttttctatataataatactacttaaggcaaagtttttgtttctgggataaataaaaracatttgaaatattatctcttggtatagtttagtaccaattttaagcctttcaagaaataggaaaaaggttagaaaggaattgtctttctacaaaaacccatttttacaggacagatttaaaaattcatcatgtttgtcaaaatatg

SEQ ID NO: 421898 - DNA, 612 bp, Homo sapiens
tcagtttaaagaaatattgcacaataatgtaactattaggtgtagatgccaaaaaccattaagatgacattaaaattactgaatattggaaaatttaagagaagctaaatctctaatatgggctttcactctcctaaattcatggtctcttctatgatwctataatttttatattattagactatagaagaacagctcttctctagatcaagggttgaagaattatctatatacacacgtatcccaggccaacgttctctcaacagattgactctcaagcaattattaaagtgtggaccataaataatcctaaaagcttcatgagaaaaaaaatactagaataagagatagagtgaaaacaacaaccacttattgagcatctactctattccatgctctatgcttaacattatttctatgtaacaatcatcagaggtagggtgttttatttcctctgttacctataagaaaactaacatggataaattttaagaaattttcttaacattgaggacacagaagtcagtgaactgagcttctatcaccatgtgactaaaataacttattttccatctgtggtatagtttctcccttaaatcaaaggtttacaaa

SEQ ID NO: 421899 - DNA, 612 bp, Homo sapiens
tcagtttaaagaaatattgcacaataatgtaactattaggtgtagatgccaaaaaccattaagatgacattaaaattactgaatattggaaaatttaagagaagctaaatctctaatatgggctttcactctcctaaattcatggtctcttctatgatactataatttttatattattagactatagaagaacagctcttctctagatcaagggttgaagaattatctatatacacacgtatcccaggccaacgttctctcaacagattgactctcaagcaattattaaagtgtggaccataaataatcctaaaagcttcatgagaaaaaaaatactagaataagagatagagtgaaaacaacaaccacttattgagcatctactctattccatgctctatgcttaacattatttctatgtaacaatcatcagaggtagggtgttttatttcctctgttacctataagaaaactaacatggataaattttaagaaattttcttaacattgaggacacagaagtcagtgaactgagcttctatcaycatgtgactaaaataacttattttccatctgtggtatagtttctcccttaaatcaaaggtttacaaa

SEQ ID NO: 421900 - DNA, 412 bp, Homo sapiens
gtgtgatttatccagaaggtgatagaaatatcattttcctagaccacagatataagccaaggagaatagaaagctctgacctaaacttcacaagtgtcccttccaagcagggacacgtaagagtaaacaaaagaagaagatcaaaytaaactcaaagtgagaagataggaaaaaataaagatgagaatataaatcaataaaacagaaaggggaaagaaaatagagaaaagtccatgaaaacaaaggctgactcaagaagatcaataagattgataaatctctagacagactgatcaggaaaaaaataagacaagatacaaattattagtatcaagaatgaggaaggtgaaatcactacagattctacacggtattaaaataataagaaacattatgatcaactccattcctt

SEQ ID NO: 421901 - DNA, 631 bp, Homo sapiens
cgacaggtatttctttacaacaacacaggagcggctgtatatatatatatattcatacatatgcacaatgtacagtgacatacacaattcaaaaacagccttgaggggaaaaaacacaaacgctatccaaaaaatgcaggtatagcaataattgcaaagaaacagaatttaaactaaaaagcagtgaataagtcaaagataataattcacaataacataagttttatgttacagtgtaaattccaaaagaagccatagtcattaaagtttatacacctaataaatatatgtcacatatagaaagtaaagctgagtagaaataacatgcatagattagactttaacatagctctcaaatcaggatattaaatagatatgaaataaataataacaatgatcgggtttgattcaaacagacacataaaatacacacagatctctgaattccaaaaatagagaaaacattctattcaaatgtacacagaattttcaaaaaaaaattcacatgtatggtcataaaraaatgtccacatattttaaaaagcaggtatttcctaggttatatccagtaaaagcagatgcgtccctagacctaatacaataaaaattagaaattcacaatataaggata

SEQ ID NO: 421902 - DNA, 615 bp, Homo sapiens
gatgcgtccctagacctaatacaataaaaattagaaattcacaatataaggataaactcccaaatctatccactggcaaaatttaaaagtcctttctatataacggcagagtttcaatcaagaaraaaaatcatgtattatttttaaatgattaagaaacatcaaaaaaatctctgagacgtggcaaatgtggtattcagaggaaaaaaatacagcttcaaacatgcaaaactgtaagactaaagaattacaataaataatgccctattcaaaaattaagccaataagaatcaacatataacccatgagattcgctatctagggaagtaaacccaccctaatactgtgtttattaaaatgctgttaatgagatcggaggtttaaacaacttttcgctttagaaagtgaaataaagctgactgaaataaaacctaatctatgaaattattctgtatatgaattgacctgaagtaatgaacagttcaatgactgactcatgactcttgttctggtccaggctaatcattctagttggcatactattaaacacacatttctgattgaaacatctgctaaaaaaataacatcaaacgacattacaaaatcaaaatggaa

SEQ ID NO: 421903 - DNA, 487 bp, Homo sapiens
tgtcttaaagtagccaccttgcagtaggaaaataccagtttcatagggctgtttcttatagcagccttcaaactaagtcagtggtataaaatyaaggcctaaatgactaaattatatttctttggttttttttttttttttttttttttttttttgagatggagtctcgctctgtcaccctggctggaatgcagtggcatggcctgggctcactgaaaactccgctttctgggttcaggtgatttctcctgcctcagcctcccaagtaggtgggattacaggtgcacatcataacacccggctaattttttgtatttttagtagagacggggtttcactatgttggctagatttgtctcggactcctgacctcgtggtctgcccgtctcagcctcccaaactgctgggatacagaggtgtgagccaccgtgcctggcctccttggggatcttaaacagtgcattctaactacacagcgttctgaccc

SEQ ID NO: 421904 - DNA, 374 bp, Homo sapiens
tagggatggatgatgtccataattatgtggattttratgcttttacaactagaaattaatatagatgaatatagaattagtatattaagtaatgtgtttgtgtatgaatatgtagcttctgtctttaatgttcttccacataagacattttccagtaataaaaaaaagcccttatgtgacttgaatagtctgtttatgcttaagaagcatcttagtctaattgatattgtttcttaattttgtctcttgtctgattttgtaatttcaaaatatatttagcatgcaaagaaaatgtttatgttacactgcaaagcatttcttagttggtattttccttgtttggttctttgcagtgagcatatattgagcattaa

SEQ ID NO: 421905 - DNA, 374 bp, Homo sapiens
tagggatggatgatgtccataattatgtggattttgatgcttttacaactagaaattaatatagaygaatatagaattagtatattaagtaatgtgtttgtgtatgaatatgtagcttctgtctttaatgttcttccacataagacattttccagtaataaaaaaaagcccttatgtgacttgaatagtctgtttatgcttaagaagcatcttagtctaattgatattgtttcttaattttgtctcttgtctgattttgtaatttcaaaatatatttagcatgcaaagaaaatgtttatgttacactgcaaagcatttcttagttggtattttccttgtttggttctttgcagtgagcatatattgagcattaa

SEQ ID NO: 421906 - DNA, 462 bp, Homo sapiens
atattaagtaatgtgtttgtgtatgaatatgtagcttctgtctttaatgttcttccacataagacattttccagtaatmaaaaaaagcccttatgtgacttgaatagtctgtttatgcttaagaagcatcttagtctaattgatattgtttcttaattttgtctcttgtctgattttgtaatttcaaaatatatttagcatgcaaagaaaatgtttatgttacactgcaaagcatttcttagttggtattttccttgtttggttctttgcagtgagcatatattgagcattaattaggtatccagcattatcattggcattaggaatagaaaattaaagaagacctgcttatggtcttaattagatatagccacaaataattgcaaaactatacgattaaatttaatgtggttacatttagattaaataccctacagtgtttttattgatacctctttctga

SEQ ID NO: 421907 - DNA, 462 bp, Homo sapiens
atattaagtaatgtgtttgtgtatgaatatgtagcttctgtctttaatgttcttccacataagacattttccagtaataaaaaaaagcccttatgtgayttgaatagtctgtttatgcttaagaagcatcttagtctaattgatattgtttcttaattttgtctcttgtctgattttgtaatttcaaaatatatttagcatgcaaagaaaatgtttatgttacactgcaaagcatttcttagttggtattttccttgtttggttctttgcagtgagcatatattgagcattaattaggtatccagcattatcattggcattaggaatagaaaattaaagaagacctgcttatggtcttaattagatatagccacaaataattgcaaaactatacgattaaatttaatgtggttacatttagattaaataccctacagtgtttttattgatacctctttctga

SEQ ID NO: 421908 - DNA, 462 bp, Homo sapiens
atattaagtaatgtgtttgtgtatgaatatgtagcttctgtctttaatgttcttccacataagacattttccagtaataaaaaaaagcccttatgtgacttgaatagtctgtttatgcttaagaagcatcttagtctaattgatattgtttcttaattttgtctcttgtctgattttgtaatttcaaaatatatttagcatkcaaagaaaatgtttatgttacactgcaaagcatttcttagttggtattttccttgtttggttctttgcagtgagcatatattgagcattaattaggtatccagcattatcattggcattaggaatagaaaattaaagaagacctgcttatggtcttaattagatatagccacaaataattgcaaaactatacgattaaatttaatgtggttacatttagattaaataccctacagtgtttttattgatacctctttctga

SEQ ID NO: 421909 - DNA, 462 bp, Homo sapiens
atattaagtaatgtgtttgtgtatgaatatgtagcttctgtctttaatgttcttccacataagacattttccagtaataaaaaaaagcccttatgtgacttgaatagtctgtttatgcttaagaagcatcttagtctaattgatattgtttcttaattttgtctcttgtctgattttgtaatttcaaaatatatttagcatgcaaagaaaatgtttatgttacactgcaaagcatttcttagttggtattttccttgtttggttctttgcagtgagcatatattgagcattaattaggtatccagcattatcattggcattaggaatagaaaattaaagaagacctgcttatggtcttaaktagatatagccacaaataattgcaaaactatacgattaaatttaatgtggttacatttagattaaataccctacagtgtttttattgatacctctttctga

SEQ ID NO: 421910 - DNA, 618 bp, Homo sapiens
aagaataaagtagcttgtcttcaggggcacyggggaggggatgtgataggatttaaacctctcactacagacgtagaagaattagagttgagtcaaaacgtcagtcatgtgtttgaatttccattccaggaaggacactttctactattattttaatgtacatctgcatctctctaaaagccaccttgagtagatcctggtcagcataattccaaaatgaaatatgtggcatttacaaatttgtaagggggttatcttttcctattgtatttcatctcttggtcatttctcttttctgtgatttccgcttgcacccccatgattctaatgagcatgataatttggggatgttaccagcatcttcatttacaggctgagaatttttgttgtaaccagcaagaattatgcccaactgccatgatcagtctgtttttattatttagttttataagaaataagcgtcaatatcttagagttacgtgacataaataggactatgtaccttcatattttggtaaaaattagataaaatattcagtaaacatttactcgataccttgtatctgcactcagtttcttgggaaggattaaaagaacttgaaggaagagtacttgtcc

SEQ ID NO: 421911 - DNA, 618 bp, Homo sapiens
aagaataaagtagcttgtcttcaggggcaccggggaggggatgtgataggatttaaacctctcactacagacgtagaagaattagagttgagtcaaaacgtcagtcatgtgtttgaatttccattccaggaaggacactttctactattattttaatgtacatctgcatctctctaaaagccaccttgagtagatcctggtcagcataattccaaaatgaaatatgtggcatttacaaatttgtaagggggttatcttttcctattgtatttcatctcttggtcatttctcttttctgtgatttccgcttgcacccccatgattctaatgagcatgataatttggggatgttaccagcatcttcayttacaggctgagaatttttgttgtaaccagcaagaattatgcccaactgccatgatcagtctgtttttattatttagttttataagaaataagcgtcaatatcttagagttacgtgacataaataggactatgtaccttcatattttggtaaaaattagataaaatattcagtaaacatttactcgataccttgtatctgcactcagtttcttgggaaggattaaaagaacttgaaggaagagtacttgtcc

SEQ ID NO: 421912 - DNA, 629 bp, Homo sapiens
atgttgaactccaagaatgatcaaatcacagtttagaacccctttgttgggccctataaagggtttccggatatcaaatgataaatagtctccagatgaagaaatgctctataacgccccaccgctgtgttttcctatattttgtccttttctgaaaactytaaatacacgaatttttggtagaaatgaaaatctttctgttttatatatttgtttctgtccatggcactctgatatctttgaatctagtaaggatatagccttgtcttatttataccagcaagcagtgttgtcacttaatgctctcatttttcacgtaaatgactgacattttcccaagtcttcacaagtgatttttgaagacgttgctgcattgagcagagactatgtcattgtaattgcagaagtttttaaattaaatatgtttaataaaattttagagcctgtttctgtggaacacataacacataatggtggtgtaatgtgtatttaaccataaattagcttcacaaaaatttgtgtacttaaaagtgtttatatccaaagaaattcttatttactgctcagtaatctcttgtgtagaagaaaatatgtaacatagtttgctgagtctttgataataaccccca

SEQ ID NO: 421913 - DNA, 629 bp, Homo sapiens
atgttgaactccaagaatgatcaaatcacagtttagaacccctttgttgggccctataaagggtttccggatatcaaatgataaatagtctccagatgaagaaatgctctataacgccccaccgctgtgttttcctatattttgtccttttctgaaaactttaaatacacgaatttttggtagaaatgaaaatctttctgttttatatatttgtttctgtccatggcactctgatatctttgaatctagtaaggatatagccttgtcttatttataccagcaagcagtgttgtcacttaatgctctcatttttcacgtaaatgactgacattttcccaagtcttcacaagtgatttttgaagacgttgctgcattragcagagactatgtcattgtaattgcagaagtttttaaattaaatatgtttaataaaattttagagcctgtttctgtggaacacataacacataatggtggtgtaatgtgtatttaaccataaattagcttcacaaaaatttgtgtacttaaaagtgtttatatccaaagaaattcttatttactgctcagtaatctcttgtgtagaagaaaatatgtaacatagtttgctgagtctttgataataaccccca

SEQ ID NO: 421914 - DNA, 586 bp, Homo sapiens
aaactcactttatggggacctgstatattcgcagtcgaacagaatattggattattgttgcttcagagcttaatggaagcagaggtggaagaatgagtaaaccacagggactcaattcttctctctgtaggggtaacacatcgacactaggataggtgcttcatgttagcaaaatgcgatgcagtgcatgtcaaactgtggaagcaaaacaatcaagaaaaaaatttcttaagtattatttatttatttattgttattatactttaagttttagggtacatgtgcacaacgtgcaggtttgttaaaatgtaactgtcaatgatcatggcaaatattttgatatataaaaggtgattaacatgaaaaaagcctctgatatttcaaatattttggttagatttgttttatgggaatctaattacatattaggtatttggagtgtaatgtatacatttcttgcataagtgaatgaagagatggcaggagggctaaagttgagaatccaggaaatggaaaaacaccagaagtctgcatgactgtggacaacatgagtatttttgttaactatgcttctgtatgtagatat

SEQ ID NO: 421915 - DNA, 586 bp, Homo sapiens
aaactcactttatggggacctgctatattcgcagtcgaacagaatattsgattattgttgcttcagagcttaatggaagcagaggtggaagaatgagtaaaccacagggactcaattcttctctctgtaggggtaacacatcgacactaggataggtgcttcatgttagcaaaatgcgatgcagtgcatgtcaaactgtggaagcaaaacaatcaagaaaaaaatttcttaagtattatttatttatttattgttattatactttaagttttagggtacatgtgcacaacgtgcaggtttgttaaaatgtaactgtcaatgatcatggcaaatattttgatatataaaaggtgattaacatgaaaaaagcctctgatatttcaaatattttggttagatttgttttatgggaatctaattacatattaggtatttggagtgtaatgtatacatttcttgcataagtgaatgaagagatggcaggagggctaaagttgagaatccaggaaatggaaaaacaccagaagtctgcatgactgtggacaacatgagtatttttgttaactatgcttctgtatgtagatat

SEQ ID NO: 421916 - DNA, 612 bp, Homo sapiens
gggtaacacatcgacactaggataggtgcttcatgttagcaaaatgcgatgcagtgcatgtcaaactgtggaagcwaaacaatcaagaaaaaaatttcttaagtattatttatttatttattgttattatactttaagttttagggtacatgtgcacaacgtgcaggtttgttaaaatgtaactgtcaatgatcatggcaaatattttgatatataaaaggtgattaacatgaaaaaagcctctgatatttcaaatattttggttagatttgttttatgggaatctaattacatattaggtatttggagtgtaatgtatacatttcttgcataagtgaatgaagagatggcaggagggctaaagttgagaatccaggaaatggaaaaacaccagaagtctgcatgactgtggacaacatgagtatttttgttaactatgcttctgtatgtagatatctgaactaatgaactgagaatacatcctgcaagcagaagggaatgatacattttaatgaaattgatagtttttaagttagaggacaaaatgaagaacaggaaaactattgtagtattgtagtataaatggttcttgggtgatttcttcagggtaca

SEQ ID NO: 421917 - DNA, 593 bp, Homo sapiens
agtcgaacagaatattggattattgttgcttcagagcttaatggaagcagaggtggaagaatgagtaaaccacagggactcaattcttctctctgtaggggtaacacatcgacactaggataggtgcttcatgttagcaaaatgcgatgcagtgcatgtcaaactgtggaagcaaaacaatcaagaaawaaatttcttaagtattatttatttatttattgttattatactttaagttttagggtacatgtgcacaacgtgcaggtttgttaaaatgtaactgtcaatgatcatggcaaatattttgatatataaaaggtgattaacatgaaaaaagcctctgatatttcaaatattttggttagatttgttttatgggaatctaattacatattaggtatttggagtgtaatgtatacatttcttgcataagtgaatgaagagatggcaggagggctaaagttgagaatccaggaaatggaaaaacaccagaagtctgcatgactgtggacaacatgagtatttttgttaactatgcttctgtatgtagatatctgaactaatgaactgagaatacatcctgcaagcagaag

SEQ ID NO: 421918 - DNA, 593 bp, Homo sapiens
agtcgaacagaatattggattattgttgcttcagagcttaatggaagcagaggtggaagaatgagtaaaccacagggactcaattcttctctctgtaggggtaacacatcgacactaggataggtgcttcatgttagcaaaatgcgatgcagtgcatgtcaaactgtggaagcaaaacaatcaagaaaaaaatttcttaagtattatttatttatttatygttattatactttaagttttagggtacatgtgcacaacgtgcaggtttgttaaaatgtaactgtcaatgatcatggcaaatattttgatatataaaaggtgattaacatgaaaaaagcctctgatatttcaaatattttggttagatttgttttatgggaatctaattacatattaggtatttggagtgtaatgtatacatttcttgcataagtgaatgaagagatggcaggagggctaaagttgagaatccaggaaatggaaaaacaccagaagtctgcatgactgtggacaacatgagtatttttgttaactatgcttctgtatgtagatatctgaactaatgaactgagaatacatcctgcaagcagaag

SEQ ID NO: 421919 - DNA, 612 bp, Homo sapiens
gggtaacacatcgacactaggataggtgcttcatgttagcaaaatgcgatgcagtgcatgtcaaactgtggaagcaaaacaatcaagaaaaaaatttcttaagtattatttatttatttattgttattatactttaagttttaggktacatgtgcacaacgtgcaggtttgttaaaatgtaactgtcaatgatcatggcaaatattttgatatataaaaggtgattaacatgaaaaaagcctctgatatttcaaatattttggttagatttgttttatgggaatctaattacatattaggtatttggagtgtaatgtatacatttcttgcataagtgaatgaagagatggcaggagggctaaagttgagaatccaggaaatggaaaaacaccagaagtctgcatgactgtggacaacatgagtatttttgttaactatgcttctgtatgtagatatctgaactaatgaactgagaatacatcctgcaagcagaagggaatgatacattttaatgaaattgatagtttttaagttagaggacaaaatgaagaacaggaaaactattgtagtattgtagtataaatggttcttgggtgatttcttcagggtaca

SEQ ID NO: 421920 - DNA, 612 bp, Homo sapiens
gggtaacacatcgacactaggataggtgcttcatgttagcaaaatgcgatgcagtgcatgtcaaactgtggaagcaaaacaatcaagaaaaaaatttcttaagtattatttatttatttattgttattatactttaagttttagggtacatgtgcacaacgtgcaggtttgttaaaatgtaactgtcaatgatcatggcaaatattttgatatataaaaggtgattaacaygaaaaaagcctctgatatttcaaatattttggttagatttgttttatgggaatctaattacatattaggtatttggagtgtaatgtatacatttcttgcataagtgaatgaagagatggcaggagggctaaagttgagaatccaggaaatggaaaaacaccagaagtctgcatgactgtggacaacatgagtatttttgttaactatgcttctgtatgtagatatctgaactaatgaactgagaatacatcctgcaagcagaagggaatgatacattttaatgaaattgatagtttttaagttagaggacaaaatgaagaacaggaaaactattgtagtattgtagtataaatggttcttgggtgatttcttcagggtaca

SEQ ID NO: 421921 - DNA, 575 bp, Homo sapiens
ggtgcttcatgttagcaaaatgcgatgcagtgcatgtcaaactgtggaagcaaaacaatcaagaaaaaaatttcttaagtattatttatttatttattgttattatactttaagttttagggtacatgtgcacaacgtgcaggtttgttaaaatgtaactgtcaatgatcatggcaaatattttgatatataaaaggtgattaacatgaaaaaagcctctgatatttcaaatattttggttagatttgttttatgggaatctaattacatattaggtatttggagtgtaatgtatacatttcttgcataagtgaatgaagagatggcaggagggctaaagttgagaatccaggaaatggaaaaacaccagaagtctgcatgactgtggacaacatgagtatttttgttaactatgcttctgtatgtagatatctgaactaatgaactgagaatacatcctgcaagcagaagggaatgatacattttaatgaaaytgatagtttttaagttagaggacaaaatgaagaacaggaaaactattgtagtattgtagtataaatggttcttgggtgatt

SEQ ID NO: 421922 - DNA, 613 bp, Homo sapiens
taatgtatacatttcttgcataagtgaatgaagagatggcaggagggctaaagttgagaatccaggaaatggaaaaacaccagaagtctgcatgactgtggacaacatgagtatttttgttaactatgcttctgtatgtagatatctgaactaatgaactgagaatacatcctgcaagcagaagggaatgatacattttaatgaaattgatagtttttaagttagaggacaaaatgaagaacaggaaaactattgtagtattgtagtataaatggttcttgggtgatttcttcagkgtacaccatagcgttctaccatgggctttgacatttatcctcctggggtcctttcatttgacatcacattttttggcttcagttaagagaatcactttggtagaagtacttccttgtgttagttgtagtcatgtgaaacctaatctctctcttgaaatctggactacatgttttatgaaaacttaattatgtgtcccttttgctttgtagaatcttctgagcgacctcctttatccacagtaaacaaatatattttcctttttaattaacaaaatgctttgtgatatatacatgatatattaatcaattaatcatta

SEQ ID NO: 421923 - DNA, 613 bp, Homo sapiens
taatgtatacatttcttgcataagtgaatgaagagatggcaggagggctaaagttgagaatccaggaaatggaaaaacaccagaagtctgcatgactgtggacaacatgagtatttttgttaactatgcttctgtatgtagatatctgaactaatgaactgagaatacatcctgcaagcagaagggaatgatacattttaatgaaattgatagtttttaagttagaggacaaaatgaagaacaggaaaactattgtagtattgtagtataaatggttcttgggtgatttcttcagggtacaccatagcgttctaccatgggctttgacatttatcctyctggggtcctttcatttgacatcacattttttggcttcagttaagagaatcactttggtagaagtacttccttgtgttagttgtagtcatgtgaaacctaatctctctcttgaaatctggactacatgttttatgaaaacttaattatgtgtcccttttgctttgtagaatcttctgagcgacctcctttatccacagtaaacaaatatattttcctttttaattaacaaaatgctttgtgatatatacatgatatattaatcaattaatcatta

SEQ ID NO: 421924 - DNA, 613 bp, Homo sapiens
taatgtatacatttcttgcataagtgaatgaagagatggcaggagggctaaagttgagaatccaggaaatggaaaaacaccagaagtctgcatgactgtggacaacatgagtatttttgttaactatgcttctgtatgtagatatctgaactaatgaactgagaatacatcctgcaagcagaagggaatgatacattttaatgaaattgatagtttttaagttagaggacaaaatgaagaacaggaaaactattgtagtattgtagtataaatggttcttgggtgatttcttcagggtacaccatagcgttctaccatgggctttgacatttatcctcctggggtcctttcatttgacatcacattttttggcttcagttaagagaatcacwttggtagaagtacttccttgtgttagttgtagtcatgtgaaacctaatctctctcttgaaatctggactacatgttttatgaaaacttaattatgtgtcccttttgctttgtagaatcttctgagcgacctcctttatccacagtaaacaaatatattttcctttttaattaacaaaatgctttgtgatatatacatgatatattaatcaattaatcatta

SEQ ID NO: 421925 - DNA, 507 bp, Homo sapiens
ttgctttgtagaatcttctgagcgacctcctttatccacagtaaacaaatatattttcctttttaattaacaaaatgctttgtgatatatacatgatatattaatcaattaatcattatgttgtaaaacccattcagcttactctgaaagaggcagatcccagttcaaaagtagccatgagaaggaaggattcaccacctccaggaaaaggtaaatttgccaatacaaatttcatctggaaagaaggacatraatatattggaaatgttcatggtcttctgattcttatttcttttaccccaataagatagaaggatttgatctaaatgatgctgatgctgttgttagtgtctatgattataaaatgatatttagaagaacaaggaaaagaaatgtttaaaatgtgagctctagctcagatgcttttccttttaggttgtgataaatatccaatgtggaatttgtatgcatgttaggggttcaaggaggtgaattttgaaactataa

SEQ ID NO: 421926 - DNA, 566 bp, Homo sapiens
taccagctgacattacaattgtgttagaacttcaacttctttatgtcggtgttgccacactgagaaccttcaaatcctcacccagtcacatgctctgattaccagcttttgaatttctgcatgtctatgtgcgtgtgtgcttttgtttgtgagtttgggtgtgtgtgatacctctgattctggaaaatkaataaagtcattaatcattttttggtgactctttggtagatacagggttttaaagcaatgattctgagctgttttagccttagaatcttttctactactacaattcattgcctacaggtaaccaacaacctgaattaatgttggtttgtttgttttgtattatacataagttcagggatacatgtgaagaacatgcaggttttttacataggcatacatgtgccatggtggtttactgtacccatcaacccatcagctacattaggtatttctactaatactatccctcccctaggaccccaaacccctgacaggccccggtgtgtgatgttcgcctccctgtgtccatgtgttctcattgttcaactcccacttac

SEQ ID NO: 421927 - DNA, 614 bp, Homo sapiens
agacttaaatgtttaagtaagacctaaaaccataataaccctagaagacaacctaggcaataccattcaggacattggcatgggcaaagacttcatgactaaaacaccaaaagcaatggcaacaaaagccaaaattgacaaacgggatctaattcaactaaggaacttgtgcagctttatttggaagtgtgcaatgaggtacgtctgagtttcaaaaatgaagwaagtaagtagtcatgctttcctgactctttggtagacagccttttaggacggtgattctgagctgttactgttttgggttttctataatactaaagcttactgccgacatgtaaccaagagcttgaattaattaaaaagaaatcacccaaatgcacattaaaaacctcttacaacatatgtgcacattcatagataacatgtagaacttgattttgtgtattaaaaacttgtagaaaagttcaggcagtgcacttattgaatgcaacttggtctttgtaaaatcagtgatatatatttcagatctatccaccttgacccagtgaggtatttcttgatttattgtatgatctcatgatatgccatgtgatgactacagcatattatgctct

SEQ ID NO: 421928 - DNA, 614 bp, Homo sapiens
agacttaaatgtttaagtaagacctaaaaccataataaccctagaagacaacctaggcaataccattcaggacattggcatgggcaaagacttcatgactaaaacaccaaaagcaatggcaacaaaagccaaaattgacaaacgggatctaattcaactaaggaacttgtgcagctttatttggaagtgtgcaatgaggtacgtctgagtttcaaaaatgaagaaagtaagtagtcatgctttcctgactctttggtagacagccttttargacggtgattctgagctgttactgttttgggttttctataatactaaagcttactgccgacatgtaaccaagagcttgaattaattaaaaagaaatcacccaaatgcacattaaaaacctcttacaacatatgtgcacattcatagataacatgtagaacttgattttgtgtattaaaaacttgtagaaaagttcaggcagtgcacttattgaatgcaacttggtctttgtaaaatcagtgatatatatttcagatctatccaccttgacccagtgaggtatttcttgatttattgtatgatctcatgatatgccatgtgatgactacagcatattatgctct

SEQ ID NO: 421929 - DNA, 614 bp, Homo sapiens
agacttaaatgtttaagtaagacctaaaaccataataaccctagaagacaacctaggcaataccattcaggacattggcatgggcaaagacttcatgactaaaacaccaaaagcaatggcaacaaaagccaaaattgacaaacgggatctaattcaactaaggaacttgtgcagctttatttggaagtgtgcaatgaggtacgtctgagtttcaaaaatgaagaaagtaagtagtcatgctttcctgactctttggtagacagccttttaggacggtgattctgagctgttactgttttgggttttctataatactaaagcttactgccracatgtaaccaagagcttgaattaattaaaaagaaatcacccaaatgcacattaaaaacctcttacaacatatgtgcacattcatagataacatgtagaacttgattttgtgtattaaaaacttgtagaaaagttcaggcagtgcacttattgaatgcaacttggtctttgtaaaatcagtgatatatatttcagatctatccaccttgacccagtgaggtatttcttgatttattgtatgatctcatgatatgccatgtgatgactacagcatattatgctct

SEQ ID NO: 421930 - DNA, 614 bp, Homo sapiens
agacttaaatgtttaagtaagacctaaaaccataataaccctagaagacaacctaggcaataccattcaggacattggcatgggcaaagacttcatgactaaaacaccaaaagcaatggcaacaaaagccaaaattgacaaacgggatctaattcaactaaggaacttgtgcagctttatttggaagtgtgcaatgaggtacgtctgagtttcaaaaatgaagaaagtaagtagtcatgctttcctgactctttggtagacagccttttaggacggtgattctgagctgttactgttttgggttttctataatactaaagcttactgccgacatgtaaccaagagcttgaattaaktaaaaagaaatcacccaaatgcacattaaaaacctcttacaacatatgtgcacattcatagataacatgtagaacttgattttgtgtattaaaaacttgtagaaaagttcaggcagtgcacttattgaatgcaacttggtctttgtaaaatcagtgatatatatttcagatctatccaccttgacccagtgaggtatttcttgatttattgtatgatctcatgatatgccatgtgatgactacagcatattatgctct

SEQ ID NO: 421931 - DNA, 593 bp, Homo sapiens
cattgtagttaaagaagtttttaaataggttatattcaataaaatttcagagcttgtttctctggaaagcatagacatagtggtgttatgggtagttaaacataaaatagctccacaaagtgttgtgtacataaaagtgttcatatcctggaaaattctactttattgctcartactgtctgctggagaggaaaataggtaagataggctgctgagcctatgataataactcataatatgaggtgaaagcatagagacaaaatgagagatgatagatactcaaacggatgtgagtgaagaacagctgtgaacgtgtctatgggagataggaggccatggggctgcttttgtgaagaaggaatttgtacacgttagtcaagtgtcttgacacatttaacattttaataaagcaaaaccttatcttcagatgtgtcagaataggattgtacagatgtcacattacagtggtggtgaaaataatgaagaaacgaatgtagaggtcaaagaatcaagtccaccaatatggatattagatttatgaacgaaaaagagtgtatgtcaaattgggcaggtgtaaacaaagaaagcagcta

SEQ ID NO: 421932 - DNA, 593 bp, Homo sapiens
cattgtagttaaagaagtttttaaataggttatattcaataaaatttcagagcttgtttctctggaaagcatagacatagtggtgttatgggtagttaaacataaaatagctccacaaagtgttgtgtacataaaagtgttcatatcctggaaaattctactttattgctcagtactgtctgctggagaggaaaataggtaagataggctgctgagcctatgataataactcataatatgaggtgaaagcatagagacaaaatgagagatgatagatactcaaayggatgtgagtgaagaacagctgtgaacgtgtctatgggagataggaggccatggggctgcttttgtgaagaaggaatttgtacacgttagtcaagtgtcttgacacatttaacattttaataaagcaaaaccttatcttcagatgtgtcagaataggattgtacagatgtcacattacagtggtggtgaaaataatgaagaaacgaatgtagaggtcaaagaatcaagtccaccaatatggatattagatttatgaacgaaaaagagtgtatgtcaaattgggcaggtgtaaacaaagaaagcagcta

SEQ ID NO: 421933 - DNA, 593 bp, Homo sapiens
cattgtagttaaagaagtttttaaataggttatattcaataaaatttcagagcttgtttctctggaaagcatagacatagtggtgttatgggtagttaaacataaaatagctccacaaagtgttgtgtacataaaagtgttcatatcctggaaaattctactttattgctcagtactgtctgctggagaggaaaataggtaagataggctgctgagcctatgataataactcataatatgaggtgaaagcatagagacaaaatgagagatgatagatactcaaacggatgtgagtgaagaacagctgtgaacgtgtctatgggagataggaggccatggggctgcttttgtgaagaaggaatttgtacacgttagtcaagtgtcttgacacatttaacattttaataaagcaaaaccttatcttcagatgtgtcagaatrggattgtacagatgtcacattacagtggtggtgaaaataatgaagaaacgaatgtagaggtcaaagaatcaagtccaccaatatggatattagatttatgaacgaaaaagagtgtatgtcaaattgggcaggtgtaaacaaagaaagcagcta

SEQ ID NO: 421934 - DNA, 593 bp, Homo sapiens
cattgtagttaaagaagtttttaaataggttatattcaataaaatttcagagcttgtttctctggaaagcatagacatagtggtgttatgggtagttaaacataaaatagctccacaaagtgttgtgtacataaaagtgttcatatcctggaaaattctactttattgctcagtactgtctgctggagaggaaaataggtaagataggctgctgagcctatgataataactcataatatgaggtgaaagcatagagacaaaatgagagatgatagatactcaaacggatgtgagtgaagaacagctgtgaacgtgtctatgggagataggaggccatggggctgcttttgtgaagaaggaatttgtacacgttagtcaagtgtcttgacacatttaacattttaataaagcaaaaccttatcttcagatgtgtcagaataggattgtacagatgtcacattacagtggtggtgaaaataatgaagaaacgaatgtagrggtcaaagaatcaagtccaccaatatggatattagatttatgaacgaaaaagagtgtatgtcaaattgggcaggtgtaaacaaagaaagcagcta

SEQ ID NO: 421935 - DNA, 588 bp, Homo sapiens
tgtgtttgctggtgtagttattttgwaaaagaacctgagagacccctgtggtatatcatgtgaaactagatttagaaaaaaggaatcaaagaatgcatttttagagtactaaacagataactgccaataatggtgacaatcatgacatatgtatatatatgtattatgtcgtattggttggttatttataagaaaagaagtctctagtgatttagaaactttgtttagtttattttcataggaatctgattacacattatttcactgatgtgtatgtttttgcaaaagtggacgaagagacggtgagaaggccgaactgctgaatccaggaaatgtaaaaacatcaggagtcttcatgagcataaacaaaatgattttttaaattataactcttagattaagtgaactcacttcagatgcattcagaatatttgcataaaggatgatttgatttttggctgttccaggaactactggaagcaggaaacagtgatagagttgggataaaccacagtgactcattattcctctttgttactattgggcaccagaggtatatgttttgttgatattggttattcaaatgag

SEQ ID NO: 421936 - DNA, 588 bp, Homo sapiens
tgtgtttgctggtgtagttattttgaaaaagaacctgagagacccctgtggtatatcatgtgaaactagatttagaaaaaaggaatcaaakaatgcatttttagagtactaaacagataactgccaataatggtgacaatcatgacatatgtatatatatgtattatgtcgtattggttggttatttataagaaaagaagtctctagtgatttagaaactttgtttagtttattttcataggaatctgattacacattatttcactgatgtgtatgtttttgcaaaagtggacgaagagacggtgagaaggccgaactgctgaatccaggaaatgtaaaaacatcaggagtcttcatgagcataaacaaaatgattttttaaattataactcttagattaagtgaactcacttcagatgcattcagaatatttgcataaaggatgatttgatttttggctgttccaggaactactggaagcaggaaacagtgatagagttgggataaaccacagtgactcattattcctctttgttactattgggcaccagaggtatatgttttgttgatattggttattcaaatgag

SEQ ID NO: 421937 - DNA, 588 bp, Homo sapiens
tgtgtttgctggtgtagttattttgaaaaagaacctgagagacccctgtggtatatcatgtgaaactagatttagaaaaaaggaatcaaagaatgcatttttagagtactaaacagataactgccaataatggtgacaatcatgacatatgtatatatatgtattatgtcgtattggttggttatttataagaaaagaagtctctagtgattyagaaactttgtttagtttattttcataggaatctgattacacattatttcactgatgtgtatgtttttgcaaaagtggacgaagagacggtgagaaggccgaactgctgaatccaggaaatgtaaaaacatcaggagtcttcatgagcataaacaaaatgattttttaaattataactcttagattaagtgaactcacttcagatgcattcagaatatttgcataaaggatgatttgatttttggctgttccaggaactactggaagcaggaaacagtgatagagttgggataaaccacagtgactcattattcctctttgttactattgggcaccagaggtatatgttttgttgatattggttattcaaatgag

SEQ ID NO: 421938 - DNA, 598 bp, Homo sapiens
acattatttcactgatgtgtatgtttttgcaaaagtggacgaagagacggtgagaaggccgaactgctgaatccaggaaatgtaaaaacatcaggagtcttcatgagcataaacaaaatgattttttaaattataactcttagattaagtgaactcacttcagatgcattcagaatatttgcataaaggatgatttgatttttggctgttccaggaactactggaagcaggaaacagtgatagarttgggataaaccacagtgactcattattcctctttgttactattgggcaccagaggtatatgttttgttgatattggttattcaaatgagataaacgtgaatatgcatacattggctttgtttttcaaggagctgttggataaaatagcaacttaataaaaattctctagagaataacatgataatttaaccagactattttagaagtgaaaataatgttgaattcattacttgactcccaaatggttattttcaaggaatattggcgtgatttccagatgtaaaagcttattcatatctaatgcttgtagcaattttattttgtataagtatgtcaaatttggtaatttatt

SEQ ID NO: 421939 - DNA, 598 bp, Homo sapiens
acattatttcactgatgtgtatgtttttgcaaaagtggacgaagagacggtgagaaggccgaactgctgaatccaggaaatgtaaaaacatcaggagtcttcatgagcataaacaaaatgattttttaaattataactcttagattaagtgaactcacttcagatgcattcagaatatttgcataaaggatgatttgatttttggctgttccaggaactactggaagcaggaaacagtgatagagttgggataaaccacagtgactcattattcctctttgttactattgggcaccagaggtatatgttttgttgatattggttattcaaatgagataaacgtgaatatgcatacattggctttgtttttcaaggagstgttggataaaatagcaacttaataaaaattctctagagaataacatgataatttaaccagactattttagaagtgaaaataatgttgaattcattacttgactcccaaatggttattttcaaggaatattggcgtgatttccagatgtaaaagcttattcatatctaatgcttgtagcaattttattttgtataagtatgtcaaatttggtaatttatt

SEQ ID NO: 421940 - DNA, 598 bp, Homo sapiens
acattatttcactgatgtgtatgtttttgcaaaagtggacgaagagacggtgagaaggccgaactgctgaatccaggaaatgtaaaaacatcaggagtcttcatgagcataaacaaaatgattttttaaattataactcttagattaagtgaactcacttcagatgcattcagaatatttgcataaaggatgatttgatttttggctgttccaggaactactggaagcaggaaacagtgatagagttgggataaaccacagtgactcattattcctctttgttactattgggcaccagaggtatatgttttgttgatattggttattcaaatgagataaacgtgaatatgcatacattggctttgtttttcaaggagctrttggataaaatagcaacttaataaaaattctctagagaataacatgataatttaaccagactattttagaagtgaaaataatgttgaattcattacttgactcccaaatggttattttcaaggaatattggcgtgatttccagatgtaaaagcttattcatatctaatgcttgtagcaattttattttgtataagtatgtcaaatttggtaatttatt

SEQ ID NO: 421941 - DNA, 598 bp, Homo sapiens
acattatttcactgatgtgtatgtttttgcaaaagtggacgaagagacggtgagaaggccgaactgctgaatccaggaaatgtaaaaacatcaggagtcttcatgagcataaacaaaatgattttttaaattataactcttagattaagtgaactcacttcagatgcattcagaatatttgcataaaggatgatttgatttttggctgttccaggaactactggaagcaggaaacagtgatagagttgggataaaccacagtgactcattattcctctttgttactattgggcaccagaggtatatgttttgttgatattggttattcaaatgagataaacgtgaatatgcatacattggctttgtttttcaaggagctgttggataaaatagcaacttaataaaaattctctagagaataacatkataatttaaccagactattttagaagtgaaaataatgttgaattcattacttgactcccaaatggttattttcaaggaatattggcgtgatttccagatgtaaaagcttattcatatctaatgcttgtagcaattttattttgtataagtatgtcaaatttggtaatttatt

SEQ ID NO: 421942 - DNA, 534 bp, Homo sapiens
ataaaatttagaaaagatgaaaaggaaataggaaaggtggatacagcctgttttctaatatcttccaactggaagcttagattaggattttagattaaattttcttaaatttttaaagacccaatcatkttctattaaatacctgtttttcaggacatacattactctttcaaattctgaataaaaattctttctccagctgttaagttgctggaatttttttttccctctctctctctgtagtaagaatgtttcaactttcagatcaatcatcatggttaactcttgggatgtgttattttatagtaaacaaatgaaactctttcttacataagtatttacacaaaacaaattgtctagtaaaggctaaccagtattattaagcatatattatgaacacaaggttttcttttaagctcatatttgattgactggtcatgtctctttttctgtttgtttctccctccttcccctttgtgtaaaaatgatttacctcagtctaactttctccttgcagcccacatgtctttagtg

SEQ ID NO: 421943 - DNA, 534 bp, Homo sapiens
ataaaatttagaaaagatgaaaaggaaataggaaaggtggatacagcctgttttctaatatcttccaactggaagcttagattaggattttagattaaattttcttaaatttttaaagacccaatcatgttctattaaatacctgtttttcaggacatacattactctttcaaattctgaataaaaattctttctccagctgttaagttgctggaatttttttttccctctctctctctgtagtaagaatgtttcaactttcagatcaatcatcatggttaactcttgggatgtgttattttatagtaaacaaatgaaactctttcttacataagtatttacacaaaacaaattgtckagtaaaggctaaccagtattattaagcatatattatgaacacaaggttttcttttaagctcatatttgattgactggtcatgtctctttttctgtttgtttctccctccttcccctttgtgtaaaaatgatttacctcagtctaactttctccttgcagcccacatgtctttagtg

SEQ ID NO: 421944 - DNA, 534 bp, Homo sapiens
ataaaatttagaaaagatgaaaaggaaataggaaaggtggatacagcctgttttctaatatcttccaactggaagcttagattaggattttagattaaattttcttaaatttttaaagacccaatcatgttctattaaatacctgtttttcaggacatacattactctttcaaattctgaataaaaattctttctccagctgttaagttgctggaatttttttttccctctctctctctgtagtaagaatgtttcaactttcagatcaatcatcatggttaactcttgggatgtgttattttatagtaaacaaatgaaactctttcttacataagtatttacacaaaacaaattgtctagtaaakgctaaccagtattattaagcatatattatgaacacaaggttttcttttaagctcatatttgattgactggtcatgtctctttttctgtttgtttctccctccttcccctttgtgtaaaaatgatttacctcagtctaactttctccttgcagcccacatgtctttagtg

SEQ ID NO: 421945 - DNA, 534 bp, Homo sapiens
ataaaatttagaaaagatgaaaaggaaataggaaaggtggatacagcctgttttctaatatcttccaactggaagcttagattaggattttagattaaattttcttaaatttttaaagacccaatcatgttctattaaatacctgtttttcaggacatacattactctttcaaattctgaataaaaattctttctccagctgttaagttgctggaatttttttttccctctctctctctgtagtaagaatgtttcaactttcagatcaatcatcatggttaactcttgggatgtgttattttatagtaaacaaatgaaactctttcttacataagtatttacacaaaacaaattgtctagtaaaggctaaccagtattattaagcatatattatgaacacaaggttttcttttaagctcatatttgattgactggtcatgtctctttttytgtttgtttctccctccttcccctttgtgtaaaaatgatttacctcagtctaactttctccttgcagcccacatgtctttagtg

SEQ ID NO: 421946 - DNA, 623 bp, Homo sapiens
ttctccctccttcccctttgtgtaaaaatgatttacctcagtctaactttctccttgcagcccacatgtctttagtgtctattctttcatttcacttctgtttctattgtcaggatacttagttacagctttctatttagtagctatgtgtggmcttcattcatgaatcattgctccgtaaggtggatggttgctttgttctgtcttttttggaaggagcttaagttatactataatttgtttttagcttttgacacactgaatagaagcaacttgtactgtttctgatgccaacccatttaaatatagtactactaaaaactacattctcactttttttcccacaaaatgcaattcgcacaaatatacatcatgcatagctattttgaaaaataatgtgatttacttttttattattagttttattcgctaatactctaaattacatagggtacatttttgtcctagtttgttgtggctaataaaagaaactaatggatatcatagtatttgtataataatcaactggggttgaaaggagtaacattttgaaaatatctgtctcaccaatcataaccatcatgccatgtgaatctgtagataagtaaatggcagacttgagg

SEQ ID NO: 421947 - DNA, 488 bp, Homo sapiens
tttagtagctatgtgtggccttcattcatgaatcattgctccgtaaggtggatggttgctttgttctgtcttttttggaaggagcttaagttatactataatttgtttttagcttttgacacactgaatagaarcaacttgtactgtttctgatgccaacccatttaaatatagtactactaaaaactacattctcactttttttcccacaaaatgcaattcgcacaaatatacatcatgcatagctattttgaaaaataatgtgatttacttttttattattagttttattcgctaatactctaaattacatagggtacatttttgtcctagtttgttgtggctaataaaagaaactaatggatatcatagtatttgtataataatcaactggggttgaaaggagtaacattttgaaaatatctgtctcaccaatcataaccatcatgccatgtgaatctgtagataagtaaatggcagacttgagg

SEQ ID NO: 421948 - DNA, 488 bp, Homo sapiens
tttagtagctatgtgtggccttcattcatgaatcattgctccgtaaggtggatggttgctttgttctgtcttttttggaaggagcttaagttatactataatttgtttttagcttttgacacactgaatagaagcaacttgtactgtttctgatgccaacccatttaaatatagtactactaaaaactacattctcactttttttcccacaaaatgcaattcgcacaaatatacatcatgcatasctattttgaaaaataatgtgatttacttttttattattagttttattcgctaatactctaaattacatagggtacatttttgtcctagtttgttgtggctaataaaagaaactaatggatatcatagtatttgtataataatcaactggggttgaaaggagtaacattttgaaaatatctgtctcaccaatcataaccatcatgccatgtgaatctgtagataagtaaatggcagacttgagg

SEQ ID NO: 421949 - DNA, 623 bp, Homo sapiens
ttctccctccttcccctttgtgtaaaaatgatttacctcagtctaactttctccttgcagcccacatgtctttagtgtctattctttcatttcacttctgtttctattgtcaggatacttagttacagctttctatttagtagctatgtgtggccttcattcatgaatcattgctccgtaaggtggatggttgctttgttctgtcttttttggaaggagcttaagttatactataatttgtttttagcttttgacacactgaatagaagcaacttgtactgtttctgatgccaacccatttaaatatagtactactaaaaactacattctcactttttttcccacaaaatgcaattcgcacaaatatacatcatgcatagctattttgaaaaataatgtgatttacttttttattattagttttattcgstaatactctaaattacatagggtacatttttgtcctagtttgttgtggctaataaaagaaactaatggatatcatagtatttgtataataatcaactggggttgaaaggagtaacattttgaaaatatctgtctcaccaatcataaccatcatgccatgtgaatctgtagataagtaaatggcagacttgagg

SEQ ID NO: 421950 - DNA, 548 bp, Homo sapiens
atagagagaatagaaactagtatctgtttagtgttctactctgtgctagacaccatattacatgcttaacatttatcatgtcatgtcatcwgcacacagctttacaaactatttgtgctattattgcttttttactaataatagacaactctgctttaaagaggttgaaatattggctcatgattccacagttaacaggtagccaacccaagattagaccatcatcctgcctggctctcaaatcacttcatttgcccctaagcatagatggatagaggcctatgcagcaatgggatcacggtactgatttacatcggatcaattcagaaagtcacattttgttatatagtaactgtctttagagtgttatttagaagcctggctactccaaaagtttgtccaaatattttgaaatggcagtggtaaccatattactttttttttaatcatcaaagttttaaaggcagttatcagttatctgtggccacaggaccctaagtttttcataagcaagaccaggccagtcctagaaaaatattatcttactg

SEQ ID NO: 421951 - DNA, 548 bp, Homo sapiens
atagagagaatagaaactagtatctgtttagtgttctactctgtgctagacaccatattacatgcttaacatttatcatgtcatgtcatcakcacacagctttacaaactatttgtgctattattgcttttttactaataatagacaactctgctttaaagaggttgaaatattggctcatgattccacagttaacaggtagccaacccaagattagaccatcatcctgcctggctctcaaatcacttcatttgcccctaagcatagatggatagaggcctatgcagcaatgggatcacggtactgatttacatcggatcaattcagaaagtcacattttgttatatagtaactgtctttagagtgttatttagaagcctggctactccaaaagtttgtccaaatattttgaaatggcagtggtaaccatattactttttttttaatcatcaaagttttaaaggcagttatcagttatctgtggccacaggaccctaagtttttcataagcaagaccaggccagtcctagaaaaatattatcttactg

SEQ ID NO: 421952 - DNA, 548 bp, Homo sapiens
atagagagaatagaaactagtatctgtttagtgttctactctgtgctagacaccatattacatgcttaacatttatcatgtcatgtcatcagcacacagctttacaaactatttgtgctattattgctttttyactaataatagacaactctgctttaaagaggttgaaatattggctcatgattccacagttaacaggtagccaacccaagattagaccatcatcctgcctggctctcaaatcacttcatttgcccctaagcatagatggatagaggcctatgcagcaatgggatcacggtactgatttacatcggatcaattcagaaagtcacattttgttatatagtaactgtctttagagtgttatttagaagcctggctactccaaaagtttgtccaaatattttgaaatggcagtggtaaccatattactttttttttaatcatcaaagttttaaaggcagttatcagttatctgtggccacaggaccctaagtttttcataagcaagaccaggccagtcctagaaaaatattatcttactg

SEQ ID NO: 421953 - DNA, 548 bp, Homo sapiens
atagagagaatagaaactagtatctgtttagtgttctactctgtgctagacaccatattacatgcttaacatttatcatgtcatgtcatcagcacacagctttacaaactatttgtgctattattgcttttttactaataatagacaactctgctttaaagaggttgaaatattggctcatgattccacagttaacaggtagccaacccaagattagaccatcatcctgcctggctctcaaatcacttcatttgcccctaagcatagatggatagaggcctatgcagcaatgggatcacggtactgatttacatcggatcaattcagaaagtcacattttgttatataktaactgtctttagagtgttatttagaagcctggctactccaaaagtttgtccaaatattttgaaatggcagtggtaaccatattactttttttttaatcatcaaagttttaaaggcagttatcagttatctgtggccacaggaccctaagtttttcataagcaagaccaggccagtcctagaaaaatattatcttactg

SEQ ID NO: 421954 - DNA, 579 bp, Homo sapiens
tcacattttgttatatagtaactgtctttagagtgttatttagaagcctggctactccaaaagtttgtccaaatattttgaaatggcagtggtaaccatattactttttttttaatcatcaaagttttaaaggcagttatcagttatctgtggccacaggaccctaagtttttcataagcaagaccaggccagtcctagaaaaatattatcttactgtgcttggagaatatctaaatatagtccatgttatgttaactatatttagcatatattaaaaggatrtttctaattcatttctctacttactacctacccagttaggttttctctttcagtaagtaccctgcctggttctctgaagctttttcttattttctggattcttttttttccttctgtgacatggtaataatattttcggtgatgtctttttactgttctcctctgcttttcttagggtttatgatcttctattatagttttcatttaaggcagctaaatattccccattttcctatagacaaaatcagaagtgcatagaatttcagaatgttaagaaatcctagagactaaacaaa

SEQ ID NO: 421955 - DNA, 553 bp, Homo sapiens
taaccagcattattaggcatayattatgaacacaagcttttcttttaagctcatatttgattgactggtcatgtctctttttttgtttgtttctccctccttcccctttgtttaaaagtgatttacctcagtctaactttttccttgcagaccacatgtctttagtgtctattctttcatttcacctctgtttctgttgtcaggatacttagttacacctttctatttagtagctatgtgtggctttcattcgtgaatcattgctccataaagtggatggttgctttgttctgtcttttttggaaggagctgaagttatacaataatttgtttttagcttttgacacacagaatagaagcaacttatactgattccgatgctagcccatttaaatatattactactaaaaactacattctcacatttttttcccacaggaagtaattcacacaaatatatatcatgcataaatattttgaaaactaaagtgattaattgactttttattagttttgttcagtaatactctaaattacgtatgagtaaattttt

SEQ ID NO: 421956 - DNA, 553 bp, Homo sapiens
taaccagcattattaggcatacattatgaacacaagcttttcttttaagctcatatttgattgactggtcatgtctctttttttgtttgtttctccctccttcccctttgtttaaaartgatttacctcagtctaactttttccttgcagaccacatgtctttagtgtctattctttcatttcacctctgtttctgttgtcaggatacttagttacacctttctatttagtagctatgtgtggctttcattcgtgaatcattgctccataaagtggatggttgctttgttctgtcttttttggaaggagctgaagttatacaataatttgtttttagcttttgacacacagaatagaagcaacttatactgattccgatgctagcccatttaaatatattactactaaaaactacattctcacatttttttcccacaggaagtaattcacacaaatatatatcatgcataaatattttgaaaactaaagtgattaattgactttttattagttttgttcagtaatactctaaattacgtatgagtaaattttt

SEQ ID NO: 421957 - DNA, 553 bp, Homo sapiens
taaccagcattattaggcatacattatgaacacaagcttttcttttaagctcatatttgattgactggtcatgtctctttttttgtttgtttctccctccttcccctttgtttaaaagtgatttacctcagtctaactttttccttgcagaccacatgtctttagtgtctattctttcatttcacctctgtttctgttgtcaggatacttagttacacctttctatttagtagctatgtgtgkctttcattcgtgaatcattgctccataaagtggatggttgctttgttctgtcttttttggaaggagctgaagttatacaataatttgtttttagcttttgacacacagaatagaagcaacttatactgattccgatgctagcccatttaaatatattactactaaaaactacattctcacatttttttcccacaggaagtaattcacacaaatatatatcatgcataaatattttgaaaactaaagtgattaattgactttttattagttttgttcagtaatactctaaattacgtatgagtaaattttt

SEQ ID NO: 421958 - DNA, 553 bp, Homo sapiens
taaccagcattattaggcatacattatgaacacaagcttttcttttaagctcatatttgattgactggtcatgtctctttttttgtttgtttctccctccttcccctttgtttaaaagtgatttacctcagtctaactttttccttgcagaccacatgtctttagtgtctattctttcatttcacctctgtttctgttgtcaggatacttagttacacctttctatttagtagctatgtgtggctttcattcgtgaatcattgctccataaagtggatggttgctttgttctgtcttttttggaaggagctgaagttatacaataatttgtttttagcttttgacacacagaatagaagcaacttatactgattccgatgytagcccatttaaatatattactactaaaaactacattctcacatttttttcccacaggaagtaattcacacaaatatatatcatgcataaatattttgaaaactaaagtgattaattgactttttattagttttgttcagtaatactctaaattacgtatgagtaaattttt

SEQ ID NO: 421959 - DNA, 597 bp, Homo sapiens
gctagcccatttaaatatattactactaaaaactacattctcacatttttttcccacaggaagtaattcacacaaatatatatcatgcataaatattttgaaaactaaagtgattaattgacttttkattagttttgttcagtaatactctaaattacgtatgagtaaatttttgtcccagtttgttgtggttaataaaagaaactaatggatatcatagtatttgtataataatcaaccgggttgaaaggagtaacattttgagaatatctgtatcaccaatcataatcatcatctcatgtgaatctgtagataagtaaatggcagacttgaggtttgaatctacatatgagtgacttcaaagtctatcctttttgtgttagatcatgtagtaatggtggcaattatcattattttaacttgctgcatgttgttcttaaacctattgtgtctttcttctagactatttcagaaccatactttacgaacagaaggactatttctcaacaatctgcagaaaagtgtaagctatttgaaacctgactattgtattatctactgattcttttttttttttctttcttatttttttgtaga

SEQ ID NO: 421960 - DNA, 597 bp, Homo sapiens
gctagcccatttaaatatattactactaaaaactacattctcacatttttttcccacaggaagtaattcacacaaatatatatcatgcataaatattttgaaaactaaagtgattaattgactttttattagttttgttcagtaatactctaaattacgtatgagtaaatttttgtcccagtttgttgtggttaataaaagaaactaatggatatcatagtatttgtataataatcaaccgggttgaaaggagtaacattttgagaatatctgtatcascaatcataatcatcatctcatgtgaatctgtagataagtaaatggcagacttgaggtttgaatctacatatgagtgacttcaaagtctatcctttttgtgttagatcatgtagtaatggtggcaattatcattattttaacttgctgcatgttgttcttaaacctattgtgtctttcttctagactatttcagaaccatactttacgaacagaaggactatttctcaacaatctgcagaaaagtgtaagctatttgaaacctgactattgtattatctactgattcttttttttttttctttcttatttttttgtaga

SEQ ID NO: 421961 - DNA, 597 bp, Homo sapiens
gctagcccatttaaatatattactactaaaaactacattctcacatttttttcccacaggaagtaattcacacaaatatatatcatgcataaatattttgaaaactaaagtgattaattgactttttattagttttgttcagtaatactctaaattacgtatgagtaaatttttgtcccagtttgttgtggttaataaaagaaactaatggatatcatagtatttgtataataatcaaccgggttgaaaggagtaacattttgagaatatctgtatcaccaatcataatcatcatctcatgtgaatctgtagataagtaaatggcagacttgaggtttgaatctacatatgagtgacttcaaagtctatccwttttgtgttagatcatgtagtaatggtggcaattatcattattttaacttgctgcatgttgttcttaaacctattgtgtctttcttctagactatttcagaaccatactttacgaacagaaggactatttctcaacaatctgcagaaaagtgtaagctatttgaaacctgactattgtattatctactgattcttttttttttttctttcttatttttttgtaga

SEQ ID NO: 421962 - DNA, 418 bp, Homo sapiens
tggaaccctcttaaagaaataaattattacttatttctggagctagtctgactgaccttgtgctgataacctctgtacttaagaacatacatgtgatgaatgcagtcaacactcatgattgttttctaaacaaagtacctattttgatagaatcgtaaggaaagaaatattgccaacagtacacagaattatctctggaatattactttttacttttaaaactatctcctgcagttgggacrttttttattattctctggaagcattattaactttagtatttatagttataccttgcacataaatttattcagctctaaaactcaggaatccttttgacttgatgtttaaaataaatttcttctctcttcatgtgagtattgagtcatgagtgacaggcatagtgtatttgaagaca

SEQ ID NO: 421963 - DNA, 418 bp, Homo sapiens
tggaaccctcttaaagaaataaattattacttatttctggagctagtctgactgaccttgtgctgataacctctgtacttaagaacatacatgtgatgaatgcagtcaacactcatgattgttttctaaacaaagtacctattttgatagaatcgtaaggaaagaaatattgccaacagtacacagaattatctctggaatattactttttacttttaaaactatctcctgcagttgggacgttttktattattctctggaagcattattaactttagtatttatagttataccttgcacataaatttattcagctctaaaactcaggaatccttttgacttgatgtttaaaataaatttcttctctcttcatgtgagtattgagtcatgagtgacaggcatagtgtatttgaagaca

SEQ ID NO: 421964 - DNA, 390 bp, Homo sapiens
ttttcttttgcttttttctaagcaacaaagttttatgatatcatgaatgaaaagatccttaattaccttttggtctacaygtcaaggacttctccctcataaaaccagtagtaatcacaacaaaaggaattaaccataaaaagaggtattaaaaatgtatacttgatttttaaatgcaagcatattatttctttacattaaaatttttagatttaaaaagcgtttctggaaactcaatctagaaaagaaagacttaattcttaacatccagtagggcaaaacaaatcagaccgaaatgatatatgaatgtaaatgtaattttatgtaccactttgatgctccaaattgcactgctaggaagtgcctgggtttaaaaatttcccgacctcc

SEQ ID NO: 421965 - DNA, 549 bp, Homo sapiens
aaagtacaaatgtgatcaagcaagtcactattctatttcaaaccttcaattgcttctcagagcacttaaaatacaaacctttcccagtgcctttctctaactcatcrtgtggcacttgtctccctgctgctatgctccagctattctggcttccttgctgtccttcaaacatgccaagctctgtatcaatcagagcccagctgacacacaacacttcactataccattctggctcttcaataaatgtctggcattttctttctttctttttttttttgagatggagtctcactctgtcacccaggctagagtgtggtggtgtgatctcggctcactgcaacctctatctcccaggttcaagcaattctcctgcctcaagcctcctgagtagctgggattacaggcatgcaccaccaggcccggctaatttttgtattttaggagcaataacatgttggtcaggctggtctcaaacacctgaccttgtgatccaccaggcttggcatcccaaagtgctgggattacagatgtgatccaccatggccagcc

SEQ ID NO: 421966 - DNA, 549 bp, Homo sapiens
aaagtacaaatgtgatcaagcaagtcactattctatttcaaaccttcaattgcttctcagagcacttaaaatacaaacctttcccagtgcctttctctaactcatcatgtggcacttgtctccctgctgctatgctccagctattctggcttccttgctgtccttcaaacatgccaagctctgtatcaatcagagcccagctgacwcacaacacttcactataccattctggctcttcaataaatgtctggcattttctttctttctttttttttttgagatggagtctcactctgtcacccaggctagagtgtggtggtgtgatctcggctcactgcaacctctatctcccaggttcaagcaattctcctgcctcaagcctcctgagtagctgggattacaggcatgcaccaccaggcccggctaatttttgtattttaggagcaataacatgttggtcaggctggtctcaaacacctgaccttgtgatccaccaggcttggcatcccaaagtgctgggattacagatgtgatccaccatggccagcc

SEQ ID NO: 421967 - DNA, 610 bp, Homo sapiens
gatccaccaggcttggcatcccaaagtgctgggattacagatgtgatccaccayggccagccatgtctggcattttctaactcttcaggtatggccttacatattttctcaccaggagacctttccttagtgctcccagtgaaccatcatctctcttaccacactaccacaccattagtgcctctcattgcatcaccacctaggacattttattgtttgtaattttatttagtggtaggcagtggggcaagagatacctaaattacttctctcaatatttccattggtttttctctgagatttggctaacatacatcttaaattctttttagtcaatagtttaatattatgttggcagtagacagttctaaaaaatatgagacagaaagtcatactctaagataaaaataatgttgaataattttatttcagaaataagaattttctggtaattatgtattattcatcataatttaaaagttagctttgatgccaaaattttatctcactttgaaaagacagactttgtgtaattttatagttctgaagaaaaattatcattatacttagatattctgacaaattatctagtatattccttagaccttaa

SEQ ID NO: 421968 - DNA, 610 bp, Homo sapiens
gatccaccaggcttggcatcccaaagtgctgggattacagatgtgatccaccatggccagccatgtctggcattttctaacycttcaggtatggccttacatattttctcaccaggagacctttccttagtgctcccagtgaaccatcatctctcttaccacactaccacaccattagtgcctctcattgcatcaccacctaggacattttattgtttgtaattttatttagtggtaggcagtggggcaagagatacctaaattacttctctcaatatttccattggtttttctctgagatttggctaacatacatcttaaattctttttagtcaatagtttaatattatgttggcagtagacagttctaaaaaatatgagacagaaagtcatactctaagataaaaataatgttgaataattttatttcagaaataagaattttctggtaattatgtattattcatcataatttaaaagttagctttgatgccaaaattttatctcactttgaaaagacagactttgtgtaattttatagttctgaagaaaaattatcattatacttagatattctgacaaattatctagtatattccttagaccttaa

SEQ ID NO: 421969 - DNA, 610 bp, Homo sapiens
gatccaccaggcttggcatcccaaagtgctgggattacagatgtgatccaccatggccagccatgtctggcattttctaactcttcaggtatggccttacatattttctcaccaggagacctttccttagtgctcccagtgaaccatcatctctcttaccacactaccacaccattagtgcctctcattgcatcaccacctaggacattttattgtttgtaattttatttagtggtaggcagtggggcaagagatacctaaattacttctctcaatatttccattggtttttctctgagatttggctaacatacatcttaaattctttttagtcaatagtttaatattatgttggcagtagacagttctaaaaaatatgagacagaaagtcatactctaagataaaaataatgttgaataattttatttcagaaataagaattttctggtaattatgtattattcatcataatttaaaakttagctttgatgccaaaattttatctcactttgaaaagacagactttgtgtaattttatagttctgaagaaaaattatcattatacttagatattctgacaaattatctagtatattccttagaccttaa

SEQ ID NO: 421970 - DNA, 455 bp, Homo sapiens
atcatagtagtgtgattacattcaatatctttctataagacgtgatgatacatacagggtaaatcatacaagaagacctaagattattatctcagaatttcctaattagaatgggaatacaattgtgcaatgagagaaatggactgaagacagaaataaaaacaaatgttatgatttaatatgacaaatttaaaatttccactttattttccaccatttttaaagagcattccttatagtattaattttaatgcatttttaaaaatcagtaagacaagtagcacatttctctagttcaggwctccactttcagggttacagttaaagatgatcctagaagtgcattttaattggtctagggtaaggtcattagcttgatgttctaaaatctactgagttgattacaatatgtgtcagtgtcaataaccactttcttaaacccaggtcgcaaagca

SEQ ID NO: 421971 - DNA, 455 bp, Homo sapiens
atcatagtagtgtgattacattcaatatctttctataagacgtgatgatacatacagggtaaatcatacaagaagacctaagattattatctcagaatttcctaattagaatgggaatacaattgtgcaatgagagaaatggactgaagacagaaataaaaacaaatgttatgatttaatatgacaaatttaaaatttccactttattttccaccatttttaaagagcattccttatagtattaattttaatgcatttttaaaaatcagtaagacaagtagcacatttctctagttcaggtctccactttcagggttacagttaaagatgatcctagaagtgcattttaattggtctagggtarggtcattagcttgatgttctaaaatctactgagttgattacaatatgtgtcagtgtcaataaccactttcttaaacccaggtcgcaaagca

SEQ ID NO: 421972 - DNA, 533 bp, Homo sapiens
taaaaaaggaagtataatacggaaatgcctaatatcaaagaaattcatgtaacagaatactgaacttcagtatttctaatatacgtatatacacattcctgctaactgtagaatatttcctgcaagttatggtcccagtgcctcaccaatggaagatctatcttgaactattcaattcatactctccctaataacagcactatattagcaggttcatcatcaagtgaaggctgtttgctagataactaaaaccaagattggaaaactaaaaagctggagggagggaaaacacagcctacaaaatgcttacaagattagcagcaawtgatgaagtagtaacaagaggggcagaaaaacagaaagattatcatcggatttgggaattcaaaggcagctcaacaaaatactaggacatggctcatataagatggaataagcctggaaatacacccccctccccaatatttcagaacataaagtctacagaaagagaatcctaatgtattgaacctggtttctcaattgaaacaaaa

SEQ ID NO: 421973 - DNA, 533 bp, Homo sapiens
taaaaaaggaagtataatacggaaatgcctaatatcaaagaaattcatgtaacagaatactgaacttcagtatttctaatatacgtatatacacattcctgctaactgtagaatatttcctgcaagttatggtcccagtgcctcaccaatggaagatctatcttgaactattcaattcatactctccctaataacagcactatattagcaggttcatcatcaagtgaaggctgtttgctagataactaaaaccaagattggaaaactaaaaagctggagggagggaaaacacagcctacaaaatgcttacaagattagcagcaattgatgaagtagtaacaagaggggcagaaaaayagaaagattatcatcggatttgggaattcaaaggcagctcaacaaaatactaggacatggctcatataagatggaataagcctggaaatacacccccctccccaatatttcagaacataaagtctacagaaagagaatcctaatgtattgaacctggtttctcaattgaaacaaaa

SEQ ID NO: 421974 - DNA, 533 bp, Homo sapiens
taaaaaaggaagtataatacggaaatgcctaatatcaaagaaattcatgtaacagaatactgaacttcagtatttctaatatacgtatatacacattcctgctaactgtagaatatttcctgcaagttatggtcccagtgcctcaccaatggaagatctatcttgaactattcaattcatactctccctaataacagcactatattagcaggttcatcatcaagtgaaggctgtttgctagataactaaaaccaagattggaaaactaaaaagctggagggagggaaaacacagcctacaaaatgcttacaagattagcagcaattgatgaagtagtaacaagaggggcagaaaaacagaaagattatcatcggatttgggaattcaaaggcagctyaacaaaatactaggacatggctcatataagatggaataagcctggaaatacacccccctccccaatatttcagaacataaagtctacagaaagagaatcctaatgtattgaacctggtttctcaattgaaacaaaa

SEQ ID NO: 421975 - DNA, 533 bp, Homo sapiens
taaaaaaggaagtataatacggaaatgcctaatatcaaagaaattcatgtaacagaatactgaacttcagtatttctaatatacgtatatacacattcctgctaactgtagaatatttcctgcaagttatggtcccagtgcctcaccaatggaagatctatcttgaactattcaattcatactctccctaataacagcactatattagcaggttcatcatcaagtgaaggctgtttgctagataactaaaaccaagattggaaaactaaaaagctggagggagggaaaacacagcctacaaaatgcttacaagattagcagcaattgatgaagtagtaacaagaggggcagaaaaacagaaagattatcatcggatttgggaattcaaaggcagctcarcaaaatactaggacatggctcatataagatggaataagcctggaaatacacccccctccccaatatttcagaacataaagtctacagaaagagaatcctaatgtattgaacctggtttctcaattgaaacaaaa

SEQ ID NO: 421976 - DNA, 562 bp, Homo sapiens
aatttcaatcatgaaacttaaaactccaaattactattgtgaattaacacttctccactatttatcttgcaattttaaaaaacacttcagaaagtagcaaatttgtaaaacaataaataatttgtacctatagtatcctcattttgccatgcagttttacttaaatctcacttagaaatggaactcattcttaaagggtagaatgtacatgatgtaaagcagacacaggaagatttayctttacttactgagaatcaatagtacaattctaagattttttccatgaaactactgaaataagtcctacttgaaaaaagaaatcccacaagagttagcaattaataaaaacaccaaaatgagaaattccccagcatggaaaattcctgtcataaatgttgatgtttatccagttaaaaatatatacaatgaataatatcaataaataaatatattagaaggaaataatagatgttagttactgtacacccaaacctatactgtattttaggctctatatttactgcagcacagaactaaaagaattttaaagctctttctatta

SEQ ID NO: 421977 - DNA, 608 bp, Homo sapiens
atccagtagaaagttcataatcttctttctgttccttttctccttgtagcctttctataaccaactgttcctcaggacataatgaagtgctttcctcatgtggggacactaaggtttctagtggaagagtgacagattcaatgacaaattttggaggccttgattcttctttggataccactgttttaggttcctctaacaactgcagttgctcttgctgcacagtgatctggtgtgtaacgacttcaatgttttctgtcacttccattttatcttcaatttgatcttcrccacaaatatgcttcacttcagaagacattttcatttcttcactatcagtctcattagaaatctgtttttccaattcggtattcactgtttgttgggatgatattacaaaattcagaacatttgttatggtaatgtacaaacaaattttaaattttctaactatagatatataaaacatttggctacactagaacttaaatcagaaggtattcatcaaagcagacaattattaagtgaatgaaagccaaagtacacaaggatttatggattagaatcagccacacaccagaaaacctaatgaaaacatgttttacaac

SEQ ID NO: 421978 - DNA, 608 bp, Homo sapiens
atccagtagaaagttcataatcttctttctgttccttttctccttgtagcctttctataaccaactgttcctcaggacataatgaagtgctttcctcatgtggggacactaaggtttctagtggaagagtgacagattcaatgacaaattttggaggccttgattcttctttggataccactgttttaggttcctctaacaactgcagttgctcttgctgcacagtgatctggtgtgtaacgacttcaatgttttctgtcacttccattttatcttcaatttgatcttcgccacaaatatgcttcacttcagaagacattttcatttcttcactatcagyctcattagaaatctgtttttccaattcggtattcactgtttgttgggatgatattacaaaattcagaacatttgttatggtaatgtacaaacaaattttaaattttctaactatagatatataaaacatttggctacactagaacttaaatcagaaggtattcatcaaagcagacaattattaagtgaatgaaagccaaagtacacaaggatttatggattagaatcagccacacaccagaaaacctaatgaaaacatgttttacaac

SEQ ID NO: 421979 - DNA, 608 bp, Homo sapiens
atccagtagaaagttcataatcttctttctgttccttttctccttgtagcctttctataaccaactgttcctcaggacataatgaagtgctttcctcatgtggggacactaaggtttctagtggaagagtgacagattcaatgacaaattttggaggccttgattcttctttggataccactgttttaggttcctctaacaactgcagttgctcttgctgcacagtgatctggtgtgtaacgacttcaatgttttctgtcacttccattttatcttcaatttgatcttcgccacaaatatgcttcacttcagaagacattttcatttcttcactatcagtctcattagaaatctgtttttccaattcggtattcactgtwtgttgggatgatattacaaaattcagaacatttgttatggtaatgtacaaacaaattttaaattttctaactatagatatataaaacatttggctacactagaacttaaatcagaaggtattcatcaaagcagacaattattaagtgaatgaaagccaaagtacacaaggatttatggattagaatcagccacacaccagaaaacctaatgaaaacatgttttacaac

SEQ ID NO: 421980 - DNA, 593 bp, Homo sapiens
ttcataatcttctttctgttccttttctccttgtagcctttctataaccaactgttcctcaggacataatgaagtgctttcctcatgtggggacactaaggtttctagtggaagagtgacagattcaatgacaaattttggaggccttgattcttctttggataccactgttttaggttcctctaacaactgcagttgctcttgctgcacagtgatctggtgtgtaacgacttcaatgttttctgtcacttccattttatcttcaatttgatcttcgccacaaatatgcttcacttcagaagacattttcatttcttcactatcagtctcattagaaatctgtttttccaattcggtattcactgtttgttggsatgatattacaaaattcagaacatttgttatggtaatgtacaaacaaattttaaattttctaactatagatatataaaacatttggctacactagaacttaaatcagaaggtattcatcaaagcagacaattattaagtgaatgaaagccaaagtacacaaggatttatggattagaatcagccacacaccagaaaacctaatgaaaacatgttttaca

SEQ ID NO: 421981 - DNA, 608 bp, Homo sapiens
atccagtagaaagttcataatcttctttctgttccttttctccttgtagcctttctataaccaactgttcctcaggacataatgaagtgctttcctcatgtggggacactaaggtttctagtggaagagtgacagattcaatgacaaattttggaggccttgattcttctttggataccactgttttaggttcctctaacaactgcagttgctcttgctgcacagtgatctggtgtgtaacgacttcaatgttttctgtcacttccattttatcttcaatttgatcttcgccacaaatatgcttcacttcagaagacattttcatttcttcactatcagtctcattagaaatctgtttttccaattcggtattcactgtttgttgggatgatattrcaaaattcagaacatttgttatggtaatgtacaaacaaattttaaattttctaactatagatatataaaacatttggctacactagaacttaaatcagaaggtattcatcaaagcagacaattattaagtgaatgaaagccaaagtacacaaggatttatggattagaatcagccacacaccagaaaacctaatgaaaacatgttttacaac

SEQ ID NO: 421982 - DNA, 593 bp, Homo sapiens
ttcataatcttctttctgttccttttctccttgtagcctttctataaccaactgttcctcaggacataatgaagtgctttcctcatgtggggacactaaggtttctagtggaagagtgacagattcaatgacaaattttggaggccttgattcttctttggataccactgttttaggttcctctaacaactgcagttgctcttgctgcacagtgatctggtgtgtaacgacttcaatgttttctgtcacttccattttatcttcaatttgatcttcgccacaaatatgcttcacttcagaagacattttcatttcttcactatcagtctcattagaaatctgtttttccaattcggtattcactgtttgttgggatgatattacaaaattcagaacatttgttatggtaatgtacaaacaaattttaaattttctaactatagatatataaaacatttggctacactagaacttaaatcagaaggtattcatcaaagcagacrattattaagtgaatgaaagccaaagtacacaaggatttatggattagaatcagccacacaccagaaaacctaatgaaaacatgttttaca

SEQ ID NO: 421983 - DNA, 549 bp, Homo sapiens
caaaagcacagacagaaaagatttgctaaccaccaatatttattttgcttaaccatacctgccaacctagccaaaatattctttggatataatcgttgttcttcatcattgtctgtaaattaaaagactaatctcaggaaatctataaacttagatatcagaaacatagtcacyggtaaattttaaatcaggataccagtatgttaaacctttaactcaatctcatcaaggtaatttttaagttatagtaaaaagacactgctagcctcatttacaaatcagtgactaaaatttatctatttatctatgttcttttttttttttgaaacaggatctcactctgtgacccaagctggagtgcagtagcaaacatggctcactgcagcctcaacctcctgggctcaagtggtcctcccacctcagcctccgaaactgctgggactgcaggcatgtgtcaccatgcccagatactttttttgtttttgtagagatagggtctcactatattgcccaggcctatacatgttctgataccaaactgataccaaa

SEQ ID NO: 421984 - DNA, 549 bp, Homo sapiens
caaaagcacagacagaaaagatttgctaaccaccaatatttattttgcttaaccatacctgccaacctagccaaaatattctttggatataatcgttgttcttcatcattgtctgtaaattaaaagactaatctcaggaaatctataaacttagatatcagaaacatagtcactggtaaattttaaatcaggataccagtatgttaaacctttaactcaatctcatcaaggtaatttttaagttatagtaaaaagacactgctagcctcatttacmaatcagtgactaaaatttatctatttatctatgttcttttttttttttgaaacaggatctcactctgtgacccaagctggagtgcagtagcaaacatggctcactgcagcctcaacctcctgggctcaagtggtcctcccacctcagcctccgaaactgctgggactgcaggcatgtgtcaccatgcccagatactttttttgtttttgtagagatagggtctcactatattgcccaggcctatacatgttctgataccaaactgataccaaa

SEQ ID NO: 421985 - DNA, 549 bp, Homo sapiens
caaaagcacagacagaaaagatttgctaaccaccaatatttattttgcttaaccatacctgccaacctagccaaaatattctttggatataatcgttgttcttcatcattgtctgtaaattaaaagactaatctcaggaaatctataaacttagatatcagaaacatagtcactggtaaattttaaatcaggataccagtatgttaaacctttaactcaatctcatcaaggtaatttttaagttatagtaaaaagacactgctagcctcatttacaaatcagtgactaaaatttatctatttatctatgttcttttttttttttgaaacaggatctcactctgtgacccaagctggagtgcagtagcaaacatggctcactgcagcctcaacctcctgggctcaagtggtcctcccacctcagcctccsaaactgctgggactgcaggcatgtgtcaccatgcccagatactttttttgtttttgtagagatagggtctcactatattgcccaggcctatacatgttctgataccaaactgataccaaa

SEQ ID NO: 421986 - DNA, 549 bp, Homo sapiens
caaaagcacagacagaaaagatttgctaaccaccaatatttattttgcttaaccatacctgccaacctagccaaaatattctttggatataatcgttgttcttcatcattgtctgtaaattaaaagactaatctcaggaaatctataaacttagatatcagaaacatagtcactggtaaattttaaatcaggataccagtatgttaaacctttaactcaatctcatcaaggtaatttttaagttatagtaaaaagacactgctagcctcatttacaaatcagtgactaaaatttatctatttatctatgttcttttttttttttgaaacaggatctcactctgtgacccaagctggagtgcagtagcaaacatggctcactgcagcctcaacctcctgggctcaagtggtcctcccacctcagcctccgaarctgctgggactgcaggcatgtgtcaccatgcccagatactttttttgtttttgtagagatagggtctcactatattgcccaggcctatacatgttctgataccaaactgataccaaa

SEQ ID NO: 421987 - DNA, 559 bp, Homo sapiens
ggggaggggaggggcgcgggtgtgctactatatctagtggatrgaggccagaaatgctgcttaacatcctacacacaggatatactgcccgtgacaaggaattagctagcccaaaatgtcaatagcgccaaagttgaataaacctgttcaagagcaacacatttctattccctcttccatagtaactgttaataaacattagttccattttctactatttctgttctacaatagaggctttaaaatatcttaagaaatataacaccattttaataatttggcaagtagaagtaaagataccatgaatcctgagatttcactttcaaaaatgtataagctacatttattttacaatataacttttaggaacaaagttgtcttctccttctgacactgttctcaaaaactgtgctaaaagccttgagtgatgtttgattactccttttattttggggtctttatagctgttaattaccacattctgccagttctttccatgtgaatgcctcacatttcaatggatctttttctattaccaatgtattatctgaaacatttt

SEQ ID NO: 421988 - DNA, 332 bp, Homo sapiens
tggttgcctgtaacataccaaataagaacctaattcctaaagcttgacattcaaatccttttttcaactagctacaatccacttttccaactcttttttccactgctctccctcaggagtagccttttttagcaaaatgacttattctgagatacacaaayaacctttccagatcagagacatcaaaagccattcaggcttcactgagacaaaagatatgcattcaactcagaataacagtaaggaatcaacttatagggaaaccagatgtagccatgttctttaaatatgagagataaccccgttggctcatgccactgtccttatttata

SEQ ID NO: 421989 - DNA, 563 bp, Homo sapiens
tagttgaatggcagtcttacaaaacctaagcaaccttggtttactctatctgtgggaaaagaatttttagtagaatgcttgcgcatcttcctacattcctgataatcaaacagtatttatcatcaactatgttggtgactctcactttgacataggctgaaccagaaatcctaggaaaaactgatgacagaaagctaaggggaaggataggaarccgggaaaccccgggaaaggagggattatattacacatgttatgggaactagtttgtatatgcggggcacagagcatacacttagataagaagggggtcataaaaccagaaaggcaataaatagaatgttatgagcatgaactctagatgcaaactgttcaggttcaatctcacctctgcttcttactacatttattaccttaagcaagtcacttaacttctccctgccgtttctgccacatctgtataatggggataacagaccctaccttagagggctgtcacactaatgaattctgagaatagtccctggtactacagttaagtgctcattagttgtccacactca

SEQ ID NO: 421990 - DNA, 563 bp, Homo sapiens
tagttgaatggcagtcttacaaaacctaagcaaccttggtttactctatctgtgggaaaagaatttttagtagaatgcttgcgcatcttcctacattcctgataatcaaacagtatttatcatcaactatgttggtgactctcactttgacataggctgaaccagaaatcctaggaaaaactgatgacagaaagctaaggggaaggataggaagccgggaaaccccgggaaaggagggattatattacacatgttatgggaactagtttgtatrtgcggggcacagagcatacacttagataagaagggggtcataaaaccagaaaggcaataaatagaatgttatgagcatgaactctagatgcaaactgttcaggttcaatctcacctctgcttcttactacatttattaccttaagcaagtcacttaacttctccctgccgtttctgccacatctgtataatggggataacagaccctaccttagagggctgtcacactaatgaattctgagaatagtccctggtactacagttaagtgctcattagttgtccacactca

SEQ ID NO: 421991 - DNA, 563 bp, Homo sapiens
tagttgaatggcagtcttacaaaacctaagcaaccttggtttactctatctgtgggaaaagaatttttagtagaatgcttgcgcatcttcctacattcctgataatcaaacagtatttatcatcaactatgttggtgactctcactttgacataggctgaaccagaaatcctaggaaaaactgatgacagaaagctaaggggaaggataggaagccgggaaaccccgggaaaggagggattatattacacatgttatgggaactagtttgtatatgcggggcacagagcatacacttagataagaagggggtcataaaaccagaaaggcaataaatagaatgttatgagcatgaactctagaygcaaactgttcaggttcaatctcacctctgcttcttactacatttattaccttaagcaagtcacttaacttctccctgccgtttctgccacatctgtataatggggataacagaccctaccttagagggctgtcacactaatgaattctgagaatagtccctggtactacagttaagtgctcattagttgtccacactca

SEQ ID NO: 421992 - DNA, 563 bp, Homo sapiens
tagttgaatggcagtcttacaaaacctaagcaaccttggtttactctatctgtgggaaaagaatttttagtagaatgcttgcgcatcttcctacattcctgataatcaaacagtatttatcatcaactatgttggtgactctcactttgacataggctgaaccagaaatcctaggaaaaactgatgacagaaagctaaggggaaggataggaagccgggaaaccccgggaaaggagggattatattacacatgttatgggaactagtttgtatatgcggggcacagagcatacacttagataagaagggggtcataaaaccagaaaggcaataaatagaatgttatgagcatgaactctagatgcaaactgttcaggttcaatctcacctctgcttcttactacatttattaccttaagcaagtcacttaacttctccctgccgtttctgccacatctgtataatggggataacagacccwaccttagagggctgtcacactaatgaattctgagaatagtccctggtactacagttaagtgctcattagttgtccacactca

SEQ ID NO: 421993 - DNA, 554 bp, Homo sapiens
agtaacaaggctgtgccccacctccaccccaaaagcaaagtttcagataaatcctactaaaagggggatttaaataaaatgcagagcttcataacacaacacttaaaatgcaaaggattcaaccaaatataccatgtcataccatactaagaaccaggaaaatctgaacaggaatttgaaaatatagtcaaaaggtgcaaacaatgagaattcatagatgtcataattatctatcaaagattttaaactatatattataaaactgcttcaacaagcaattacagccggacacagtggctcacgcctgtagtcccagcactttgggaggcagaggtggttggatcacttgargtcaggagttcgagaccagcctagccaacatcgtgaaaccccatctgtactaaaaatacaaaaattacccaggcatggtggttcacgcctgtgattccagctactcgggaggctgaggcatgagaatcacttgaacccaggaagcagaggttgcagtgagctgagatcattctactgcattccagcctgggcaacagagcaag

SEQ ID NO: 421994 - DNA, 554 bp, Homo sapiens
agtaacaaggctgtgccccacctccaccccaaaagcaaagtttcagataaatcctactaaaagggggatttaaataaaatgcagagcttcataacacaacacttaaaatgcaaaggattcaaccaaatataccatgtcataccatactaagaaccaggaaaatctgaacaggaatttgaaaatatagtcaaaaggtgcaaacaatgagaattcatagatgtcataattatctatcaaagattttaaactatatattataaaactgcttcaacaagcaattacagccggacacagtggctcacgcctgtagtcccagcactttgggaggcagaggtggttggatcacttgaggtcargagttcgagaccagcctagccaacatcgtgaaaccccatctgtactaaaaatacaaaaattacccaggcatggtggttcacgcctgtgattccagctactcgggaggctgaggcatgagaatcacttgaacccaggaagcagaggttgcagtgagctgagatcattctactgcattccagcctgggcaacagagcaag

SEQ ID NO: 421995 - DNA, 583 bp, Homo sapiens
aaaaaaaaattttaggttttgtttctaaaatgcttcacaatttatttttgaaaatataaggaatgaaattctaactttctaatttgaatggaaggatgagttggtagcacacaaagcactaaattgagtaatgtagattttattatttttaatgaatcctttgtttaatrttttgcaggttcaatttgtttacttgtgatgtacagagagttttttataccttcccagcttatatttgaatattccttttcaaggttttataaagagatttctctcctttacccctttcagcaatgtgcattttgtaagcactttggagccactatcaaatgctgtgaagagaaatgtacccagatgtatcattatccttgtgctgcaggagccggctcctttcaggatttcagtcacatcttcctgctttgtccagaacacattgaccaagctcctgaaagatgtaagtttactacggatagacttttaaacttcaaccaatgtatttactgaaaataacaaatgttgtaaattccctgagtgttattctacttgtattaaaaggtaataatacataatcattaaaatctga

SEQ ID NO: 421996 - DNA, 592 bp, Homo sapiens
taacttataattgatgaatttatttgtatttatttttaggcagggtaaaaaatagtaatatgtctcataaataatatatgttcctattactagttttggtaggatttaaaaactttataataatcctcaatatagaaacctgcccctttaaccatattactatttgcttttaaaaaaaaattttaggttttgtttctaaaatgcttcacaatttatttttgaaaatataaggaatgaaattctaactttctaatttgaatggaaggatgagttggtagcacacaaagcactaaattgagtaatgtagattttattatttttaatgaatcctttgtttaatattttgcaggttcaatttgtttacttgtgatgtacagagagttttttataccttcccagcttatatttraatattccttttcaaggttttataaagagatttctctcctttacccctttcagcaatgtgcattttgtaagcactttggagccactatcaaatgctgtgaagagaaatgtacccagatgtatcattatccttgtgctgcaggagccggctcctttcaggatttcagtcacatcttcctgcttt

SEQ ID NO: 421997 - DNA, 583 bp, Homo sapiens
aaaaaaaaattttaggttttgtttctaaaatgcttcacaatttatttttgaaaatataaggaatgaaattctaactttctaatttgaatggaaggatgagttggtagcacacaaagcactaaattgagtaatgtagattttattatttttaatgaatcctttgtttaatattttgcaggttcaatttgtttacttgtgatgtacagagagttttttataccttcccagcttatatttgaatattccttttcaaggttttataaagagatttctctcctttacccctttcagcaatgtgcattttgtaagcactttggagccactatcaaatgctgtgaagagaaatgtacccagatgtatcattatccttgtgctgcaggagccggctcctttcaggatttcagtcacatcttcctgctttgtccagaacacattgaccaagctcctgaaagatgtaagtttactayggatagacttttaaacttcaaccaatgtatttactgaaaataacaaatgttgtaaattccctgagtgttattctacttgtattaaaaggtaataatacataatcattaaaatctga

SEQ ID NO: 421998 - DNA, 583 bp, Homo sapiens
aaaaaaaaattttaggttttgtttctaaaatgcttcacaatttatttttgaaaatataaggaatgaaattctaactttctaatttgaatggaaggatgagttggtagcacacaaagcactaaattgagtaatgtagattttattatttttaatgaatcctttgtttaatattttgcaggttcaatttgtttacttgtgatgtacagagagttttttataccttcccagcttatatttgaatattccttttcaaggttttataaagagatttctctcctttacccctttcagcaatgtgcattttgtaagcactttggagccactatcaaatgctgtgaagagaaatgtacccagatgtatcattatccttgtgctgcaggagccggctcctttcaggatttcagtcacatcttcctgctttgtccagaacacattgaccaagctcctgaaagatgtaagtttactacggatagacttttaaacttcaaccaatgtatttactgaaaataacaaatgttgtaaattccctgagtgttatkctacttgtattaaaaggtaataatacataatcattaaaatctga

SEQ ID NO: 421999 - DNA, 615 bp, Homo sapiens
ataaaacgagtttctccaaacagatgtatgtaaaaatctagtacatatacccccaagttgagtcaataaggtgaaccagattctggttgaatggaatccttgaaatataactttggtgaacaaactgtttgtgttttccacttttcttaaaaaagaagtgataaagcagatttccagtamctgccagctgacaaaatgctacttaccaggtaaaaaccactaccaaaaatcagaatcacagaagagctatcagtaaaattattaatgccacaaattaacatgatgttaacagctgatttatgcatcaaaagagtatttatataatcacagcaaataactcaaatcttttacatcactagtaaactcaaaaaatatagcaaaaagcaataacattaaatttcattattgatctactagctttaactatttaatactagtacacttagttttgattactttgaagcaaaaacaataatcttttcttcttttaatgactttttcagttataggaaagatgatattaaaagaagatatacaaccatagcttagctacaggtataaaattgttttaaagatatgtaattgtgctattgaattaaactgaaaacataaata

SEQ ID NO: 422000 - DNA, 615 bp, Homo sapiens
ataaaacgagtttctccaaacagatgtatgtaaaaatctagtacatatacccccaagttgagtcaataaggtgaaccagattctggttgaatggaatccttgaaatataactttggtgaacaaactgtttgtgttttccacttttcttaaaaaagaagtgataaagcagatttccagtaactgccagctgacaaaatgctacttaccaggtaaaaaccactrccaaaaatcagaatcacagaagagctatcagtaaaattattaatgccacaaattaacatgatgttaacagctgatttatgcatcaaaagagtatttatataatcacagcaaataactcaaatcttttacatcactagtaaactcaaaaaatatagcaaaaagcaataacattaaatttcattattgatctactagctttaactatttaatactagtacacttagttttgattactttgaagcaaaaacaataatcttttcttcttttaatgactttttcagttataggaaagatgatattaaaagaagatatacaaccatagcttagctacaggtataaaattgttttaaagatatgtaattgtgctattgaattaaactgaaaacataaata

SEQ ID NO: 422001 - DNA, 542 bp, Homo sapiens
tcaagaacagtaaaagaacttctggtcttacaaacattacacagataaaacgagtttctccaaacagatgtatgtaaaaatctagtacatatacccccaagttgagtcaataaggtgaaccagattctggttgaatggaatccttgaaatataactttggtgaacaaactgtttgtgttttccacttttcttaaaaaagaagtgataaagcagatttccagtaactgccagctgacaaaatgctacttaccaggtaaaaaccactaccaaaaatcagaatcacagaagrgctatcagtaaaattattaatgccacaaattaacatgatgttaacagctgatttatgcatcaaaagagtatttatataatcacagcaaataactcaaatcttttacatcactagtaaactcaaaaaatatagcaaaaagcaataacattaaatttcattattgatctactagctttaactatttaatactagtacacttagttttgattactttgaagcaaaaacaataatcttttcttcttttaatgacttt

SEQ ID NO: 422002 - DNA, 615 bp, Homo sapiens
ataaaacgagtttctccaaacagatgtatgtaaaaatctagtacatatacccccaagttgagtcaataaggtgaaccagattctggttgaatggaatccttgaaatataactttggtgaacaaactgtttgtgttttccacttttcttaaaaaagaagtgataaagcagatttccagtaactgccagctgacaaaatgctacttaccaggtaaaaaccactaccaaaaatcagaatcacagaagagctatcagtaaaattattaatgccacaaattaacatgatgttaacagctgatttatgcatcaaaagagtatttatataatcacagcaaataactcaaatcttttacatcactagtaaactcaaaaaatatagcaaaaagcaataacattaaatttcattattgatctactagctttaactatttaatactagtacacttagttttgattactttgaagcaaaaacaataatcttttcttcttttaatgactttttcagttayaggaaagatgatattaaaagaagatatacaaccatagcttagctacaggtataaaattgttttaaagatatgtaattgtgctattgaattaaactgaaaacataaata

SEQ ID NO: 422003 - DNA, 598 bp, Homo sapiens
tcaaatttgatatacttacacgcaataaagtggctacaagcattagatatgaataaggttgttcatttggaaatcactccaatattcattaaaaataaatattttaggagtcaattaaagaatttaacattatttttgtttctaaaataagtctggtttgaaggatcatgttattctctaaagtattttcattaaattgctattttatccaaaagttagctctctgaacaacaaagccagtgtatgcatatttacatttatctcatttgactaactgataacaacaaaacatatatctctgaygcccaataattacaaagaggggtaacaggtgactgtggtttatcacaattctggcactctatcctccttccagtagttcctggaacagccaaaatcaaatcttcctttatgcaaacattctaaatgcatctgacgtgagttccctcaggtttcctcagtacaaaccctaaaattaaataacttcttttcccttcttcctgcctcacaatccctcttccctgaggaaaatgattactacatcagcggtctcgttacttctccttctatagtgtttatggcttattacgatcacttc

SEQ ID NO: 422004 - DNA, 598 bp, Homo sapiens
tcaaatttgatatacttacacgcaataaagtggctacaagcattagatatgaataaggttgttcatttggaaatcactccaatattcattaaaaataaatattttaggagtcaattaaagaatttaacattatttttgtttctaaaataagtctggtttgaaggatcatgttattctctaaagtattttcattaaattgctattttatccaaaagttagctctctgaacaacaaagccagtgtatgcatatttacatttatctcatttgactaactgataacaacaaaacatatatctctgatgcccaataatwacaaagaggggtaacaggtgactgtggtttatcacaattctggcactctatcctccttccagtagttcctggaacagccaaaatcaaatcttcctttatgcaaacattctaaatgcatctgacgtgagttccctcaggtttcctcagtacaaaccctaaaattaaataacttcttttcccttcttcctgcctcacaatccctcttccctgaggaaaatgattactacatcagcggtctcgttacttctccttctatagtgtttatggcttattacgatcacttc

SEQ ID NO: 422005 - DNA, 556 bp, Homo sapiens
aagcctaacttccaatattttcttcactctgaaataaatatttccaacagtgtattatgtcagaagttctcrgttttgggggcgctgtatcttaatttttctgtactctattttcaacttcactgacataatacaagctctatcttccttacaaatttataaggaatcaaatgaaatgaaatatataaaagttgtcctctttctcccatcttcaaaaaacttccccctgcacttcatttcctgttaaccctctctccttcaacagcctggtctgtagaaagagtccatacatggcctccctccactccctcatcttccattcactccttgttccaaggccctcccaacaccactgaaacttttttcaatgcccttttttttaattttttttaaagcaaattctgcccccaacttttcattctttcagttgaaacactttttccaaaacactgtgcagatgtaaaaaaatattgtagttaaggccagggtccagtggctcatgcctgtatcccagcactgtgggagtccaaggcaggaagatcacaggtctggagtt

SEQ ID NO: 422006 - DNA, 510 bp, Homo sapiens
atgtaggtgcagttcagtaatgattgaaatgaagttttcattatattctatttttgaaaaattaccaataastacatatataactgaaatcacattatgtaactgtcagtataaaggaatggctcaggtaaaaccaaatagaagttgtatatttaatatttttaataatttttttaattaaaaagttaaaacttgtactacatggctatttattagggtaaggaagtatgatctctttaacgtacatggtattttaaaaatatcttattctggtgtgtcttcttgattgtaaaaccccacttaacattttgggcttctatttgtatctttttactttaaagtaacactattctgtggttattcttgtggcatattaaagtgatattttaaggaatacttaaccaaattctatataaaatgtatctactctaagttagaaatcttggtgcccttactggtcttatgatcttggaagtcacttaagatcctgagctctgtattaagccagtg

SEQ ID NO: 422007 - DNA, 510 bp, Homo sapiens
atgtaggtgcagttcagtaatgattgaaatgaagttttcattatattctatttttgaaaaattaccaataagtacatatataactgaaatcacattatgtaactgtcagtataaaggaatggctcaggtaaaaccaaatagaagttgtatatttaatawttttaataatttttttaattaaaaagttaaaacttgtactacatggctatttattagggtaaggaagtatgatctctttaacgtacatggtattttaaaaatatcttattctggtgtgtcttcttgattgtaaaaccccacttaacattttgggcttctatttgtatctttttactttaaagtaacactattctgtggttattcttgtggcatattaaagtgatattttaaggaatacttaaccaaattctatataaaatgtatctactctaagttagaaatcttggtgcccttactggtcttatgatcttggaagtcacttaagatcctgagctctgtattaagccagtg

SEQ ID NO: 422008 - DNA, 556 bp, Homo sapiens
  misc_feature (1)...(556): n = A,T,C or G
tttaggaatttttcctttgttatctctaatttgtgtttatttccatccactatagtttttacttctgacaatgtaatttgcatctctgcaagtatggttccttttttttttttaaaaaaaaaaaaccttccctgcttccacttattgtcttgagttttatttggagtacagagatttacttaaaatctttccatgcttgcttttagatttggggtaattcctcactcctgaggcaagacctttctgaatattcattgtcctgtgaagtatgtggtattttggcctggctcatgggaatggacsctcttccagtcattgtgtgaaccccagacatagtttctgctaattttctttaactttttttaaattttattttccattgttcttaggcagtttcctagcacacaagcacttttcattactccactaaatacccaagagggaatctctgcacacctccaggatttgtttcctgtactgctttttttctctccagttttctgtcctgtgatctctatctgcttgggttnnnnnnnnnnnnnnnnnnnnnnnnnnn

SEQ ID NO: 422009 - DNA, 550 bp, Homo sapiens
tttttttaattaaaaagttaaaacttgtactacatggctatttattagggtaaggaagtatgatctctttaacgtacatggtattttaaaaatatcttattctggtgtgtcttcttgattgtaaaaccccacttaacattttgggcttctatttgtatctttttactttaaagtaacactattctgtggttattcttgtggcatattaaagtgatattttaaggaatacttaaccaaattctatataaaatgtatctactctaagttagaaatcttggtgcccttactggtcttatgatcttggaagtcacttaagatcctgagctctgtrttaagccagtgctggttcaagttctggatctaccattgaataattgaccatgacttctttatacttcagtttccccaactgttgaataggaataatgattgttgtgatgagtccataaaaatacaatcttactgactttatggtggccgaaatttcaagagtaacacagtaacagttaagtcatactgggactcaggctaatcttttctctgttgccct

SEQ ID NO: 422010 - DNA, 550 bp, Homo sapiens
tttttttaattaaaaagttaaaacttgtactacatggctatttattagggtaaggaagtatgatctctttaacgtacatggtattttaaaaatatcttattctggtgtgtcttcttgattgtaaaaccccacttaacattttgggcttctatttgtatctttttactttaaagtaacactattctgtggttattcttgtggcatattaaagtgatattttaaggaatacttaaccaaattctatataaaatgtatctactctaagttagaaatcttggtgcccttactggtcttatgatcttggaagtcacttaagatcctgagctctgtattaagccagtgctggttcaagttctggatctaccattgaataattgaccatgacttctttatacttcagtttccccaaytgttgaataggaataatgattgttgtgatgagtccataaaaatacaatcttactgactttatggtggccgaaatttcaagagtaacacagtaacagttaagtcatactgggactcaggctaatcttttctctgttgccct

SEQ ID NO: 422011 - DNA, 556 bp, Homo sapiens
  misc_feature (1)...(556): n = A,T,C or G
tttaggaatttttcctttgttatctctaatttgtgtttatttccatccactatagtttttacttctgacaatgtaatttgcatctctgcaagtatggttccttttttttttttaaaaaaaaaaaaccttccctgcttccacttattgtcttgagttttatttggagtacagagatttacttaaaatctttccatgcttgcttttagatttggggtaattcctcactcctgaggcaagacctttctgaatattcattgtcctgtgaagtatgtggtattttggcctggctcatgggaatggaccctcttccagtcattgtgtgaaccccagacatagtttctgctaattttctttaactttttttaaattttattttccattgttcttaggmagtttcctagcacacaagcacttttcattactccactaaatacccaagagggaatctctgcacacctccaggatttgtttcctgtactgctttttttctctccagttttctgtcctgtgatctctatctgcttgggttnnnnnnnnnnnnnnnnnnnnnnnnnnn

SEQ ID NO: 422012 - DNA, 556 bp, Homo sapiens
  misc_feature (1)...(556): n = A,T,C or G
tttaggaatttttcctttgttatctctaatttgtgtttatttccatccactatagtttttacttctgacaatgtaatttgcatctctgcaagtatggttccttttttttttttaaaaaaaaaaaaccttccctgcttccacttattgtcttgagttttatttggagtacagagatttacttaaaatctttccatgcttgcttttagatttggggtaattcctcactcctgaggcaagacctttctgaatattcattgtcctgtgaagtatgtggtattttggcctggctcatgggaatggaccctcttccagtcattgtgtgaaccccagacatagtttctgctaattttctttaactttttttaaattttattttccattgttcttaggcagtttcctagcacacaagcacttttcattactccactaaatacmcaagagggaatctctgcacacctccaggatttgtttcctgtactgctttttttctctccagttttctgtcctgtgatctctatctgcttgggttnnnnnnnnnnnnnnnnnnnnnnnnnnn

SEQ ID NO: 422013 - DNA, 479 bp, Homo sapiens
  misc_feature (1)...(479): n = A,T,C or G
nnnnnntatgtttttaggttgttagtgggaatattcttcacagaagattaaaatattaaaaattttaaaatccaattattgtcattatatagatcctgccttattcagatccacaaaaaccagcaagcttaagaaccttcatagacactcagatacrcaagagagagactgctggaaaagtctccctcctaagtacttatagctccatttcattcatcactatctaagtatcttccttcctatgggctcccacttctggatccctcttctgcagggatccgtggcaatctccaatctacatcttcagcctaggaaagcccagattcctcaaaagacgggctaacataattgagagtaggagctctctattcctctgcttctggaaagtaagttagtctcagtcatccaccccaagcatacgcatgttaccaactacccaaatgaagcttcactgctggtttgctggccaatcctacatt

SEQ ID NO: 422014 - DNA, 479 bp, Homo sapiens
  misc_feature (1)...(479): n = A,T,C or G
nnnnnntatgtttttaggttgttagtgggaatattcttcacagaagattaaaatattaaaaattttaaaatccaattattgtcattatatagatcctgccttattcagatccacaaaaaccagcaagcttaagaaccttcatagacactcagatacgcaagagagagactgctggaaaagtctccctcctaagtacttatagctccatttcattcatcactatctaartatcttccttcctatgggctcccacttctggatccctcttctgcagggatccgtggcaatctccaatctacatcttcagcctaggaaagcccagattcctcaaaagacgggctaacataattgagagtaggagctctctattcctctgcttctggaaagtaagttagtctcagtcatccaccccaagcatacgcatgttaccaactacccaaatgaagcttcactgctggtttgctggccaatcctacatt

SEQ ID NO: 422015 - DNA, 479 bp, Homo sapiens
  misc_feature (1)...(479): n = A,T,C or G
nnnnnntatgtttttaggttgttagtgggaatattcttcacagaagattaaaatattaaaaattttaaaatccaattattgtcattatatagatcctgccttattcagatccacaaaaaccagcaagcttaagaaccttcatagacactcagatacgcaagagagagactgctggaaaagtctccctcctaagtacttatagctccatttcattcatcactatctaagtatcttccttcctatgggctcccacttctggatccctcttctgcagggatccgtggcaatctccaatctacatcttcagcctaggaaagcccagattcctcaaaagacgggctaacataattgagagtaggarctctctattcctctgcttctggaaagtaagttagtctcagtcatccaccccaagcatacgcatgttaccaactacccaaatgaagcttcactgctggtttgctggccaatcctacatt

SEQ ID NO: 422016 - DNA, 520 bp, Homo sapiens
tacaaaaatcttagggtcctgtggccacaggtaactgatgcctgcctttaaaattttgatggttaaaaaaaaatgtaatatggttaccacwgccatttccaaaatatttggacaaacttttagagtatccaggcttctaaggaacactctaaagagagttaatatataacaaaatgtgactttctgaattgatctgagttaaaccagtatcgtgatcacactgctgcataggtctgtatccatctatgcttaggggcaaatgaagtggttagagagccaggcaggatgatggccaaatcatgggttggctacctgttaactgtggaatcatgagccaatatttcaacctctttaaagcagagttgtctaattagtaaaaaagcaataatagcacaaatagtttgtaaagctgtgtggagacgacatgacatgataaatattaagcatgtaatatggtgtctagcacagaggagaacaccaaacggtactagttctattctctctattcactaagttaaca

SEQ ID NO: 422017 - DNA, 520 bp, Homo sapiens
tacaaaaatcttagggtcctgtggccacaggtaactgatgcctgcctttaaaattttgatggttaaaaaaaaatgtaatatggttaccactgccatttccaaaatatttggacaaacttttagagtatccaggcttctaaggaacactctaaagagagttaatatataacaaaatgtgactttctgaattgatctgagttaaaccagtatcgtgatcacactgctgyataggtctgtatccatctatgcttaggggcaaatgaagtggttagagagccaggcaggatgatggccaaatcatgggttggctacctgttaactgtggaatcatgagccaatatttcaacctctttaaagcagagttgtctaattagtaaaaaagcaataatagcacaaatagtttgtaaagctgtgtggagacgacatgacatgataaatattaagcatgtaatatggtgtctagcacagaggagaacaccaaacggtactagttctattctctctattcactaagttaaca

SEQ ID NO: 422018 - DNA, 520 bp, Homo sapiens
tacaaaaatcttagggtcctgtggccacaggtaactgatgcctgcctttaaaattttgatggttaaaaaaaaatgtaatatggttaccactgccatttccaaaatatttggacaaacttttagagtatccaggcttctaaggaacactctaaagagagttaatatataacaaaatgtgactttctgaattgatctgagttaaaccagtatcgtgatcacactgctgcataggtctgtatccrtctatgcttaggggcaaatgaagtggttagagagccaggcaggatgatggccaaatcatgggttggctacctgttaactgtggaatcatgagccaatatttcaacctctttaaagcagagttgtctaattagtaaaaaagcaataatagcacaaatagtttgtaaagctgtgtggagacgacatgacatgataaatattaagcatgtaatatggtgtctagcacagaggagaacaccaaacggtactagttctattctctctattcactaagttaaca

SEQ ID NO: 422019 - DNA, 520 bp, Homo sapiens
tacaaaaatcttagggtcctgtggccacaggtaactgatgcctgcctttaaaattttgatggttaaaaaaaaatgtaatatggttaccactgccatttccaaaatatttggacaaacttttagagtatccaggcttctaaggaacactctaaagagagttaatatataacaaaatgtgactttctgaattgatctgagttaaaccagtatcgtgatcacactgctgcataggtctgtatccatctatgcttaggggcaaatgaagtggttagagagccaggcaggatgatggccaaatcatgggttggctacctgttaactgtggaatcatgagccaatatttcaacctctttaaagcagagttgyctaattagtaaaaaagcaataatagcacaaatagtttgtaaagctgtgtggagacgacatgacatgataaatattaagcatgtaatatggtgtctagcacagaggagaacaccaaacggtactagttctattctctctattcactaagttaaca

SEQ ID NO: 422020 - DNA, 570 bp, Homo sapiens
gatctctagaaatggaaaagtatacagacactttttaagaaactgtgaaactgttttccaaagttaagaatattatttccaacaagtcagaaattccagtcctaggtatttacccaagaaacatgaaaagatacatctacaacraagcatgttacataaatgctcacagcagctttatatactggccaaaaattgaacgaaacttaactgtaagctagtgaatggaccaatctcaaaacgattatgctaagcaaaaaaaaaggcagatggaaaagattctatactgtatggttccattcatatattagtctagaaaaggcaaaactataggaaagcaacagatcggtgattgccaggagctggagtgggaggtaggcagtaacttcaaaaggtcatgagcgaatttatgggtaaagggtctattctgtatcttgactatgatggtaattacatgactgttcatatttaccaaatcacattcaatacacaccttagaaagggtgaattatagtgtatgcaaaatataccttaacaaaacaatgactctcacacataaatttatttatttat

SEQ ID NO: 422021 - DNA, 570 bp, Homo sapiens
gatctctagaaatggaaaagtatacagacactttttaagaaactgtgaaactgttttccaaagttaagaatattatttccaacaagtcagaaattccagtcctaggtatttacccaagaaacatgaaaagatacatctacaacgaagcatgttacataaatgctcacagcagctttatatactggccaaaaattgaacgaaacttaactgtaagctagtgaatggaccaatctcaaaacsattatgctaagcaaaaaaaaaggcagatggaaaagattctatactgtatggttccattcatatattagtctagaaaaggcaaaactataggaaagcaacagatcggtgattgccaggagctggagtgggaggtaggcagtaacttcaaaaggtcatgagcgaatttatgggtaaagggtctattctgtatcttgactatgatggtaattacatgactgttcatatttaccaaatcacattcaatacacaccttagaaagggtgaattatagtgtatgcaaaatataccttaacaaaacaatgactctcacacataaatttatttatttat

SEQ ID NO: 422022 - DNA, 570 bp, Homo sapiens
gatctctagaaatggaaaagtatacagacactttttaagaaactgtgaaactgttttccaaagttaagaatattatttccaacaagtcagaaattccagtcctaggtatttacccaagaaacatgaaaagatacatctacaacgaagcatgttacataaatgctcacagcagctttatatactggccaaaaattgaacgaaacttaactgtaagctagtgaatggaccaatctcaaaacgattatgctaagcaaaaaaaaaggcagayggaaaagattctatactgtatggttccattcatatattagtctagaaaaggcaaaactataggaaagcaacagatcggtgattgccaggagctggagtgggaggtaggcagtaacttcaaaaggtcatgagcgaatttatgggtaaagggtctattctgtatcttgactatgatggtaattacatgactgttcatatttaccaaatcacattcaatacacaccttagaaagggtgaattatagtgtatgcaaaatataccttaacaaaacaatgactctcacacataaatttatttatttat

SEQ ID NO: 422023 - DNA, 570 bp, Homo sapiens
gatctctagaaatggaaaagtatacagacactttttaagaaactgtgaaactgttttccaaagttaagaatattatttccaacaagtcagaaattccagtcctaggtatttacccaagaaacatgaaaagatacatctacaacgaagcatgttacataaatgctcacagcagctttatatactggccaaaaattgaacgaaacttaactgtaagctagtgaatggaccaatctcaaaacgattatgctaagcaaaaaaaaaggcagatggaaaagattctatactgtatggttccattcatatattagtctagaaaaggcaaaactataggaaagcaacagatcggtgattgccaggagctggagtgggaggtaggcagtaacttcaaaaggtcatgagcgaatttatgggtaaagggtctattctgtatcttgactrtgatggtaattacatgactgttcatatttaccaaatcacattcaatacacaccttagaaagggtgaattatagtgtatgcaaaatataccttaacaaaacaatgactctcacacataaatttatttatttat

SEQ ID NO: 422024 - DNA, 547 bp, Homo sapiens
atttaatgtgaggaactctgaggttgatttgagtttctaataaaaagaaagagggaaatcattccacaatgtataatttactaccatcggtctcaaccacatactcatttctttttgagacttcaggtttttaagcattgcagattcatcaggggaggaatgactagtgggctgaatatgttgtgtgaataacaataccagtttggmaggaagataacaccttctgtatccttaactggattcagtaatacacaggaatgtgtacacatgaggaaaagaaggtgaatcgatctgtgtggtgatatttttcaaagtgtatgctttagagttaaatattattaatggtttaataataaggtgatttgtaaaatcagtaacaaaaataacatcaggtagctgtgagacagcttcaatgaaaacaagatgatgtcttaaacaatcagcaacaaaagctttgctggatgcttcatcgcgtcattgcatctatttagaaaatgagatgcaggattcaaggaagaaattagaccagatgagaagtcaagtatgt

SEQ ID NO: 422025 - DNA, 417 bp, Homo sapiens
ttaatggtttaataataaggtgatttgtaaaatcagtaacaaaaataacatcaggtagctgtgagacagcttcaatgaaaacaagatgatgtcttaaacaatcagcaacaaaagctttgctggatgcttcrtcgcgtcattgcatctatttagaaaatgagatgcaggattcaaggaagaaattagaccagatgagaagtcaagtatgtatgaaactttgcatgccaacaactgttaatctgtagctagttaactaatataaagtgttttggggtactaattttagtggatggctttcttttgtatttttattataattaattttattaaaattttatagtggatggctttcttttgtattttccttattattaattttattaaaattttattataatgcacctatatcttaatctc

SEQ ID NO: 422026 - DNA, 547 bp, Homo sapiens
atttaatgtgaggaactctgaggttgatttgagtttctaataaaaagaaagagggaaatcattccacaatgtataatttactaccatcggtctcaaccacatactcatttctttttgagacttcaggtttttaagcattgcagattcatcaggggaggaatgactagtgggctgaatatgttgtgtgaataacaataccagtttggcaggaagataacaccttctgtatccttaactggattcagtaatacacaggaatgtgtacacatgaggaaaagaaggtgaatcgatctgtgtggtgatatttttcaaagtgtatgctttagagttaaatattattaatggtttaataataaggtgatttgtaaaatcagtaacaaaaataacatcaggtagctgtgagacagcttcaatgaaaacaagatgatgtcttaaacaatcagcaacaaaagctttgctggatgcttcatcgcgtcattgcatctatttagaaaatgagatgcaggattcaasgaagaaattagaccagatgagaagtcaagtatgt

SEQ ID NO: 422027 - DNA, 614 bp, Homo sapiens
tattattaacaaattagatagcaaagcattatatttgttatgctagaagactatggctgtgctaaaagaatataatatatgtcaacattgccagactgggcacttctcacaatattcccaaccaacaggaataaaactaaaaggtaagaaaaaaatagtaaattaaaacaaaattttatcacagcagaatttcttctcaaaaacaaaaaatggaaattaggctataattaaagtaagttttttcaatggcttatttgttagccaagcaaggaaaaccattaccaacagtagttaattaaattatgtttcrttacggtaaccaaagatgtgtccatagaaaataaactttaaaaaagactattagcctttcagcgagagtaattgctctaaaagttaaggacattgggagtaatatcaagtcattttggaaagaagggtgaatgatttttcatggttttcttaggcttttgatggttgaataggtgttaccagtactgttcagttgttacatattccagaagtcagtgctgagtttgaagtgattgaagaattagtgtttatgcatagtctatgtgaaacaaatacaagagaaaatattttcagaaaagttgagc

SEQ ID NO: 422028 - DNA, 611 bp, Homo sapiens
tttagaggcatagtggaatgtatattattattaacaaattagatagcaaagcattatatttgttatgctagaagactatggctgtgctaaaagaatataatatatgtcaacattgccagactgggcacttctcacaatattcccaaccaacaggaataaaactaaaaggtaagaaaaaaatagtaaattaaaacaaaattttatcacagcagaatttcttctcaaaaacaaaaaatggaaattaggctataattaaagtaagttttttcaatggcttatttgttagccaagcaaggaaaaccattaccaacagtagttaattaaattatgtttcgttacggtaaccaaagatgtgtccatagaaaataaactttaaaaaagactattagcctttcagygagagtaattgctctaaaagttaaggacattgggagtaatatcaagtcattttggaaagaagggtgaatgatttttcatggttttcttaggcttttgatggttgaataggtgttaccagtactgttcagttgttacatattccagaagtcagtgctgagtttgaagtgattgaagaattagtgtttatgcatagtctatgtgaaacaaataca

SEQ ID NO: 422029 - DNA, 611 bp, Homo sapiens
tttagaggcatagtggaatgtatattattattaacaaattagatagcaaagcattatatttgttatgctagaagactatggctgtgctaaaagaatataatatatgtcaacattgccagactgggcacttctcacaatattcccaaccaacaggaataaaactaaaaggtaagaaaaaaatagtaaattaaaacaaaattttatcacagcagaatttcttctcaaaaacaaaaaatggaaattaggctataattaaagtaagttttttcaatggcttatttgttagccaagcaaggaaaaccattaccaacagtagttaattaaattatgtttcgttacggtaaccaaagatgtgtccatagaaaataaactttaaaaaagactattagcctttcagcgagagtaattgctctaaaagttaaggacattgggagtaatatcaagtcattttggaaagaagggtgaatgatttttcatggttttcttaggcttttgatggwtgaataggtgttaccagtactgttcagttgttacatattccagaagtcagtgctgagtttgaagtgattgaagaattagtgtttatgcatagtctatgtgaaacaaataca

SEQ ID NO: 422030 - DNA, 614 bp, Homo sapiens
tattattaacaaattagatagcaaagcattatatttgttatgctagaagactatggctgtgctaaaagaatataatatatgtcaacattgccagactgggcacttctcacaatattcccaaccaacaggaataaaactaaaaggtaagaaaaaaatagtaaattaaaacaaaattttatcacagcagaatttcttctcaaaaacaaaaaatggaaattaggctataattaaagtaagttttttcaatggcttatttgttagccaagcaaggaaaaccattaccaacagtagttaattaaattatgtttcgttacggtaaccaaagatgtgtccatagaaaataaactttaaaaaagactattagcctttcagcgagagtaattgctctaaaagttaaggacattgggagtaatatcaagtcattttggaaagaagggtgaatgatttttcatggttttcttaggcttttgatggttgaataggtgttaccagtactgttcagttgttacatattccagaagtcagtgctgagtttgaagtgattgaagaattagtgtttatgcatagtctatgtgaaacaamtacaagagaaaatattttcagaaaagttgagc

SEQ ID NO: 422031 - DNA, 568 bp, Homo sapiens
acatgctgcaaactggccagagtgcttttctttcctctttgcttaactgcttctttctcatccttcatttctcagtgtagcatctcttcctcacggaaatcttccctgggtgaagtatagatcaaattatcttatgcaatcatataactatggtttgtgtcttttttacaggacccatctgagtttataactgtcatctttttatcttggttcttcgctatactttaagctaaaataatagcagaagtgttgtcttatcttcagagcttattataatatcttccaccttgtaggcactcaatatgtacatacttgttcagtgtctgaatgaatacatgttaaaaatgcacrgtcctttatatccagaaatctactcatgtattttatctctactttgctttttcccggttacagattgtgttcacctattgaaaattaaaaatacattttgtttgtgtaaaagatgaatagaacttaaagaaaatctctgtgagcaacttggagtaaaaattcaaaaaaatgaaaaataaggctagtgtactacaaaagagactatctgaaaaagaag

SEQ ID NO: 422032 - DNA, 539 bp, Homo sapiens
gctatactttaagctaaaataatagcagaagtgttgtcttatcttcagagcttattataatatcttccaccttgtaggcactcaatatgtacatacttgttcagtgtctgaatgaatacatgttaaaaatgcacagtcctttatatccagaaatctactcatgtattttatctctactttgctttttcccrgttacagattgtgttcacctattgaaaattaaaaatacattttgtttgtgtaaaagatgaatagaacttaaagaaaatctctgtgagcaacttggagtaaaaattcaaaaaaatgaaaaataaggctagtgtactacaaaagagactatctgaaaaagaagaaataaaatcgcagttagagcatgaagcacttgaattggaaaaagaactctgtagtttgaggtatgacctagttttaaataaatgtttgaactatttgttttatattaaagacatataaggagaggttttgtaattatgaactttccttctaggatttaacaaggaagaaagcttcttaatcttata

SEQ ID NO: 422033 - DNA, 539 bp, Homo sapiens
gctatactttaagctaaaataatagcagaagtgttgtcttatcttcagagcttattataatatcttccaccttgtaggcactcaatatgtacatacttgttcagtgtctgaatgaatacatgttaaaaatgcacagtcctttatatccagaaatctactcatgtattttatctctactttgctttttcccggttacagattgtgttcacctattgaaaattaaaaatacattttgtttgtgtaaaagatgaatagaacttaaagaaaatctctgtgagcaacttggagtaaaaattcaaaaaaatgaaaaataaggctagtgtactacaaaagagactatctgaaaaagaagaaataaaatcrcagttagagcatgaagcacttgaattggaaaaagaactctgtagtttgaggtatgacctagttttaaataaatgtttgaactatttgttttatattaaagacatataaggagaggttttgtaattatgaactttccttctaggatttaacaaggaagaaagcttcttaatcttata

SEQ ID NO: 422034 - DNA, 539 bp, Homo sapiens
gctatactttaagctaaaataatagcagaagtgttgtcttatcttcagagcttattataatatcttccaccttgtaggcactcaatatgtacatacttgttcagtgtctgaatgaatacatgttaaaaatgcacagtcctttatatccagaaatctactcatgtattttatctctactttgctttttcccggttacagattgtgttcacctattgaaaattaaaaatacattttgtttgtgtaaaagatgaatagaacttaaagaaaatctctgtgagcaacttggagtaaaaattcaaaaaaatgaaaaataaggctagtgtactacaaaagagactatctgaaaaagaagaaataaaatcgcagttagagcatgaarcacttgaattggaaaaagaactctgtagtttgaggtatgacctagttttaaataaatgtttgaactatttgttttatattaaagacatataaggagaggttttgtaattatgaactttccttctaggatttaacaaggaagaaagcttcttaatcttata

SEQ ID NO: 422035 - DNA, 539 bp, Homo sapiens
gctatactttaagctaaaataatagcagaagtgttgtcttatcttcagagcttattataatatcttccaccttgtaggcactcaatatgtacatacttgttcagtgtctgaatgaatacatgttaaaaatgcacagtcctttatatccagaaatctactcatgtattttatctctactttgctttttcccggttacagattgtgttcacctattgaaaattaaaaatacattttgtttgtgtaaaagatgaatagaacttaaagaaaatctctgtgagcaacttggagtaaaaattcaaaaaaatgaaaaataaggctagtgtactacaaaagagactatctgaaaaagaagaaataaaatcgcagttagagcatgaagcamttgaattggaaaaagaactctgtagtttgaggtatgacctagttttaaataaatgtttgaactatttgttttatattaaagacatataaggagaggttttgtaattatgaactttccttctaggatttaacaaggaagaaagcttcttaatcttata

SEQ ID NO: 422036 - DNA, 565 bp, Homo sapiens
gtattattctttattatttaattaaatattagatcttgtgttgttccaaaacatattytaaaattggttataaaatacatactaatcaacaggatagactggaagtgttacccaaaaaacaatcttaaaaagtgtagggtaacatattacattcttaacctagtcttggattacaataatctgtagatatgtttcataaagacatcaaaaatgctatcttacaatataaattatgtttagggatacttgtaatgaatgtttcatgaagatgaaaatgtatttctagtgaatgtatcaacttgtttataaaaagtaactttatgttaattaactaaatgattcatcctaactgaggagtaattactgtgtgaagaaaagataatttttatcctgtaactttactgaataattttcaacatcctttttcatactatttgctggagttactagtaacagaaacttatgcaggttgttcttttatcaatacatttcaacttacacatgtcctttggatgagatttaggtgagaaactaaaaacatgagaactagaaagaaaaataatat

SEQ ID NO: 422037 - DNA, 565 bp, Homo sapiens
gtattattctttattatttaattaaatattagatcttgtgttgttccaaaacatattctaaaattggttataaaatacatactaatcaayaggatagactggaagtgttacccaaaaaacaatcttaaaaagtgtagggtaacatattacattcttaacctagtcttggattacaataatctgtagatatgtttcataaagacatcaaaaatgctatcttacaatataaattatgtttagggatacttgtaatgaatgtttcatgaagatgaaaatgtatttctagtgaatgtatcaacttgtttataaaaagtaactttatgttaattaactaaatgattcatcctaactgaggagtaattactgtgtgaagaaaagataatttttatcctgtaactttactgaataattttcaacatcctttttcatactatttgctggagttactagtaacagaaacttatgcaggttgttcttttatcaatacatttcaacttacacatgtcctttggatgagatttaggtgagaaactaaaaacatgagaactagaaagaaaaataatat

SEQ ID NO: 422038 - DNA, 565 bp, Homo sapiens
gtattattctttattatttaattaaatattagatcttgtgttgttccaaaacatattctaaaattggttataaaatacatactaatcaacaggatagactggaagtgttacccaaaaaacaatcttaaaaagtgtagggtaacatattacattcttaacctagtcttggattacaataatctgtagatatgtttcataaagacatcaaaaatgctatcttacaatataaattatgtttagggatacttgyaatgaatgtttcatgaagatgaaaatgtatttctagtgaatgtatcaacttgtttataaaaagtaactttatgttaattaactaaatgattcatcctaactgaggagtaattactgtgtgaagaaaagataatttttatcctgtaactttactgaataattttcaacatcctttttcatactatttgctggagttactagtaacagaaacttatgcaggttgttcttttatcaatacatttcaacttacacatgtcctttggatgagatttaggtgagaaactaaaaacatgagaactagaaagaaaaataatat

SEQ ID NO: 422039 - DNA, 565 bp, Homo sapiens
gtattattctttattatttaattaaatattagatcttgtgttgttccaaaacatattctaaaattggttataaaatacatactaatcaacaggatagactggaagtgttacccaaaaaacaatcttaaaaagtgtagggtaacatattacattcttaacctagtcttggattacaataatctgtagatatgtttcataaagacatcaaaaatgctatcttacaatataaattatgtttagggatacttgtaatgaatgtttcatgaagatgaaaatgtatttctagtgaatgtatcaacttgtttataaaaagtaactttatgttaattaactaaatgattcatcctaactgaggagtaattactgtgtgaagaaaagataatttttatcytgtaactttactgaataattttcaacatcctttttcatactatttgctggagttactagtaacagaaacttatgcaggttgttcttttatcaatacatttcaacttacacatgtcctttggatgagatttaggtgagaaactaaaaacatgagaactagaaagaaaaataatat

SEQ ID NO: 422040 - DNA, 466 bp, Homo sapiens
gtggaatgctcttcccacagatctctctatgactctccctctgtcacttgctctgctctaatgtctctttttcagtgaggcctttcctgatcaccctacagaaaagcacccagcaatattctctattccttttccttgccttgtcttggtarcacttgctccttgctgacatatagaaagaatatgtgtttatgcaatggtgaatgtgatgaccacagattttccccagccctgttctaggcagagactgggaaatgggtcattcctgtcccctattccaattctcaccttctataatggcttattttcctttttaatgttctaacctaatgtcgagcaatttcagttgattttttcataagctggaaggtccatgaaatctctttctatggccattattttctcaaacactgcagtgtcttttttcagtgttttccatatataatgatattcctaggaatatctc

SEQ ID NO: 422041 - DNA, 527 bp, Homo sapiens
  misc_feature (1)...(527): n = A,T,C or G
ctatagtaactgtagcagcctggtactggcataaaaatagacacataaaccaatggaattgaacagaaaacccagaaaaaaattttatacattttcactgaactcatttycaacaatggtgccaagaacttaaattagggaaaagacaatctcttcaataaatcatgcttggaaactggatatctacatgcaaaagaatgaaattataaccccaactcttgccatatacaaaagtcgaatcaaaatggattaaatacttaaatctaagacctcgaattaaaaaactactgcaagaaaacattggggaaagtctctccaggtcttggcaaaaatgtcttgagtaataccccacaagcacaggcaaccaaagcaaatatggacaaatgaagttacatcaagttaaaaatcttctgtatgtcaaaggaaatgatcaataaagtgaggagacaacccacnagaataggagaacatatttgcaaactattcacctgacaaaagattaataactagaacagataagcagctca

SEQ ID NO: 422042 - DNA, 527 bp, Homo sapiens
  misc_feature (1)...(527): n = A,T,C or G
ctatagtaactgtagcagcctggtactggcataaaaatagacacataaaccaatggaattgaacagaaaacccagaaaaaaattttatacattttcactgaactcatttccaacaatggtgccaagaacttaaattagggaaaagacaatctcttcaataaatcatgcttggaaactggatatctacatgcaaaagaatgaaattataaccccaactcttgccatatacaaaagtcgaatcaaaatggattaaatacttaaatctaagacctcgaattaaaaaactactgcaagaaaacattggggaaagtctctccaggtcttggcaaaaatgtcttgagtaataccccacaagcacaggcaaccaaagcaaatatggacaaatgaagttacatcaagttaaaaatcttctgyatgtcaaaggaaatgatcaataaagtgaggagacaacccacnagaataggagaacatatttgcaaactattcacctgacaaaagattaataactagaacagataagcagctca

SEQ ID NO: 422043 - DNA, 584 bp, Homo sapiens
aaactactgtataggaaaaaaatctagtaatctgatctttacaatgggcaaaatatttcaataaacatttcttaaaagaaggcatatgaattgcaagcagttatattatcagaaacatgcaaatcaaaactacaatgagatatcawcttatcccagttaaaatgaattttgtccaaaagtcaggcaacagcaaatgctagtgagaatgtggagaaatgggaagcctggtacactgttgctggaaatgtaaattagtacaaccactatggaaaacagcttggaggttcctcataaaactaaactagagcttcaatataatccagcaatttcactgctaagtatatactcacaagaaaggaactcagtatgttgaagagatgtctaattcccatgtttgttgcagcattgttgaaaatagccaagatttggaagcaacgtaagtgtcaatcaacagatgaatggataaagaaaatgtagtatgtatacacagtggagccagaaaaaaagaatgagattctgtcatttttaacaacatggatgagggtaattatgttaaatgaaataagccaggcacagaaagacaa

SEQ ID NO: 422044 - DNA, 584 bp, Homo sapiens
aaactactgtataggaaaaaaatctagtaatctgatctttacaatgggcaaaatatttcaataaacatttcttaaaagaaggcatatgaattgcaagcagttatattatcagaaacatgcaaatcaaaactacaatgagatatcaacttatcccagttaaaatgaattttgtccaaaagtcaggcaacagcaaatgctagtgagaatgtggagaaatgggaagcctggtacactgttgstggaaatgtaaattagtacaaccactatggaaaacagcttggaggttcctcataaaactaaactagagcttcaatataatccagcaatttcactgctaagtatatactcacaagaaaggaactcagtatgttgaagagatgtctaattcccatgtttgttgcagcattgttgaaaatagccaagatttggaagcaacgtaagtgtcaatcaacagatgaatggataaagaaaatgtagtatgtatacacagtggagccagaaaaaaagaatgagattctgtcatttttaacaacatggatgagggtaattatgttaaatgaaataagccaggcacagaaagacaa

SEQ ID NO: 422045 - DNA, 531 bp, Homo sapiens
tagttcagagctttattttgtttcataatcactctagaaattattaacaaaccagtgggtatttagttgatttagtcaaatagaactaagcccagactgaacaatattggttgataatcatttggctaatactgaaattttgatgttattcaaaataatattctaaagcggtgytaatagaaatataatgagaaccacatatgcaccttaaaacttcctagtagccacattaataagttacaatgagctgggtgcagtggatcatttgaggtcaggagttaagagaccagcctgaccaatatggtgaaaccccgtctctactaaaaatacagaaattagctgggcatggtggtggacaactgtaatcccagctacttgggaggctgaggcagggagaacagcttgaaccaggaggcagaggttgcaacgagctgagatcatgctattacactccagcctgggcaacaagagtgaaactcctctcaaaacaaaggttatagtgaacaggcaaaattaattttaatgccttcc

SEQ ID NO: 422046 - DNA, 531 bp, Homo sapiens
tagttcagagctttattttgtttcataatcactctagaaattattaacaaaccagtgggtatttagttgatttagtcaaatagaactaagcccagactgaacaatattggttgataatcatttggctaatactgaaattttgatgttattcaaaataatattctaaagcggtgttaatagaaatataatgagaaccacatatgcaccttaaaacttcctagtarccacattaataagttacaatgagctgggtgcagtggatcatttgaggtcaggagttaagagaccagcctgaccaatatggtgaaaccccgtctctactaaaaatacagaaattagctgggcatggtggtggacaactgtaatcccagctacttgggaggctgaggcagggagaacagcttgaaccaggaggcagaggttgcaacgagctgagatcatgctattacactccagcctgggcaacaagagtgaaactcctctcaaaacaaaggttatagtgaacaggcaaaattaattttaatgccttcc

SEQ ID NO: 422047 - DNA, 531 bp, Homo sapiens
tagttcagagctttattttgtttcataatcactctagaaattattaacaaaccagtgggtatttagttgatttagtcaaatagaactaagcccagactgaacaatattggttgataatcatttggctaatactgaaattttgatgttattcaaaataatattctaaagcggtgttaatagaaatataatgagaaccacatatgcaccttaaaacttcctagtagccacattaataagttacaatgagctgggtgcagtggatcatttgaggtcaggagttaagagaccagcctgaccaatatggtgaaaccccgtctctactaaaaatacagaaattagctgggcatggtggtggacaactgtaatcccagctacttgggaggctgaggcagggagaacagcttgaaccaggaggcagaggttgcaacgagctgagatcatgctattacactccagcctgggyaacaagagtgaaactcctctcaaaacaaaggttatagtgaacaggcaaaattaattttaatgccttcc

SEQ ID NO: 422048 - DNA, 567 bp, Homo sapiens
ttttttgtaattaattttagtgggacactgccacaccccttcaatctgcatattgttygtggctacttttgtgctataactgcagggctgagttattgcaacagtgatattatggctcacaaagccttaaataatactatctggccctttacagaaaagttcacagacccctgctctaggactaaaacacaacattcttcttgcttttgtattacattttatcagttaaatactcaaacttgcaaactggtaaaatgtggaaagataaaggattacctcatgctaagcatttatattttgaattccaaacactaccacatcaactataattttattttttgtatgtatgcatttagttttattatagcaaagcaacttgcacatttttaaatatttaaaactaagcgtcatctttcctttctagggaaacaacaagaaaatttaaaaacaagcaggaacaaaattaaaatcgacaaagtcagttccaaataagatcctacaggatcttattgactctcccattgaatagcaggactcaagtcatcattaggagagaagtaatttaaa

SEQ ID NO: 422049 - DNA, 567 bp, Homo sapiens
ttttttgtaattaattttagtgggacactgccacaccccttcaatctgcatattgtttgtggctacttttgtgctataactgcagggctgagttattgcaacagtgatattatggctcacaaagccttaaataatactatctggccctttacagaaaagttcacagacccctgctctaggactaaaacacaacattcttcttgctyttgtattacattttatcagttaaatactcaaacttgcaaactggtaaaatgtggaaagataaaggattacctcatgctaagcatttatattttgaattccaaacactaccacatcaactataattttattttttgtatgtatgcatttagttttattatagcaaagcaacttgcacatttttaaatatttaaaactaagcgtcatctttcctttctagggaaacaacaagaaaatttaaaaacaagcaggaacaaaattaaaatcgacaaagtcagttccaaataagatcctacaggatcttattgactctcccattgaatagcaggactcaagtcatcattaggagagaagtaatttaaa

SEQ ID NO: 422050 - DNA, 567 bp, Homo sapiens
ttttttgtaattaattttagtgggacactgccacaccccttcaatctgcatattgtttgtggctacttttgtgctataactgcagggctgagttattgcaacagtgatattatggctcacaaagccttaaataatactatctggccctttacagaaaagttcacagacccctgctctaggactaaaacacaacattcttcttgcttttgwattacattttatcagttaaatactcaaacttgcaaactggtaaaatgtggaaagataaaggattacctcatgctaagcatttatattttgaattccaaacactaccacatcaactataattttattttttgtatgtatgcatttagttttattatagcaaagcaacttgcacatttttaaatatttaaaactaagcgtcatctttcctttctagggaaacaacaagaaaatttaaaaacaagcaggaacaaaattaaaatcgacaaagtcagttccaaataagatcctacaggatcttattgactctcccattgaatagcaggactcaagtcatcattaggagagaagtaatttaaa

SEQ ID NO: 422051 - DNA, 410 bp, Homo sapiens
tgtatacatgaatttacttttaaaaagttttaaataagaaggaaatactttctaggtaaatttaattgtatatagaagacctaatgggtgagaatctgccttgaaagctggagacacgtcaataaataagaatacacaattagaataagaaagagtaacaaacactctgccctctaaagcttccatyctgcttggagaaaccaagaaaaacccgagaatcttggccaaatacaatctagggtaatgcagtcagggagctgtctggtgagtgttggaggccccataggaacgctgaggaagaagaagttgaggaagaagaagacgtttgtcactaggagaattctaagaataagaaaggatgaagacaaagtgatttcaccaaagatgtccaagttgtaattatctcgtgg

SEQ ID NO: 422052 - DNA, 410 bp, Homo sapiens
tgtatacatgaatttacttttaaaaagttttaaataagaaggaaatactttctaggtaaatttaattgtatatagaagacctaatgggtgagaatctgccttgaaagctggagacacgtcaataaataagaatacacaattagaataagaaagagtaacaaacactctgccctctaaagcttccattctgcttggagaaaccaagaaaaacccgagaatcttggccaaatacaatctagggtaatgcagtcagggagctgtctggtgagtgttggaggccccataggaacgctgaggaagaagaagttgaggaagaagaagacgtttgtcactaggagaattctaagaataagaaaggatgaagacaaagtgatttcaccaamgatgtccaagttgtaattatctcgtgg

SEQ ID NO: 422053 - DNA, 528 bp, Homo sapiens
ctgcactactggctttgaaggtcaaggaagggtccaggagccaaggaatactctagaaacattcccctagaagcaggaaatggcaaggaaactgattctcccccagaacttgcatcaagagggaagttttgctgacaccttggttttaggccagtgagacccagggtgggcttcaaaactacmacactgtaagacaatacatttgtgttgctttaagccaatatgaatgtgatcattggtgatggcggccagaggacactcacagaaggagtaacgtactggaggtctgcagcaggaatgaatttggcatgactgggaggacgccaagggggcagcaaagaagaacaagcaaaggctaaacgtgacgactccttgttttagaagaacccccttcagaagaagaatcagtaaagcaaaggctgaactcaactttgtcttcttttcttccccagacataatttacgttattttattgggaccacagagtcccagttggagcaagtgaccagggacagagttacaatgaag

SEQ ID NO: 422054 - DNA, 528 bp, Homo sapiens
ctgcactactggctttgaaggtcaaggaagggtccaggagccaaggaatactctagaaacattcccctagaagcaggaaatggcaaggaaactgattctcccccagaacttgcatcaagagggaagttttgctgacaccttggttttaggccagtgagacccagggtgggcttcaaaactaccacactgtaagacaatacatttgtgttgctttaagccaataygaatgtgatcattggtgatggcggccagaggacactcacagaaggagtaacgtactggaggtctgcagcaggaatgaatttggcatgactgggaggacgccaagggggcagcaaagaagaacaagcaaaggctaaacgtgacgactccttgttttagaagaacccccttcagaagaagaatcagtaaagcaaaggctgaactcaactttgtcttcttttcttccccagacataatttacgttattttattgggaccacagagtcccagttggagcaagtgaccagggacagagttacaatgaag

SEQ ID NO: 422055 - DNA, 528 bp, Homo sapiens
ctgcactactggctttgaaggtcaaggaagggtccaggagccaaggaatactctagaaacattcccctagaagcaggaaatggcaaggaaactgattctcccccagaacttgcatcaagagggaagttttgctgacaccttggttttaggccagtgagacccagggtgggcttcaaaactaccacactgtaagacaatacatttgtgttgctttaagccaatatgaatgtgatcattggtgatggcggccagaggacactcacagaaggagtaaygtactggaggtctgcagcaggaatgaatttggcatgactgggaggacgccaagggggcagcaaagaagaacaagcaaaggctaaacgtgacgactccttgttttagaagaacccccttcagaagaagaatcagtaaagcaaaggctgaactcaactttgtcttcttttcttccccagacataatttacgttattttattgggaccacagagtcccagttggagcaagtgaccagggacagagttacaatgaag

SEQ ID NO: 422056 - DNA, 604 bp, Homo sapiens
agctaaaaacatttgcagatgtgattagttcagaatcatgagatgaatgacgcttgattatccagctggtcgtacgatcatcacagaatcttgctcagagggaggtaggagtgccagagccagaggaggtgatgttaggacaaaagcaaatgtcagagtcacagagaaattagaagatgctgcactactggctttgaaggtcaaggaagggtccaggagccaaggaatactctagaaacattcccctagaagcaggaaatggcaaggaaactgattctcccccagaacttgcatcaagagggaagttttgctgacaccttggttttaggccagtgagacccagggtgggcttcaaaactaccacactgtaagacaatacatttgtgttgctttaagccaatatgaatgtgatcattggtgatggcggccagaggacactcacagaaggagtaacgtactggaggtctgcarcaggaatgaatttggcatgactgggaggacgccaagggggcagcaaagaagaacaagcaaaggctaaacgtgacgactccttgttttagaagaacccccttcagaagaagaatcagtaaagcaaaggctgaac

SEQ ID NO: 422057 - DNA, 528 bp, Homo sapiens
ctgcactactggctttgaaggtcaaggaagggtccaggagccaaggaatactctagaaacattcccctagaagcaggaaatggcaaggaaactgattctcccccagaacttgcatcaagagggaagttttgctgacaccttggttttaggccagtgagacccagggtgggcttcaaaactaccacactgtaagacaatacatttgtgttgctttaagccaatatgaatgtgatcattggtgatggcggccagaggacactcacagaaggagtaacgtactggaggtctgcagcaggaatgaatttggcatgactgggaggacgccaagggggcagcaaagaagaacaagcaaaggctaaacgtgaygactccttgttttagaagaacccccttcagaagaagaatcagtaaagcaaaggctgaactcaactttgtcttcttttcttccccagacataatttacgttattttattgggaccacagagtcccagttggagcaagtgaccagggacagagttacaatgaag

SEQ ID NO: 422058 - DNA, 605 bp, Homo sapiens
ggtgactttgaatgccttctcacttcttccttcccactccatgctccaggttcaaagactccattaccaccatccatcccatgccagagtctccaggcttccatcttcagtgccatcccttctcatccatcctatgcatgggttccaaggtaataggtctaaacacatttagacctatttaagatgtataagcataaatgttgacatgactggtcacaaaatgttggtggtttctcatcaactgcagagaatagttcaggatccttacctaagtgtctgagatctttcataaattcacwcatggaaagatgtggcctctctgtctgtacttcatcacataacacccagcacctcaatctctgactccatcgtcaatttcctagttctctgactttgcctgcccagccctgagtcattgtaacatctgattcatcttttaaagtttaacaacaacaacaacaaaatcatctgctctgagaagccagcctttctcaggtgcagagattatcccagagatagacatacggttcaagacaggctagttaaccttcccctgaatttgatcagcaaagactgagagggtggtgggagaagctcagactgtg

SEQ ID NO: 422059 - DNA, 451 bp, Homo sapiens
tccaggcttccatcttcagtgccatcccttctcatccatcctatgcatgggttccaaggtaataggtctaaacacatttagacctatttaagatgtataagcataaatgttgacatgactggtcacaaaatgttggtggtttctcatcaactgcagagaatagttcaggatccttacctaagtgtctgagatctttcataaattcacacatggaaagatgtggcctctctgtcwgtacttcatcacataacacccagcacctcaatctctgactccatcgtcaatttcctagttctctgactttgcctgcccagccctgagtcattgtaacatctgattcatcttttaaagtttaacaacaacaacaacaaaatcatctgctctgagaagccagcctttctcaggtgcagagattatcccagagatagacatacggttcaagacaggctag

SEQ ID NO: 422060 - DNA, 597 bp, Homo sapiens
tccaggcttccatcttcagtgccatcccttctcatccatcctatgcatgggttccaaggtaataggtctaaacacatttagacctatttaagatgtataagcataaatgttgacatgactggtcacaaaatgttggtggtttctcatcaactgcagagaatagttcaggatccttacctaagtgtctgagatctttcataaattcacacatggaaagatgtggcctctctgtctgtacttcatcacatmacacccagcacctcaatctctgactccatcgtcaatttcctagttctctgactttgcctgcccagccctgagtcattgtaacatctgattcatcttttaaagtttaacaacaacaacaacaaaatcatctgctctgagaagccagcctttctcaggtgcagagattatcccagagatagacatacggttcaagacaggctagttaaccttcccctgaatttgatcagcaaagactgagagggtggtgggagaagctcagactgtgaatctataggtgcagcagctggatttttttttccatcctatattccaagactttttctgagagaatctagtctggaacccaga

SEQ ID NO: 422061 - DNA, 605 bp, Homo sapiens
ggtgactttgaatgccttctcacttcttccttcccactccatgctccaggttcaaagactccattaccaccatccatcccatgccagagtctccaggcttccatcttcagtgccatcccttctcatccatcctatgcatgggttccaaggtaataggtctaaacacatttagacctatttaagatgtataagcataaatgttgacatgactggtcacaaaatgttggtggtttctcatcaactgcagagaatagttcaggatccttacctaagtgtctgagatctttcataaattcacacatggaaagatgtggcctctctgtctgtacttcatcacataacacccagcacctcaatctctgactccatcgtcaatttcctagttctctgactttgcctgcccagccctgagtcattgtaacatctgattcatcttttaaagtttaacaacaacaacaacaaaatcatctgctctgagaagccagcctttctcaggtgcagagattatcccagagatagacatackgttcaagacaggctagttaaccttcccctgaatttgatcagcaaagactgagagggtggtgggagaagctcagactgtg

SEQ ID NO: 422062 - DNA, 605 bp, Homo sapiens
ggtgactttgaatgccttctcacttcttccttcccactccatgctccaggttcaaagactccattaccaccatccatcccatgccagagtctccaggcttccatcttcagtgccatcccttctcatccatcctatgcatgggttccaaggtaataggtctaaacacatttagacctatttaagatgtataagcataaatgttgacatgactggtcacaaaatgttggtggtttctcatcaactgcagagaatagttcaggatccttacctaagtgtctgagatctttcataaattcacacatggaaagatgtggcctctctgtctgtacttcatcacataacacccagcacctcaatctctgactccatcgtcaatttcctagttctctgactttgcctgcccagccctgagtcattgtaacatctgattcatcttttaaagtttaacaacaacaacaacaaaatcatctgctctgagaagccagcctttctcaggtgcagagattatcccagagatagacatacggttcaagacaggctagttaaccttcycctgaatttgatcagcaaagactgagagggtggtgggagaagctcagactgtg

SEQ ID NO: 422063 - DNA, 424 bp, Homo sapiens
tctctatctatctatctatctagagatttcttaagtccttgggaatcctgaagtcagctccatcataggatctcacagttatattaagtcaataattttctttctctgcctaacttagtctgagttgtgtttcagttgctgttgattggaacaaacctcaaaaagaaattrggactgttataatattgcatttatgggtggctgacttatgatgctgccttccttgtctctggatcctgagtcctgcatccaacccagttccacagcctgggtatctaaccgtttccctggaactcagtaacatttgaactgaaatgccattttcttgttgggatcattataatactttggaaaactgccttggaattaatgtggttaccctttgcatctgtaaaataaacaggcatttctttagaaggagaaa

SEQ ID NO: 422064 - DNA, 424 bp, Homo sapiens
tctctatctatctatctatctagagatttcttaagtccttgggaatcctgaagtcagctccatcataggatctcacagttatattaagtcaataattttctttctctgcctaacttagtctgagttgtgtttcagttgctgttgattggaacaaacctcaaaaagaaattgggactgttataatattgcatttatgggtggctgacttatgatgctgccttccttgtctctggatcctgagtcctgcatccaacccagttccacagcctgggtatctaaccgtttccctggaactcagtaacatttgaactgaaatgycattttcttgttgggatcattataatactttggaaaactgccttggaattaatgtggttaccctttgcatctgtaaaataaacaggcatttctttagaaggagaaa

SEQ ID NO: 422065 - DNA, 541 bp, Homo sapiens
tttatctatcctatgtatttatctatcatctatttattctatctatatctatttttttctctacgtctctatctatctatctatctagagatttcttaagtccttgggaatcctgaagtcagctccatcataggatctcacagttatattaagtcaataattttctttctctgcctaacttagtctgagttgtgtttcagttgctgttgattggaacaaacctcaaaaagaaattgggactgttataatattgcatttatgggtggctgacttatgatgctgccttccttgtctctggatcctgagtcctgcatccaacccagttccacagcctgggtatctaaccgtttccctggaactcagtaacatttgaactgaaatgccattttcttgttgggatcattataatactttggaaaactgccttggaattaatgtggttaccctttgcatctgtaaaataaacaggcatttctttagaaggagaaactaaagtttyacaaagaccttcagggtctgtttttcttacaccagaagtcac

SEQ ID NO: 422066 - DNA, 602 bp, Homo sapiens
gtgttaatatattgtgttttttaccagtataaaattgttatttattctatgtaatgtgttttttgttgagggatcaggaagggcaggtattttgctttgcctgacactatggccacgtagggtgttagtttaacagttgaatgrttatcttttcacatcttattttggattcttttgtgttataaaaatgtatcttttgaaaagcttaatagaggtaactgtttggattgacggttgtaattgaaatgcttggctgttttgagacaaaatttttcttttctttctattttttctcttcttttacttcctgcaatgatttataattcagaatctcattttgtgaatgtaaatgattataaatattaaagatataaattttctcccattccccactgacaataaagtttttattccccttttctctgtttgattcgattaacctagattgtaaaccttgtcacaattttcttgcaaaaatatatttcctctgttaattccaactttaccctcaatctttcggagtcttggttgtgatcctttaaaaataattataaattttttgaaaccctacatgttggaaagagactgttccttttaggcta

SEQ ID NO: 422067 - DNA, 602 bp, Homo sapiens
gtgttaatatattgtgttttttaccagtataaaattgttatttattctatgtaatgtgttttttgttgagggatcaggaagggcaggtattttgctttgcctgacactatggccacgtagggtgttagtttaacagttgaatggttatcttttcacatcttattttggattcttttgtgttataaaaatgtatcttttgaaaagcttaatagaggtaactgtttggattgacggttgtaattgaaatgcttggctgttttragacaaaatttttcttttctttctattttttctcttcttttacttcctgcaatgatttataattcagaatctcattttgtgaatgtaaatgattataaatattaaagatataaattttctcccattccccactgacaataaagtttttattccccttttctctgtttgattcgattaacctagattgtaaaccttgtcacaattttcttgcaaaaatatatttcctctgttaattccaactttaccctcaatctttcggagtcttggttgtgatcctttaaaaataattataaattttttgaaaccctacatgttggaaagagactgttccttttaggcta

SEQ ID NO: 422068 - DNA, 602 bp, Homo sapiens
gtgttaatatattgtgttttttaccagtataaaattgttatttattctatgtaatgtgttttttgttgagggatcaggaagggcaggtattttgctttgcctgacactatggccacgtagggtgttagtttaacagttgaatggttatcttttcacatcttattttggattcttttgtgttataaaaatgtatcttttgaaaagcttaatagaggtaactgtttggattgacggttgtaattgaaatgcttggctgttttgagrcaaaatttttcttttctttctattttttctcttcttttacttcctgcaatgatttataattcagaatctcattttgtgaatgtaaatgattataaatattaaagatataaattttctcccattccccactgacaataaagtttttattccccttttctctgtttgattcgattaacctagattgtaaaccttgtcacaattttcttgcaaaaatatatttcctctgttaattccaactttaccctcaatctttcggagtcttggttgtgatcctttaaaaataattataaattttttgaaaccctacatgttggaaagagactgttccttttaggcta

SEQ ID NO: 422069 - DNA, 546 bp, Homo sapiens
ttataattagatgagaggcatgcattattgrccagaatactgcaaaatgctgatccatcctcagggtatcacaactggaagcacatattattccactttccctcatgagaatcacctggtcaggctgttgcccaatttctattcccccctcctttgtatctaataaagcagtatgtgaggatactttaagaccatgcaaatatcttgcttttcctcagaatttccttctagatttgaaaaacttactccctaggccgggtgtggtggctcacacgctgtaatcccagcactttgggaggctgaagtgggtggatcacttgaggtcaggagttcgagatcagcctggccaacagggtgaaaccctgtctgtactaaaaatacaaaaattagccaggcatggtagcgggtgccatgtaatcccagctactcaggatgctgagaccggagaatcgcttgaacccaggaggtgaggttgcagtgagttggactcatgctactacactccagcctgggtgacagagatagactctatctcaaaaaacagca

SEQ ID NO: 422070 - DNA, 546 bp, Homo sapiens
ttataattagatgagaggcatgcattattgaccagaatactgcaaaatgctgatccatcctcagggtatcacaactggaagcacatattattccactttccctcatgagaatcacctggtcaggctgttgcccaatttctattcccccctcctttgtatctaataaagcagtatgtgaggatactttaagaccatgcaaatatcttgcttttcctcagaatttccttctagatttgaaaaacttactccctaggccgggtgtggtggctcacacgctgtaatcccagcactttgggaggctgaagtgggtggatcasttgaggtcaggagttcgagatcagcctggccaacagggtgaaaccctgtctgtactaaaaatacaaaaattagccaggcatggtagcgggtgccatgtaatcccagctactcaggatgctgagaccggagaatcgcttgaacccaggaggtgaggttgcagtgagttggactcatgctactacactccagcctgggtgacagagatagactctatctcaaaaaacagca

SEQ ID NO: 422071 - DNA, 546 bp, Homo sapiens
ttataattagatgagaggcatgcattattgaccagaatactgcaaaatgctgatccatcctcagggtatcacaactggaagcacatattattccactttccctcatgagaatcacctggtcaggctgttgcccaatttctattcccccctcctttgtatctaataaagcagtatgtgaggatactttaagaccatgcaaatatcttgcttttcctcagaatttccttctagatttgaaaaacttactccctaggccgggtgtggtggctcacacgctgtaatcccagcactttgggaggctgaagtgggtggatcacttgaggtcaggagttcgagatcagcctggccaacakggtgaaaccctgtctgtactaaaaatacaaaaattagccaggcatggtagcgggtgccatgtaatcccagctactcaggatgctgagaccggagaatcgcttgaacccaggaggtgaggttgcagtgagttggactcatgctactacactccagcctgggtgacagagatagactctatctcaaaaaacagca

SEQ ID NO: 422072 - DNA, 589 bp, Homo sapiens
aataggttgactcataagaaattgctgcttttcatcagttcagaaataatattggcaatttcatatggatcaacctaatatataaatataccaaactggtaacagggaaataaggaggactgaggagttagtaatggtaaattctgatctacctataacactttaattcttttaatagagaaaatgcattgatgtgttatatgcatagcattaacaaaatcagctttctaagattttagagaatcatccaagatgattcacagaagyagaatcatcatcatcagtaagaaattaagtgactactaaaagtaatcattaattcagtcataggactaatgatgcattgacaagactattgagatatataattttggaaatggctaaaatagagataaagtatctatttctacctcccaaccacttacagaaaattcaacacattatacacactgagcagctcaaagaaattgtaaagatccattattatttttaaaaggaaatttaaccagtgaatgctttcactgaaaatgataaacaatatattcccagtataaaccagaaataaagtctgcagtagaaaactacaatg

SEQ ID NO: 422073 - DNA, 412 bp, Homo sapiens
gtgtgatttatccagaaggtgatagaaatwtcattttcctagaccacagatataagccaaggagaatagaaagctctgacctaaacttcacaagtgtcccttccaagcagggacacgtaagagtaaacaaaagaagaagatcaaattaaactcaaagtgagaagataggaaaaaataaagatgagaatataaatcaataaaacagaaaggggaaagaaaatagagaaaagtccatgaaaacaaaggctgactcaagaagatcaataagattgataaatctctagacagactgatcaggaaaaaaataagacaagatacaaattattagtatcaagaatgaggaaggtgaaatcactacagattctacacggtattaaaataataagaaacattatgatcaactccattcctt

SEQ ID NO: 422074 - DNA, 555 bp, Homo sapiens
atggtgaaaccctgtctctactgaaaatacaaaaattagccgggcatgctggcataaacagctacttgggaggctgagacaggagaactgcttgaacccrggaagccaaggttgcagtgagtcaagatcacaccactgcactccagcctggacaacagagcgagactccatctcaaaaaaaaaaaaatgcacatagagaattcttgtctcactgaaagactgttatgccaagtatggatatctgcctcccagtgtcctctgctaggctgtctctagagtattctctctcttccaccaatgaagaacccccatcacacctggatggccacccattctccttctctcttaccttcattgtaagaattattatttttattttatttcattttagagacagggtctcactgtcacccaggctagaatgcagtggcacaattatagctcactgttgcctcagattcctaggctcaagtgatcctcccacctcagcctccctagcagccgagactacaggaacaagccaccatgcctgactaatttttttaaatttttgta

SEQ ID NO: 422075 - DNA, 555 bp, Homo sapiens
atggtgaaaccctgtctctactgaaaatacaaaaattagccgggcatgctggcataaacagctacttgggaggctgagacaggagaactgcttgaacccaggaagccaaggttgcagtgagtcaagatcacaccactgcactccagcctggacaacagagcgagactccatctcaaaaaaaaaaaaatgcacatagagaattcttgtctcactgaaagactgttatgccaagtatggatatctgcctcccagtgwcctctgctaggctgtctctagagtattctctctcttccaccaatgaagaacccccatcacacctggatggccacccattctccttctctcttaccttcattgtaagaattattatttttattttatttcattttagagacagggtctcactgtcacccaggctagaatgcagtggcacaattatagctcactgttgcctcagattcctaggctcaagtgatcctcccacctcagcctccctagcagccgagactacaggaacaagccaccatgcctgactaatttttttaaatttttgta

SEQ ID NO: 422076 - DNA, 480 bp, Homo sapiens
ctgttttctagcaccctaaagaactccagaagcacctatttacatagaaataattgaaaatccttctgatagcttcagtaacttagtcccctaagacttgtaccaggcaacaatttgttggcctagtgggagttaaaatatgtacttgaaagtaataaaagtacayttattttaaaatattctataattcacatgggtctcctcctcccccactctgcaattagtaggaattagtgaagtttccccatactctcagctacaaatagcacacccaggaagccaaggttcacctctaatctcttaattagacgcatccctcacgacactgcccgccatccttcaaaggaatgttgacaggctgtcagccacagaggacagttccacagccccttacctagaatcatatggatttcctaggaaaattgcttcagcagctgcagttagtcaatttaataaccttattaaacactttaatgactt

SEQ ID NO: 422077 - DNA, 480 bp, Homo sapiens
ctgttttctagcaccctaaagaactccagaagcacctatttacatagaaataattgaaaatccttctgatagcttcagtaacttagtcccctaagacttgtaccaggcaacaatttgttggcctagtgggagttaaaatatgtacttgaaagtaataaaagtacatttattttaaaatattctataattcacatgggtctcctcctcccccamtctgcaattagtaggaattagtgaagtttccccatactctcagctacaaatagcacacccaggaagccaaggttcacctctaatctcttaattagacgcatccctcacgacactgcccgccatccttcaaaggaatgttgacaggctgtcagccacagaggacagttccacagccccttacctagaatcatatggatttcctaggaaaattgcttcagcagctgcagttagtcaatttaataaccttattaaacactttaatgactt

SEQ ID NO: 422078 - DNA, 564 bp, Homo sapiens
taaattaccagtacccaaatgagatgccttttaccacacagcctattctgctcacatgtgttgttttgttgggggagccttttcttccctgcttttttggtgagttgccacctattttgttctacaggatcgagaatgttaattctcatattgtacattgtgccatctctccctgaactttattgatgttttgaagcaaaacmaccatttactcctctcctaaagattccagttaatgaggtgcgcacaggtgagcaaggtgtttgtatgaagaaataaacccattaaataaaaattatatgaagagatgagctaggagaaaaggcatacttgtgtgtttgtgtgtatgtgcctgcgtgtgtcttagagctgcctgtcaaagctttcctctcatacacaaagatagaaatatggaaatcagaatgaaaaataaggggaattgggtttagagcagcctcttaaaatttgtgctgtttccaggcccctttgcagagcgccagccatttccagggaggcacagtggtagcatttcagtgccgttctgctcaggaaagacgaccaaac

SEQ ID NO: 422079 - DNA, 592 bp, Homo sapiens
aagtcttgttgcaccacaaagctccatgatctataaaataacataatgttaacattaagattcacaacaaaaatctcccttcaaaaataagcagctacccaacttgtttgtaacgtctcaaaatatctatctaatagatggtataatactcacaactgacaaccaacttcctcaagtttcaggttcatatgtttacaaacaaaaagtcactgctttgcaataaggtcatcattctcctatttatcaaaatccatatgattagcaattttcttagaataaatttttgttatgagtcacatttttaaagaaacaacgtaccacccactcttattcataagcactgcacatacaataggaccatgtgactaagagactattatgcagccatttaaagtgacggtctttaaatgatataacaacatggaaaaatactaaggatttatcaagtggggaagaaaggcaagayacctaattttaaccacataaatacaaatttggaaactatttttaaaaagtctatcacaattttttcagatgagattgagtcgggttttccctcttattttccaaatgtgtttaatatggctacact

SEQ ID NO: 422080 - DNA, 592 bp, Homo sapiens
aagtcttgttgcaccacaaagctccatgatctataaaataacataatgttaacattaagattcacaacaaaaatctcccttcaaaaataagcagctacccaacttgtttgtaacgtctcaaaatatctatctaatagatggtataatactcacaactgacaaccaacttcctcaagtttcaggttcatatgtttacaaacaaaaagtcactgctttgcaataaggtcatcattctcctatttatcaaaatccatatgattagcaattttcttagaataaatttttgttatgagtcacatttttaaagaaacaacgtaccacccactcttattcataagcactgcacatacaataggaccatgtgactaagagactattatgcagccatttaaagtgacggtctttaaatgatataacaacatggaaaaatactaaggatttatcaagtggggaagaaaggcaagacacctaattttaaccacataaatacaaatttggaaactatttttwaaaagtctatcacaattttttcagatgagattgagtcgggttttccctcttattttccaaatgtgtttaatatggctacact

SEQ ID NO: 422081 - DNA, 624 bp, Homo sapiens
cctgtaagcctgctactcaggaggctgaggcaggagaatcgcttgaacctgggaggcggaggttgcagtgagccgagattgtgccattgcactccagcctgggcgagagtgagactccatctcaagaaaaagaaaaaaaaaaaaagaagtctgttacccaggaatgtgtgtgagtctttaagcctgggaggagccccagcccagcatcacttccctggctcccaaggaagagggagctacgctggatttagttctcaagtattatgtagttcaaaagaagcaaaggctatttttaaaaaacataaaattgaatgtaagagtggcatcccatttgcaagcacttaactcattgtgtgtagggaacactgtggttggggctgaaggcagaggcttctgagggcctcctgcgggcacagtactgagttttcagagatgtcaagacctgcctccaataaccaagtttccattcaatcttcagraaagaaatgttgtagaagacaattcttgggacacaaagtccaggctcagcaaaaatgatttaaattttgaagcactgattaatctggtaagctattatataatgtaactttaccattggttttgctcctgatagtgaaatttcag

SEQ ID NO: 422082 - DNA, 656 bp, Homo sapiens
aatgaggaagtccaggtgaaagggataaagacattatttgtactattcttgcaacttttctgtaagttaaaaattattgcaaaatgaaaagttttttttaagtggctaaaattttttttttaagtttgcttcagttccaagttttaacgatttattttctgtgttcttcctcccctggccttaagtcactgctgtttttttgatccctgtccatgtagccttgtcacatcctgagacaaaacagagtggcgtaaaatgaacctgttggcaggccgttgtgaggaaagagacagagagagagaatgagagtgtgtgtgtgtgtgtgtgtgtgtgtgtgtgtgtgtgtgtgtaaacgggggcaaagaatggagccgggcctgtactggtagcatgtagtatccacagacagaagtgtcacttgaggatcttgtcagtatcaacaataaagcacaggtaataactgtcatttccttagagattaacattcaagctgaacaagactgtgacaatgccaagaacagttaatytctaatgaattactgtcctcattgcctgagttagacttcaggatcattttgctagcctttgagataagttttactctcatttacttggaattataaaatacagtaataaaataagaggcaaaacagaga

SEQ ID NO: 422083 - DNA, 589 bp, Homo sapiens
atttctaggtaagggagtattgcaggcataaagtcaggtgcacatatgaccacagagtgcttgaggggtaatgagtttctcaaaacgaagagtaggggttgctgaatatgygttagaatgtagattgaatccgtggacctgggaaataataactgttgacacatgcatattgtcatttgagtttcacaacactcctgtgagggagacactattttatggatgagcaaacagaggcatggagctgccaactgattgcccaagacaactgacaaaaggcaaagccgacctcaaacccagacggtccagctctacaggccaccatctcacccatgagcttggtgggtctcaaacttaaaagtttgtggcactgaggagtctctcctggttttgctggagtggggcaccactgagtgtttaataaagacattatacaagatcccttttaagcaatatccctatgctatggtgtgaatatcccctccaaaactcaggttgaaacttaatccctaatatgggtatattgagaggtgagccctttaagaggtgattggattcatgagactctgtcctcatgaatggaatgatccat

SEQ ID NO: 422084 - DNA, 588 bp, Homo sapiens
ctgagaccacaagtgtgcaccttcatgcccagttaatttttaaattatttttggtagaaatggtgtcttgctatgtcgcctaggctaatcttgaactactggtctcaagcaatcctcctgcctcagccttccatagtgctgggattacaggcatgagccacagtgcccagccaaaattcttgctctttaagatgccataacagtggaataatcactgaagggcaggaaacaatgggcagtgggagagagagtctccatattttcggctccaatgggaagtgagttagagagatttgttcctgcatgctcttaaaatatttttattcattaaaaaagtgatcttagggctgacgcagtkgttcacaccagtaatcccagcactttgggaggccaaggcaggtggatcacgaggtcaagagattgagattgtcttggccaacatgtgaaaccctgtctctactaaaaatacaaaaattagccaggcgtggtggtgcaggcctgtaatcacagctactcaggaggttaaggcaggagaattgcttgaactcgaggggcggaggttgcagtgagccgagattgcgccactgc

SEQ ID NO: 422085 - DNA, 543 bp, Homo sapiens
agttcactgtgggcagattgtaaatatgtgcgagcctggtgctgtcagccratatgggtcagtaggcctctgagctcgtgaatccaaattcaaatattgaatgttatctgtggacatcaagggagggagtaaagtttaacagaaattggatgggcatggtggctcacgcctgtaatcccagcactttgggaggctgaggcgaacggatagcctgaggtcagaatttcgagaccagcctggccagcatggtgaaaccccatcactactgaaaatacaaaaattagccaggcgtggtggcaggtgcctgtaatgccagctactcaggaagctgaggcaggagaatcgcttgaacctgggaggcagaggttgcagtgagccaagatcgcaccattgcactccagcctgggcaagagcaagactccgtcaaaaaaaagaaagaaaagaaaagaaaggaagaaagaaagaatctaagagcaggaattgaggggatgtgacattaaaatgaaatttagggcaaacaaattactgagctttcttttttct

SEQ ID NO: 422086 - DNA, 641 bp, Homo sapiens
gcagctcacatatgtggagaaaatgcaatgtctttatctgtgtctgatgatgtcgtattccttctgggtagcaaaggcaaataagctaaacatccaggctggtttaaagctgattctgacttaatcatttcaaaattccttcctggttgtgctctgtccctcatgaataaaaatgttcagtttctcgaagagcctttcccgtcctctgcttctttctataaggtggggaccaggtgtacagaatataaaaggagacaggcagcaacatgtctagctttagcattctaatgataccgtgggcagggagagacctggatgcatgctggtccttgagtttgcatggccaggcatctgctggcctccasgccagtgtcctgtgtccctgagtgctcttctggccttggagcttaaatctgtggttgatgaacttagagtccctttctttgactcaggcagtgttcccagggagcacctgccatcctgccctttgcttacttgctgtgccctcaatctcccacttgagagacccctaagccctaagtctctttcgcatcctccgtctccccatggcaggttgtcgtcagctatcaagcagtgagggctttcatctaaggcttcatgctgcacgagaatgagatgat

SEQ ID NO: 422087 - DNA, 641 bp, Homo sapiens
gcagctcacatatgtggagaaaatgcaatgtctttatctgtgtctgatgatgtcgtattccttctgggtagcaaaggcaaataagctaaacatccaggctggtttaaagctgattctgacttaatcatttcaaaattccttcctggttgtgctctgtccctcatgaataaaaatgttcagtttctcgaagagcctttcccgtcctctgcttctttctataaggtggggaccaggtgtacagaatataaaaggagacaggcagcaacatgtctagctttagcattctaatgataccgtgggcagggagagacctggatgcatgctggtccttgagtttgcatggccaggcatctgctggcctccacsccagtgtcctgtgtccctgagtgctcttctggccttggagcttaaatctgtggttgatgaacttagagtccctttctttgactcaggcagtgttcccagggagcacctgccatcctgccctttgcttacttgctgtgccctcaatctcccacttgagagacccctaagccctaagtctctttcgcatcctccgtctccccatggcaggttgtcgtcagctatcaagcagtgagggctttcatctaaggcttcatgctgcacgagaatgagatgat

SEQ ID NO: 422088 - DNA, 575 bp, Homo sapiens
ctgctgtgggcatacagatgtgggacaaatgaattttaataagcctttagaattattaagaccctttaagaataaattaattcaaaattagggaatattattggaatatgagacaagtgggaattaacttttttttttaagagacagggtctcgctatgtttcccaggctggagtgcagtagctatccacaggtgtgattataaccttgaactcccagactccagtgatcytcctctcagcctcccaaatagctgggacactggctaattttaattatgcaaatacatctgtattcaacctggggtcagtacaaccaataggacaaatcgtgtctttcgtcagttggaacatattgcaggtgctcagaaattccaagtattacaccctaaaatgatattatttagtgtagattttaaatttttttctatcataaatcatctgaccctagatgttcacatgtatagcacacggtcaggcgtatacccaggattatgcatttcaggaaatacataagcgtgcaagtttgtgcaagaattgtcttcctgagtgggttctaattaaaatacaaaacgaa

SEQ ID NO: 422089 - DNA, 430 bp, Homo sapiens
gagatttgcatctgtagagaaaatctgcattgatgcagtcagcctttctccgaggccctcttttgtctgatctaggaaagattaactgaaagtctgacacctttaaaggtataaaagaaacagtcaccatctatttttctctgatagctgctacctgtgaggtttcttttctttctttttttttttaagagatagggtctcactccgtcatgtaagctgattgcaatggcaycattgcagctcactgaaaccttgaacccctggcctcaagcgcttttcctgcctcaacctcccaaaatgctcagattataggcttgagccaccctgcccagcctacctgtgaggtttcgtctgcattataagatcacctttgctagtcaggcctcttcttcttcccctttcataacctgtttgtcacaatccaagccct

SEQ ID NO: 422090 - DNA, 430 bp, Homo sapiens
gagatttgcatctgtagagaaaatctgcattgatgcagtcagcctttctccgaggccctcttttgtctgatctaggaaagattaactgaaagtctgacacctttaaaggtataaaagaaacagtcaccatctatttttctctgatagctgctacctgtgaggtttcttttctttctttttttttttaagagatagggtctcactccgtcatgtaagctgattgcaatggcaccattgcagctcactgaaaccttgaacccctggcctcaagcgctyttcctgcctcaacctcccaaaatgctcagattataggcttgagccaccctgcccagcctacctgtgaggtttcgtctgcattataagatcacctttgctagtcaggcctcttcttcttcccctttcataacctgtttgtcacaatccaagccct

SEQ ID NO: 422091 - DNA, 592 bp, Homo sapiens
atgggtctccaaattatgagtttctggcattcagctgcttattttgaaaaggtttctgacttttctctaggcccatctgtgtgcttctttgtaaaatcatgtaatgagttcctattttttattcacttggcatccatttttaatcttctcgatgaacatacccaaactctgtcttgacaaaccttaaattctttctctgtaagtttgctaccctgttttttctttttctttctttcttttttttttaagttgagttttactcttttgcccaggctrgagtgcagtagcataatcttggctcactgcaacctccacctcccgggttcaagcaattcttctgcctcagcctcctgagtagctgggattacaggtgcccaccacaatgcctagctaatttttgtatttttagtagagacgaggtttcaccatgttggccaggatggtcttgtactcttggacttgaagtgatctgcctgccttggcctctcagagtgctgggattacaggcatgagccactgttcctgtcccctaccctgttttttccaaaacttggcaagggcttcagccatgtgggatagatacactttagct

SEQ ID NO: 422092 - DNA, 528 bp, Homo sapiens
cacacgctgcaaagtgaaactttctcaatacaggcataaaacaaaaatgaaactaaatagcaaagagtgggaggggtagaagagatataggaggaaagaggaaaaaacagatttcaaaagctagttatttaaaaatgggcaattttaaccaattttcccaaatggtaaagcagctactgagtcagaattttgtggatatttatgcaaataaacaatttcaatgtttagaatttattcctctatccttcccacattcactacctctaatatctaatagcattttttcaagataagtaaaccacayacagcacatggaaactaagtaatttatactgacaacccttaagacaccctgagttcttctgtccttgaatttgtcctaggacaacagcataggtgacaagcactacccagagatgccgggcttggatgcaggctgccaataaaaactaagcaaactgctttaagaaatgatctgcagcatgatctaacttctctgatttaaaggaaaaaaaaacctataaaata

SEQ ID NO: 422093 - DNA, 648 bp, Homo sapiens
gaggcacgttgtctttgcttttaacaaataatcaaggcaatgaagcattcccatcaaaattctcaaggaaactgatttttaaattagaattcaatatcctggtagttaaaaatctgttaaagacgattccagaaaagtaaaggtcttaacatttttatcttctataaacccattttgaaggtaacagccataggatttgttayaccataaggagagaatatgataataaagaagactcaagacacaggaaaatgggtgatccaacacgggagagaggctaaggggacctgcagaaagatggtgtcttagtcagctcgggctgacataacaaaatgccgtattctgggtggcctaaacaacagaaactggttttctcattcattctgtaggttggaaatctgagatcagggtcccagcaaggtgggtttgtggtgagagctttcttcctggcttaagatgacagccctctttcttcttcacatggcacggtggtggggggtggggtggatgcttccttatctagaagatggagaacgtgccttggctgtaagagggctgtgatgagaacaagttaaataaaagaagtaaacactctttgtaaattgaggcatgtaagttgcatggattagggaaactctcccacactca

SEQ ID NO: 422094 - DNA, 420 bp, Homo sapiens
atttctctttctgataaaactttcaaccttctctttgttcatctcacataccaaagaccacctggtctatgtgtatgccccgaattgtgattattgcttccctaataaaacgttttaaccttagagattcatctgtctataatatttgacttaaacatacttggtgtcagaagcatggatccaaagctgccttgccttggggaaaatcccagcctctggactatgatgagatgtgcctacactcgaacccctggagcctcctgcttccctaagctgcctcttttccctttggtgagtctctctttgaccagacttctgactttggtcaaatggtgttttatttggaatttggttgaagagagccttccccgctttttttccgagaggyatctttcctcctctgtttgggagctctcctgc

SEQ ID NO: 422095 - DNA, 609 bp, Homo sapiens
aatccacaataattgatctatttcttcttagatggttgtcccaggcctagcaataaaaaagatgagaattttctctcaaaatccaaaagagaggcatttctatataaattcacagaaactggttaaatatattggatttacaagtaaagaatataatccttactcttcatttaacataaaatattaaattgagatggaacatcctatttttcatttgttcttatcaaggtaacaatggtaaatattaaagttatttgtccattaataagtataaagcatgcctattggtcactgtatgcattactttagcaattacggggactctttaaattccactggacaattattcctacatccagtcccataaagtttacaatgtgaaatggcaacagttttctatattcattaaaggtatttttgttttggcattatcacataacaattaagcataraaatagaaattccttaatttttgcagtaaaattctgatctcagaatagtttagtttgcatttaagttgtgctacatgtatttgtggtcagaacattttgtctattgcttacattagaaactcaaaactgacaaacctctgcagctacttcccagtct

SEQ ID NO: 422096 - DNA, 609 bp, Homo sapiens
aatccacaataattgatctatttcttcttagatggttgtcccaggcctagcaataaaaaagatgagaattttctctcaaaatccaaaagagaggcatttctatataaattcacagaaactggttaaatatattggatttacaagtaaagaatataatccttactcttcatttaacataaaatattaaattgagatggaacatcctatttttcatttgttcttatcaaggtaacaatggtaaatattaaagttatttgtccattaataagtataaagcatgcctattggtcactgtatgcattactttagcaattacggggactctttaaattccactggacaattattcctacatccagtcccataaagtttacaatgtgaaatggcaacagttttctatattcattaaaggtatttttgttttggcattatcacataacaattaagcatagaaatagaaattccttaatttttgcagtaaaattctgatctcagaatagtttagtttgcatttaagttgtgctacatgtatttgtggycagaacattttgtctattgcttacattagaaactcaaaactgacaaacctctgcagctacttcccagtct

SEQ ID NO: 422097 - DNA, 579 bp, Homo sapiens
tgggcagtttaactcgtttgatagttaaatcgtgaactctgcaggtataccctacatgtctatgaagctctctgcttcttgatattaacttttctcttaatgtgcataccatcaacctctagctaaaggcatttttgtctaaaataatccattggatttcctagagtatcaagattggaaaaaaaaaaaatcagacctagagattttttgtagatcctttaaccaggccaagaggtgagggasgcactggatgcaggtgcagaatttggggatcaaaaaattctgcactcaagataagtgatcttataatgtatgtgttttttttttttttgtaaaaaaaaaaaaattgattcaaaagtaacccatgatctacaaaattttccagttttaaataaggacagaatctaatcctgctatttgtgcactcaaacttacccacctcaccttggtcccaggccggtccgatagtcttatttatttaaccatttaatttttataatatgtgacatttttagtttgaatgaatttgttgctcccccggtgcctggaagtttaggtagagtttacattatatatccc

SEQ ID NO: 422098 - DNA, 604 bp, Homo sapiens
ttttgtctaaaataatccattggatttcctagagtatcaagattggaaaaaaaaaaaatcagacctagagattttttgtagatcctttaaccaggccaagaggtgagggaggcactggatgcaggtgcagaatttggggatcaaaaaattctgcactcaagataagtgatcttataatgtatgtgttttttttttttttgtaaaaaaaaaaaaattgattcaaaagtaacccatgatctacaaaattttccagttttaaataaggacagaatctaatcctgctatttgtgcactcaaacttacccacctcaccttggtcccaggccggtccgatagtcttatttatttaaycatttaatttttataatatgtgacatttttagtttgaatgaatttgttgctcccccggtgcctggaagtttaggtagagtttacattatatatcccatgatatttgcaatgtccatatactaaaaagttattcacagacatttttctccttaaagacaatttttgtggccaaagtatttatttgctacactgagttttattttactaggtgtagtaggcataataatggcctcccaaagatgtccatgtccca

SEQ ID NO: 422099 - DNA, 579 bp, Homo sapiens
tgggcagtttaactcgtttgatagttaaatcgtgaactctgcaggtataccctacatgtctatgaagctctctgcttcttgatattaacttttctcttaatgtgcataccatcaacctctagctaaaggcatttttgtctaaaataatccattggatttcctagagtatcaagattggaaaaaaaaaaaatcagacctagagattttttgtagatcctttaaccaggccaagaggtgagggaggcactggatgcaggtgcagaatttggggatcaaaaaattctgcactcaagataagtgatcttataatgtatgtgttttttttttttttgtaaaaaaaaaaaaattgattcaaaagtaacccatgatctacaaaattttccagttttaaataaggacagaatctaatcctgctatttgtgcactcaaacttacccacctcaccttggtcccaggccggtccgatagtcttatttatttaaccatttaatttttataatatgtgacattwttagtttgaatgaatttgttgctcccccggtgcctggaagtttaggtagagtttacattatatatccc

SEQ ID NO: 422100 - DNA, 604 bp, Homo sapiens
ttttgtctaaaataatccattggatttcctagagtatcaagattggaaaaaaaaaaaatcagacctagagattttttgtagatcctttaaccaggccaagaggtgagggaggcactggatgcaggtgcagaatttggggatcaaaaaattctgcactcaagataagtgatcttataatgtatgtgttttttttttttttgtaaaaaaaaaaaaattgattcaaaagtaacccatgatctacaaaattttccagttttaaataaggacagaatctaatcctgctatttgtgcactcaaacttacccacctcaccttggtcccaggccggtccgatagtcttatttatttaaccatttaatttttataatatgtgacatttttagtttgaatgaatttgttgctcccccggtgcctggaagtttaggtagagtttacattatatatcccatgatatttgcaatgtccatatactaaaaagttattcacagacatttttctccttaaagacaatttttgtggccaaagtatttatttgctacacygagttttattttactaggtgtagtaggcataataatggcctcccaaagatgtccatgtccca

SEQ ID NO: 422101 - DNA, 456 bp, Homo sapiens
gtcatataacctttgcatttcctcctatgtactttacatcatctctagattacctgtaaatcctaaatcgatgtaaatgctaagtaaatgggtgttaacttatattgtttagggaataatgaccaaaaaaagcctgtatatgttcagaccagacacatttyttttttcctgagtattttcagatcaacacagagggtcgactatatcctagtttcaaatcatgaattgagcataaaattagtaacacaaaagacctaagcctacatttgtttaatggagaaaaaatgatgaaaaactcacaacaagttactgaactttctatgtttttttcctagaaatgagcaaggctcatatgataactcttcctccctcagaaggcactctgagctcagtattacatgaatagcccatttatttcagatctgtagcttggaatttattgtgaacagattcagt

SEQ ID NO: 422102 - DNA, 456 bp, Homo sapiens
gtcatataacctttgcatttcctcctatgtactttacatcatctctagattacctgtaaatcctaaatcgatgtaaatgctaagtaaatgggtgttaacttatattgtttagggaataatgaccaaaaaaagcctgtatatgttcagaccagacacattttttttttcctgagtattttcagatcaacacagagggtcgactatatcctagtttcaaatcatgaattgagcataaaattagtaacacaaawgacctaagcctacatttgtttaatggagaaaaaatgatgaaaaactcacaacaagttactgaactttctatgtttttttcctagaaatgagcaaggctcatatgataactcttcctccctcagaaggcactctgagctcagtattacatgaatagcccatttatttcagatctgtagcttggaatttattgtgaacagattcagt

SEQ ID NO: 422103 - DNA, 456 bp, Homo sapiens
gtcatataacctttgcatttcctcctatgtactttacatcatctctagattacctgtaaatcctaaatcgatgtaaatgctaagtaaatgggtgttaacttatattgtttagggaataatgaccaaaaaaagcctgtatatgttcagaccagacacattttttttttcctgagtattttcagatcaacacagagggtcgactatatcctagtttcaaatcatgaattgagcataaaattagtaacacaaaagacctaagcctacatttgtttaatggagaaaaaatgatgaaaaactcrcaacaagttactgaactttctatgtttttttcctagaaatgagcaaggctcatatgataactcttcctccctcagaaggcactctgagctcagtattacatgaatagcccatttatttcagatctgtagcttggaatttattgtgaacagattcagt

SEQ ID NO: 422104 - DNA, 557 bp, Homo sapiens
ttcagaccagacacattttttttttcctgagtattttcagatcaacacagagggtcgactatatcctagtttcaaatcatgaattgagcataaaattagtaacacaaaagacctaagcctacatttgtttaatggagaaaaaatgatgaaaaactcacaacaagttactgaactttctatgtttttttcctagaaatgagcaaggctcatatgataactcttcctccctcagaaggcactctgagctcagtattacatgaatagcccatttatttcagatctgtagcttggaatttattgtgaacagattcagtcttaggtgagggtggaagacatatgtctccattccrtgatttcatatctccaggatattcctacaccaaaagcacttcctccatagaatttgcaaagagtaaatatgtactgtcagagatttattcttatggttcaagatctaattctttattaatcaatcacacacctccaaagtgctattcttaaaaaacaaacaaacaaacaaacaaaaaaacccaaaaaacagcaaattgctgccttgc

SEQ ID NO: 422105 - DNA, 557 bp, Homo sapiens
ttcagaccagacacattttttttttcctgagtattttcagatcaacacagagggtcgactatatcctagtttcaaatcatgaattgagcataaaattagtaacacaaaagacctaagcctacatttgtttaatggagaaaaaatgatgaaaaactcacaacaagttactgaactttctatgtttttttcctagaaatgagcaaggctcatatgataactcttcctccctcagaaggcactctgagctcagtattacatgaatagcccatttatttcagatctgtagcttggaatttattgtgaacagattcagtcttaggtgagggtggaagacatatgtctccattccgtgatttcatatctccaggatattcctacaccaaaagcacttcctccatagaatttgcaaagagtaaatatgtactgtcagagatttattcttatggttcaagatctaattctttattaatcaatcacacacctccaaagtgctattcttaaaaaamaaacaaacaaacaaacaaaaaaacccaaaaaacagcaaattgctgccttgc

SEQ ID NO: 422106 - DNA, 543 bp, Homo sapiens
tattttgtcctggcatgtattgaaagagaagttaaaaaaaaaaaaagacagggcactgaaagagagagagagagaaagaatggtaagaaaagacagaagggatggaaaaaggaagaaggaaagggagggggaaaggagagggaggaaagcagggagggaggaataaagaaaagggagggaaggaaggagagaggaaaggagggaacaaaggtgggaagggtaaagagggaagaagagagaaagggtcgtagatcgcatttccttgcttactcatagacaggactygtattagcccatttcacacctctataaagaactgagtaatttattaaaaaaaaaaaaagataggtttaattgactcacagttctgcagggttggggaggcctgaggaaacttacaatcatggcagaaggcaaagaggaagtaggcacatcttacatggcagcaggagagagagagaagagggaagcacgcatttttaaaccgatcagatttcatgagaactcactcactattacaagaacagcatgggagaaactgcc

SEQ ID NO: 422107 - DNA, 543 bp, Homo sapiens
tattttgtcctggcatgtattgaaagagaagttaaaaaaaaaaaaagacagggcactgaaagagagagagagagaaagaatggtaagaaaagacagaagggatggaaaaaggaagaaggaaagggagggggaaaggagagggaggaaagcagggagggaggaataaagaaaagggagggaaggaaggagagaggaaaggagggaacaaaggtgggaagggtaaagagggaagaagagagaaagggtcgtagatcgcatttccttgcttactcatagacaggacttgtattagcccatttcacacckctataaagaactgagtaatttattaaaaaaaaaaaaagataggtttaattgactcacagttctgcagggttggggaggcctgaggaaacttacaatcatggcagaaggcaaagaggaagtaggcacatcttacatggcagcaggagagagagagaagagggaagcacgcatttttaaaccgatcagatttcatgagaactcactcactattacaagaacagcatgggagaaactgcc

SEQ ID NO: 422108 - DNA, 543 bp, Homo sapiens
tattttgtcctggcatgtattgaaagagaagttaaaaaaaaaaaaagacagggcactgaaagagagagagagagaaagaatggtaagaaaagacagaagggatggaaaaaggaagaaggaaagggagggggaaaggagagggaggaaagcagggagggaggaataaagaaaagggagggaaggaaggagagaggaaaggagggaacaaaggtgggaagggtaaagagggaagaagagagaaagggtcgtagatcgcatttccttgcttactcatagacaggacttgtattagcccatttcacacctctataaagaactgagtaatttattaaaaaaaaaaaaagataggtttaattgactcacagttcygcagggttggggaggcctgaggaaacttacaatcatggcagaaggcaaagaggaagtaggcacatcttacatggcagcaggagagagagagaagagggaagcacgcatttttaaaccgatcagatttcatgagaactcactcactattacaagaacagcatgggagaaactgcc

SEQ ID NO: 422109 - DNA, 559 bp, Homo sapiens
aaaatcaaacattgaactcaaccaaggaaaaaatgtaatttccatttacagaatttcttctccttttttagcttctaaaatgggtggttttccaaamaaccaattgctctcatttataagtgggagctagggtatgagtacaaaaaggcatacagagtgatatgatggattttagagactcagaaggccgcagggctaggaatacaaaactacctattaggtacaatgtactctactcaggtgacaggtgtactaaaatctcagaattcaccgctatataattcatccatgtaacaaaaaactatgtgtaccccaaaaactactgaaatttgaaaagaagagagagaatttaacctctccttaatgattcatgtagcactttcatatcttgaaataaggtaatgtcagtcgtattaaatattggttaatttaatccatagatgtgtggaaagaggcagttgacagaaagtaatcttgcatgaattcaaaatgcaattttaatcaaaatgcaattttaaaatagctgcccttacatggtctggcattaaaaataaacttt

SEQ ID NO: 422110 - DNA, 559 bp, Homo sapiens
aaaatcaaacattgaactcaaccaaggaaaaaatgtaatttccatttacagaatttcttctccttttttagcttctaaaatgggtggttttccaaacaaccaattgctctcatttataagtgggagctagggtatgagtacaaaaaggcatacagagtgatatgatggattttagagactcagaaggccgcagggctaggaatacaaaactacctattaggtacaatgtactctactcaggtgacaggtgtactaaaatctcagaattcaccrctatataattcatccatgtaacaaaaaactatgtgtaccccaaaaactactgaaatttgaaaagaagagagagaatttaacctctccttaatgattcatgtagcactttcatatcttgaaataaggtaatgtcagtcgtattaaatattggttaatttaatccatagatgtgtggaaagaggcagttgacagaaagtaatcttgcatgaattcaaaatgcaattttaatcaaaatgcaattttaaaatagctgcccttacatggtctggcattaaaaataaacttt

SEQ ID NO: 422111 - DNA, 559 bp, Homo sapiens
aaaatcaaacattgaactcaaccaaggaaaaaatgtaatttccatttacagaatttcttctccttttttagcttctaaaatgggtggttttccaaacaaccaattgctctcatttataagtgggagctagggtatgagtacaaaaaggcatacagagtgatatgatggattttagagactcagaaggccgcagggctaggaatacaaaactacctattaggtacaatgtactctactcaggtgacaggtgtactaaaatctcagaattcaccgctatrtaattcatccatgtaacaaaaaactatgtgtaccccaaaaactactgaaatttgaaaagaagagagagaatttaacctctccttaatgattcatgtagcactttcatatcttgaaataaggtaatgtcagtcgtattaaatattggttaatttaatccatagatgtgtggaaagaggcagttgacagaaagtaatcttgcatgaattcaaaatgcaattttaatcaaaatgcaattttaaaatagctgcccttacatggtctggcattaaaaataaacttt

SEQ ID NO: 422112 - DNA, 559 bp, Homo sapiens
aaaatcaaacattgaactcaaccaaggaaaaaatgtaatttccatttacagaatttcttctccttttttagcttctaaaatgggtggttttccaaacaaccaattgctctcatttataagtgggagctagggtatgagtacaaaaaggcatacagagtgatatgatggattttagagactcagaaggccgcagggctaggaatacaaaactacctattaggtacaatgtactctactcaggtgacaggtgtactaaaatctcagaattcaccgctatataattcatccatgtaacaaaaaactatgtgtaccccaaaaactactgaaatttgaaaagaagagagagaatttaacctctccttaatgattcatgtagcactttcatatcttgaaataaggtaatgtcagtcgtattaaatrttggttaatttaatccatagatgtgtggaaagaggcagttgacagaaagtaatcttgcatgaattcaaaatgcaattttaatcaaaatgcaattttaaaatagctgcccttacatggtctggcattaaaaataaacttt

SEQ ID NO: 422113 - DNA, 550 bp, Homo sapiens
attaaatattggttaatttaatccatagatgtgtggaaagaggcagttgacagaaagtaatcttgcatgaattcaaaatgcaattttaatcaaaatgcaattttaaaatagctgcccttacatggtctggcattaaaaataaacttttttatagaatggaagaaataaaaaatgtttaaagggtggttttctttatatttccaaaaggaaagttgatagatgcagagacatgaaatgaatraggataaatgaataagtggatgaatcctcaatatcactattttataataatttattctggggaaaaaaaggcaccaaacctcagagccataagcagaaatgaaaatccaccagaaaatgcaaaattattgtgaagactttctatttgaataggaggagacttggatctgtaatcatgagtccatagatggaacattctcaggttacacccatgccataatttgaacatttgaatcaggaatgcaagctttttctctctagctgaattgttgtcgttgttgttgttcttcttctttttaaattttgcagt

SEQ ID NO: 422114 - DNA, 579 bp, Homo sapiens
cttttgccctagaaggtataaacaaattggcacctgtggtctccctggaacaaaatgctgcaaaaagccatgaggaggccaagaagctgctgtggctgatgcggattcagaaagggytccctcatcagagacgtgcgacatgtaaaccaaattaaactatggtgtccaaagatacgcaatctttatcctagtaattgtggtcattgggtgatgttggtttgggcaggccatctctaatatccttgaaacacctttttctgctctccaggaaggggtcagggctgccacagcggggcttggagtgctttccagggtcacaggcatctgtattctttggattccttgaccttccccatttattcccggcattttcctaaaacgtgtgctttgctcctcctgcatcctccccttgcatgccctcacctaccccacatcttccctaaaaaaagcaagcccaactcaaagaccagttccctcatggaatcatagtggatctgccaagggaggggatgcccagtcctctgttcttcacaaggactcccttcttctggctaaggtttcttatgcaattatgcctcc

SEQ ID NO: 422115 - DNA, 579 bp, Homo sapiens
cttttgccctagaaggtataaacaaattggcacctgtggtctccctggaacaaaatgctgcaaaaagccatgaggaggccaagaagctgctgtggctgatgcggattcagaaagggctccctcatcagagacgtgcgacatgtaaaccaaattaaactatggtgtccaaagatacgsaatctttatcctagtaattgtggtcattgggtgatgttggtttgggcaggccatctctaatatccttgaaacacctttttctgctctccaggaaggggtcagggctgccacagcggggcttggagtgctttccagggtcacaggcatctgtattctttggattccttgaccttccccatttattcccggcattttcctaaaacgtgtgctttgctcctcctgcatcctccccttgcatgccctcacctaccccacatcttccctaaaaaaagcaagcccaactcaaagaccagttccctcatggaatcatagtggatctgccaagggaggggatgcccagtcctctgttcttcacaaggactcccttcttctggctaaggtttcttatgcaattatgcctcc

SEQ ID NO: 422116 - DNA, 579 bp, Homo sapiens
cttttgccctagaaggtataaacaaattggcacctgtggtctccctggaacaaaatgctgcaaaaagccatgaggaggccaagaagctgctgtggctgatgcggattcagaaagggctccctcatcagagacgtgcgacatgtaaaccaaattaaactatggtgtccaaagatacgcaatctttatcctagtaattgtggtcattgggtgatgttggtttgggcagrccatctctaatatccttgaaacacctttttctgctctccaggaaggggtcagggctgccacagcggggcttggagtgctttccagggtcacaggcatctgtattctttggattccttgaccttccccatttattcccggcattttcctaaaacgtgtgctttgctcctcctgcatcctccccttgcatgccctcacctaccccacatcttccctaaaaaaagcaagcccaactcaaagaccagttccctcatggaatcatagtggatctgccaagggaggggatgcccagtcctctgttcttcacaaggactcccttcttctggctaaggtttcttatgcaattatgcctcc

SEQ ID NO: 422117 - DNA, 673 bp, Homo sapiens
gtataaaatgtaagcactaagatatcctgtacttaagatagatgatcttataatgcgatagatttttaaaaaataatattcatgaaaaaatcaccataattaacaaactctccaaaatttaaaccaagacagggtctaatcctgtgattgtccaactcagtcgcactcacctaccttgatgccaggatagtcaggccctgcctttatttagtcatttaatattcatcgtatatacgttgttattttgaataaattagtggatttcttgattcctggaagcatatatcatttgactgtataaaagaagtgaagcttcacacacacaaaaaaagtaaaagtcaccatgacaatgacattcattcctatgttctaggggaaacagcacaactctcttaggargaaactctccttttatttaagaaggccctttaatggctgtttaggtcttggaagataggacacctgactgcatctgtgaaatagagatacaatccataagcgctaaatcattctacaattctaaaaataaaatgttaaaggtttcttggccctcagagattaacaatgaaaggagttctgggttccaaaaggagcaggtatacctgtaacatcagggtacaaagtagcctgtagaggttattgccaagagtggctgaactctttagctagaatg

SEQ ID NO: 422118 - DNA, 552 bp, Homo sapiens
agacatgtttcagatgccccagccttcttgggatatgggctttttcatgctaacatctgtctcttaatgaatccaaaatgaaggagtgtttgcttttaaaagaatacatttcagtgaaggtcttgatcaaagagagataattaaaaaaacactaaagaaacatcaaaaagatctaattgtagggtatctgggggatgataacacatccaggaaactttttctsagagacctgtgatagaaccttaaatgtacttttctttgttttgctctcatatgtgagcaacttagaagaaacatgtatttgtttgtattaatcctacatgactagggttgacagatttagcaaataaaagtataggacactcagttaaatgtgagttttagataaacaacatccagtttattgtggcattatctatctcatactatttgggattaaatacactaaaaagttcttcatggtttttctgaaagccaaattgaacttggcctcctatattcatctaataacactatgaatcactgaaaacattttttctttaaagatatttt

SEQ ID NO: 422119 - DNA, 593 bp, Homo sapiens
agcattgaggagaccaaggtcaaagctcacacagcacgatacgccctgtgtcagtctgtgtgtgttgctctaaaggaatacctgaggtgggataatacttcaggaaaggaagttatttggctcactatttttggctgtgtgagaagcatggtgcctgcatccgctccttgttaggactccataagccttcagtcatagtggaaagtcaagtgggagcaggaatatcacgtggtaagagtggagcgagagggtgcaaggaggtcccagactcttttaaacaactacatgttgtatgaactcggagcaagaactcactcatttttgtgatgaaagcagttagtcattcattagggattcacccccacaacccaaacacttcccaccagattccacttccaacactgaggattagatttcagcaggaggtttcgaggggacaaacatctgaaaaatattattcttcctctggyccctcaaatctcatgtccttctcacattgcaaaatgcaatcatcccttcccaatcactccccaaagttttaactacttccagcattaacttaatcaaaagtccaaagttcaaaatctcatccc

SEQ ID NO: 422120 - DNA, 533 bp, Homo sapiens
cgttcttctcaagggcacgtagaatattttccagagtagataacatgtgaggccacaaaacaagttaataaatttaagaagattaacatcatatgaagtatgttttaccaaccacaatggtgtgaaactagaaatgtgtgtgtgtatgtagaagtgtgtgtctttttctgtaaagagggagggataagatgyattctagatgtgaggaagagagagaagaacataagagctctaatgttctaatgtaagaatatgtggctctgatctgggatttccctgaagtttgtgtgagcgggacttgtggatctagatgttatgacatcacagaacttcgcaaaggccatattgaaataaaaattggccagtgtcctggacccaagatacaagcagatggtaaaagaacataatttctctgttttagggaagatctcaaaataagcatcattcaagtggttctccaaagaccatcagagccaggccagtgagagatagtaaggaattgggtactgcagtgcattggagcactcatattc

SEQ ID NO: 422121 - DNA, 533 bp, Homo sapiens
cgttcttctcaagggcacgtagaatattttccagagtagataacatgtgaggccacaaaacaagttaataaatttaagaagattaacatcatatgaagtatgttttaccaaccacaatggtgtgaaactagaaatgtgtgtgtgtatgtagaagtgtgtgtctttttctgtaaagagggagggataagatgcattctagatgtgaggaagagagagaagaacataagagctctaatgttctaatgtaagaatatgtggctctgatctgggatttccctgaagtttgtgtgagcgggacttgtggatctagatgttatgacatcacagaacttygcaaaggccatattgaaataaaaattggccagtgtcctggacccaagatacaagcagatggtaaaagaacataatttctctgttttagggaagatctcaaaataagcatcattcaagtggttctccaaagaccatcagagccaggccagtgagagatagtaaggaattgggtactgcagtgcattggagcactcatattc

SEQ ID NO: 422122 - DNA, 533 bp, Homo sapiens
cgttcttctcaagggcacgtagaatattttccagagtagataacatgtgaggccacaaaacaagttaataaatttaagaagattaacatcatatgaagtatgttttaccaaccacaatggtgtgaaactagaaatgtgtgtgtgtatgtagaagtgtgtgtctttttctgtaaagagggagggataagatgcattctagatgtgaggaagagagagaagaacataagagctctaatgttctaatgtaagaatatgtggctctgatctgggatttccctgaagtttgtgtgagcgggacttgtggatctagatgttatgacatcacagaacttcgcaaaggccatattgaaataaaaattggccagtgtcctggacccaagatacaagcagatggtaaaagaacataatttctctgttttagggaagatctcaaaataagcatcattcaagtggttctccaaagaccatcagagccaggccagtgasagatagtaaggaattgggtactgcagtgcattggagcactcatattc

SEQ ID NO: 422123 - DNA, 477 bp, Homo sapiens
tatcccttttccctttatgcctcctcaagcaataacaccaacaggtcacatttcagtaggatagtgttgttttcaagcatttactcttargctatttcaatttattaatacaacaagctgatagtgtgtataatagggggtaagcaggtccattttaggaatgaaagaaaaatgaaaatcatcaggtgaagcacatttcccccaggctagcaattcataaatggcattctcagtatgcctatcagccagcattcattcttctatgatccttctaaaaaacatatttctgtgcaattggagcaaggcagggcccctgttcatggagattcctgaatgcttagctgccttttgcctttctctggatcctgcttgaatttgttgaatactaattccaatagtagtgaacaccaattacaagtaaggaatttaaaaaataataaaaacaaacatgctgagagatagagaccacatgccaag

SEQ ID NO: 422124 - DNA, 477 bp, Homo sapiens
tatcccttttccctttatgcctcctcaagcaataacaccaacaggtcacatttcagtaggatagtgttgttttcaagcatttactcttaggctatttcaatttattaatacaacaagctgatagtgtgtataatagggggtaagcaggtccattttaggaatgaaagaaaaatgaaaatcatcaggtgaagcacatttcccccaggctagcaattcataaatggcattctcagtatgcctatcagccagcattcattcttctatgatccttctaaaaaacatatttctgtgcaattggagcaaggcagggcccctgttcatggagattcctgaatgcttagctgccttttgcctttctctggatcctgcttgaatttgttgaatactaattccaatagtagtgaacaccaattacaagtaaggaatttaaaaaataataaaaacaaacrtgctgagagatagagaccacatgccaag

SEQ ID NO: 422125 - DNA, 586 bp, Homo sapiens
tgctttacctttattaatgaattgtgataggaagcccaaggagctgttcctcaccaataacttcagagaagtcagttggcgaaaatgaagaaaaggctggctgatgtttaagaaaccactataaccatcagttactggtttcaastgacaaaatatataatggtttacagctgtcatccatgcctacagataatttagtttgtatttttgaatagaaagatcttgtacattcctgacactgggtacaagagccatgtactgatgtactgttttcaacttaaatcactgaggcattttttagtaaaaatgaatagtagtctattctgttaaaatcaggattttagtgcttgcaaccaacaaatgagaagttaagcagcctttctgtgcagagtgagaataattgtgtacaaagtagagaaacttccaattatgtgacaacctttgtgtactaaaaatgtgtttaaagttaaaaaagaaagacgcaaacatcatgacacttcactgtaattatctcagcagaatctcttacatatgaggggacatttccacatcaaacacaatataatttacacacattaagaaaact

SEQ ID NO: 422126 - DNA, 586 bp, Homo sapiens
tgctttacctttattaatgaattgtgataggaagcccaaggagctgttcctcaccaataacttcagagaagtcagttggcgaaaatgaagaaaaggctggctgatgtttaagaaaccactataaccatcagttactggtttcaagtgacaaaatatataatggtttacagctgtcatccatgcctacagataatttagtttgtatttttgaatagaaagatcttgtacattcctgacactgggtacaagagccatgtactgatgtactgttttcaacttaaatcactgaggcattttttagtaaaaatgaatagtagtctattctgttaaaatcaggattttagtgcttgcaaccamcaaatgagaagttaagcagcctttctgtgcagagtgagaataattgtgtacaaagtagagaaacttccaattatgtgacaacctttgtgtactaaaaatgtgtttaaagttaaaaaagaaagacgcaaacatcatgacacttcactgtaattatctcagcagaatctcttacatatgaggggacatttccacatcaaacacaatataatttacacacattaagaaaact

SEQ ID NO: 422127 - DNA, 586 bp, Homo sapiens
tgctttacctttattaatgaattgtgataggaagcccaaggagctgttcctcaccaataacttcagagaagtcagttggcgaaaatgaagaaaaggctggctgatgtttaagaaaccactataaccatcagttactggtttcaagtgacaaaatatataatggtttacagctgtcatccatgcctacagataatttagtttgtatttttgaatagaaagatcttgtacattcctgacactgggtacaagagccatgtactgatgtactgttttcaacttaaatcactgaggcattttttagtaaaaatgaatagtagtctattctgttaaaatcaggattttagtgcttgcaaccaacaaatgagaagttaagcagcctttctgtgcagagtgagaataattgtgtacaaagtagagaaacttccaattatgtgacaacctttgtgtactaaaaatgtgtttaaagttaaaaaagaaagacgcaaacatcatgacacttcactgtaattatctcagcagaatctcttacatatgaggggacatttccacatcaaacacaatayaatttacacacattaagaaaact

SEQ ID NO: 422128 - DNA, 578 bp, Homo sapiens
gtctgtcttccgaccttagatgacatgagagaacacgcactggagaaaagccatatgaatgccatttatgtgggaaagccttcagtcaatgtactaatmttaaaaagcatcagaaaattcaccctggagagaaaattataaacttcttcagaacatattctgactttagatgacacagtgttaggaatgacgaaggtaaggaatgtggaagagacttcagctgtagttgtagcatctaaacatgccaaaggactcacattttgaagaattactgtaatcaacatggaagatacttcagttgcctttattcttcagcccacatcaataaattcatatggaagagaaattgtatgacatgtatgtaccaaagacttgttagtgatctgagcataaatgacatgagagagctgaaactgtcagcataatcaactaaaagtcttcagcaacagctttaacttaaaacatgtgggactttcaggtagagaatctctaactctgcattcagtgtgaaaatgtttttatttgcaatttattgtcaaataacatgagaaaactttacttggatgaaccctttattt

SEQ ID NO: 422129 - DNA, 578 bp, Homo sapiens
gtctgtcttccgaccttagatgacatgagagaacacgcactggagaaaagccatatgaatgccatttatgtgggaaagccttcagtcaatgtactaatcttaaaaagcatcagaaaattcaccctggagagaaaattataaacttcttcagaacatattctgactttagatgacacagtgttaggaatgacgaaggtaaggaatgtggaagagacttcagctgtagttgtagcatctaaacatgccaaaggactcacattttgaagaawtactgtaatcaacatggaagatacttcagttgcctttattcttcagcccacatcaataaattcatatggaagagaaattgtatgacatgtatgtaccaaagacttgttagtgatctgagcataaatgacatgagagagctgaaactgtcagcataatcaactaaaagtcttcagcaacagctttaacttaaaacatgtgggactttcaggtagagaatctctaactctgcattcagtgtgaaaatgtttttatttgcaatttattgtcaaataacatgagaaaactttacttggatgaaccctttattt

SEQ ID NO: 422130 - DNA, 607 bp, Homo sapiens
tcctggtctgacactccaaagtgctttgtttatgttacagtacttactgccttgtrtgttagattagtgaatgcatattgcctcatccactactgtatgaacttcttgcttgctaggacaaggctatattcctcagaactgaggagggagttgaatcatgtggctatttattctcaaatcctcttcaccaagtggaacaaaacaacagcgaaagaccaccgcacgtggaggcaggaggtttggatttgggttctagatctctagatctgttactaactggaggtatggatatagtcaggaaaattgtcttccttaggtgcttccttgatagcacctataaaggtcgagatctattggatctagatcaggggattctcaatcattactatgcagaaaatcaactgggagagttactttgcaatacagatgcttagttccatctcatgatatttttatttttttttaaattggtcaagtatttttcattaaataatgtaaactttcttagtctacatctaacaaaactcccaccagcatacaaatacattgaatgatattaacagcagaatctttaaataaagtaaccatacacaactatgaggccacc

SEQ ID NO: 422131 - DNA, 607 bp, Homo sapiens
tcctggtctgacactccaaagtgctttgtttatgttacagtacttactgccttgtgtgttagattagtgaatgcatattgcctcatccactactgtatgaacttcttgcttgctaggacaaggctatattcctcagaactgaggagggagttgaatcatgtggctatttattctcaaatcctcttcaccaagtggaacaaaacaacagcgaaagaccaccgcacgtggaggcaggaggtttggatttgggttctagatctctagatctrttactaactggaggtatggatatagtcaggaaaattgtcttccttaggtgcttccttgatagcacctataaaggtcgagatctattggatctagatcaggggattctcaatcattactatgcagaaaatcaactgggagagttactttgcaatacagatgcttagttccatctcatgatatttttatttttttttaaattggtcaagtatttttcattaaataatgtaaactttcttagtctacatctaacaaaactcccaccagcatacaaatacattgaatgatattaacagcagaatctttaaataaagtaaccatacacaactatgaggccacc

SEQ ID NO: 422132 - DNA, 584 bp, Homo sapiens
gttctccaacagatcttcagtaaaaatagctgatgtctatattgttttgcctgtcctttcccttccttttaattcagaactgcagtctcgaaaagtgctattatttagtagattctctcaattctcaacaccagtgctatacaatgttgaatgacatctgaggtgctagggaaacagcagctcacattctagcaatgaaaaaatagaaaagcaaagatcaccacagagtaaaagagaatagatttttttaaagtatgaaaccagaacgaatatatatcagattacactataaatggaaaatcytattatcttgacgggattgcaagtcagattacactataaatggaaaatcctattatcttgacaggattgcaagcctctcatggcttccaacctccaatatattcaaagcagttcaggaatggtgaaagtggaatggaatttaaaattattctaaggttttatgtgtgaaagcatcatgccctgaaacaaaatatttatttttaaagtgcataatgaacactgcatacaaagtttatgtaacaggagagaggaaatatctcacattttaaaaaaaggaatat

SEQ ID NO: 422133 - DNA, 347 bp, Homo sapiens
ctcttcctggtctggaaatgccagaaatgtcctccttggtccttctgagagtcaagatcttttcaaaatcacctcaggagccacagaaccactccatcctacctgaaattgcaggatgactcttcttttgaccagaatctcaaaaatatattcgttgatagtattgattcctgcggagccgccattgcttgcaaagatgtgccagagactagacattttctgtctcctcacttgtccagggaagactgaagttttactgaaacacagcgaygggaatctgaccctctgagcagcctcaggattttctaagtcttccaagcagagtggaaatactggtgaggacccat

SEQ ID NO: 422134 - DNA, 426 bp, Homo sapiens
tcactgctctggggataggccacacactctgaggtaytgagtttgaaaagtgttttaattctgagcagtctttgtatgtaacacagagcaccttttccatgataacttcttggcagtaagagaggtataaaaaccagcacttttttttttctattctggaacacaaaagccaattctagaatagctttcaatcagtacagcaattttaataaacattcaataaatgcctatttaattgacctgaaatccaaatgtattagattccatttaacttttcaatggtcacaaagcagttagtggattgatgtgaagaccaaatatatgcaacatcatatttatatctgtaatgcaaattgggaaataaaggtcatgcttttctgaagacaatggtaattgtaaatgttgaccacttggtagaaacaagct

SEQ ID NO: 422135 - DNA, 586 bp, Homo sapiens
tacctaaattaataatttatttatttttttttgtatatttgctatgtcacctttagaaagtaagaggcagctctcacttgctgctgatgacctgcctcrccatgcacatgtcctgccagcaccccacagaaatgcttccattacccacagtctttcaccagatgagaccagtgtccaggctactggctcctcacctcacttgaagtgatggtaaagatgtaaaatttggtgctgatgtccgagccttaatgcttcaaagtgtagactttttgtcgaggctgtagccattacaatggggccaaagggaagaacagtaattattgaacatagctggggaagtccaaagtaacataagatggtgtgactgatgcaaagtcaattgacttaaaggataaatataaaagcattggagctaaacttgtccaagatgttgccaataacacagatgaagagactgggggatggcactatcactgctgctgtactggtatgctctatttccaaataagccttccagaaggttagcaaaggtgctaatccagtggaaatcaagagaggtgtgatgttagctgttgatgctgtaatt

SEQ ID NO: 422136 - DNA, 337 bp, Homo sapiens
ggtaacatcatctctgatgcaatgaaaaagtttggaagaaagggcatcatcacagtaaaggatggaaaaacactgactgatgaattagaaattattgaaggcatgaaaatttgatcgaggatatatttctccatactttattaatacatcaaaaggtgagaaatgtgaattccaggatgcctaygttctgttgcatgaaaagaaaatttctagtgtccagtccattgtacctgctcttgaaattgccaatgcttactgtaagcctttggtcataattgctggagacattgatggagaagctctaactacactcatcctgaataggctaaaggttggt

SEQ ID NO: 422137 - DNA, 337 bp, Homo sapiens
ggtaacatcatctctgatgcaatgaaaaagtttggaagaaagggcatcatcacagtaaaggatggaaaaacactgactgatgaattagaaattattgaaggcatgaaaatttgatcgaggatatatttctccatactttattaatacatcaaaaggtgagaaatgtgaattccaggatgcctacgttctgttgcatgaaaagaaaatttctagtgtccagtccattgtamctgctcttgaaattgccaatgcttactgtaagcctttggtcataattgctggagacattgatggagaagctctaactacactcatcctgaataggctaaaggttggt

SEQ ID NO: 422138 - DNA, 628 bp, Homo sapiens
gtaaatgtgcattaaatgtggcagtaaaaatagacacaatgatgtttgggaactggggtctaaatgctggagtccccagaatcatagagaaccttggttaggggagtaattttgtcaaaaagcaagaagaggcagtgacaggcagaatataattaaaagtattgctgggccattttctaattttgtaattttgtcatattattcaaaccctgttgatcatttattaaattggtaaataaattataatcagcaggattattatgagggttaaataaggaaatatatgtacatctgtaagcacaatgtcacaattaatacaaagttaccctttttatttttcctggacttcatgtacaaatgggtcagtaaattttttgtttatgacacataattatcacttgcacataaaatatatttaattatttttatatttttagcaaggaaataatacatgcatgtttccccctgtctcaaacacatacactcatataaacatatgcacctatatacctacatatctatgtaygaatatatacatggacatgggtatttctcagcaaatatgtatcatgataatcacagatattgcagctaacaaagactaatataaaccatgattgcaagaatt

SEQ ID NO: 422139 - DNA, 579 bp, Homo sapiens
ccgcccctgaccaagatttccctcaaactcccatacactttagtacgagacctatgcagtacaaacagaacattttatcaaagtttctggagatttcatcaaagaagggcaacaaattaaagtctggaaaattaatgcttttcccagattccaaaagggaagtttctttgcttaggtcctttaaaaggccagtgggctcttacgtgttccagcctcagtctcttgaccccaagttgtcctcctccttcattcaccctccttctctccttcactgcttgggagtgcagtcttgcttcactgctctccttcactccctccctcccacctgccagcagtgaggacaccacttgattgttccagcacctctttcccttcgcttaaacaggctggagcagtcactgagaatagcagcaggaatatcatgggtatctagtgacacccaagctccagagaacattaagcctgaggggctgagttctctaaaatgccttgtctactgggtactggtcgaaccctcaggctgtctccatgcatgcccaccagggtgagtgcaaacaracttatttcttagctcatgaa

SEQ ID NO: 422140 - DNA, 578 bp, Homo sapiens
tttctttgcttaggtcctttaaaaggccagtgggctcttacgtgttccagcctcagtctcttgaccccaagttgtcctcctccttcattcaccctccttctctccttcactgcttgggagtgcagtcttgcttcactgctctccttcactccctccctcccacctgccagcagtgaggacaccacttgattgttccagcacctctttcccttcgcttaaacaggctggagcagtcactgagaatagcagcaggaatatcatgggtatctagtgacacccaagctccagagaacattaagcctgaggggctgagttctctaaaatgccttgtctactgggtactggtcgaaccctcaggctgtctccatgcatgcccaccagggtgagtgcaaacaaacttatttcttagctcatgaacctgttagatagaacatctgtacaactccccaggacaaatgttaggttctgaggacagtacagtctcaaccccaagtgaagaaasaaatatttccctgattactgagatgcttctcacttccccaagagctaggatctcattgttcaccaaagtagcattt

SEQ ID NO: 422141 - DNA, 340 bp, Homo sapiens
gtaattgaaatgagcctattgactgatgtggtaataggccatggatgactattaaatgatttgcacacggtggctagtatctatggagctgttattacgtacctggcatggcaatggtgctttaatgcatttctctgacaaaaaaaggcataaagtaggtatcagaatttttacttaaggataaggaggaggcacagtggctcacacctgtaatcctagcactttgggaggtcaaggtgggtggatctcctgaggtcaagagtttgagacaagmctggccaacatggtgaaacccagtgtctattgaaaatacaaaaattagctagaagtggtggcgggc

SEQ ID NO: 422142 - DNA, 578 bp, Homo sapiens
tttctttgcttaggtcctttaaaaggccagtgggctcttacgtgttccagcctcagtctcttgaccccaagttgtcctcctccttcattcaccctccttctctccttcactgcttgggagtgcagtcttgcttcactgctctccttcactccctccctcccacctgccagcagtgaggacaccacttgattgttccagcacctctttcccttcgcttaaacaggctggagcagtcactgagaatagcagcaggaatatcatgggtatctagtgacacccaagctccagagaacattaagcctgaggggctgagttctctaaaatgccttgtctactgggtactggtcgaaccctcaggctgtctccatgcatgcccaccagggtgagtgcaaacaaacttatttcttagctcatgaacctgttagatagaacatctgtacaactccccaggacaaatgttaggttctgaggacagtacagtctcaaccccaagtgaagaaacaaatatttccctgattactgagatgcttctcacttccccaagagstaggatctcattgttcaccaaagtagcattt

SEQ ID NO: 422143 - DNA, 233 bp, Homo sapiens
actaaggctaagacaaacgaaattactttctaaaatttgaagcccaggaccatcaggctcacagattatgctaactacttgctttattattcaggttattgtagwtatattttatatccatgtttctgtcaaaggtttttggtgtggggtttcccagtggaaagggaaatgattatatatggtggagaataaatgagagagggcttggggaatggaagccacacctcacccac

SEQ ID NO: 422144 - DNA, 233 bp, Homo sapiens
actaaggctaagacaaacgaaattactttctaaaatttgaagcccaggaccatcaggctcacagattatgctaactacttgctttattattcaggttattgtagatatattttatatccatgtttctgtcaaaggtttttggtgtggggtttcccagtggaaaggkaaatgattatatatggtggagaataaatgagagagggcttggggaatggaagccacacctcacccac

SEQ ID NO: 422145 - DNA, 583 bp, Homo sapiens
tccttccctgtgtaggcttcagatacaaatgcagccctggctgacagcttaactgcgacttcatgactgagcttgatctagaagcacccagctggccatgcctggtttctacaatccacagaatgtgtgagataacaatgtttctcgtcttcatccactaagttttgggataatttgttatgcagcaatggataactaatatagtgaggtatagtgcaaagaatggaagagatttagagacctatgtttcagtcccagtttttttacaaatttgctatgtaaatttagactaactgttgaccaagtctagcccttccattttttattctgcctacaaaagggaaaggaatcatggatttctgaggtcatwacaggtctaagtcttcatggttcattgaattgtcaagctgattcctgcatctaaaccagagtcttgaattggaagcccatgagtaaaatatagtccatcgaagtattttgatattaggtgtcaacatttaaaacactaaaaattttgcataaaaattcagttttctgacttcctcagaaaaattcaatgattaaaccaccagggcccacgttt

SEQ ID NO: 422146 - DNA, 583 bp, Homo sapiens
tccttccctgtgtaggcttcagatacaaatgcagccctggctgacagcttaactgcgacttcatgactgagcttgatctagaagcacccagctggccatgcctggtttctacaatccacagaatgtgtgagataacaatgtttctcgtcttcatccactaagttttgggataatttgttatgcagcaatggataactaatatagtgaggtatagtgcaaagaatggaagagatttagagacctatgtttcagtcccagtttttttacaaatttgctatgtaaatttagactaactgttgaccaagtctagcccttccattttttattctgcctacaaaagggaaaggaatcatggatttctgaggtcataacaggtctaagtcttcatggttcattgaattgtcaagctgattcctgcatctaaaccagagtcttgaattggaagcccatgagtaaaatatagtcyatcgaagtattttgatattaggtgtcaacatttaaaacactaaaaattttgcataaaaattcagttttctgacttcctcagaaaaattcaatgattaaaccaccagggcccacgttt

SEQ ID NO: 422147 - DNA, 534 bp, Homo sapiens
cattaatagctggtaaaaaaatactttttctaatatgcactaaaataattaccactatccaaatcaaggtgtttgtttatgcactaactggaattatcttgcagtatggcagaatttgtaagggcattggcttaaatctcagctcttctactaacccgatgtgggatcctgagcaaattaacttctctgtgccttagtttcctcatatttaaagtgaggttattgtgaagataaaatgtaaactgttytagtgagtactttataacgcttggttgtagtagcagtaatagtagttattatattttgtataatcagtggtaaatgtaccacattttggaacatgctgcatcaacttcttctgccctccagagtgtgaaaactctactaattcaatttgtttcctcatagcctaatgacatatggtttggctgtgtccccacccaaatctcatcttgaattatagctcccacaatccccaagtatcatgggagggacccagtaggaggtaattgaatcatgggggtggttacctcc

SEQ ID NO: 422148 - DNA, 534 bp, Homo sapiens
cattaatagctggtaaaaaaatactttttctaatatgcactaaaataattaccactatccaaatcaaggtgtttgtttatgcactaactggaattatcttgcagtatggcagaatttgtaagggcattggcttaaatctcagctcttctactaacccgatgtgggatcctgagcaaattaacttctctgtgccttagtttcctcatatttaaagtgaggttattgtgaagataaaatgtaaactgttctagtgagtactttataacgcttggttgtagtagcagtaatagtagttattatattttgtataatcagtggtaaatgtaccacattttggaacatgctgcatcaacttcttctgccctccagagtgtgaaaactctactaattcaatttgtttcctcatagcctaatgacatatggtttggctgtgtccccacccaaatctcatcttgaattatagctcccacartccccaagtatcatgggagggacccagtaggaggtaattgaatcatgggggtggttacctcc

SEQ ID NO: 422149 - DNA, 505 bp, Homo sapiens
tatcagctagtggatagtttctggaaaagtcactaattgacttcacctacagatttctgtgtatatatggggaataacatttttgtaataataaaggagcaatttagggtagagtcttaataactatgygactttgacaaatcactcaccatcacttatctataaaatggggatgctaattaaatcagttgcatagactgattgtgaggatcaaatgagaaaatgcatgcatacacttagcacagtgtccggcacatagtatgtgttcaataaacgccagctactactaccacagttggtgcttctgtccaaggcagacacctccactctgaaatatagaagccaattgacttaaaaattacatgtatttggcagtgaataatctggtgatgttaccctctggagggtgaaccaaaacctctgtctgcatcactcatcatcaacccacactgtaaaaagccgtctctcctaccctggacattccctgaagccaaagcataagtga

SEQ ID NO: 422150 - DNA, 609 bp, Homo sapiens
gtcttcaacagtaagagtttttttttttttaaatatactaactcaagtgttaattataagaagatttaagttttgataagagttcttgctactccaggctttggccatttgcccccaacatacttctcatcattcaactgggagcagrtgcatggcctggaacttggggaagtctaggactgccaggttcaggtcagagaacaatgtgagtagacggtggttgtggttgtgggaggggaatgagaatggcatgtaacagaccatacttgaaagtaacctcaagattacatcatcttctattatactcaaaatatgaaaccccagggaaagactgcaactggctcaaaaaaagattgtattaataactggctcagtcactgtaaccagaaaaagaatactttaacttgtgatgaagcctgggtcaaatttcatctcccatggtttagagggtgataagaaagggcagagttcactgagtatcagcccatcttaaatcttgtgtacagagaaggttgagtcctcagaaggtggtagtctttccagagaagagggaaggataccaccctgaggaaaatagaatataaataccagaatctgcattcagtttat

SEQ ID NO: 422151 - DNA, 609 bp, Homo sapiens
ctctaaaaagagtaaagtgtactctgctcacttaatttgctccataaaaagtttctgtagaaagttaactctgttagtacatgtagccttttgctttccaaatcccattcttttctttttccacacaataaacatacaaascaggtaacacacatagcagcaccccattttaccattaaacaaacgagagagtaatttatttgcccaaggccatgcagtgaaaagtcacgaagtctgacctcacacccagtttacatggctccaagactgtgttctttccattgccgcacaatctctcattgatgttaggggagatcagcctttgatacaatgcgtgttgtatctaatattatcctcatcatgatctaggaaataaaactttttatttagacagcttgtaattctttgagaggttacaaatactggaaaattcctcaggtcttatttctaattacaagacatttgccacatatcaagcctgtctttcatcataaactatatcaaatgtaggcacttttgacttatagggatactaagtcctaactgtttgcataaaacacattgctctaaaatctgatgattttgtttccctgccaagcattatagcaa

SEQ ID NO: 422152 - DNA, 609 bp, Homo sapiens
ctctaaaaagagtaaagtgtactctgctcacttaatttgctccataaaaagtttctgtagaaagttaactctgttagtacatgtagccttttgctttccaaatcccattcttttctttttccacacaataaacatacaaagcaggtaacacacatagcagcaccccattttaccattaaacaaacgagagagtaatttatttgcccaaggscatgcagtgaaaagtcacgaagtctgacctcacacccagtttacatggctccaagactgtgttctttccattgccgcacaatctctcattgatgttaggggagatcagcctttgatacaatgcgtgttgtatctaatattatcctcatcatgatctaggaaataaaactttttatttagacagcttgtaattctttgagaggttacaaatactggaaaattcctcaggtcttatttctaattacaagacatttgccacatatcaagcctgtctttcatcataaactatatcaaatgtaggcacttttgacttatagggatactaagtcctaactgtttgcataaaacacattgctctaaaatctgatgattttgtttccctgccaagcattatagcaa

SEQ ID NO: 422153 - DNA, 575 bp, Homo sapiens
cataaactatatcaaatgtaggcacttttgacttatagggatactaagtcctaactgtttgcataaaacacattgctctaaaatctgatgattttgtttccctgccaagcattatagcaaatctcttctcattcttttgctgtaacttgtagaaatatttatctgtgagggacctaacagagctcatagaataacatagctatggaaagcaaaagaaactgaggacagatgaggttaagtattaatattttatttaaggataatcactagtcagtgttagagtctctcactttttagaccatccgagttgayaaccattgcctctgtggatgcatttaaagggttatttgtggccagacacagttgctcatgcctgtaatcccagcactttgggaggccgaggtgggaggattgcttgatcccaggaatttgagatcagcctggacaacatggtgagaccccatccctattaaaaaaaataaagaaattagccaggtgtggcaacacatgcttgtggaggctgaggtaggagcatctcttgagcacaggagtttgaggttgccatgaattttgat

SEQ ID NO: 422154 - DNA, 460 bp, Homo sapiens
aggtcctttgtgaacacacatgcaatgcacagtaaaaaattttgaaggtactctgtttttcttttttgttttgttttgttttgttttgttttgtttttgacggagtctcactctgtcatcaggctggagtgcagtggtgcgatctcagcttactgcagcctccagctcccaggttcaagtgattctcctgcctcagcctcctgagtagctgagattacaagtgygcaccaccatgcccagctaattttttgtatttttagtagagacagggtttcaccatgttggccaggatggtgttacaagtattatttaactttttattctcaaagtcctagccaattcaattagaaaacaaaatgaggtaatatatatatatacatacatatatatatatacacacatatatgtgtgtatatatatatatagagagagagagagagagagagagaaacaaaaaaag

SEQ ID NO: 422155 - DNA, 616 bp, Homo sapiens
gcttatcctccccagaaggatccatcctggctgacaactccgtaccatattagccaaggttcttcagagaaacagaacaaatggggtgagtgtgtgtgtgtgtgtgtgtgtgtgtgtgtgtgtgtgtgwgagagagagagagagagagagagagagattttaaagaattagctcatgtgattgtagggattggcaagacaaatctatggggcaggctagctagctggcaaatttattgttgtagtcttgagtctaaagacagtctggaggcagactatttcattgctataaattatccttgtacacacagtttagtcctattgtcagataatctctttaagaatgaattcctagaagtagaattgctgagtcaaatggcatatacttaataaagcttatgaaatatttttcctaatagtcttccagaaacactatgccaacatgcataacccaaagctatttataactgtactatatatctttacacctcacaatgattcttttcattctctttaaacctttgtcaattcagtgggagaaaacttattgtcttaactttctaaattttttaaatttagcatgttttacatttctacaaaaatataataaacatttt

SEQ ID NO: 422156 - DNA, 526 bp, Homo sapiens
tttgccatttaggttaagaaaaacgtatagcctctcccctactcaacacatgcaccttaagaaacaacttyaaagttatcctgaccacatcaccacattgttactgatgttacccttgaatgaatttttatcctttccttacctgtgtcttatgagtcttataaatttttattgtaatttcaccggactaaaatctagtaaaattttctttttcatgaaaccttaattgttcatgggcattttaatgtaaagtcaattaaatgcaaaacaagacaaaatccaaaagatactattccaaaaaataactatattattttcctttaagatgttagttttttaatcaatctctaatagtttcagaaggtaagatgaaatgttgtttcctgtgaatccactaaaaactacttacattattcttaaacaaattaacatcacctagtttattatttttaaaagattaatattctttttagaattgtcccagttgattttttgaacacaccacacacacacacacacaaacaca

SEQ ID NO: 422157 - DNA, 602 bp, Homo sapiens
atcctaaacaggtttttttttgtttgctttttccatatgtaataatttggactgtaataatgtaacacctcactcagagtatgcacttgaaaaattaattcttacttaactggtctgtctactgtgtaggatttgcattaatattgtgaaaacactttaggggaaaataatttaaaatatatgaatagacatataacttttcttactttgattatttttgcaaatttgttctatttaatcttaaagggattgtttctttgttttcaaagtatagaccattgagaaagagggaaagctccccagtatattttatgaagttagcacaaccttaaacctgttaaagcaaatttaaacctagtaaagatagtataaatacacaaactgtgtacatgcacacatgtatacacacacacacacacacacacactcctatgtgctaaagtttcaaataaaatactagcaaatgaattcagcattgtatttaaaaattatatatattgactagaaaggctttatcccargaatataaagatgactctacactacaaaatctgtacataattcattatagcaacatattagaggtaaatttataactaagc

SEQ ID NO: 422158 - DNA, 587 bp, Homo sapiens
cagcattgtatttaaaaattatatatattgactagaaaggctttatcccaggaatataaagatgactctacactacaaaatctgtacataattcattatagcaacatattagaggtaaatttatractaagccagtaggtatttctcaaaaagaaggaaaatcatttgataaaaatctaacaacttcattcatagggaagtgcagagtaaagcaacagtgagatgacatgcaggactggcagcatgtgaagaaataggcaatcataccttgatgctagtgtgaagtgttactgctttttgggaaaaaaacaacaatagcttctgaaataaaaatgcacattatcatttgaatattcctgtttctgggagtctttcctacacaaaataatatattaatattagtgtatactataatgttaatatatactaatatagtaaattaggacttatatgcagggatatttgtttcatagtttgtaataactaaaaattaggaacaacatgaatgttgatcaccgaaggagtgactgagtaaattattctacactacactgtggaatatagtgtaaccattgagcaggagggat

SEQ ID NO: 422159 - DNA, 563 bp, Homo sapiens
gtgttactgctttttgggaaaaaaacaacaatagcttctgaaataaaaatgcacattatcatttgaatattcctgtttctgggagtctttcctacacaaaataatatattaatattagtgtatactataatgttaatatatactaatatagtaaattaggacttatatgcagggatatttgtttcatagtttgtaataactaaaaattaggaacaacatgaatgttgatcaccgaaggagtgactgagtaaattattctacactacacygtggaatatagtgtaaccattgagcaggagggataatattgttgagtatggaatggcaaattatagattactgtgtataatgtaatccattttttaataaaaagggagaagccttatatatgttaaatgtgtgcatgagccgtgagaaatgtgtgggagtattgagttaagagggggtgggataggtgaagtgagaatatcatttttatttcatatgcttctgtagtgtttgatttattgtgaagagcatttatttttgtataaccacatttaatgaaggaaaaatgctaaata

SEQ ID NO: 422160 - DNA, 591 bp, Homo sapiens
aaggacattctctatgtactaatggaaagacctccaaaatacattattaaaggaaaaaagcaaggtgtatataaaatagaccactgaaagccagataggggggttgatatcagctacagcaaaaaataaaaagccatgagaagggttgaaagtacaatgagtcaaaaagtgtaagacttcaaacctaggtgactgagaactgaaagggaagactatttgagagaaaagaatttctgtgcagtcacagatctacttcaatttcactagtacatgccttgctccagtcaatggraaaatagctgtcagaagatgagacaccttctaccaattagcatgggaaatttggaaatcgtgtttgactaccttttacacccaggactaatgcatcaagaaagtaacactgcccaaggcactaataaaagcactaacaggctcctagctactccaatctatagagatgcaaaagtgaaattgaatagtggttatgaattaaaatgactggctatcaagatgcaataggacgggagaaaagctctaagatagtacattagagagtatccacatttatctccttacggtcttctgtccctt

SEQ ID NO: 422161 - DNA, 591 bp, Homo sapiens
aaggacattctctatgtactaatggaaagacctccaaaatacattattaaaggaaaaaagcaaggtgtatataaaatagaccactgaaagccagataggggggttgatatcagctacagcaaaaaataaaaagccatgagaagggttgaaagtacaatgagtcaaaaagtgtaagacttcaaacctaggtgactgagaactgaaagggaagactatttgagagaaaagaatttctgtgcagtcacagatctacttcaatttcactagtacatgccttgctccagtcaatgggaaaatagctgtcagaagatgagacaccttctaccaattagcatgggaaatttggaaatcgtgtttgactaccttttacacccaggactaatgcatcaagaaagtaacactgcccaaggcactaataaaagcactaacaggctcctagctactccratctatagagatgcaaaagtgaaattgaatagtggttatgaattaaaatgactggctatcaagatgcaataggacgggagaaaagctctaagatagtacattagagagtatccacatttatctccttacggtcttctgtccctt

SEQ ID NO: 422162 - DNA, 581 bp, Homo sapiens
ctagcctgggcaacaagagcgaaactctgtctcaaaaacaaaacaaaaaatcttccacacttaaacrgaatttttattttttcatattttcagtaatgagaaatctgcagtataatctactctttccttactaaattcaactagagaaagattatatttttctaaagatttgtcatcattttccatatacctagtcaattacaacagtcagagataatcttttttgaatgattttgaatgttcaaggtaatagaaacgatgtttttctatgtagtgcaaatgatacctttcaaacagcagggcataacgcatgtttcctcactttcatttataccacttacaggaatttatttgcttttgtattaaaagctgaaatgcatatcaagttagatttttatttctatcaatcataattatagttgtcactattttgataaggctatgtcataacttaccaaaggaaagagacaagttaacaaatactttaagaaaccactaatatctagacttgacttttaaaattaaaagcctcacccatttactcatttcagagagtcaaaagataacaatcacagaaggat

SEQ ID NO: 422163 - DNA, 581 bp, Homo sapiens
ctagcctgggcaacaagagcgaaactctgtctcaaaaacaaaacaaaaaatcttccacacttaaacggaatttttattttttcatattttcagtaatgagaaatctgcagtataatctactctttccttactaaattcaactagagaaagattatatttttctaaagatttgtcatcattttccatatacctagtcaattacaacagtcagagataatcttttttgaatgattttgaatgttcaaggtaatagaaacgatgtttttctatgtagtgcaaatgatacctttcaaacagcagggcataacgcatgtttcctcactttcatttataccacttacaggaatttatttgcttttgtattaaaagctgaaatgcatatcaagttagatttttatttctatcaatcataattatagttgtcactattttgataaggctatgycataacttaccaaaggaaagagacaagttaacaaatactttaagaaaccactaatatctagacttgacttttaaaattaaaagcctcacccatttactcatttcagagagtcaaaagataacaatcacagaaggat

SEQ ID NO: 422164 - DNA, 581 bp, Homo sapiens
ctagcctgggcaacaagagcgaaactctgtctcaaaaacaaaacaaaaaatcttccacacttaaacggaatttttattttttcatattttcagtaatgagaaatctgcagtataatctactctttccttactaaattcaactagagaaagattatatttttctaaagatttgtcatcattttccatatacctagtcaattacaacagtcagagataatcttttttgaatgattttgaatgttcaaggtaatagaaacgatgtttttctatgtagtgcaaatgatacctttcaaacagcagggcataacgcatgtttcctcactttcatttataccacttacaggaatttatttgcttttgtattaaaagctgaaatgcatatcaagttagatttttatttctatcaatcataattatagttgtcactattttgataaggctatgtcataacttaccaaaggaaagagacaagttaacaaatactttaagaaaccactaatatctagacttgacttttaaaattaaaagcctcacccatytactcatttcagagagtcaaaagataacaatcacagaaggat

SEQ ID NO: 422165 - DNA, 619 bp, Homo sapiens
aacttagaatttatcatgtacctatatgtaagataaaactagaaaactcttagaagcgaacataggagaaactctttatgacctggggtttcacagagagttcttagagtatcaaaagcactatccataaaaggaaatcatttataaattggtcttcatcaaattaaaaacttttgttctgtgaaagatactgatagaatgtaaagaagatatagggatggcagataaacacatgtgaagggtgctcaacatcattagtatatattttttagaatgcctaaattaaaatactgataatacaaggtattcatgaggatgtggaacaactggaagtttcatacattgctggtggattacaacatgatacagycactctagaaaacagtttggcagtttcttcaaaagtaagacatatacctaccatataacctggcatttattctagacaaagttcacaaaaacttgtgcacaaatgtttgtagcagtattgttcataatcaccaaaatctggaaagaacttgaatgtccttgaatggataaactaattgtgtatctactcaatgggaaatactgttcagcaatggatacaggaacagatctttttatacatacaaaaatg

SEQ ID NO: 422166 - DNA, 619 bp, Homo sapiens
aacttagaatttatcatgtacctatatgtaagataaaactagaaaactcttagaagcgaacataggagaaactctttatgacctggggtttcacagagagttcttagagtatcaaaagcactatccataaaaggaaatcatttataaattggtcttcatcaaattaaaaacttttgttctgtgaaagatactgatagaatgtaaagaagatatagggatggcagataaacacatgtgaagggtgctcaacatcattagtatatattttttagaatgcctaaattaaaatactgataatacaaggtattcatgaggatgtggaacaactggaagtttcatacattgctggtggattacaacatgatacagtcactctagaaaacagtttggcagtttcttcaaaagtaagacatatacctaccatataacctggcatttattctagacaaagttcacaaaaacttgtgcacaaatgtttgtagcagtattgttcataatcaccaaaatctggaaagaacttgaatgtccttgaatggataaactaattgtgtatctactcaatgggaaatactrttcagcaatggatacaggaacagatctttttatacatacaaaaatg

SEQ ID NO: 422167 - DNA, 603 bp, Homo sapiens
gttttttttgtgtgttttgtctcactctgccacccaggctggagtgcagtgacacaatcttggctcactacaacctccacctcccaggttcaagagattctcctatctcagcctcctgagtagctgggactgcaggcaggtgccaccatacctggctaatttttgtattttttgtygagacagggtttcaccatgttacccaggctggtcttgaactcctggacttaagtgatatgcctgtctcagcctcccaaagtgctgagattacaggtgtgagccaccttgcccggccagatctctgttttaatgttaatgctgctcagctgtgcctggattccagtgagaggaaggtataatgaggcatgcctgaccatccattcccatcatgccctgaactagtgctcaggtttactctagaatgctcttggctgagacgtgaggtctattcagttggttgggggacttcgaattttatttttggtttacagcaggacatcctcctctgcacagctattcatgggccctggttcctttaatcttgttctctctagagcctttgtcatctgtttgatcaaagctgagtcatgaccataacctggttcc

SEQ ID NO: 422168 - DNA, 540 bp, Homo sapiens
aagtccccactcgacccaggaagtccagctggcttcacctctcaacaacacaacaatcttcagcccagaagacttctgtgaccaaatgtgtggtggttttcttctccagactccaagcagcggacaccagcggggtgtcctctaattcagtcctgacaccatcgacctggagatagtgtcagatcccacaattcaaaggcttggtccccagaacggctgtatatgccacgccaattgcaaatccaggcctccagaacttctgaccaaaaggcttccagttgggattctttgggtttgattaacttgctggagyggcttacagaagtcagggaaacacttatttatgtgtatcaatttattataaagaatgtcacaaaggatacagatgaattgatggatagggtgaggtatagggaaagggtatagagcttccatgccctccccagagtgctgccttccagaaacctccatgtattcagctctccagaagctcactgaaccccgtcctcttgggttttcgtggaagcttcatgtggtcag

SEQ ID NO: 422169 - DNA, 547 bp, Homo sapiens
attaatatatctactccataggtatctttgagtgtctgtatctttcattaaaatcattctcattcaaaaattgttgcttcttcaaattcttttaattcactagatgataattaagtttttacatctattctcctacaattccactcccccyactgcagtgttttttaattgtgaaagaagcatgaaaaagctatcttctaattatgtcttttgatttttaaaattattaggattttgaatgtaaaatacatataagtattctaaaaatgaaacttttcttgaccaaggaagaaatacattaaaagtagagaagtctgattaaggttcattacagcattaatttagaaagtatgggaaagacagggaaaaatgtcagttttaaataattaaaacactgaattattagtactgctaggtcttttgcaagcactttatcattaacatgtgacttatgttttattccagtttgtctgcatagcccagcaagattactgccgtattctcaatcaagtagaaaagaacatgcaaaaagttgaagaggaaggag

SEQ ID NO: 422170 - DNA, 552 bp, Homo sapiens
tttatcatgaaaattatttgaaatcatatgtgtaatgcaattgaaaagaaaaaataattaaaggaagtttcacaaagctgtaggatctatcatattggtaacagacttgatttatactatactagctattaaatttttctataaattatcatttgtgtatgaagattttttttttgacaaagctactaaactagcaattagagaagtctagatagagtatactgttgagttttttcctcaaactttatcagccttagagaagctaagatgctagataatggtaaattggcaaggtaggcacaatcgggtgatgtgcatagagaggaaggagaagatggggcatgagctcccagaattcagatttggttgccaagtaagtagaaaaagactaatgaacccagagacaagaaggagtaagtcagcacactataaaaccagtgcagatcgaaagacaatttcagtaacaaggaaagtgttggagaggtagaatcctaagaggatgtgcccagaragggacatttctgaattaggtcttggatataaaatagtttc

SEQ ID NO: 422171 - DNA, 588 bp, Homo sapiens
gctcatgacttgatcacctagttactgcagagacagagagtattaggaggctttcaaggaaggtgggccgattctcyagccaacgtgaaatgttggtagacaagaagctaaacttccccccaagagacagtatgtcagtcaggaaactatttcctgtccgttgaaatatctttttatagctgggaaaaactttgggaaaaccaagtggtgagccatggaaaagggtttctttgtttatttactttggcttttcgaaatgttcttggacttgagtggacgtctgactctggggaaaacagacataaggacaattaaagatgtcccaaattgactctgctgggaggaacattgctcgttgctgccctccagagaagttcagagagggaacaatgaaaagcagaaggctgatgaagaaaggtcaggctgtatgccaacaaaggtcagcccgtatgcgtgtctgttgcaccttgcgtagcctgtgagtttgcctgaaacctttccatagagatagcaaaatatgctttcagctcaactttaatttagaagccatatcctatcttggttgagtgccaccttgtttaaagtaac

SEQ ID NO: 422172 - DNA, 588 bp, Homo sapiens
gctcatgacttgatcacctagttactgcagagacagagagtattaggaggctttcaaggaaggtgggccgattctctagccaacgtgaaatgttggtagacaagaagctaaacttccccccaagagacagtatgtcagtcaggaaactatttcctgtccgttgaaatatctttttatagctgggaaaaactttgggaaaaccaagtggtgagccatggaaaagggtttctttgtttatttactttggcttttcgaaatgttcttggacttgagtggacgtctgactctggggaaaacagacataaggacaattaaagatgtcccaaattgactctgctgggaggaacattgctcgttgctgccctccagagaagttcagagagggaacaatgaaaagcagaaggctgatgaagaaaggtcaggctgtatgccaacaaaggtcagcccgtatgcgtgtctgttgcaccttgmgtagcctgtgagtttgcctgaaacctttccatagagatagcaaaatatgctttcagctcaactttaatttagaagccatatcctatcttggttgagtgccaccttgtttaaagtaac

SEQ ID NO: 422173 - DNA, 587 bp, Homo sapiens
tacatttttggtctctgtcccccctaaggagtcttttttggggggtggctatttactttaaatacatactttggtctttttgcttcatgtgttattgaaaataacgtcaggatcttacctaacattttgtcccaagaatcatactgtccaaggcttttacaagactgatctgtgagtatagtatattctttcagaaatgccctactttgaagatgacactttgattcaaagtgtttgccctgactcttcttgacatttttctttcagttcggcattgcacttctccttcctttaactgcaagatcagtcctttttggaaattggctgcctgggtgacattagttttctttacttttcaagaatcttgtgtttattttgtttcctctsaacagtgttcagaggcctccagtcctcttggatgaaatccaaacctatattcttatatagcactagctcccatagccagtcctccagtccataactctcctcttgagagccaagtcctgagaatagcatcttttctctgaagcatgtgagtcatagtttttcactgcggatcaataactcctctctgtcttctggaaatt

SEQ ID NO: 422174 - DNA, 607 bp, Homo sapiens
tctttgtgcctttatctgaatgtatgtttcatgtttctagtttgtatgtctttgagtttttacgggcatgttactgtgtgcatgggtgtgtgtgtgtgtgtgcacatgtgctagtttatatatacatatctattttgtgaaggtgtgttatgtacgtgatgttggacggatgtctctccatgtaactgaaaacatgtatgtacatgggtaagtttttgcctatgcttctctatttgtgtgatttcagtaacactctagtgtacaggctcagaacctcctatagaaatgtacagagcaccctctagtgttcaacaggagacagtgccttgcccacaacagasagcagggcctaaattgccttccataaagcaatggtccgcacatgcccatggctggctttctgggactgtccttaagaggcagaggtggatggtctggagtggggtgcccctgtgacagagaactctgtacagaatgtgactcacaggaaggtgcttgatgatgtgaggtgaaaagcagcatctgctgcctgtggggacaggatcaccagggagcaagtagggcatagggataagagtttattatgcttcattttcatttggcgagt

SEQ ID NO: 422175 - DNA, 607 bp, Homo sapiens
tctttgtgcctttatctgaatgtatgtttcatgtttctagtttgtatgtctttgagtttttacgggcatgttactgtgtgcatgggtgtgtgtgtgtgtgtgcacatgtgctagtttatatatacatatctattttgtgaaggtgtgttatgtacgtgatgttggacggatgtctctccatgtaactgaaaacatgtatgtacatgggtaagtttttgcctatgcttctctatttgtgtgatttcagtaacactctagtgtacaggctcagaacctcctatagaaatgtacagagcaccctctagtgttcaacaggagacagtgccttgcccacaacagagagcagggcctaaattgccttccataaagcaatggtccgcacatgcccatggcyggctttctgggactgtccttaagaggcagaggtggatggtctggagtggggtgcccctgtgacagagaactctgtacagaatgtgactcacaggaaggtgcttgatgatgtgaggtgaaaagcagcatctgctgcctgtggggacaggatcaccagggagcaagtagggcatagggataagagtttattatgcttcattttcatttggcgagt

SEQ ID NO: 422176 - DNA, 579 bp, Homo sapiens
aagccttctcaggattaataataaggccaaatagaagggaattaaaattaraaagaaatagcaaaatccaaggttaatgcttcgatgtcaaaatgaccaccagaagaaatgacacaatgcatctgttatcaaagtggtaaactccttctgaatttccaaaccacatttccacccaggctgcactgcctgtgctttgacatatctctgactgtgatgaccatcatctcttgtaagggattttgcagccaactctctcattatagtgtcatcttgagtatggagaagaagggaaaacaagccggtcctcctgactgtagttctgaatattgacacagaagtcgatagatcaggaattcccctgctccaggagggggatctctgagggcaaactccaaagtttgatgaatatgatgttcagcccctgcagaaccttgcttgttagtgttgcctctgcagtgtcatttactgtctgtcttttccctcgccctgatcttgaaacttctgcacggccactgaatttgcatgtgtgcatcacctggtctccatggcaactgcagaaaatcagagcagagacaaagg

SEQ ID NO: 422177 - DNA, 525 bp, Homo sapiens
gttctggttgccacagagaaatgagcaaatatcttcttagcaggcacatcatgaagacctagaaggagttccaaaccgcaacctcaaatgtgttattaactgagacggtacttacacaatttataaagtattttaatatttttcttttatgtgcttctcataaattattttttttaaaaaaactttgaaatgtacaaagtgtctcatgcctctaatcccagcaaccttaggaggctgaggtgggaggatcgcttgagcccaggagtttgagaccagcctgggcarcatactgagacttcgtctctaaaaaaaaaaaacaaaattagccaggtgtggtggcatgagcctgtggctcccagctaattgggaggctgaagtgagaggatcacctgagcctgggaggtagaggctgcagcctgggtcacaccactgcactgcagcctgggtgacagagcaacactctatttcaaaataaataattttttttttaaaaagtcaaaaataaaaaacacttcctcatctaca

SEQ ID NO: 422178 - DNA, 545 bp, Homo sapiens
tactacgattatcttttttaaaattaagttaaagctgaaagctatggatgagtgtttcttttaaattaacatcactgtattacccatacaaggctgttctctgcatttaggtgtawgcactagccatttcgtggtataagttgtagaaaagtaaacttgacttttttagcataacccacagtaagaattacattttgtgttaatgacatattatgcgacatacacattcaaaactcaaagagaagtttcataaatttgtacacacccttactacctataatgtgctctgacatttcttactctgttctctattcggttctgttttagcctattctgttttttaatagctggttgcaatccattaaactgattttgtgccactgacacagagtgagcagtagtttgaaagccagggccctctggaaggcagatcctgctctggggaaacactgcctgttttgcatatgcattgctgaaaacaggcactgctggcttaggagtaggagactggcctttcaaagttgtccaaatgtgctcctatgtaa

SEQ ID NO: 422179 - DNA, 629 bp, Homo sapiens
tggcttcaactacaaactgaattgttggttcttttcgtagtctgcctccacctcctcatctcttgaatttcattagatccacatttygctctgttctaactgaggtcatttctagaattttgagaaatttctagaaaatacatagggttatctgtcattctggtttgaaaaagtagaggaaaggaaagtctgaactcattctatctcacaatgtagttcagtggaaaatgcattatttcagaggctgggtccccttgcccttctctgggtgcctggagagagctcacaataacataagcaatttctattgcatctcctgccaaagaggaacaactctaggcaagactgtggttgtctctatttaaatttttactaaaatatttattcaaatttaatttaaatgcaaatgagtccctttccacttggcttctggatatccatgaaggcagcatattgttagtaggacctggaatttctggttggacaatgaataattccagacttaaacaggatctgcccagagatttctcttctcacaggcctgatccatctgaccactttctcagaacacaatgatgcggcatctaatgcaccattatcttcgtgacagctcagtactccatgtcaaa

SEQ ID NO: 422180 - DNA, 629 bp, Homo sapiens
tggcttcaactacaaactgaattgttggttcttttcgtagtctgcctccacctcctcatctcttgaatttcattagatccacatttcgctctgttctaactgaggtcatttctagaattttgagaaatttctagaaaatacatagggttatctgtcattctggtttgaaaaagtagaggaaaggaaagtctgaactcattctatctcacaatgtagttcagtggaaaaygcattatttcagaggctgggtccccttgcccttctctgggtgcctggagagagctcacaataacataagcaatttctattgcatctcctgccaaagaggaacaactctaggcaagactgtggttgtctctatttaaatttttactaaaatatttattcaaatttaatttaaatgcaaatgagtccctttccacttggcttctggatatccatgaaggcagcatattgttagtaggacctggaatttctggttggacaatgaataattccagacttaaacaggatctgcccagagatttctcttctcacaggcctgatccatctgaccactttctcagaacacaatgatgcggcatctaatgcaccattatcttcgtgacagctcagtactccatgtcaaa

SEQ ID NO: 422181 - DNA, 629 bp, Homo sapiens
tggcttcaactacaaactgaattgttggttcttttcgtagtctgcctccacctcctcatctcttgaatttcattagatccacatttcgctctgttctaactgaggtcatttctagaattttgagaaatttctagaaaatacatagggttatctgtcattctggtttgaaaaagtagaggaaaggaaagtctgaactcattctatctcacaatgtagttcagtggaaaatrcattatttcagaggctgggtccccttgcccttctctgggtgcctggagagagctcacaataacataagcaatttctattgcatctcctgccaaagaggaacaactctaggcaagactgtggttgtctctatttaaatttttactaaaatatttattcaaatttaatttaaatgcaaatgagtccctttccacttggcttctggatatccatgaaggcagcatattgttagtaggacctggaatttctggttggacaatgaataattccagacttaaacaggatctgcccagagatttctcttctcacaggcctgatccatctgaccactttctcagaacacaatgatgcggcatctaatgcaccattatcttcgtgacagctcagtactccatgtcaaa

SEQ ID NO: 422182 - DNA, 629 bp, Homo sapiens
tggcttcaactacaaactgaattgttggttcttttcgtagtctgcctccacctcctcatctcttgaatttcattagatccacatttcgctctgttctaactgaggtcatttctagaattttgagaaatttctagaaaatacatagggttatctgtcattctggtttgaaaaagtagaggaaaggaaagtctgaactcattctatctcacaatgtagttcagtggaaaatgcattatttcagaggctgggtccccttgcccttctctgggtgcctggagagagctcacaataacataagcaatttctattgcatctcctgccaaagaggaacaactctaggcaagactgtggttgtctctatttaaatttttactaaaatatttattcaaatttaatttaaatgcaaatgagtccctttccacttggcttctggatatccatgaaggcagcatattgttagyaggacctggaatttctggttggacaatgaataattccagacttaaacaggatctgcccagagatttctcttctcacaggcctgatccatctgaccactttctcagaacacaatgatgcggcatctaatgcaccattatcttcgtgacagctcagtactccatgtcaaa

SEQ ID NO: 422183 - DNA, 562 bp, Homo sapiens
ccagaaaaaaaaaacattcaaaatatgctattaggatattcaataaaatatttaaatattcgcaatatttagaaaagaatatgtacattcttctgactgctctgaaagttgattttccatgttgatcatgacaatgaagtggtttggagrgtcctctggctgaaggcaatttagaaacttcatcctgaattgcatgctttttgcagatgttaatgagtggattgttgttttgggttataattataatttctgggaatatggccagaaatggaatgcagtgctgaaggttggccttttcctcctctggaccctccttcataaattggtttattggaaatatttctaaagcaaaatagagacaaaagggtaggggtatagtattcacaaactagtgagataaatcttggatgacttacatgtaaacattgatgcgtcaacttgatgacctctgtagtctctggatattctcaggtagcctttgtagggagagaatacaattcttaatgctaagacctgaccgtatatttttgctaatttctcttctttcctcattgaacaccag

SEQ ID NO: 422184 - DNA, 562 bp, Homo sapiens
ccagaaaaaaaaaacattcaaaatatgctattaggatattcaataaaatatttaaatattcgcaatatttagaaaagaatatgtacattcttctgactgctctgaaagttgattttccatgttgatcatgacaatgaagtggtttggagggtcctctggctgaaggcaatttagaaacttcatcctgaaytgcatgctttttgcagatgttaatgagtggattgttgttttgggttataattataatttctgggaatatggccagaaatggaatgcagtgctgaaggttggccttttcctcctctggaccctccttcataaattggtttattggaaatatttctaaagcaaaatagagacaaaagggtaggggtatagtattcacaaactagtgagataaatcttggatgacttacatgtaaacattgatgcgtcaacttgatgacctctgtagtctctggatattctcaggtagcctttgtagggagagaatacaattcttaatgctaagacctgaccgtatatttttgctaatttctcttctttcctcattgaacaccag

SEQ ID NO: 422185 - DNA, 596 bp, Homo sapiens
ttctgtccttattttcttccttcggtattttctacttttaagagaagttactttctgcgacttgctggtttttgaaaataacatcatggcatgaatatttagttcattgattatggtatctttctttttttctggatgaatattttcattcaaagctattattccactctctgcatccattgtgcatttattcctgggctagggcccaagtagaggctaaagaaaatagaatatgaagaagtagaacacctttgttgctccgtaggacctctctgtctggcagtggacacagggcttgtgagtcctgcataatgagatcatatacgatggactgccctgaggatcagacagatacttcactcacatttccatggctcttgaaggagaacttccaacttgatggattttattactgccctggatttgacaggtcccctgttggtggggaatygaaaaggagcatttcctgcctttcctaagtccctccacagtctatgggccctatgctcacacagacccccatggaaacccacccacagtctgcactcccccgttcccagctgcacagacagatcaacatgcagaaacagatgcac

SEQ ID NO: 422186 - DNA, 549 bp, Homo sapiens
ttcttggaggtgtattatctttgaaaaatcaattgtgctgttacctctattccctccaaagggagagaaagtgcccatcttcttatcccaaaccccccaaaggaagaggatccaacagggcgggctatttgtaggcattaagatgcaacccctatgactgggggagatggtggcctgagtatgattttccagggcagtgaaagggagatgtgcctataaaagcttagctctggggagcarccctgggctttcagattttcccaagaccagagacacaggtatgttttatctctaagcaaggcaagtgatacaatctacaaagacattggcacaaaagttgaaggcattttaatttttagcatcaaagaataaaataaaacaaagcgaagagcacatgaaaagaatagtcaccttttctttggaaatgaagctgatgagaatatcagaaggaacatgcattgctcagtaagttgttttcctgcaaaggttcctaatcatctcaacaaatcatagttctattaatttgaaattgatgtaaagttggaggaa

SEQ ID NO: 422187 - DNA, 610 bp, Homo sapiens
tggcaagtgattgaagctgtgtttcggttataagtggacttcgaaggggctggtcattgggtaattttccctttacatatttgtgcataaaatatgttacctttataataaaaaagttaaaatttccataaagtagaaaagtccttttagatttttgtttgtttgtttgtttgtttgttttgagacagatttgctcttgttgcccaggctggactgcagtggtgcaatcttggctcacggctcaccgcaacatcygccacctgggttcaagcaattctgcgtcagcctcccgagcagctgggattacaggcacgtgcctgctaattttgtatttttaatagagacatagtttctccatgttggtcagactggtcttgaactcccaacctcaggtgatctgcccacctcggcctcccaaagtgctgggattacaggtgtgagccaccgtgcctggctgattgacttttataattaaaatgcacactatatactagagtttttcaaacatatgaagccatgctttggactttaaattgcgtgagtgagttcatagaatcaaggtttttttcagctgccgccactgctataccttttgaacaactccagactg

SEQ ID NO: 422188 - DNA, 610 bp, Homo sapiens
tggcaagtgattgaagctgtgtttcggttataagtggacttcgaaggggctggtcattgggtaattttccctttacatatttgtgcataaaatatgttacctttataataaaaaagttaaaatttccataaagtagaaaagtccttttagatttttgtttgtttgtttgtttgtttgttttgagacagatttgctcttgttgcccaggctggactgcagtggtgcaatcttggctcacggctcaccgcaacatccgccwcctgggttcaagcaattctgcgtcagcctcccgagcagctgggattacaggcacgtgcctgctaattttgtatttttaatagagacatagtttctccatgttggtcagactggtcttgaactcccaacctcaggtgatctgcccacctcggcctcccaaagtgctgggattacaggtgtgagccaccgtgcctggctgattgacttttataattaaaatgcacactatatactagagtttttcaaacatatgaagccatgctttggactttaaattgcgtgagtgagttcatagaatcaaggtttttttcagctgccgccactgctataccttttgaacaactccagactg

SEQ ID NO: 422189 - DNA, 610 bp, Homo sapiens
tggcaagtgattgaagctgtgtttcggttataagtggacttcgaaggggctggtcattgggtaattttccctttacatatttgtgcataaaatatgttacctttataataaaaaagttaaaatttccataaagtagaaaagtccttttagatttttgtttgtttgtttgtttgtttgttttgagacagatttgctcttgttgcccaggctggactgcagtggtgcaatcttggctcacggctcaccgcaacatccgccacctgggttcaagcaattctgcgtcagcctcccgagyagctgggattacaggcacgtgcctgctaattttgtatttttaatagagacatagtttctccatgttggtcagactggtcttgaactcccaacctcaggtgatctgcccacctcggcctcccaaagtgctgggattacaggtgtgagccaccgtgcctggctgattgacttttataattaaaatgcacactatatactagagtttttcaaacatatgaagccatgctttggactttaaattgcgtgagtgagttcatagaatcaaggtttttttcagctgccgccactgctataccttttgaacaactccagactg

SEQ ID NO: 422190 - DNA, 610 bp, Homo sapiens
tggcaagtgattgaagctgtgtttcggttataagtggacttcgaaggggctggtcattgggtaattttccctttacatatttgtgcataaaatatgttacctttataataaaaaagttaaaatttccataaagtagaaaagtccttttagatttttgtttgtttgtttgtttgtttgttttgagacagatttgctcttgttgcccaggctggactgcagtggtgcaatcttggctcacggctcaccgcaacatccgccacctgggttcaagcaattctgcgtcagcctcccgagcagctgggattacaggcacrtgcctgctaattttgtatttttaatagagacatagtttctccatgttggtcagactggtcttgaactcccaacctcaggtgatctgcccacctcggcctcccaaagtgctgggattacaggtgtgagccaccgtgcctggctgattgacttttataattaaaatgcacactatatactagagtttttcaaacatatgaagccatgctttggactttaaattgcgtgagtgagttcatagaatcaaggtttttttcagctgccgccactgctataccttttgaacaactccagactg

SEQ ID NO: 422191 - DNA, 687 bp, Homo sapiens
gattgacttttataattaaaatgcacactatatactagagtttttcaaacatatgaagccatgctttggactttaaattgcgtgagtgagttcatagaatcaaggtttttttcagctgccgccactgctataccttttgaacaactccagactggagcgagcttgctctgacttgcctttgcaaagccacattccgttttctctgcttaataattwgaaacttctccttgtccatgggccccaaggagatgccatcctttctcactctccccattttcaagtgatgattaatgcgaagttgaatcctgtcactttgcaattttatttagacatgtacagtagattaaatacaagggtgtctaatgatgaatatgacacaattttttttaatccatgtcttctcaggaattggcttgtcttagctacaaaaaggaagcccatactatatcaaacccatgctcgcatttctcattagtatctatcatgtgagattcagccaaatgatatgtcaccagagtttctgcaaggagaagtttatgctgaattttgcaaatgattccatagattattccagaacccaccttgagtaaaagataatggaaacaaattgttttaagcccaacttcagaaatgttcttggaaacggccttgggcaaccctggctctctatgtgtggctctgaggccc

SEQ ID NO: 422192 - DNA, 687 bp, Homo sapiens
gattgacttttataattaaaatgcacactatatactagagtttttcaaacatatgaagccatgctttggactttaaattgcgtgagtgagttcatagaatcaaggtttttttcagctgccgccactgctataccttttgaacaactccagactggagcgagcttgctctgacttgcctttgcaaagccacattccgttttctctgcttaataatttgaaacttctccttgtccatgggccccaaggagatgccatcctttctcactctccccattttcaagtgatgattratgcgaagttgaatcctgtcactttgcaattttatttagacatgtacagtagattaaatacaagggtgtctaatgatgaatatgacacaattttttttaatccatgtcttctcaggaattggcttgtcttagctacaaaaaggaagcccatactatatcaaacccatgctcgcatttctcattagtatctatcatgtgagattcagccaaatgatatgtcaccagagtttctgcaaggagaagtttatgctgaattttgcaaatgattccatagattattccagaacccaccttgagtaaaagataatggaaacaaattgttttaagcccaacttcagaaatgttcttggaaacggccttgggcaaccctggctctctatgtgtggctctgaggccc

SEQ ID NO: 422193 - DNA, 687 bp, Homo sapiens
gattgacttttataattaaaatgcacactatatactagagtttttcaaacatatgaagccatgctttggactttaaattgcgtgagtgagttcatagaatcaaggtttttttcagctgccgccactgctataccttttgaacaactccagactggagcgagcttgctctgacttgcctttgcaaagccacattccgttttctctgcttaataatttgaaacttctccttgtccatgggccccaaggagatgccatcctttctcactctccccattttcaagtgatgattaatgcgaagttgaatcctgtcactttgcaattttatttagacatgtacagtagattaaatacaagggtgtctaatgatgaatatgacacaattttttttaatccatgtcttctcaggaattggcttgtcttagctacaaaaaggaagcccatactatatcaaacccatgctygcatttctcattagtatctatcatgtgagattcagccaaatgatatgtcaccagagtttctgcaaggagaagtttatgctgaattttgcaaatgattccatagattattccagaacccaccttgagtaaaagataatggaaacaaattgttttaagcccaacttcagaaatgttcttggaaacggccttgggcaaccctggctctctatgtgtggctctgaggccc

SEQ ID NO: 422194 - DNA, 443 bp, Homo sapiens
acactcaaatcagtctcatccaaggctcataagcaggagcttttcaaagacagtgtggggtaagggccggtggttgctaggcaatgagtgcttgctgctgatgggttggggcagagatgaagtcataggagatccaagctgtcctcttgcattgaatcacttctgggtggggtcacgggagtgagattggtctacatggagacatggtgtcagatatcaaaaaaaaaacaaacaaacaaacaaaaaaacaaacaaaccaaaaaaccctgaaaatgtattatatttcaaaaggtcaatctataatagtggtgttatctgctggaatgactgacaatgtatgtccacactttagcagaattcagattccccttctcccccagcctgatggcctttcattagctttacaaaggyggttgagttttggggaagtgctattatcattt

SEQ ID NO: 422195 - DNA, 552 bp, Homo sapiens
atgactcagggcctgcctctgggtcacactgagcatggccgcagcagacacgtcctcaccctcttmctgctccattctgctgctcctcattcgttctccaaggcaaaggataatgaagatgaatgtaacaatcacagcatctgacacttcctgaaagctcactatagtcaggactgttctaagtgacttatatttacgagaaccctacaaaatgggtaacatcatgtgcctcatttgacagatagaggggctaaggctcagagagggtaaggaacttgctattagctgcacagctaatgaggacagggttgggctttgaacaccaaatgcctgtttccagaaccccctttcgcaagcatacatacccccctttgtctaacttcctaaaccaagaacccaggagtcatcccaaaccctgtaatataggagttaagaaatcgctcaggcagatagtaagggtatgagagtgctcggtaagcctgttttttttttaatgaaaagcagccccagatcattttctaacaaacagcagcctgtaaagtcgaactgcag

SEQ ID NO: 422196 - DNA, 552 bp, Homo sapiens
atgactcagggcctgcctctgggtcacactgagcatggccgcagcagacacgtcctcaccctcttcctgctccattctgctgctcctcattcgttctccaaggcaaaggataatgaagatgaatgtaacaatcacagcatctgacacttcctgaaagctcactatagtcaggactgttctaagtgacttatatttacgagaaccctacaaaatgggtaacatcatgtgcctcatttgacagatagaggggctaaggctcagagagggtaaggaacttgctattagctgcacagctaatgaggacagggttgggctttgaacaccaaatgcctgtttccagaaccccctttcgcaagcatacatayccccctttgtctaacttcctaaaccaagaacccaggagtcatcccaaaccctgtaatataggagttaagaaatcgctcaggcagatagtaagggtatgagagtgctcggtaagcctgttttttttttaatgaaaagcagccccagatcattttctaacaaacagcagcctgtaaagtcgaactgcag

SEQ ID NO: 422197 - DNA, 432 bp, Homo sapiens
tcttttactcactttcatttcgtatcatatactgccaccatttttggcttagacacaatcacgaacctctgaatctccctgaatgtaatcatggagcagtggtctacacaactcatctcagacgatgtatttgaagattgaaaccaaattcacatttatctgagtacagcygtaaagtgagtagcattaggataaacatcatgtcttccagcattcacctggaggtgtagacagtgaaacccaaggagtacatttgttagttcccaaagaagagtttttgtgattatctgaaagaaatctttgattggcacagaaaataagctttaaacaagggctgactggaagacagggaatggggaattcaatagtgattaacacaatccaaatatttcctgtgacaatatttctggggtctagggagatgccatttca

SEQ ID NO: 422198 - DNA, 432 bp, Homo sapiens
tcttttactcactttcatttcgtatcatatactgccaccatttttggcttagacacaatcacgaacctctgaatctccctgaatgtaatcatggagcagtggtctacacaactcatctcagacgatgtatttgaagattgaaaccaaattcacatttatctgagtacagctgtaaagtgagtagcattaggataaacatcatgtcttccagcattcacctggaggtgtagacagtgaaacccaaggagtacatttgttagttcccaaagaagagtttttrtgattatctgaaagaaatctttgattggcacagaaaataagctttaaacaagggctgactggaagacagggaatggggaattcaatagtgattaacacaatccaaatatttcctgtgacaatatttctggggtctagggagatgccatttca

SEQ ID NO: 422199 - DNA, 649 bp, Homo sapiens
tctgctctggtctaacttgaaataaagtttaaagtttctacaccaaatttatgtatctacatatactactaagtcaaaaacatatgagaccagaaacagaatttttcttagctattcatttttcttaaatcctgtgctccatcagtttaatatttgttgacagatttttagctatcttgctctgttattgttctaatacactcactcactcaacccttcctcacttgtctcaactgccacaccctgcagatgtcgttctaaattatgctccaacctaaagcagaccyttagcactgttccatgatgtgtcattgtctctctgtccaaatccttctttattctccataaccttctcttatttatacaacaagccttttaaaaatacccggtccaggttagatgtgactctcagggggctaacagtctagaagaagagacaggcatcaaacatgcatggcagataaattgttacacggcagttgtaataagtcatgttgagtaaaagaatgaggtgcaagtcttcttgctgaaagtggcatttgagggaacattgaaatgttgaaaagagttaattagacaaagtcgaggaggtcacttcagaaatgaagaaccacttatgccaagctcttgaggcagaaatgcaataaca

SEQ ID NO: 422200 - DNA, 649 bp, Homo sapiens
tctgctctggtctaacttgaaataaagtttaaagtttctacaccaaatttatgtatctacatatactactaagtcaaaaacatatgagaccagaaacagaatttttcttagctattcatttttcttaaatcctgtgctccatcagtttaatatttgttgacagatttttagctatcttgctctgttattgttctaatacactcactcactcaacccttcctcacttgtctcaactgccacaccctgcagatgtcgttctaaattatgctccaacctaaagcagacctttagcactgttccatgatgtgtcattgtctctctgtccaaatccttctttattctccataaccttctcttatttatacaacaagccttttaaaaatacccggtccaggttagatgtgactctcagggggctaayagtctagaagaagagacaggcatcaaacatgcatggcagataaattgttacacggcagttgtaataagtcatgttgagtaaaagaatgaggtgcaagtcttcttgctgaaagtggcatttgagggaacattgaaatgttgaaaagagttaattagacaaagtcgaggaggtcacttcagaaatgaagaaccacttatgccaagctcttgaggcagaaatgcaataaca

SEQ ID NO: 422201 - DNA, 461 bp, Homo sapiens
tgattatggtctccactttcctgtctaattttctgtagggtaattcaacctgtatttccccatctcttaatgagaatgaatagctacacagtctgtttcaggggctttaattgtttcctagacattgcggatcttttctaatagtgcttgtgatgcttgagacaaagtccccattcttgaatggtttctgccaatccgactttgtgaataaactctaatgacaatatttttgagaaaaccatcgtaagaatgccatcaatgtcttggaagtgaattataggctataggagagccctgcggggagggagggagcagggagcctgcagcagtactgaccaaatctttcatgttcctaactaygatgaaacaaagttgttgcttttttttcaaattgccctagttaaaagcagtgaacaaactactcaatcttcaccccatgacaattttcttgtctctgtatg

SEQ ID NO: 422202 - DNA, 649 bp, Homo sapiens
ccttgcatattaatattattttcaactttgatttctttacagacattttttaaggatcgactatccattttgtggtttaattaaaaactaggaaatattatagtatataactgcgaagttaggctcatgcaaactgtcatagattgtagcttactgaaagtgatcacatgggagagggttccactgtaaaccaccttgctggggaatgaacacactattctcaygattctgcattctctgcatggcatgcaaactgaaggagggtcctccattttcaatccatatactaaacattggtaacatttatttttttcctataaattttggataaaagaactccaaccagaaggtctagcatgcccttttggaggatattttcaatattaaagcaagactggagattagagtattggcctaggagaaggggacagaggaagatgctgagctcaccttagtccttgccctttagccttgcagatgttattcagtgatgctcagaggatcatacaaaagctctataataataaactggaatgtgcttttccccagcctccctgtacatatatatctctatgaattcatatggaaggagatggagctaagtagctcaggtgggacaagacatgattcagaaatccaagcacaggca

SEQ ID NO: 422203 - DNA, 587 bp, Homo sapiens
attagagtattggcctaggagaaggggacagaggaagatgctgagctcaccttagtccttgccctttagccttgcagatgttattcagtgatgctcagaggatcatacaaaagctctataataataaactggaatgtgcttttccccagcctccctgtacatatatatctctatgaattcatatggaaggagatggagctaagtagctcaggtgggacaagacatgattcagaaatccaagcacaggcacatttgctactataactttaatcattttgatttttgaataaggcgatcactgcaaactgcacattttcctggcagtaaagtaagtttcaakgaactccttatgtagaaacacatggctctggtatattttcatcaacatatatagctcctgcagtttgacgttattcagtagtattccttcatttgttctatatttctgtaaagaggataataaaataccagcttcaaatcattttagtcacagctgataggattataatatcaaaattccatttcttttatatattgtattgattattgacactgaattggagtgacttactattacatgctaaata

SEQ ID NO: 422204 - DNA, 568 bp, Homo sapiens
ttttaaaattaaacaacttacccttaaataacccaagaaatggaatctgttataawtgaaaagagaaggagtgtctagaagtcagtagattttaatagttaaggaagcttgagacctaaaagaacaagtgtttctttcacaaatggatgtgaattgcaccacggagtaggagagactccagtaccacctctggaacttgagggctccgaggtgtaaaaatgaatattctttactagagagagcagcagagaacctgtactatcagaggagagttctatttcaattgggagagaaaattagaggcacatattggtgaagaagcttaggattttttgaaatacctgaaattcagaaacataattatgaataaacatattactagaaaatttcaatgcaggttaaaggtagtgacaggcaaatgctgtgtttaaataaaaaattgatcttactcttttggtatttattttgatgactttaaaattgccagagggttcaacagacatccctaatcatttccatccaacttctagctattcccaaagccttatccacccagaaatacaatcat

SEQ ID NO: 422205 - DNA, 568 bp, Homo sapiens
ttttaaaattaaacaacttacccttaaataacccaagaaatggaatctgttataattgaaaagagaaggagtgtctagaagtcagtagattttaatagttaaggaagcttgagacctaaaagaacaagtgtttctttcacaaatggatgtgaattgcaccacggagtaggagagactccagtaccacctctggaacttgagggctccgaggtgtaaaaatgaatattctttactagagagagcagcagagaacctgtactatcagaggagagttctatttcaattgggagagaaaattagaggcacatattggtgaagaagcttaggattttttgaaatacctgaaattcagaaacataattatgaatamacatattactagaaaatttcaatgcaggttaaaggtagtgacaggcaaatgctgtgtttaaataaaaaattgatcttactcttttggtatttattttgatgactttaaaattgccagagggttcaacagacatccctaatcatttccatccaacttctagctattcccaaagccttatccacccagaaatacaatcat

SEQ ID NO: 422206 - DNA, 508 bp, Homo sapiens
tgtaagtttcttatactaatttttgtgtttgccttttttttttttcttggtctattctgccctcatttcctccttcttcccttcatcgttttccatggtcaagtcttaraactcaccctaaggcccgcatgtttactgcagacattaagaattaacagccatggtgcagtttgacataagcgtctcagtggcccctgtgggaatttacagacagcaccgtgtggcatgagctgtaaaaagaagcgttaaactagtacctataaaaatgtgtgcttaaagcctagaatgaaaatattgtttggaactttcaatattaaaatggctctggatttattgtgcctttgaggctgactgagttttgcgcagcccggttttatatgtgatagtgctatttttgttggtcgacacaacatgataacatcttttgatgaaggtccatgaaactgtgggttggaagcctttaggggggtcaccaaaagaaatgcagtcctttaaatgtcagcaaaat

SEQ ID NO: 422207 - DNA, 508 bp, Homo sapiens
tgtaagtttcttatactaatttttgtgtttgccttttttttttttcttggtctattctgccctcatttcctccttcttcccttcatcgttttccatggtcaagtcttagaactcaccctaaggcccgcatgtttactgcagacattaagaattaacagccatggtgcagtttgacataagcgtctcagtggcccctgtgggaatttacagacagcaccgtgtggcatgagctgtaaaaagaagcgttaaactagtacctataaaaatgtgtgcttaaagcctaraatgaaaatattgtttggaactttcaatattaaaatggctctggatttattgtgcctttgaggctgactgagttttgcgcagcccggttttatatgtgatagtgctatttttgttggtcgacacaacatgataacatcttttgatgaaggtccatgaaactgtgggttggaagcctttaggggggtcaccaaaagaaatgcagtcctttaaatgtcagcaaaat

SEQ ID NO: 422208 - DNA, 583 bp, Homo sapiens
tatattcgctcctgttataacacctgtgatttcattttctgggagaatggatcacaaagaaagacaggggaaaagtggccagcatggtaggggatgtgyggaaggtaaaaattcacattctcacattacaaagcttttagtttattcccaaatcgtaattaatcacaaaaactggtatggattgtttgcagaagacagagtgggttaaaaaggcagagaaacattgctgtagcctcttttcagacagacagaaatgtatgcttttagtttcagtttataagaaaaccctaaactaattatcagccccttggaaagtattgtactcttggaaacattagtattttattgcaattgtataagttctttaagagaaagttcctcagtagtagccatgatagcctggctcagtgctgtaggacttagagaaaaattgacatactttcatggtaaccataaggtaattcatacaaccagaaaaagagactcacagtggcctgccatacttgggagtttactctagaagcatgttgttggaattagttaaaagcttagggaaaacactctgactcttacttagtgagaa

SEQ ID NO: 422209 - DNA, 583 bp, Homo sapiens
tatattcgctcctgttataacacctgtgatttcattttctgggagaatggatcacaaagaaagacaggggaaaagtggccagcatggtaggggatgtgtggaaggtaaaaattcacattctcacattacaaagcttttagtttattcccaaatcgtaattaatcacaaaaactggtatggattgtttgcagaagacagagtgggttaaaaaggcagagaaacattgctgtagcctcttttcagacagacagaaatgtatgcttttagtttcagtttataagaaaaccctaaactaattatcagccccttggaaagtattgtactcttggaaacattagtattttattgcaattgtataarttctttaagagaaagttcctcagtagtagccatgatagcctggctcagtgctgtaggacttagagaaaaattgacatactttcatggtaaccataaggtaattcatacaaccagaaaaagagactcacagtggcctgccatacttgggagtttactctagaagcatgttgttggaattagttaaaagcttagggaaaacactctgactcttacttagtgagaa

SEQ ID NO: 422210 - DNA, 528 bp, Homo sapiens
gcacatgtaaattcatggagagcccacatttcccctcaggtcctacacgtgggcattaatagaatgggcacttgaacccttaactgctaaaacttaagtaagagcaatccccaatttcccagagcaaattcttgaggaaattagctgctgagtaattttttatgaaggagaagagggtaatgagaagcaagtaatgtagataatgaaattggaggcagtttcaccttgggataacctgtttccattgtttaattaaaaatatacattttacaggctctgtataaatgatatggcttcatcggcacaatagactctttcacgaaactgctctaattatactgcggaattacctgggatccttacagtcaaaatgaatgaatcccaatmttttcaatatcatataggcaaagatggcttcttgctttaaaatatccctccacgttctttgttatcttggcagtgaaagccagatgtgcctgctgtataaacagacatccttgttttcagtgtcttgtcttatagtacaga

SEQ ID NO: 422211 - DNA, 635 bp, Homo sapiens
taatagtaatgtaacaaaattggttcattaatgacaaaaaataaaamttctaatatattaacaataggggaaactgtgtggggagtatacgagaactctctgtactatcttctcaacttttctataaatctaaaactgttctgaaaaataaagtctactaaaagtaagtaaataaatacagtggtcaattcaaaacatgacacacacatgcacacaccccagaaggtcagcgctctgccctgccatggtgtctttctttcctctcggtgctttacactgacaatagactgtttagcatctcagtatgtgccatattggttgccagtggtgttgggccatggactcagctggttcagggatgtaattaataggtgttgctctgaagttctagcttttggctactcacaaaatgcttcattccaaagtgggaaagtagagattttcatatctgaacttttaagtacaaactaacattttatttcagtagaaagttgtgccaattttttggtaaaacttacagcaggtaatcagtattattttctgtattgattttaatttgaggaaaattagtgtgaaagtgtttattatccatcaattgcatacatgagcacatgctttttttgaagtaaagtcat

SEQ ID NO: 422212 - DNA, 635 bp, Homo sapiens
taatagtaatgtaacaaaattggttcattaatgacaaaaaataaaacttctaayatattaacaataggggaaactgtgtggggagtatacgagaactctctgtactatcttctcaacttttctataaatctaaaactgttctgaaaaataaagtctactaaaagtaagtaaataaatacagtggtcaattcaaaacatgacacacacatgcacacaccccagaaggtcagcgctctgccctgccatggtgtctttctttcctctcggtgctttacactgacaatagactgtttagcatctcagtatgtgccatattggttgccagtggtgttgggccatggactcagctggttcagggatgtaattaataggtgttgctctgaagttctagcttttggctactcacaaaatgcttcattccaaagtgggaaagtagagattttcatatctgaacttttaagtacaaactaacattttatttcagtagaaagttgtgccaattttttggtaaaacttacagcaggtaatcagtattattttctgtattgattttaatttgaggaaaattagtgtgaaagtgtttattatccatcaattgcatacatgagcacatgctttttttgaagtaaagtcat

SEQ ID NO: 422213 - DNA, 635 bp, Homo sapiens
taatagtaatgtaacaaaattggttcattaatgacaaaaaataaaacttctaatatattaacaataggggaaactgtgtggggagtatacgagaactctctgtactatcttctcaacttttctataaatctaaaactgttctgaaaaataaagtctactaaaagtaagtaaataaatacagtggtcaattcaaaacatgacacacacatgcacacaccccagaaggtcagcgctctgccctgccatggtgtctttctttcctctcggtgctttacactgacaatagactgtttagcatctcagtatgtgccatattggttgccagtggtgttgggccatggactcagctggttcagggatgtaattaataggtgttgctctgaagttctagcttttggctactcacaaaatgcttcattccaaagtgggaaagtagagattttcatatctgaacttttaagtacaaactaacattttatttcagtagaaagttgtgccaattttttggtaaaacttacagcaggtaatcagtattattttctgtattgattttaatytgaggaaaattagtgtgaaagtgtttattatccatcaattgcatacatgagcacatgctttttttgaagtaaagtcat

SEQ ID NO: 422214 - DNA, 586 bp, Homo sapiens
ttaacactgttattatacggtaggagtcaagccttggacctacaatgccaaggagcaagattttttaaatgaaaacttcgagaccagatccacatttaaaaattgaggagtatccaaatagatgaatatgcataagaaataacagcatatatggtaatgaatatacatctacttttcttggtagttctcatcctttagcttctgtttccatcattatatttacctcattcatactccaaacatatttcctttcatagctttggcttatctttatcctcaaagaaatacataattgttcatgacacatcaaaatcaggaaagtatacagactgaattaaaggagacggacttttattaagcatgaagtcctgcatctaagaataggaagacarccatgtatctattcttagttgtcacaataaaatatctcattgtctaaactaggcaatttgataaagtatatctgaattcactagaggttgtaaaaaagaaatgataattctcatgtttcatggctaggttagaccttaaaagtcaacttggtattgtatcattcaactacagtgctttctttaggttgaaacaa

SEQ ID NO: 422215 - DNA, 586 bp, Homo sapiens
ttaacactgttattatacggtaggagtcaagccttggacctacaatgccaaggagcaagattttttaaatgaaaacttcgagaccagatccacatttaaaaattgaggagtatccaaatagatgaatatgcataagaaataacagcatatatggtaatgaatatacatctacttttcttggtagttctcatcctttagcttctgtttccatcattatatttacctcattcatactccaaacatatttcctttcatagctttggcttatctttatcctcaaagaaatacataattgttcatgacacatcaaaatcaggaaagtatacagactgaattaaaggagacggacttttattaagcatgaagtcctgcatctaagaataggaagacaaccatgtatctattcttagttgtcacrataaaatatctcattgtctaaactaggcaatttgataaagtatatctgaattcactagaggttgtaaaaaagaaatgataattctcatgtttcatggctaggttagaccttaaaagtcaacttggtattgtatcattcaactacagtgctttctttaggttgaaacaa

SEQ ID NO: 422216 - DNA, 589 bp, Homo sapiens
gatatagatagagacagagatatggcatttcatcaatgaaagaagtttcttccttgtaccaggctcarttctaggcacttcacacatattatttcagaaattcacaagacagcctcctggccctcaaggagttcatcttcaggaatgagggaggtttttgtcacgagacatttcagaggaatgatattgaaactgagccttgggaggcgctggagaggagcaagggttgcaaatgcaggagcagcgtgggcagacccagggttgaacagcacattctgcagcatgcaccatgcaaaggggctggcagttttgccacattgataaaaatgcacctttattacttggcaggccctacatccactacatattataatgtccacagccaatattcggggaagctaggaaggaaatgttataaaggaggaaactacagtcaatgggaggcattacacaaacttaaggcaaagaatcacacattctgattttctttttggattaaaaaaaaatccagcaaaagtaatctgagtgtatgtcactcacttttctttaaaaagaaaagggtacagattgtaggaatatgacctcgaag

SEQ ID NO: 422217 - DNA, 369 bp, Homo sapiens
gtaaaactcagtctaaaaacaacaacaacaaaaacaaaacaaaacaaaaaactaatgagcttctgcacagcaaaagaagctatcaataaagtaaacaacctacagaatgaaaaaaatattcacaaactattcacaaactatgcatctcacaaagatcaaatatccagaatctataataaacaaataatttgacaagcaataaaccaataaccccattaaaatatgagcaaaagacatgaacagacacttctcaaaagragtcatacaagcagccaacaaacatatgaaaaaatgctccacatcactaattatcagagaactgcaaatcaaaccacaatgagataccatctctcaccagtcagaatggct

SEQ ID NO: 422218 - DNA, 570 bp, Homo sapiens
ctaataacgccacagcttgattacaactccctgatgccttctttatggacatcccaggctttgggtatgtccataatagcctcttgaccaaagatggttcaaatatcgggcatatacaagaggctaaacccttaaatgtttgaataaatctagctatgttcttcctgaaactgcccaatccccactgaaaaatggagtccgttgaaagactgtggtccattatctctacatacctccagaaaagagttattatccctatactagcccttgtgatccttttgttctgtctgttacaaacacaaattagtatgactgccactttgtacaagatttragggccattaacacaattttactttcctgctttcctattatctcaaactcaaatactgtcctatctacaatctctagaactgctgcttactttacagtggtagatccatgcttagcattctttagtaattcttttcttccagactcactgtatctatttacactcacttggaaacaatactcatgaacaattgtgaccaagaatttacagaaacaccctcttacttcttggaaata

SEQ ID NO: 422219 - DNA, 573 bp, Homo sapiens
gctctctcgcctgcctccactctccattgtctttaactcctcctcattcttcagtctgaggatctaaaagttctcatccttagaacagccaccctgaacccctttgtatgctcttttccttataacacatatactaatttgcaatgatctttcagtgtgattatttgatgactgtctttcctccgtaataaactctrcacttcacaagggtgaggactgaatctggtttgctcctattttatccccacaatgcttgcatgtagcagcttcttgtaaagtgattgttgaaaggttaaagaatgaaatgaacaaaatgatgtgaattaattcattcataacagtagtcaggaatgatttcatcaatggaaccggaagatttcaatgacataaactacaaatgtctgcttgtctctgcagcaggggtgctttgactctgggtttcatttacagctagtgaaacttagtggacatttaattcctctctgaaacattcttttttaaaagatatgttaatatatataattagatatccatcagatctcattgatctgagattacactatcttgttcatg

SEQ ID NO: 422220 - DNA, 614 bp, Homo sapiens
ttttatgtaaacaactagtctcctcttttgggtattgtgactgctacatttccttcaytgagggtgcctgttatttcctcactatatgatgtctctttatcatgtttagtgcttctgaccttaatctaattttgtctgattttactattctcatttatactttgttttaattttcttgatatctatttgtccatcccactatttaagcctttctttattgatagtttcttttcaatgtagttcttaaaaagagtttctttattttattttattttatttttgagatggagtcttgctctgtcgcccaggctggagtgcagtggaacaatcttggctcactgcaagttctgcctcctgggttcacgccattctcctgcctcagcctccagagtagctgggactagaggtgctcagaaccgcgcctggctaattttttttgtatttttagtagagacggggtttcactgtgttagccaggatggtcttgatttcctgacctcctgatctgcctgcctcagcctcccaaagtgctgggattacaggcgtgacgaccgcacccggctaaaaagagttattttttaagccaatgtaacaatttgcctctgaatagaatt

SEQ ID NO: 422221 - DNA, 614 bp, Homo sapiens
ttttatgtaaacaactagtctcctcttttgggtattgtgactgctacatttccttcattgagggtgcctgttatttcctcactatatgatgtctctttatcatgtttagtgcttctgaccttaatctaattttgtctgattttactattctcatttatactttgttttaattttcttgatatctatttgtccatcccactatttaagcctttctttattgatagtttcttttcaatgtagttcttaaaaagagtttctttattttattttattttatttttgagatggagtcttgctctgtcgcccaggctggagtgcagtggaacaatcttggctcactgcaagttctgcctcctgggttcacgccattctcctgcctcagcctccagagtagctgggactagaggtgctcagaaccgcgcctggctaattttttttgtatttttagtagagacggggtttcactgtgttagccaggatggtcttgatttcctgacctcctgatctgcctgcctcagcctcccaaagtgctgggattacaggcgtgacgaccgcacccggcyaaaaagagttattttttaagccaatgtaacaatttgcctctgaatagaatt

SEQ ID NO: 422222 - DNA, 580 bp, Homo sapiens
taccatggagggtctttttatagaactgtaaaacatctgaatgttcaatcaatcrtttagtttcttatgaataattttttttaaacgccaccaagaaccaggcctcctgagcactggccagtagcttctttctggaaatacacaaacatgtacatatctctataccaaaaactggtgtaaaaatttccacaacataaaagagctgctttgtgtatgttttctgacccccagagaaatgctaataaattcgcattcaaaggacattatgtgttcattctacttctataaagtctccttcggtgcagtttgccccaggggcaaatgtgccaaactatgaaaaaatatttaaaatatcatcattctcatctgctacttcactttaacttttattgaaacattcagacgttgttaaaggacaagaaagttgtttggggatgtttctgttgttgggaacaacagctaggtaaatgagtgctattagtgaaggtaaaaaatcttcccaggaacttcattctctagacttgcatggcaatagactgctattttaatgattgcatacattaaaagtgccgaggcttga

SEQ ID NO: 422223 - DNA, 580 bp, Homo sapiens
taccatggagggtctttttatagaactgtaaaacatctgaatgttcaatcaatcatttagtttcttatgaataattttttttaaacgccaccaagaaccaggcctcctgagcactggccagtagcttctttctggaaatacacaaacatgtacatatctctataccaaaaactggtgtaaaaatttccacaacataaaagagctgctttgtgtatgttttctgacccccagagaaatgctaataaattcgcattcaaaggacattatgtgttcattctacttctataaagtctccttcggtgcagtttgccccaggggcaaatgtgccaaactatgaaaaaatatttaaaatatcatcattctcatctgctacttcactttaacttytattgaaacattcagacgttgttaaaggacaagaaagttgtttggggatgtttctgttgttgggaacaacagctaggtaaatgagtgctattagtgaaggtaaaaaatcttcccaggaacttcattctctagacttgcatggcaatagactgctattttaatgattgcatacattaaaagtgccgaggcttga

SEQ ID NO: 422224 - DNA, 579 bp, Homo sapiens
ctgctacacagttgtaattatagtagatgcccatttaaaaaaaatgtagattttttttttttgagactgagttttgctcctgtcccccaggctggagtgcaatggcgcaatcttggctcactgctacctctgcctcccaggttcaagggattgtcctgccacagccccctgagtagctgtgattacaggtacacaccaccacgcccagctaattattttatttttagtagagatggggtttcaccatgttggccaggctggtattgaactcctgacttcagatgatgcacctgcyttggcctcccaaagtgccgggattacaggtgtgagccatcgggcctagcaaacaaaaaatgtagattttaaacaaaaatctaatattaaaaatttactgttccatctttatgcatttactttcagtattacctcaggacggattccccacagtgaaagtttcagttcaagagatattaaacacttttatgtttcccatacatacatattgacaaattgactttcaaatatttgttccaatttacctcaacctcattgcaaacgctatttctttgttgctgtccc

SEQ ID NO: 422225 - DNA, 578 bp, Homo sapiens
gtattataccaataatctattccttgtagttttgttgtgagtattaaatgagttaaaacacacaaagatcttagaactgtgggtatctggcaagaatgtcagcaatacataaatatgtgaaacttctatctctaaactataatgtccacaagggcagtgatttatgcttaaataatatttgttaatcagtgaatgacaagtggttgrgaaggcttggagatggcctcactaacttggatcaaactgtgaggaaactttcagttgaaatattgtcagcaaaatctctatcaatataatgatctttttcttgttgactatacagtgcttacatttgttaaaatggcctttattttatagaagttttatgtttatagaaaaattaagcagaaagtacagtttccttgttttccttccccagcatgtactttctcctcttattgacctcttccattagtatggtatatttgctatgactgatgaactaatactaacacatattatctaaagtctataggttagattaaggttcactctttgtgttgcacagttctgtgaatattgacaagtgtataatatca

SEQ ID NO: 422226 - DNA, 585 bp, Homo sapiens
ctggtactaaacttttgctcattccctactttcatctttgtatttacttagaaaattactggtagctagtcaatctcgaaaggcttgaatcttgcccgcatatgcatattttaaacttactgaaagtaaaattttgtcacaaactcttctggttatgcacctctttgccttagtacagtgttaaatctggaggaaaacgatcaataaattccccccaaataaagtggcagaatatttatttgtgacaataatttattataaaggttaatgaygttttttactatctggaaggagaaaggtcctgacgaataacatccaaaagaaatgctgtgcagacatttttatttcctacacgttttaaacttgaatttaagttttcctcaaacagtttttagaaaggtccaatttggcatccagcacaaggttatctgagaaataattaagtgaggtggtaaacttgccaaaatatcagtgttcccaagaattttattcctgacttagcaaatagtcttttatttgtgactattcactttttttctctatcttatatctaaatattgtttccaagggagagccagtatgact

SEQ ID NO: 422227 - DNA, 612 bp, Homo sapiens
cttttgacttacagtgagatacatgtgactctttttcttttcacttgaacacctagagactattaaaattagtattattaattcgtctaattttaacagttttgcctcaggggatagggaagccctaaaagaaggagagagatcgggaacagctggtagatggaacagtcagaacacacacwtttattgattaagttcaccatcttatatgggcgtgattcatggtaccccaaacaattataatagtaacatcaaagacaactgaacacagatcaccataagagatataataataatgaaaaagttttaaatattgtgagacttactaacacatgacacagtgacacaaagtgaacacatactctgggaaaatggcaccagtaggcttgcttgacatagcattgtcacagatcttcaatttgtaaaaaatgcagtatctgtgaagcataataaagtggagtgcagtaaaatgagatatgcctgtttataaccataaatccagaataatccactatattttctgtgtttttgtatgattttgtcttataattttaaatctatccaatatcctgtaggaaaattaagccataagcttcatgtgtaacataaatc

SEQ ID NO: 422228 - DNA, 584 bp, Homo sapiens
gggactttattcagagaaaattatatattatgattaaagagtcacattaataatgtatataaatggtgccccctgaagctttgtaacacagcaaccttgatattgtattttcccatgatgcctcacttacagaacctgccttagattgcctgaaattgaatttttgctgaaatgacttcttaaatccaaggaagyagtgcttacccgccaatatgaatatgtactcttaatgatgtaaccactcaaggccattgggactgatttgcaactagactataatctacacaaatacaagctcttaatttgcagtatttcaggtattaaaaatgaccatttttcagtagattatagtttgtcagtgctgtatttgctttcacctctctctctctctcatatatatatatatatatatatatgccaaatatatacatatgccatatatatatatatttaaaaatgtcatgctgttaaactattccatgtacttagaagattttcttacagcaacagagaatagtctctgatgaagctttgattcacaattaattagttcagcaaaaggttttgtttttggctttgtccct

SEQ ID NO: 422229 - DNA, 536 bp, Homo sapiens
tgtatgtatgcctatgcatatttgcrtatatatatataatttatacatacatacatttgcttagatatacatttacatacatataaattccgtgctgtgcacccaagtaaagatattttgaattataaaactcttgttgagaattaaataaatttatttgattatttttacatttgaagattttttaaacccacacattatttatcatattgatcatcactaaaacccatggaatttaaacatgtgtgtgggaagggtggtgaatgtggatgtggatgtgagtgtgtatacaatcttgacaaattttatgactctttcaaaatagcactttgtcgctactatttatgtatgtctactgagtaacaaaatgggagaatagcagataattactgtttaacttaacgaaaataatttggtatttaaacagaataagacaataaagtaagaatcaaagagtgatatggtttgaatatgtgtcctgcccaaacctcatcttcaattatcatgcttagtgttggaggtaagggctggtggga

SEQ ID NO: 422230 - DNA, 536 bp, Homo sapiens
tgtatgtatgcctatgcatatttgcgtatatatatataatttatacatacatacatttgcttagatatacatttacatacatataaattcygtgctgtgcacccaagtaaagatattttgaattataaaactcttgttgagaattaaataaatttatttgattatttttacatttgaagattttttaaacccacacattatttatcatattgatcatcactaaaacccatggaatttaaacatgtgtgtgggaagggtggtgaatgtggatgtggatgtgagtgtgtatacaatcttgacaaattttatgactctttcaaaatagcactttgtcgctactatttatgtatgtctactgagtaacaaaatgggagaatagcagataattactgtttaacttaacgaaaataatttggtatttaaacagaataagacaataaagtaagaatcaaagagtgatatggtttgaatatgtgtcctgcccaaacctcatcttcaattatcatgcttagtgttggaggtaagggctggtggga

SEQ ID NO: 422231 - DNA, 594 bp, Homo sapiens
taaacatgtgtgtgggaagggtggtgaatgtggatgtggatgtgagtgtgtatacaatcttgacaaattttatgactctttcaaaatagcactttgtcgctactatttatgtatgtctactgagtaacaaaatgggagaatagcagataattactgtttaacttaackaaaataatttggtatttaaacagaataagacaataaagtaagaatcaaagagtgatatggtttgaatatgtgtcctgcccaaacctcatcttcaattatcatgcttagtgttggaggtaagggctggtgggaggtgaccggatcatgggagcagtttctcatgaatggtttagcatcatttccttggtgctgttctcatgatagtaagttttcatgagatctcgttgtttaaaagtgtgtggcacatccccccatctctatcttcctcctgctctggccatgtgaagacctggctccccctttgccttccaccatgattgttcgtttcctgaggccttctcagaagctgagtagttgccagcatcctgcttcctatacagcctgcagaactgtgagacaattaagcctcttttctttataaattac

SEQ ID NO: 422232 - DNA, 594 bp, Homo sapiens
taaacatgtgtgtgggaagggtggtgaatgtggatgtggatgtgagtgtgtatacaatcttgacaaattttatgactctttcaaaatagcactttgtcgctactatttatgtatgtctactgagtaacaaaatgggagaatagcagataattactgtttaacttaacgaaaataatttggtatttaaacagaataagacaataaagtaagaatcaaagagtgatatggtttgaatatgtgtcctgcccaaacctcatsttcaattatcatgcttagtgttggaggtaagggctggtgggaggtgaccggatcatgggagcagtttctcatgaatggtttagcatcatttccttggtgctgttctcatgatagtaagttttcatgagatctcgttgtttaaaagtgtgtggcacatccccccatctctatcttcctcctgctctggccatgtgaagacctggctccccctttgccttccaccatgattgttcgtttcctgaggccttctcagaagctgagtagttgccagcatcctgcttcctatacagcctgcagaactgtgagacaattaagcctcttttctttataaattac

SEQ ID NO: 422233 - DNA, 619 bp, Homo sapiens
gactacttacggtacagtttgggatcagagagattgtggttaattttacaaatgggaattcagggactgctccaagacaaaataaagtttgagctaagttgagtcttcaaaaagaagtagatcttaaccaggcagccagagccaatttcaagggccttgctgtggtttaatgatctgctgtgaccatcttaaaattcttaataattatatctttgaacttatattttgtaagtgaaatccaaagtgacaatagagcacatatgtcaaggatattcatactaaccaggcccactgttccttgcaccccaattttcacatgaagttcacaatgccccatgaatactgcattctagtgaacccatgatcagaatttagcaagactctgaataaagaagtaagcatatgacattgttgtcttgttttctttccaaaccaaaacttcattcaaaagcagaaagaaaattattaatcatgcttcaagaaacacaaatgaccaaagaacsctgtatcctttattacttaagctacttcctttattactgaagctacttccaatcatttatgttgaaaatgatgacataaagaggaaacaaaagacagggcaaatcatacatccttt

SEQ ID NO: 422234 - DNA, 619 bp, Homo sapiens
gactacttacggtacagtttgggatcagagagattgtggttaattttacaaatgggaattcagggactgctccaagacaaaataaagtttgagctaagttgagtcttcaaaaagaagtagatcttaaccaggcagccagagccaatttcaagggccttgctgtggtttaatgatctgctgtgaccatcttaaaattcttaataattatatctttgaacttatattttgtaagtgaaatccaaagtgacaatagagcacatatgtcaaggatattcatactaaccaggcccactgttccttgcaccccaattttcacatgaagttcacaatgccccatgaatactgcattctagtgaacccatgatcagaatttagcaagactctgaataaagaagtaagcatatgacattgttgtcttgttttctttccaaaccaaaacttcattcaaaagcagaaagaaaattattaatcatgcttcaagaaacacaaatgaccaaagaaccctgtatcctttattacttaagctacttcctttattactgaagctacttccaatcatttatgytgaaaatgatgacataaagaggaaacaaaagacagggcaaatcatacatccttt

SEQ ID NO: 422235 - DNA, 616 bp, Homo sapiens
atctgtgaagagactaaaaactattgaattgtccactttaaatgtgtgaattgtatgatatgtgaattctctcttaataaagttgtttaaaattttaaaaataaaaaattgaaatctaattttttttttttttttgagacagggtctcacttggtagcctaggctggcrtacagtgacacaatcatggctcacagaagccttgaactcctcggctcaagccatcctccaacctcaccatctctagtagctgggaccacaggtgtgcaccactatgcctggctaatttatttttttcttttcttggagtgatgaggtctctctatgttgcccagggtggtcttaaactcctggacttaagtgatactcctacctcagctcccaaagtgctggggttataggcctgagccaccatgcctggccttgatcattaaagtatgactttgtactactagcaaagaaaaaaaagtaaaatgcaaaaaaacaaaacaaaacaaaacaaaacaaaaaacaaatatacaatcattccttgcatgatattttgtgatgccatcctgctgctcactttataggaaaaaactcggaattttgtcatggctgccacttgctgacccctta

SEQ ID NO: 422236 - DNA, 616 bp, Homo sapiens
atctgtgaagagactaaaaactattgaattgtccactttaaatgtgtgaattgtatgatatgtgaattctctcttaataaagttgtttaaaattttaaaaataaaaaattgaaatctaattttttttttttttttgagacagggtctcacttggtagcctaggctggcgtacagtgacacaatcatggctcacagaagccttgaactcctcggctcaagccatcctccaacctcaccatctcwagtagctgggaccacaggtgtgcaccactatgcctggctaatttatttttttcttttcttggagtgatgaggtctctctatgttgcccagggtggtcttaaactcctggacttaagtgatactcctacctcagctcccaaagtgctggggttataggcctgagccaccatgcctggccttgatcattaaagtatgactttgtactactagcaaagaaaaaaaagtaaaatgcaaaaaaacaaaacaaaacaaaacaaaacaaaaaacaaatatacaatcattccttgcatgatattttgtgatgccatcctgctgctcactttataggaaaaaactcggaattttgtcatggctgccacttgctgacccctta

SEQ ID NO: 422237 - DNA, 537 bp, Homo sapiens
caaaacatacatacatgttattcatataattcatagaaacagcaggaaccttacaggggaaaatgacttccacaaaaatataatttacaaaagtcgcaaaactgtgattgacccattaatgcctgaaaataaaaagcaaatgctaaaaccaaatagtactaacaatatccaaaagtctgaactcatgattctgtcttctgcagytattatcacccctaagccagtttctctgcttactgcatatataacccatcaaatggaacgcttctgtctaaacagaaccttctatctgtgaatattaatatgcaatccacaggagagcatctggcttatatctgagataataattatctttttatgacacagttatgagttttcctttcatgaatttttatactggaatttttcattattctggtagtctagctttagaacaaacacctgctttttacactcttagcagaatccttcaagattttgtgtttaaaacctctgactattctacataagattcttgatcctttgtcattccaggag

SEQ ID NO: 422238 - DNA, 558 bp, Homo sapiens
tagccaaaatataattatttatcctcacctctacctccaatcccttgttaaaacttaagatacccttatactccaggatatttcttcagtacaaacctaatgtttcctttaaaatttaagctagatcatatatcacttctctgtttaaaacagtccagtatttttcagctcactcagtataaaacccaagtacttagtatgacttatacaaagctgaatgaacaggctccctctcaccatttgacttcatcttccatctcatctccccttgtttacttggtttcagccacattggaatccagatgtctttagacacatcaaagatgtttccatttctagacctttgtaycttttagaaattgcttcttgcaaactctgcacagtttgtctctcacatccttgagccttctactgctagtaaaatgaacactacaaaagtattcattgactactctataaatatatagttagatggatagataaaatcttcacatatataagtgcatattatttgctaaaatttaaaaataaaacattatatatacagtgtcaaagtct

SEQ ID NO: 422239 - DNA, 553 bp, Homo sapiens
aatgaacctatgacagcctaattagctacaatttaaaatctatggaatctaatcagaagagctgaacgctgctgcaaatctgtgtatgaatgagtctttctaaatactccaatctgttgcttagtcactgattgatagtaattgctttttttcctctattgtgcataggaaaatgcccaattttgctctgataagggaggacacaacactgaagttaaatgcctaagatgtttagctccttaagtttaatcagtgagtgtttaaaaaaatcaaagtaaaattaatttgaactctgaatatagatgatttaaaatatactaccaacttcttatatattgggttggcaaagacaacatagctattaacacccgacagcatatctgaaaagcaagcaaagatgctgaaatcatgcaaatgcataaaatgcatttattaatccgtaatttgttttaaaaagctttatttatgtcatcagagataacagggctacataktttattgaatacttgagataatgaaacagctttttgaggttaacacaatctattaagca

SEQ ID NO: 422240 - DNA, 553 bp, Homo sapiens
aatgaacctatgacagcctaattagctacaatttaaaatctatggaatctaatcagaagagctgaacgctgctgcaaatctgtgtatgaatgagtctttctaaatactccaatctgttgcttagtcactgattgatagtaattgctttttttcctctattgtgcataggaaaatgcccaattttgctctgataagggaggacacaacactgaagttaaatgcctaagatgtttagctccttaagtttaatcagtgagtgtttaaaaaaatcaaagtaaaattaatttgaactctgaatatagatgatttaaaatatactaccaacttcttatatattgggttggcaaagacaacatagctattaacacccgacagcatatctgaaaagcaagcaaagatgctgaaatcatgcaaatgcataaaatgcatttattaatccgtaatttgttttaaaaagctttatttatgtcatcagagataacagggctacatattttattgaatacttgagataatgaaayagctttttgaggttaacacaatctattaagca

SEQ ID NO: 422241 - DNA, 482 bp, Homo sapiens
tttggtatagttactgaatctctttagcaacaatttcataacctatagtaagaatgttataatgtgaccttcttcaacatgtaataggaggagtaattaacattaagtaccataaaatatgtgcgtataagagctcaacacaaaatgaatgatttttggtgtttctaaaattagactgttttataaatagtaggtcctcaggaaaaaaaaaaagatgctatttctgcttcaaggtgactatamtctttgttgaaattaatagagtacttgaatcagaattttaaataatttttttaaattggtacttggtggtggcagatcactctacattgaaaatgtttcatttagtagaccaactttcctaggctctatttaattttggaagctataatgatttaaatataagtaacgaatagaatcattagatttatgaatcaattatttgtattaagatctttattgatatagattaacctacttga

SEQ ID NO: 422242 - DNA, 616 bp, Homo sapiens
aatctgcaattttttttgacctgtgagaattaacccaagctctatgtaaacacttacggaagaatcacttgattaagagatttctaggggaaaaaaaaagttcagtcacaaatatgtaaacgttcatgagcaataagtgattttctttgcrgtcagaatcaactgataatttttacttcagtttaaacgtattacaagtacatgtgtttataccttacctcttgacactcgtgaactcagtgaaagaaagtaaaagagagattttttctttcacattttcatatctaagagaatgtctttgttcaaacatctaggaactcaactgatgtgtactataaacaactggatgatttgttacattgacctctaagcttttaaatgcttttctaggaccaaaatggaagaaatgataatgtagcaaaatgaagaatgtcagagaagcctatgtgaaaccaatccaaaatgcttccggagctaaaaacacggtgcatatccatgtgcagcatttgccattttgaacatgaaaagtgctatttactgaattgtataggtagaaatcatttgaagttacactttagaaattatatgtgttatctgtaatctaaaacgcattgtg

SEQ ID NO: 422243 - DNA, 455 bp, Homo sapiens
ctgcagcagccctacagaagagggacctgaccattgaaagaaaaacaaacaagcagaaagcaataacaacagcatcaacgaaaaaagtccccacaaaatccccrtccaaggatcagcagcctcaaagatcgatactagacaaactcatgaagatgagaaagaattaatgaaaaaaagctgaaaactcaaaaggccaaagtgccttttctcctccaaatgatcccaacacctctccagcaagggtgcagaattggacagaggatgagatggacaaattgacagaagtaggcttcagtaggtgggtaatgacaaactcccctgagctaaaggagcatgttctaacccaatgcaaagaagctaagaaccttgataaaaggttacaggagctgctaactagaataactacttcagagaggaacataaatgacctgatggagctgaaaaacagcaccaga

SEQ ID NO: 422244 - DNA, 455 bp, Homo sapiens
ctgcagcagccctacagaagagggacctgaccattgaaagaaaaacaaacaagcagaaagcaataacaacagcatcaacgaaaaaagtccccacaaaatccccatccaaggatcagcagcctcaaagatcgatactagacaaactcatgaagatgagaaagaattaatgaaaaaaagctgaaaactcaaaaggccaragtgccttttctcctccaaatgatcccaacacctctccagcaagggtgcagaattggacagaggatgagatggacaaattgacagaagtaggcttcagtaggtgggtaatgacaaactcccctgagctaaaggagcatgttctaacccaatgcaaagaagctaagaaccttgataaaaggttacaggagctgctaactagaataactacttcagagaggaacataaatgacctgatggagctgaaaaacagcaccaga

SEQ ID NO: 422245 - DNA, 563 bp, Homo sapiens
attgaattaaatctcaaagatcattctgagtcccaaagaaaggtgagttaaaatgcaaacttaattaaatgcatacttacacattcttgacaatgtggaggattcaaaatagaagattcctgcttttcggragcttcagatttatattagagggacacgcaaaatccacagttgttctgaagatcaaataaacagaacctggatttagtccctaaaatgtgaaagcactataaggaaattttgctacatagatactctttgacttatgatgacgggatatctcaataaacccatcataagttgaaaatataataaatgaaaaatgcatttactaccaaataaactcattgcaaagttaaaaaaaaaaactgtaactcgagcaatagtaagtccagatgcccctcaacttagatgaagttggtttccaatgaactcatcgtgaagtcaaaaaattataaattgaacaatcataagttggggaccatctgtatgaataactgagtggcttaaaggaaagtacactgatggattagtcctacagtctagtggggaaccagcttatg

SEQ ID NO: 422246 - DNA, 603 bp, Homo sapiens
tctttgtgcctacgttatcaatgattcacttcataattcacatacctacacttcaaaaaggcagagagaaccagtctckgggaactgtcttattatacaatgtggggagagattctttgtaggaagtcactgaagcttctagactaaatgaatgatgtcatcattaactaagataaggaattgtaactaaggactaatctgcttaggctgagcaaacttaacatgccttgcttgcttttagtccctggcttctagttaatcttaaaacccacatcagctaagtcacatagctaacccttatgttttgttgactttatagagtcaataaaaagccccttgaaaagactggcctcgtaactaccatggttctctgacaaggtttctgtccttggtgtaagcaaaaaaatgtcactttctgacaggcccaggaacctaaagatgttttagggccacgagaagaaagaaacaccaatttatataggaattacaggcacagtctattagcaaatctttggcttggttagccctaagccttttacatgtctagttagaggttccttctgaaaaggttccaacaaagctaattttaagagagtctgtatg

SEQ ID NO: 422247 - DNA, 603 bp, Homo sapiens
tctttgtgcctacgttatcaatgattcacttcataattcacatacctacacttcaaaaaggcagagagaaccagtctctgggaactgtcttattatacaatgtggggagagattctttgtaggaagtcactgaagcttctagactaaatgaatgatgtcatcattaactaagataaggaattgtaactaaggactaatctgcttaggctgagcaaacttaacatgccttgcttgcttttagtccctggcttctagttaatcttaaaacccacatcagctaagtcacatagctaacccttatgttttgtwgactttatagagtcaataaaaagccccttgaaaagactggcctcgtaactaccatggttctctgacaaggtttctgtccttggtgtaagcaaaaaaatgtcactttctgacaggcccaggaacctaaagatgttttagggccacgagaagaaagaaacaccaatttatataggaattacaggcacagtctattagcaaatctttggcttggttagccctaagccttttacatgtctagttagaggttccttctgaaaaggttccaacaaagctaattttaagagagtctgtatg

SEQ ID NO: 422248 - DNA, 614 bp, Homo sapiens
ccagttcggtatcagaatgtcagaaaaaaaaaatcttgtttggaggggtacagaggagcccagttttagtaatgcaaaatataggacatttagatagaaatattcaacagtcatttgtgaatgaagctaggggatattagaatatgtggaagcttatggcttagaaatagataaaatcattcagaaaagtaacctatagaacaaagagaaataaagaccaaatcagaaatttggagtatttgattataaaaggtgaaaataatgtgtgtgtgtgtgtgtgtgtgttttgatgagaaggatgactaaaacataatcatgaagaggaagaggaactggtctcctgggactgaggaagtaagcagaattgataagacaagtataacatttaagttagagccgaaaatctcagtatttctacctagggtattaagagacaaccgcatctaagaagctgaggaattgttattgagattaagggactaaaaagggaaaagaaacggagcaggagattacastaaccaggttacacactgaaggctctccactgggagacagggtgaagtgagttggggttgaatgtaatagatttaattcattgaaggaaataagacaat

SEQ ID NO: 422249 - DNA, 564 bp, Homo sapiens
attttgtaacataataaaattattgtatacataaaactctataaatttagttactaaaataatttcatatctataccatataatatttaaaagtttaaaaattttaatattcattattttcagcatgttttgagggactgatattatgtgtatacaataatgccccaaatccttcatacttcttgaacaagtcagaaatttaaggtttatattttaaacaaatgatagccaaggccataaaacaccattggcaccttaataaaacctcaattattagaaaacaggtaattaaaacatgggcaaaagacttgaatagacattttaccaaaaacaatatatttatagaaaataagcacatgaaaaaaaatcaacgtwtttagttacaaggaaatgtaaattaaatccggaatgggacaccactaaacagctattaaaatgtctctaagaagcaaaacaacttactatgccacatgctggcaacactgtggaactggaattctcattacagttttaagaaatttcattaagatgtagctttgatgcagttttcttcctgtttcttct

SEQ ID NO: 422250 - DNA, 583 bp, Homo sapiens
aatgggccaggaagtttaaataaagagggagagaagatattttatccagatggcataagccttaaaagagaaacctatatgtaaacaaaagtgaagaataactgtgtattactggtctttgagtattactgaaataatgactccattttccaaatgtaagtatataggtcttggaagaatacagtagaacctatctgaacacaatctagtgaaagcagccacctataggaccaagtttcattcaaggcaaataaatggagggaaaatttgaagagactgatatttttaaagggccattaagtatgaatataatgtaaataagtaagatgaataaacattgaaaatgaaaaagaataacaacggaaataaaaatcaaattacatattctttagcttttacaaagtattaaaaacgaaatttttctgtttgtataytcattttatcaatttttaaatgattttaaatattttataaggtcatcttttgatatatttaggatgtaaacatgcatattacttatttttaaattttaccacattatacaagcaattgttcacatataccaaatattaatatttaatga

SEQ ID NO: 422251 - DNA, 582 bp, Homo sapiens
ttaacagttttagttctgataacaaatgttctagaaggtattttgtttcttaaaatacatataaatcttcccttttgttgagaaacaaactcaccatctggggctaaaatacggtcggtgcctcgttccttctattcctcgtactaaaaatagatgctgccaagaaatgaaactcatcctgggatatttggatcagtcctttaagctaaaacaaagctcattatctgttatcasatatgcttgctccagatacaagtatcccaacactaattgttacatagataataattcagatgtcaaattctcattttagataggttttatacagagatggatggatagatagagagagggggataggtagataaatagatagataatttttttctacctgatttcagaccaaagtatctgggtttacaaggttggccttgcataaacaaagcatgcattcttaacaatttggaaaatttttcttaaatatcttgttttaagaatatactcatggaatattttaaaaatatatttagtaatttgtcattccttttgctcattttcataattaacatgtaagaccaagat

SEQ ID NO: 422252 - DNA, 630 bp, Homo sapiens
aatgaagataataaagagaattctaatatatccatcacccaaatttttctattattaacatcttacatttctatattagatttatcacaaataatgaaccactttgagatattgttattagctaaagtatagactttattcatttgtctctagttttgacctaatatcctttatctgttccagaatcccgttcaggttctcatgtcacattgagttgtcatgtctccttaggctcttctagacagcagctttttcttggacttcctttgttttgatgacttagacggtgctgaggaaaactgattagatactccataggatgtccttcaactgagattattctgatgtttttctcatgggtaaataggacttattagtgtttgggaaaaaaatctgtgggggtacactcccattactctcaaaatgacttatccctgttgatgtgaatcttaatcacctggctgggtagtgtttgtcaagtttttccactggaaaattactcttttactttttctccataccacaatgtttggaacaagatcagtaygttcagcagacatttatggagtggggaattatgctctacttccttgagggtgtagtatctacaaaaattatttatttgttttt

SEQ ID NO: 422253 - DNA, 343 bp, Homo sapiens
gtagtatctacaaaaattatttatttgtttttgttcagaaatttgtctattctttcacaatttatttgtttcctcaagcatttatttacatcagtatagacttgtgaatatttattttatagtttaggttataaaccaataccacttattattattattatttgctaaaattattccaacttttaaccatcgggagttctttcagttgaytcccatgtctctgacatatcccaatctttgtgtttttcctgagtatttcctcactttataataatatgaaatgcttcagactcttatatattctctgttctaatcttataatcagccatttcttcaaggagac

SEQ ID NO: 422254 - DNA, 610 bp, Homo sapiens
ttgtttcactatagcaccattcccactcacatatttttatgctgttatggtcatacaaattatgtctttatacattataagcccttcaatgcagttttataattattttatgcacttttcktttaaattagaaaaaggaaatgcttacaaccaaacatataattgtgctgtctttatatttacctataatcttacttgtatcagtctctcaatttgtttatgtgtaaattattgtctagcattcttcattttagcctgaaagacctttaataatcttgcagggcaggtctactagatatgaaggcttttttgttttttgtttatctaggaatttatttattttttattttctaaaaggttgttttaccaattatgggaatcataactggagttcattgcattcttggatgtgtagattaatctttttcatcaaatttgtggagctatcagccattatttcttaaatattctttatacatctttctctttttcctctcctttggaaatcccagacacgaatgtatctgcgtgcttgatgatgtcccataagtctctgaaactttgttcatttatcttctttatttttctttctgttcctcagattgtatag

SEQ ID NO: 422255 - DNA, 610 bp, Homo sapiens
ttgtttcactatagcaccattcccactcacatatttttatgctgttatggtcatacaaattatgtctttatacattataagcccttcaatgcagttttataattattttatgcacttttcttttaaattagaaaaaggaaatgcttacaaccaaacatataattgtgctgtctttatatttacctataatcttacttgtatcagtctctcaatttgtttatgtgtaaattattgtctagcattcttcattttagcctgaaagacctttaatawtcttgcagggcaggtctactagatatgaaggcttttttgttttttgtttatctaggaatttatttattttttattttctaaaaggttgttttaccaattatgggaatcataactggagttcattgcattcttggatgtgtagattaatctttttcatcaaatttgtggagctatcagccattatttcttaaatattctttatacatctttctctttttcctctcctttggaaatcccagacacgaatgtatctgcgtgcttgatgatgtcccataagtctctgaaactttgttcatttatcttctttatttttctttctgttcctcagattgtatag

SEQ ID NO: 422256 - DNA, 610 bp, Homo sapiens
ttgtttcactatagcaccattcccactcacatatttttatgctgttatggtcatacaaattatgtctttatacattataagcccttcaatgcagttttataattattttatgcacttttcttttaaattagaaaaaggaaatgcttacaaccaaacatataattgtgctgtctttatatttacctataatcttacttgtatcagtctctcaatttgtttatgtgtaaattattgtctagcattcttcattttagcctgaaagacctttaataatcttgcagggcaggtctactagatatgaaggcttttttgttttttgtttatctaggaatttatttattttttattttctaaaaggttgttttaccaattatgggaatcataactggagttcattgcattcttggatgtgtagattaatctttttcatcaaatttgtggagctatcagccattatttcttaaatattctttayacatctttctctttttcctctcctttggaaatcccagacacgaatgtatctgcgtgcttgatgatgtcccataagtctctgaaactttgttcatttatcttctttatttttctttctgttcctcagattgtatag

SEQ ID NO: 422257 - DNA, 600 bp, Homo sapiens
gtgcccttctcaaaaagcttgatctgaatcatgtaaaataaagccagatagctcgaatagtgaaaattctctgagttttatacattctggcgacctctagtcacamggtgcatatgccctagtggatgctaggctattggttttcacaagcattgttgtgaatcggctagcttttgaggatatttcttatgagagggtgaggagatgagggcaagttaaacaccacaaattttaccattttaaaaaaaatcagctgtagtccttgcataaacactccaggaacacttataagcctggttaattttcaggattctgaaaaagtttattttgatgcatttagcagtggtcttgctttaatggagtagcaaattttgggaggcccttaccttactctgctactctgaaagtacttctgccaataatatttttgattagcattttcattttaaatttttactttattaaacaaatgacgtcttttttctaaaaacagcaaaatttgttcccctgttaaaattatagcataggaccttaaacaaaagaacaagaaagccttacctactactaataaatattaatttcagaagccttagcactact

SEQ ID NO: 422258 - DNA, 600 bp, Homo sapiens
gtgcccttctcaaaaagcttgatctgaatcatgtaaaataaagccagatagctcgaatagtgaaaattctctgagttttatacattctggcgacctctagtcacacggtgcatatgccctagtggatgctaggctattggttttcacaagcattgttgtgaatcggctagcttttgaggatatttcttatgagagggtgaggagatgagggcaagttaaacaccacaaattttaccattttaaaaaaaatcagctgtagtccttgcataaacactccaggaacacttataagcctggttaattttcaggattctgaaaaagtttattttgatgcatttagcagtggtcttgctttaatggagtagcaaattttgggaggcccttaccttactctgctactctgaaagtacttctgccaataatatttttgattagcattttcattttaaatttttactttattaaacaaatgacgtcttttttctaaaaacagcaaaatttgttcccctgttaaaattatagcataggrccttaaacaaaagaacaagaaagccttacctactactaataaatattaatttcagaagccttagcactact

SEQ ID NO: 422259 - DNA, 630 bp, Homo sapiens
tagactttcaaaatgatttaatacctcatggaaagaatgtcttagatactgggtcaggtgagctacatttctaagtgatctaaagggttttgctaagaatatatttgccctgsctctattcccatctgtgcaaatatgtgttgttctccgtcaggcaggaacaccagcctggattttctggagcttagtttggatgaagggaagagtgcattcttacttaccctcaaatcacactcagtggtggctggctgtttttatagagtcttatagtcagagttcatttgaatcatctgggtttcattagggttaccattaatctaatcacaatctgtgtagttcccaagaggaataactgatatttaagtcttccccggtaaggttatctgtgtttattctgcctaaattgcatccctgcttggaagtaagagggtcagtgtaaaacatcaaagggcattggaccaaacctgaatttatagctctacaatatcatacctcagttatagcttactaacatttgtgtatgtcttggtggaaacatgagtcacaaataatgattagtttggaaagactgagaaagttctcctataaaacaatttgccaacaatattgttgtctagtaaagatgcagta

SEQ ID NO: 422260 - DNA, 630 bp, Homo sapiens
tagactttcaaaatgatttaatacctcatggaaagaatgtcttagatactgggtcaggtgagctacatttctaagtgatctaaagggttttgctaagaatatatttgccctggctctattcccatctgtgcaaatatgtgttgttctccgtcaggcaggaacaccagcctggattttctggagcttagtttggatgaagggaagagtgcattcttacttaccctcaaatcacactcagtggtggctggctgtttttatagagtcttatagtcagagttcatttgaatcatctgggtttcattagggttaccattaatctaatcacaatctgtgtagttcccaagaggaataactgatatttaagtcttccccggtaaggttatctgtgtttattctgcctaaattgcatccctgcttggaagtaagagggtcagtgtaaaacatcaaagggcattggaccaaacctgaatttatagctctacaatatcatacctcagttatagcttactaacatttgtgtatgtcttggtggaaacatgagtcacaaataatgattagtttggaaagactgagaaagttctcctataaaacaatttgccaacartattgttgtctagtaaagatgcagta

SEQ ID NO: 422261 - DNA, 563 bp, Homo sapiens
aaacatacagctttcacacctcaccttaggctttcccaatgtatttgacttttaaaaagattataccatcccctaatatgctcattttgcattaaacaaaaaaagtaccttcttgctggaactgcctattcacgtcagtctgaatgtaacagtgtctggtttatcaacagtctggttaattttatttgaccaatgcaaagagctatcaaaatagtccaatgtacattaaatttacattaactgctttactactacaaacagtcaaatgaaaacttccctcaatactcagacagtttacgatgtttaaaatcactacacagggttacattcacaacagatctagggtggaataattttctttttatyacttaatggagaagttctcaaatgagtttgattcctctgttttgaagtacaagtaatattaccctcctcaattatttctgtgaaggttttgaagaaaagtttcaaaaacttaaagcatatcacgcatactagttgctgcatatacataggcaacttttaccacagaatgacaaaaacatatcaaatctgtacacata

SEQ ID NO: 422262 - DNA, 656 bp, Homo sapiens
cacacttgtaatcccagcactttgggaggctgaggcgggccaatcacgaggtcagaagatcgagaccatcctgcataacacggtgaaaccccgtctctactaaaaatacaaaaattagcctggcgtggtggtgggcgcctgtagtcccagctactcaggaggctgagacaggagaatggcgtgaacccgggaggcggagcttgcagtgagctgagatcacgccgctgcactccagcgtgggtaacagagtgagactctatctcataaaaaaaaagaattctaaactcagataaattttcatacacaaagacaatcaacaataatacaaaaaatgcaaaattcaggaaactaattttattctaattacaaaagttatacttttaaaawatatattgttatttaacagtaattaacagttcagaactcaaaaatattgttatttaactgttacttaacagtccagatctaaaaaagatcatgctgtagatgcagttgtaagatttgatatcaattagcacaagcttaaatatttttaatgtttaagaatatggcaaaaattacttatacattctaaatactgtaaattctataaaatatggtaaaagaataactgaagaaaatgtttgcaagcttaaatataactatataataaaaat

SEQ ID NO: 422263 - DNA, 479 bp, Homo sapiens
attgcatattcttttcaaattccatatgcacgcacactttctattactgctaatgagagctttgcatgtgttttgatggtgactagcatttggtaattttaggaaaatgcacatattgttaagttctctttttctcttcttttttggtcctctgttggttgttgagggaacaaattcatggaatattacaatctgcagccttccaaaaggatcctttcagtgcttttaaaatttaattatataacacatgatgggtttaaatcacctcctctcgtaatgtaacccattaaaaaacagtttagtaactcgtttttattgtrtgaagatgatcaatggtgtatcattatctgtttcaaatctggaatatcattaaagacattggcagcactcaacattgaaaacttaagaattacttttaatacatctcttttgaaaaccaatactgtggactttttcattaggaaagaaaagaatgtttt

SEQ ID NO: 422264 - DNA, 549 bp, Homo sapiens
ggagcagctcctactaccacacagtccaaaaccaaacatgaacaaatatggcccatagaacattgtcctaccacattgtttgttgttccacatcagtataattatcctatactctcygaatttttatccaacaataatttgtattcattcattcattccttttctaatccatttatttcagctctgagtcccagatacctagagtctattccagcagctcagggcatagagcgggaaacaccctggacaggatgaaatcccatggcaggccacactcacacctacccactttcactcagaagaaaccatgtagacaggccaacgaacttaagggacacatcttggagatatgagaggaaactaaaatacctggagaaaacccatgaagacatggggagcacgttaccaactccacacagacggcggcctcagcaggaatcaactatttttctcatcaatgtcacaatattgaatgaaatgatgctattcaaagacctgctgtctccctgtatatgactttggcattcttgcaattcacagattgtacat

SEQ ID NO: 422265 - DNA, 579 bp, Homo sapiens
gtcacctcatctcaactagtcttcataaaacactttctcccatgtgaaagtctgttttgccaaacagaggcctttagttccctatagatctaacctcagtaagccaaggataaatgcactcttaactggtcatctgatttttaaaaaatagaaacctgccagccttctctcccaattgaatagagattattttattcacactaaaatgtatagtagtttaattcttgataaatttgccatatgggtgctgaggtcataattatccacatggagtgggaaaatctgggcatggctattcctctacaggccatagctgtatgtcctatcactctgtgaagcatctgtatgatcaaaatggtyattcatcactcaaactctaattctgtccacacaaatcaataagggagaagctgtagcaaatctatatgatctcctaaattatctttatatagacaaaggacttgtgtcttaacaaaaatgggtcaaaatacttaatattttaacataatgcattgtaccctactttataattgtaattatatttataatattttaatggcctaagcctactttaatgac

SEQ ID NO: 422266 - DNA, 589 bp, Homo sapiens
cctgattgtacataaaagtgcagttcattcttatacattaatcctttatctatacctttatatattgctctgtctacatcttttaatgaaatataatacattttctatagattctcttgaattttcattgtagacaattatataatcagctattttcattatgtttattttttatttatttattttttttgcacatgctggtcttgaacttctggcctcaagtgattcccccgtgttggccaaccaaagtgctgggtttacaagcatgagccaccgtacccagccccaccttttctttattgtrctttattatctgtacaatttaatttggatgtgaatgtctctgagttgtatatgaacattagagttgttttcctggcttgattgtaagctacttgaaaatatgctttatttttttttttaatgtgccctactatgctgggcatataaaatagtaataatatctgagaaagtactttcacatatgtaatttcacgctgtctaaataagtgttaattgccatgtcttaaaatactgcttttacagtactggcatagagctttgattctgatctgaagtaatactgagg

SEQ ID NO: 422267 - DNA, 594 bp, Homo sapiens
gttttcctggcttgattgtaagctacttgaaaatatgctttatttttttttttaatgtgccctactatgctgggcatataaaatagtaataatatctgagaaagtactttcacatatgtaatttcacgctgtctaaataagtgttrattgccatgtcttaaaatactgcttttacagtactggcatagagctttgattctgatctgaagtaatactgaggctcatttgtggaattgccttttaactttataagattttttaataaaattattataagatcatttaagattatttaagttattgagggtgaaaggtatttagataatctgatttatatatctggactgtgatatgtcatttgtgattttattgaaagtatagtttttcagtagaaaaatagttttgaatttgggggttattaaaatctaaattttcattttggaagttcactggtctatgagcaaaactttttcaaatgatgactgtattttatttaattttcagaaagtaaactacaataaaatagtatattcctatgaaaaagtagatatattccctgagctaatatatgactaaagtgtcacaagattctgt

SEQ ID NO: 422268 - DNA, 573 bp, Homo sapiens
agccaacaaacgatacgcaatcctatcaaaatgaaagcttttctgggcacatttatatgctgatctacaagtcactgtagttttgcttctataagaaaaaaacattcaaacytatacaagattgtgtaatgtctctatattgtgtaatgtccctatattgtgtatcacttaatttcagggccccattgtcattcacttgtattctagtcatttagcataaatcttgaactgtgtattatatggtgagttgttgtaaatcttaaaacttctttatgatataagaagtcctccaatactcatgtggtaggttaaaaaaatacccccacccccaaagatatccatgtcctaatctctggaatctgtgaatgttatatcatatggcaaaaagagagaaagaaggaaggtgtttgcagatgtgataaagttaaggatcttgaggtggagacattctcctagcttaactgagtagccctaaatgtaatcacacctccttctaagaaggaggtaaagggagatttcatacacagacacacatggagaaggtggtgggaagatgcaacagagggaaatttg

SEQ ID NO: 422269 - DNA, 573 bp, Homo sapiens
agccaacaaacgatacgcaatcctatcaaaatgaaagcttttctgggcacatttatatgctgatctacaagtcactgtagttttgcttctataagaaaaaaacattcaaacctatacaagattgtgtaatgtctctatattgtgtaatgtccctatattgtgtatcacttaatttcagggccccattgtcattcacttgtattctagtcatttagcataaatcttgaactgtgtattatatggtgagttgttgtaaatcttaaaacttctttatgatataagaagtcctccaatactcatgtggtaggttaaaaaaatrcccccacccccaaagatatccatgtcctaatctctggaatctgtgaatgttatatcatatggcaaaaagagagaaagaaggaaggtgtttgcagatgtgataaagttaaggatcttgaggtggagacattctcctagcttaactgagtagccctaaatgtaatcacacctccttctaagaaggaggtaaagggagatttcatacacagacacacatggagaaggtggtgggaagatgcaacagagggaaatttg

SEQ ID NO: 422270 - DNA, 603 bp, Homo sapiens
acctgcactttactcaaaataataaaacactgataccagtggactgtaatacattatgtattaataatttaatacttgcagtagccattaagaaaactatagaaagtgatatacccaaaacactataagtaaattaagatttaaccttaaaaataagttcaaataacccacaggatgataataaaagcagaggaacaagaaatagaggaaataaacagaaaataactaatactatgatagagttaagcatgaacatattaataatcacatgtaattgtttaaaatacaacaattaaacagtgtagtttggtaaagtagacttaaaaagtaaacatggttaacaacatgccatgtatctacaagaaacttcaaaagcaatatcataggtagattaaatgtaaaaggattaagatatacactgtgcaaatcttaaccaaaaaaagtggctaaactagtatcrgataaagcagacttcacagtgcagaaaattactagagacaaagaggtatgttagattatgataaacaatccaacaggatgacatagcaatcttaaatgcatatactccgcacaaaacagcctcaaaatgtatgaggcaaaaat

SEQ ID NO: 422271 - DNA, 507 bp, Homo sapiens
agaataatgtaaataataaatggtcacgaaaaagaaagtattgggctgaaatgaatcaatcatcaactttttggaaataatatactttgaattaaaaattacttaaaatagaaaggaaagcattcaagaagtcctgaagtgagtcttagctgaaacaaacaaatcagttgctctaattgctattaagcatacccagaaaagttaaataggtttacacatctatttccctcatattcttagcacagcctccaaatctcaatttggaactttatattataatccaatttgcatgtatcaaatattaaatgtagtttcagacayaccttaatataataccagagtaatttgcattatatgtatgtccaagattttctgatgacctgatcccctttttcgatttatctctatatctgaagaaataaaagtctcaaagcaaagatatggtggattcagaatggttgaaaaatttcctgacaacccatcttgcttatcacagttcttttatat

SEQ ID NO: 422272 - DNA, 615 bp, Homo sapiens
agaccaggtggagtagggaaaatagtcagactatggatattgttttgatgagagaagcaactgcatatcctacatttggatctggagaagaagacaaactgacgagtcaagrttgaggttgaggttgcaggcatgaacaagtaagaatgaaatttctatgcctgaaattgggaaaagctgctgctggagcaagtaagggggtagaagagggagtgttggggtaaaatcagggttttttgtttgctcctgtgaggtttgggtgtcaagtagtgggagtttcaagcaagttaaatatttgagggcagtacctcagggagatgtctgagattgagatatggattctgctgtcagtaagtatttctccaacagaagtttggtattggggagaaaaggaaaaacctggatcagggaagcagggggggagccacagttcaacttcatctcattgcaaaacaaaaaagacacaatgggaggtgtacatgggaagtaaagtagattaagacattcttcttgatttcacagtcctttttttaaactacatttaccttcaaataatattttaagtgttcaataaccttgtaataatttttgctaagtgcagcatttccaactgtc

SEQ ID NO: 422273 - DNA, 615 bp, Homo sapiens
agaccaggtggagtagggaaaatagtcagactatggatattgttttgatgagagaagcaactgcatatcctacatttggatctggagaagaagacaaactgacgagtcaagattgaggttgaggttgcaggcatgaacaagtaagaatgaaatttctatgcctgaaatygggaaaagctgctgctggagcaagtaagggggtagaagagggagtgttggggtaaaatcagggttttttgtttgctcctgtgaggtttgggtgtcaagtagtgggagtttcaagcaagttaaatatttgagggcagtacctcagggagatgtctgagattgagatatggattctgctgtcagtaagtatttctccaacagaagtttggtattggggagaaaaggaaaaacctggatcagggaagcagggggggagccacagttcaacttcatctcattgcaaaacaaaaaagacacaatgggaggtgtacatgggaagtaaagtagattaagacattcttcttgatttcacagtcctttttttaaactacatttaccttcaaataatattttaagtgttcaataaccttgtaataatttttgctaagtgcagcatttccaactgtc

SEQ ID NO: 422274 - DNA, 613 bp, Homo sapiens
gctgaaacaattggacattcatatgcaacttaggagtctagacacagaccttacatcttacatctttcacaatatttgattctaattagrtcacagttctctgtgtcatattcaaaactatcattctcctagatgatagcataggagaactctagatgacttgagttcaatgatggcttcttagctatgacacaaatggccccatctatgaaagaaagaaacatgatggaagtttctcctctgtgaaagatacagtcactagaatgaaaagactagactgggaaaaatatttgcaaaataaacatatgacaaaagactcttgtccaaaatatacaaataactccttttttttttttttttaacttagaagaaactttaattagaaggaaacaggaatattcaacggactcccaagacaagaatatagatgtatatcagaagctgagcattgaagttgctactagagtctccccgagcccttattggattctcacttcaggagctgctttcattattttgcctctcagtttcaaaatagacaaagaactcaacactcaacaataagaaaatgaacaacttggttgaaaaatgggccaaagaccttaacagacac

SEQ ID NO: 422275 - DNA, 561 bp, Homo sapiens
aaatagttctctattgtgaggtagaatcttgggagagttggacaagtaaagaaaaggcatcttttgatggcaagatagaatgagtagcatggaaaagaaagaaatataaaatgtcaaaactctaaggtcagaactctgttgctgttgtgtgtgaataatgttttgaaactagacctattctgttgccttttatgtttgaagaaacagctaaagacagaaccaaatgtagtcaagccatgttccaagaaatgctattaatacacaccctttactatatacagccatctctctacttaatgtgccatgacagtgaggatattctgtttccttggaactgagtataagaaaaaaagtgataagtaggccaggcacagtggctcaagcctgtaatcccagcactttggaggctgaggcaggtggrtcatttgaggtcaggagttggagaccagactggccaacatggcaaaaccctatctctactaaaagtacaaaaattagccaggtgtggtggtgctcgcctgtaatcccagctacttgggaggctgagtcaggagaatcact

SEQ ID NO: 422276 - DNA, 556 bp, Homo sapiens
tgtttgtaacataaagaaaagataaatacttgaggaaatcaatacctcatttaccatgatgtgattattatactttgtttggctatatcaaaacatctcatgtaccccataaagttatacacatactatatatccataaagattaaaaataaagacataaacacacaatgtattccatattattataaagaaattgaggagaaaatataatctcttatgtttactaagacatataatattttttattctatttttcttgcacatcagtattccaaatgataatgttgctctttagcttgatgaatgcccttattcatttctcagatttcatcactgctgccaaaaaatcttcaacttttatttttgagcactttatagtctcytgatttttgaaagataatttcattaactacaaaattgaaatctatttgagtttttctaagtaatggtaagaacaattaacataatatctccattattaacaaaatcttaatcttaggtgtataatatagtattgttatctataagcattatattatacattagatctccagaa

SEQ ID NO: 422277 - DNA, 619 bp, Homo sapiens
aaacctcacctagtcatacactttaaactttttttactaaaataggatcacaatttatttgaactaatccataaaatccagatagtttgagcactataatcattggcaaggggaatatttaygcaaatctagtctcagaaaaagctctgtagatttcttagctctctaagatttacataaaagtgaatcatgggctacatataaaaagtagtatgcacccacagacacatttattaatacacacctgtttagaaaagtaaagcagttttagtatatttcagtgaaacatattcagtgaaacatattcagagaataaacaccccttcctcaggaaatattcaataattaaatttctctgagtcaaaacaaaaggacaatatttttagtgagtattaagaatatgaagctaattttccaacctgtatatactctatagtaatatattttgcatatgtctcagacatatgtctacatgtttacgtgttgtcttagactctggaaatagaacaattgtcacttttcaacaagtgcctgttatttcacccttatctattttatattttatgccctaagatggtaaataaataaaaaaatagtgctgataaactctttgaatact

SEQ ID NO: 422278 - DNA, 621 bp, Homo sapiens
ttgttatgggccactacttcatttacataaggtgtaaaygaagtaaccaatgggaaacctctagagggtatttaacccttagaattctgtaaccagtgctcttgagccgcttgctcaagcccactcccattctgtgaagtgcactttcatttcaatacatccgtgctttacttgcttcatttgttcattgctttgtgcactgtgcctattctttgtttaaaatgccaagaacctggacaacttgtagtcaagaccatgcgccagtaacatattttggtgagccagcaaggaggtaagccccaagtttgggatttatttttcttctctctctctgtttttttccttttcttctttgctgtatatagaggagccctgttctccctctgtctctctctctttttccctttccaactcgggacccttggcagatagcacctaagcatggaggcagctgcaggtatctggcagaggctgctctacggtgaaactgaaagatttccgtgtgttagcacctgaccaccactgcctggtttgggtgagagacttgagtcctggtaattgaggatgactttcctgggccactctctggtgttacctgaaggccaaggagtgaatggggat

SEQ ID NO: 422279 - DNA, 621 bp, Homo sapiens
ttgttatgggccactacttcatttacataaggtgtaaatgaagtaaccaatgggaaacctctagagggtatttaacccttagaattctgtaaccagtgctcttgagccgcttgctcaagcccactcccattctgtgaagtgcactttcatttcaatacatccgtgctttacttgcttcatttgttcattgctttgtgcactgtgcctattctttgtttaaaatgccaagaacctggacaacttgtagtcaagaccatgcgccagtaacatattttggtgagccagcaaggaggtaagccccaagtttgggatttatttttcttctctctctctgtttttttccttttcttctttgctgtatatagaggagccctgttctccctctstctctctctctttttccctttccaactcgggacccttggcagatagcacctaagcatggaggcagctgcaggtatctggcagaggctgctctacggtgaaactgaaagatttccgtgtgttagcacctgaccaccactgcctggtttgggtgagagacttgagtcctggtaattgaggatgactttcctgggccactctctggtgttacctgaaggccaaggagtgaatggggat

SEQ ID NO: 422280 - DNA, 621 bp, Homo sapiens
ttgttatgggccactacttcatttacataaggtgtaaatgaagtaaccaatgggaaacctctagagggtatttaacccttagaattctgtaaccagtgctcttgagccgcttgctcaagcccactcccattctgtgaagtgcactttcatttcaatacatccgtgctttacttgcttcatttgttcattgctttgtgcactgtgcctattctttgtttaaaatgccaagaacctggacaacttgtagtcaagaccatgcgccagtaacatattttggtgagccagcaaggaggtaagccccaagtttgggatttatttttcttctctctctctgtttttttccttttcttctttgctgtatatagaggagccctgttctccctctgtctctctctctttttccctttccaactcgggacccttggcagatagcacctaagcatggaggcagctgcaggtatctggcagaggctrctctacggtgaaactgaaagatttccgtgtgttagcacctgaccaccactgcctggtttgggtgagagacttgagtcctggtaattgaggatgactttcctgggccactctctggtgttacctgaaggccaaggagtgaatggggat

SEQ ID NO: 422281 - DNA, 584 bp, Homo sapiens
gtaggtgctgatggtgtctaatgctcctagcaaactataaatgtatctggaagcagagcattgttatctgcacatgtgtaagccctagaataatgctgaacatatagtaacgatttagtaaatatttgtggaattaaacaaaatactacttttttcttatttatctggttacagaacacccttcagagatttagatttgccagtagtaaaccagagcacaatcttgaaagtctcacatattaagcagcattgcagaggggttaaaagtacaagcttcagagtcagacattttaggttgagtcctgatgctccctaattagctggagagaacttgggcaatgatgccctttctaaacctcaacttaatctctataaaataaagataataatgtctatcacctaagaattttcaaagtttcaattaaatagcacatataaaaacatttagcacaatgtctaacatgttgtacrcattctataaaacctgcctattagtgttaatattattgttattatcattagtcagggccctaacagaaaacgaattcaaatcaggtgattcaaattaagagacattcacaaag

SEQ ID NO: 422282 - DNA, 580 bp, Homo sapiens
tgttttgtatgtgtgtatacacacacacacacacaccagggaatacacacatatacacccagggaatactactcagccataaaaaggaacacaatcatgacattgttagcaacttggatagaattggagaccattattctaagtgaaataactctggaatggaaaaccaaacatcacatgttctcacttgaagtgggagctaagctatgaggattcaaaggcaggagaatgatacaatagactttgggggaaagggtggaagaagtatgagagataaaagactgcatattgggtgatgtacactgcttgggtgatgggtgcaccacagtctcagaaatcatcactaaaggacttattcatgtaaacagataccacctattcctccaaaacttattgaaataaaaataaacagaatagtagcaaaattgaatcatgttttaaggcttttatcttgtcttgtttcctctttctyacaagtatccccacagaacagaatgaaaagaaatgtataaatctagccaacaaatacaaaaatcctaatttagtaaggattaataattttgttaaagtgagaaccagg

SEQ ID NO: 422283 - DNA, 453 bp, Homo sapiens
tgtttcttctaacaatcccacaatatcaccccttaccacagaatcttccttcagcttaatctctcccactctaggttcccacaccgcccctaatcccgctcgaagcagccccgagaagcatcgcccattatctctccatgccaccccccaaaaaatttttctcactgccccaacacttcaatactattttatgttatttttcttattaatataagaaggccrtaatgtcaggcctctgagcccaagctaagccatcgcatccccctgcatgtatacatccagatggcctgaagtaactgaagaatcacaaaagaagtgatatttaaatggtctgttcctgccttaactgaggacattccaccacaaaagaagtgaaaatggccagtccttgccttaactgatgacattaccttgtgaaattccttctcctggctcaaaaagctcccccactga

SEQ ID NO: 422284 - DNA, 453 bp, Homo sapiens
tgtttcttctaacaatcccacaatatcaccccttaccacagaatcttccttcagcttaatctctcccactctaggttcccacaccgcccctaatcccgctcgaagcagccccgagaagcatcgcccattatctctccatgccaccccccaaaaaatttttctcactgccccaacacttcaatactattttatgttatttttcttattaatataagaaggccgtaatgtcaggcctctgagcccaagctaagccatcgcatccccctgcatgtatacatccagatggcctgaagtwactgaagaatcacaaaagaagtgatatttaaatggtctgttcctgccttaactgaggacattccaccacaaaagaagtgaaaatggccagtccttgccttaactgatgacattaccttgtgaaattccttctcctggctcaaaaagctcccccactga

SEQ ID NO: 422285 - DNA, 585 bp, Homo sapiens
ggtggactgaaataatgccattcaaaacccaagctcttttttttttttatgaaataatgaaaatagcatggagaaacaaaataagcagtgattatataacaacatgttcyatataaatatgataaaaaacagtgaaagtttatctttcactagatatctactgttaatagtactactattttactagatatctattattaatagataccttttgcatctacagaggacaaggaacaaagatgtttctttgactaccccatagcagaacatcaattttcatcttttgccactgatgaactggaacagacccttctactttgtattctaccacctacaagtttaacctatcccagtgatttcatcttcctgaagatttctgaaaaataacatccacttacataaaaatttaaagaaaaaaacttcattttagagaactcaataatttgatagttctactcgattgaaaaataggactagataatcctattgcagtaggtcaatggaaaataaagaaaatataattatacaaataatgaaaaattttaagaagaaaaacaataaaagttatttatagaattcaaaaac

SEQ ID NO: 422286 - DNA, 312 bp, Homo sapiens
tcacatgactggtccactcagcagcccttgtggatttcacacatgaaactccactgctttttagtctcttgggtatccttccacttctttctgtacctcctggtttcaccattactctggcaattgctagaatttcaggtcaccctaaaggctctgtgacctctttcttmtgacacacagacactacgtgctgggggccaagaatgagggtgatgtacctgtggcagctgactccatcgcttttcctcatgtgcatcgcaactgtggtttaccagccctggcctcactgctgaaaccctaccaattctgata

SEQ ID NO: 422287 - DNA, 441 bp, Homo sapiens
ttttttttcttttttgtgattagtaataagggcctggatctagaggtgggtatagccccatgaaagacagcacaagacaagcatggtttaagacatactgaagattattctagaccagggccagctaaaacaaagacacaaattgagcccagccagaaaacaracaaaaatattagttacaagatattattgttcatcatatacaagtatcctgaagtggaggtattgtagtgtggtggactgagtgcactgagcagagagagttggctcagatcctggctctggtgctttctatttgatcctggaaacaggaaactaaccatcctgtgtctcagtagcgcttacttcacatgctgtgaaaattacatgcagttatttgaaagcccatactctggtaagtggacagcaagtagtacctgtttttattatgttctttatcct

SEQ ID NO: 422288 - DNA, 610 bp, Homo sapiens
ttgacaattcttcattacccacctttagtctccccccttgatccagaacccccatatccactctcagtcatcctcctcactgatttgggtgaaccaggtccatctgctcctttggtcgtcccaatacccacccagttgagtcttgctgagatatagccctggtaattggtctggtgaccaggaagaaaataggggaagatcctaagaaagccaggattgtcttataaagcacctactttattggaggtttctgcattgtcttcaagtaaaggggagggggtggttctatcttccaataaaggggaaagtccacaaggttcagagaaattgtcaattcagggtgctcttgtgtatctacatagacaccatcccaaatctcatggtacactctttccctrtcaggctctggctttggtctagggtaaaaaaggttaaaccctgttgaatgcagtcaaatatcatcagactaattatcagacttgctgtctaagaattagcctcctgacagctcatctacatcactctatgtgcgaaattaacctatttgttactcaaacctcacagcctctctgttccaaagctgtcttgataacacccctatccttgcaat

SEQ ID NO: 422289 - DNA, 590 bp, Homo sapiens
gacatttaattgacaattaaagtcaaaggattagtgaaacaacccaatataggatttagagaagaggtccaaggactgagtcctaaggtattccactgtttaaaggggtgaagaagaggaaggtcccaccaacagcctgacgaagggtatccagggtgggagaagagcaacaggacattgtgtaatccagaaaccaagtgaagaaagcacttccaggaggaggtaataactaatgatgtgtctgttggaatttgagtaaggagacaacttgaaatcaaccagtgtgttttaatggaggtcaatggtaatactgccaaaacagtttcagggtaggagtaggaaagaaagcctcactgaagagaattaaggggagagcaagagattaagaaatgaagacagcaagaattgaccactctatttaagaaaatggaattttttragatggaagatatttcagtatgtttgtatgctcctgtaagtaatctagtgtagggggcaagagtttatgttgaggaaaatataaccatagttgtaattcacttgtgcagatgagagaacatgggtccagtgtaccaggagggacttagata

SEQ ID NO: 422290 - DNA, 603 bp, Homo sapiens
ggagtttgccctggtatgtcgtatgaaaacaatttgatcttttaccatatggctatccataggtctcaactccattcattaaaaagcccatctttgtgccaagtgatttgagattttacctttatcatacatccaattcccacataaagcaacttcaaaagcacacatttagtatactttttccaatcatacattattctttagatgtaaagaattagaaacaataaaaagaaattgtgcaatctatattaktcttctctgtattatcatttaaataattttaaagatctattgactgacaatgactaattttttctaaaattatactcctaataaaatatttttaatacttatattaaccatagttttctcagtttcaactttaaaacaaaaactcttttgtgatcataaaattgtagcattttacttttgtatttgtttttattgatgaaagtttttttgatgtcacttcaacttatattttagattcagggggtacatgtgcaggtttgttacatgggtacattgtgtgatgctgaggtttcggatataaatgatcccatcacccaggtggtgagcataatacccaattgttagtttttc

SEQ ID NO: 422291 - DNA, 603 bp, Homo sapiens
ggagtttgccctggtatgtcgtatgaaaacaatttgatcttttaccatatggctatccataggtctcaactccattcattaaaaagcccatctttgtgccaagtgatttgagattttacctttatcatacatccaattcccacataaagcaacttcaaaagcacacatttagtatactttttccaatcatacattattctttagatgtaaagaattagaaacaataaaaagaaattgtgcaatctatattattcttctctgtattatcatttaaataattttaaagatctattgactgacaatgactaattttttctaaaattatactcctaataaaatatttttaatacttatattaaccatagttttctcagtttcaactttaaaacaaaaactcttttgtgatcataaaattgtagcattttacttttgtatttgtttttattgatgaaagtttttttgatgtcacttcaacttwtattttagattcagggggtacatgtgcaggtttgttacatgggtacattgtgtgatgctgaggtttcggatataaatgatcccatcacccaggtggtgagcataatacccaattgttagtttttc

SEQ ID NO: 422292 - DNA, 600 bp, Homo sapiens
cgctctatagaaagacacaatagggtgggttgagggaaataaggagtgacataataggtatagagtttccttttggagtgataaaaatgttttaaaatgtattgtggtgatggctacacaattctatgaatatattaaaaaccactaacttgtacacttggggtaagttttatggtatgcaaattataatacaataaaactggcttctgtttttgtttaaaacacacagcaattcaggattctaaaataagatcactttttaaatgttyaaaacaacctggagatgtaaatattctctcatacaacttaacaatacttgctcagataaatggacaaaattttcagtaattttgcagaaggccagagaaaggaatatatatttagcttaatcttttacaaactgactccaacaatgaaattttggcttttatttcttatatatttaaacatgtttaatgcaatgcttgaaagaagctatgtaattcgaagagaattgattctacaatgacactagaaagtggcagattaataaatatacttggttcacgtcaactattttgtagcttccttggacctctatcttgagaaatgaatgagctg

SEQ ID NO: 422293 - DNA, 605 bp, Homo sapiens
actaacacattatagccttccatttttgaataatggtcctccagataaaatacaaagggaaaccagatgtgcctttataatctgtcattatatattgattattgatttggggagttgagtaatttggaatttacttattycaaaaaatttactggtcaagaaagccaagtacttctgtcagttgttacacatgcagatagcattttggtgttctttcactgatgaagttcagggcaccttctaaatttatgaaacatctgtttaagcagctggttattcattaaataaaaataaaaatgtaccacttttccctggcaatgctaataaatgggaacaggtgatgatcccaaaagagattatgattataaacgaatgtattgaaattcttcactatttttatagaggcatcaaaataaaaacatataaaaagtgaaagaggagctcgtggagcccctggaatacactggggaccctagggtaatggctcacctgcatgtcccactccacttagataccacattctacatggaaattcaccaggatcaaaactaatattctttctgcatcactccctaaatttaccacctgaaaatttctagttagta

SEQ ID NO: 422294 - DNA, 605 bp, Homo sapiens
actaacacattatagccttccatttttgaataatggtcctccagataaaatacaaagggaaaccagatgtgcctttataatctgtcattatatattgattattgatttggggagttgagtaatttggaatttacttattccaaaaaatttactggtcaagaaagccaagtacttctgtcagttgttacacmtgcagatagcattttggtgttctttcactgatgaagttcagggcaccttctaaatttatgaaacatctgtttaagcagctggttattcattaaataaaaataaaaatgtaccacttttccctggcaatgctaataaatgggaacaggtgatgatcccaaaagagattatgattataaacgaatgtattgaaattcttcactatttttatagaggcatcaaaataaaaacatataaaaagtgaaagaggagctcgtggagcccctggaatacactggggaccctagggtaatggctcacctgcatgtcccactccacttagataccacattctacatggaaattcaccaggatcaaaactaatattctttctgcatcactccctaaatttaccacctgaaaatttctagttagta

SEQ ID NO: 422295 - DNA, 605 bp, Homo sapiens
actaacacattatagccttccatttttgaataatggtcctccagataaaatacaaagggaaaccagatgtgcctttataatctgtcattatatattgattattgatttggggagttgagtaatttggaatttacttattccaaaaaatttactggtcaagaaagccaagtacttctgtcagttgttacacatgcagatagcattttggtgttctttcactgatgaagttcagggcaccttctaaatttatgaaacatctgtttaagcagctggttattcattaaataaaaataaaaatgtaccacttttccctggcaatgctaataaatgggaacaggtgatgatcccaaaagagattatgattataaaygaatgtattgaaattcttcactatttttatagaggcatcaaaataaaaacatataaaaagtgaaagaggagctcgtggagcccctggaatacactggggaccctagggtaatggctcacctgcatgtcccactccacttagataccacattctacatggaaattcaccaggatcaaaactaatattctttctgcatcactccctaaatttaccacctgaaaatttctagttagta

SEQ ID NO: 422296 - DNA, 532 bp, Homo sapiens
ttattcacacatgcaaccagagtgatcttttccaatgtatatctaaaatcatgggaccttctgcctccaccttatgtttaaactctccagtggcatcttataccaagctacataaagacaaacatgyttaaaatggcctatagatcctaatttgttgacccctgcctatctattagcaccatcttgcacatcaacaccacactgcccaaagcctataaataccaggggaatcctttttaatcaatcaacttttccttattaggtggctatggttcttgagtcccctttgcttcaaagagttgtttagcctgaccagcatcactgactataaaagatattccatcactcctggtggttaccaggatggatctgccacacagccagcccctctgttggtactattgccaaggtatagaaaagagtatagtctgtttgacagctattatgctttgtttaaatgcaattttaaatgcaggagtttctaagtgtgttattcatgccagtgatttctgcaaaaaataaacattttgta

SEQ ID NO: 422297 - DNA, 610 bp, Homo sapiens
tatactaaataccattatttataggattattatttttattttagtaaaaataatcaataggatatatagacagagattattggttattttccctagagaaccttgactgatatacgtttttaattttctgctrttctaccagatcacaattcttacaacagtctatgaataaatgttgttgtcaatcctttaattatattgttagtagtgtgattacatcacattatatagtgttagtctacgagtgttgaaaatgtttttcactaaagtaatatttataatatcttacaatttttgaaaccttattttggcttctatagaagttttaatttctagaagtgttacataatggcaatggttcaattatttttctcaagcctagaaaaactctggtggaaaaacctggaccaccagtcagagcacttagctccccattaacttgtagtaccatgatcgatcttaaactctacttataccttggagtaatcaaatggatgttgatggtgatcattcccatccttctttgccaatagggtttatgtgaggatcaaatcagataagagatatagaaaatgcatttaaagaagggaagtatacaatagtgatataa

SEQ ID NO: 422298 - DNA, 610 bp, Homo sapiens
tatactaaataccattatttataggattattatttttattttagtaaaaataatcaataggatatatagacagagattattggttattttccctagagaaccttgactgatatacgtttttaattttctgctgttctaccagatcacaattcttacaacagtctatgaataaatgttgttgtcaatcctttaattatattgttagtagtgtgattacatcacattatatagtgttagtctacgagtgttgaaaatgtttwtcactaaagtaatatttataatatcttacaatttttgaaaccttattttggcttctatagaagttttaatttctagaagtgttacataatggcaatggttcaattatttttctcaagcctagaaaaactctggtggaaaaacctggaccaccagtcagagcacttagctccccattaacttgtagtaccatgatcgatcttaaactctacttataccttggagtaatcaaatggatgttgatggtgatcattcccatccttctttgccaatagggtttatgtgaggatcaaatcagataagagatatagaaaatgcatttaaagaagggaagtatacaatagtgatataa

SEQ ID NO: 422299 - DNA, 547 bp, Homo sapiens
gctacctataagagattcataaaccaaaaatgaataaatagaaaaagatattctatacaaatggtatcaaaagggagcagaggtggctatacttatatcagacagaaaaactttaagtaataaacctgtcaacaagaaacaaagaagataattatataatgacaatggagtcaattygtcagtaggatataacaattgtaagtatatatgcactcaacatcagaacatctaaatatataatgcaaatattaacagaactgaaggaagaaatatatagcaatacaatgatggtaggggatttcaacataccattttaaacaatagttggatcatctaggcagaaaatcaataaggagacagtggacttgaataacactagaaagcaaatggaaatatacacagaacactatccaacagcagcaaaatccacattcttctcaagcacatgtggaacattctccaggatagaccatgttcggccacaaaacaagtcttagcaatttgagaaggttgaaataataccaaatttattttctgatcatattgg

SEQ ID NO: 422300 - DNA, 547 bp, Homo sapiens
gctacctataagagattcataaaccaaaaatgaataaatagaaaaagatattctatacaaatggtatcaaaagggagcagaggtggctatacttatatcagacagaaaaactttaagtaataaacctgtcaacaagaaacaaagaagataattatataatgacaatggagtcaattcgtcagtaggatataacaattgtaagtatatatgcactcaacatcagarcatctaaatatataatgcaaatattaacagaactgaaggaagaaatatatagcaatacaatgatggtaggggatttcaacataccattttaaacaatagttggatcatctaggcagaaaatcaataaggagacagtggacttgaataacactagaaagcaaatggaaatatacacagaacactatccaacagcagcaaaatccacattcttctcaagcacatgtggaacattctccaggatagaccatgttcggccacaaaacaagtcttagcaatttgagaaggttgaaataataccaaatttattttctgatcatattgg

SEQ ID NO: 422301 - DNA, 547 bp, Homo sapiens
gctacctataagagattcataaaccaaaaatgaataaatagaaaaagatattctatacaaatggtatcaaaagggagcagaggtggctatacttatatcagacagaaaaactttaagtaataaacctgtcaacaagaaacaaagaagataattatataatgacaatggagtcaattcgtcagtaggatataacaattgtaagtatatatgcactcaacatcagaacatctaaatatataatgcaaatattaacagaactgaaggaagaaatatatagcaatacaatgatggtaggggatttcaacataccattttaaacaatagttggatcatctaggcagaaaatcaataaggagacagtggacttgaataacactagaaascaaatggaaatatacacagaacactatccaacagcagcaaaatccacattcttctcaagcacatgtggaacattctccaggatagaccatgttcggccacaaaacaagtcttagcaatttgagaaggttgaaataataccaaatttattttctgatcatattgg

SEQ ID NO: 422302 - DNA, 483 bp, Homo sapiens
gtttatttaaatgtgttcgctaaggagtcatttctggatgctgctatccattttatagccccatattatatgcccttgcatgccttatcacacattctgtcaaagctgaccctctgaaacccttttaggctcagctatcccttacactacatacaggaaggttgatctaaaatgtttcaaatctctccatttgttaagtaatggtgatttactttgtcaatgatattttttgagaacttaaaaaaaaactcattgtgcacatgtaccctaaaacttraagtataataatgtaaaaaaatgaaaaaaaaacctcaaaaaataaaataaaaaatctgttcctgctcccccccccccccccacacacacacacacacactcacatgatatgttaacattttttaaatatgggggttttttaaatcaacattctaaatcaaattaaagcctctttctcatctaccctctaaccaggtttcttccctc

SEQ ID NO: 422303 - DNA, 483 bp, Homo sapiens
gtttatttaaatgtgttcgctaaggagtcatttctggatgctgctatccattttatagccccatattatatgcccttgcatgccttatcacacattctgtcaaagctgaccctctgaaacccttttaggctcagctatcccttacactacatacaggaaggttgatctaaaatgtttcaaatctctccatttgttaagtaatggtgatttactttgtcaatgatattttttgagaacttaaaaaaaaactcattgtgcacatgtaccctaaaacttgaagtataataatktaaaaaaatgaaaaaaaaacctcaaaaaataaaataaaaaatctgttcctgctcccccccccccccccacacacacacacacacactcacatgatatgttaacattttttaaatatgggggttttttaaatcaacattctaaatcaaattaaagcctctttctcatctaccctctaaccaggtttcttccctc

SEQ ID NO: 422304 - DNA, 573 bp, Homo sapiens
ggaaattaatctagcccaagaaaccctataagttatttttcccaagttgcacacattgaaaaatcgttaagtatacgcatatttgaaaaggcatataccaacattctagccatctcttatagcatccctcaaaataccatctcctcaacatgccatgagtatttctggtatgtggtagtgcattactggacttcccaaatatcactttggtggttattacttaacaatcatttatccgagagaaataaagaygtgtctatacaaaaacctgcatgtaaatttggaagcagctttattgataattgccccaaactggaaacacctcaactgcttaatgaaaaaacaaaatgtggtaaatccgtaaaataaaatattagttagcaattaaaagtaacaaactattgacatgtgacaatttggataagccacaggggcattatgctaagtgggagtagaggggaagccagactcaaaggaattcttactatgtagctttacttacatgacattccaggagagataaattatactgctgcatgatatgagactggtttttctcccttcacctgttgt

SEQ ID NO: 422305 - DNA, 570 bp, Homo sapiens
attggtgtgaaacagtaaagtgtgacatgtttatgactaaaaacacatgttggcaatgccatctccagagtgggaaagttttattttataatttccacaattcaaaagactggtgatttttactctragttttaatttattgtggctctacgcctgtttgtaaaatgctggccctctgggaagtatattttgatgcctacagatagctaacaaccagaattcataattttctaactagagttttaaaacccctatatttgtaatagtcttatgatgaaacaatgtactgaagaaatcaaggactttgcgacttcaggaatggggaatatcaatgaaggtttagtaatgctataaaatggagcccttttgttgggatctctttatttgcttgttcatctctgtacatgcatttggcaaaatttgcctctttagcttaaatattgtctcagcatacatttaaaaaaattgtgtactcttgaagctcattataaataccaaattttgactcaaaatataattcactaaaatataatagttttaacattattctatttaaaaccttttcctcct

SEQ ID NO: 422306 - DNA, 616 bp, Homo sapiens
gtgaccactgcacctccaggaaggccaggtgcacatcgcttcccatgcgcccggcctcatggcctttgggggttgtcgtgtggaatggagatgacacgagtgctgcatgtgaggtcagggaattgggtatgcatgtcaccactcagaatggggctcctgggtggtggagggagtgcagttttctgcagtatctttgagcaaggacaaaatggcaacagaggagtagctgcaactaatagaaagatttcaactagcaatagcttaaagaaggtagaagtcttttcctcgcatgggaaggcagcctgcatacaggcagcctgggccttttgtggcagccacacagcgtcctctgaaagggcaactmgcctcccaggtttctgaagcctagttctccgcatgtggcttctaccctggggctgtgtaaacgtcagcattctagcatggagctgggctggacaggtagcagccctttccctaaggctaatgcatttcttgtttctctccaggtcagtcaggatctttgattttggagcacaagccttctgcgtgctactgactgggtcctggcctccctccttccatggcatcgtcgtgaatgggaatttccaccactgcc

SEQ ID NO: 422307 - DNA, 634 bp, Homo sapiens
ttcattccttctccctccctctctctctatgtatatatacacacacacatgcatacacataagattattaaatatacacaccatgctttttatcacttcatacagtaygtgtatgtcctatgaacaaggatttctttttaacatagccacagtatagtcatccagttcaaaaatgtaaaaacaaaaataatactgatcaaaagtccatatatgagttctggtcaatagtgtgtgccaagggtgtccttatagcaatttccttcctagcccaagatccagtctaggattatatattgcatttagttgtcatatctctttggtctccttttaatttgtaacagcttctcagctttttcttgttttttcatgacattgatattttggaaaaacacaatctgcttattttatagagtagcctttattttgggtttgtctgttttctcataattagactcaggttgtgcatttttggcatgattattacctgagtgacgctgtctctttttcagagcatcatgtccagaggcacatgctccatctgtccattattggtgatgttgattttgatgacttagttaaggtgttatccaatttagccattgaaaagttcctttttttcttttgtaatttatgg

SEQ ID NO: 422308 - DNA, 524 bp, Homo sapiens
ctgtgattcaagttatgccctaggtgttgattttttatgagcctataatcccagagatgtaacatttgatttgttcacatggtgtctataagagtaccttgcagtgatagaaaattagaaacaacatttattaataagtgccaggtttcaaggactcctgatccatccccatgacataaatcctggaatctgcagcatgtatatttgmaatacattaccataaaatatttataattactttttaaattctcttggacttgtcttggtgtcagaaatataatatttatttattattatttttctcttggctcatttctctgtgcattttcagagaataacacttgacctaaacatttgcatttttaatttatttataataaaaagaactgataatttgccaaccgagacattatggtgatcttcaccacaagacatagatgctatgtatctatgtgtgtacatactgtgatgcaaacaaagaaagtaaaatgtggagcaactagatagtttgtccaaggtcacac

SEQ ID NO: 422309 - DNA, 400 bp, Homo sapiens
cctctcctgataccaacttactacattagtttgttctcatgctcctgtgaagaaatacctgaggctggatgacttataaagaaaagaggtttaattgactcacagttctgcatggcttggaggtctcaggaaacttacaatcatggaggaagacacctcttygcagggtggtgggagagaaaaatgagttcaagcaagggaaataccaggtgtttataaacctttatagaccttgcgagactcactgattttcatgagaacagcatgggggaaatagcccccatgatccaaatacctctacctggtcccacccttgacacagggagattattacaattcaaggtgagatttgggtagggacacagagccaaaccatcagatagataggtggattattctt

SEQ ID NO: 422310 - DNA, 400 bp, Homo sapiens
cctctcctgataccaacttactacattagtttgttctcatgctcctgtgaagaaatacctgaggctggatgacttataaagaaaagaggtttaattgactcacagttctgcatggcttggaggtctcaggaaacttacaatcatggaggaagacacctcttcgcagggtggtgggagagaaaaatgagttcaagcaagggaaataccaggtgtttataaacctttatagaccttgygagactcactgattttcatgagaacagcatgggggaaatagcccccatgatccaaatacctctacctggtcccacccttgacacagggagattattacaattcaaggtgagatttgggtagggacacagagccaaaccatcagatagataggtggattattctt

SEQ ID NO: 422311 - DNA, 400 bp, Homo sapiens
cctctcctgataccaacttactacattagtttgttctcatgctcctgtgaagaaatacctgaggctggatgacttataaagaaaagaggtttaattgactcacagttctgcatggcttggaggtctcaggaaacttacaatcatggaggaagacacctcttcgcagggtggtgggagagaaaaatgagttcaagcaagggaaataccaggtgtttataaacctttatagaccttgcgagactcactgattttcatgagaacagcatgggggaaatagcccccatgatccaaatacctctacctggtcccacccttgacayagggagattattacaattcaaggtgagatttgggtagggacacagagccaaaccatcagatagataggtggattattctt

SEQ ID NO: 422312 - DNA, 415 bp, Homo sapiens
ataatcttagctacataaaggtgatacaaaaggaagggaactatatagtgcatgaaatttgacctaagagttatgaagagtttgagaaaacaagagaaaatatgaaagattatcatagaacagaaggtaattgcatggtattaattttaaatgctgccactatkcacaggctaaggaagaacaagaaggtttttgttgtaaagtcaggtttcaggaagtgatttggctaagatgtggacctaaaagctgggtaatatcacttacagaaaataccattacagaaaataccgaaatagtcactatccacaatttagaagaaaaaaacctaaagttatcctttgtcccatgataatcaagcagttgtcatttagctcctttcagggtaagaagggatttcatagaatattatacttca

SEQ ID NO: 422313 - DNA, 415 bp, Homo sapiens
ataatcttagctacataaaggtgatacaaaaggaagggaactatatagtgcatgaaatttgacctaagagttatgaagagtttgagaaaacaagagaaaatatgaaagattatcatagaacagaaggtaattgcatggtattaattttaaatgctgccactattcacaggctaaggaagaacaagaaggtttttgttgtaaagtcaggtttcaggaagtgatttggctaagatgtggacctaaaagctgggtaatatcacttacagaaaataccattacagaaaataccgaaatagtcactatccacaatttagaagaaaaaaacctaaagttatcctttgtcccatgataatcaagcagttgtcatttagctcctttcarggtaagaagggatttcatagaatattatacttca

SEQ ID NO: 422314 - DNA, 525 bp, Homo sapiens
taagaagggatttcatagaatattatacttcaatagcacttcatcaaaatttcatttacagtaaatctaattatctcatttctttttttttgagacrgagtctcgctctttcacccaggccggaatgcagtggcgcgatctccgctcactgcaagctccgcctcccgggttcacgccattctcctgcctcagccccccgagtagctgggactacaggattatctcatttcttacaaaagttacccatggtgctgagaaaactagaaactggactgtagatgatgcttggtattgttcctatttatttttaaaacttgatatttcttcagagagtaaactttgttatattatgacaacatgtcgggtatcatcaatttgaattttgttagattcatttttttttagaatcccaagataaattgctcagtttttatgcttagtttaaatttgagagccttaatataaacttgtacaattttgtttcactgtatgttttgttattatttgggaggtgaggagagttca

SEQ ID NO: 422315 - DNA, 525 bp, Homo sapiens
taagaagggatttcatagaatattatacttcaatagcacttcatcaaaatttcatttacagtaaatctaattatctcatttctttttttttgagacggagtctcgctctttcacccaggccggaatgcagtggcgcgatctccgctcactgcaagctccgcctccygggttcacgccattctcctgcctcagccccccgagtagctgggactacaggattatctcatttcttacaaaagttacccatggtgctgagaaaactagaaactggactgtagatgatgcttggtattgttcctatttatttttaaaacttgatatttcttcagagagtaaactttgttatattatgacaacatgtcgggtatcatcaatttgaattttgttagattcatttttttttagaatcccaagataaattgctcagtttttatgcttagtttaaatttgagagccttaatataaacttgtacaattttgtttcactgtatgttttgttattatttgggaggtgaggagagttca

SEQ ID NO: 422316 - DNA, 525 bp, Homo sapiens
taagaagggatttcatagaatattatacttcaatagcacttcatcaaaatttcatttacagtaaatctaattatctcatttctttttttttgagacggagtctcgctctttcacccaggccggaatgcagtggcgcgatctccgctcactgcaagctccgcctcccgggttcacrccattctcctgcctcagccccccgagtagctgggactacaggattatctcatttcttacaaaagttacccatggtgctgagaaaactagaaactggactgtagatgatgcttggtattgttcctatttatttttaaaacttgatatttcttcagagagtaaactttgttatattatgacaacatgtcgggtatcatcaatttgaattttgttagattcatttttttttagaatcccaagataaattgctcagtttttatgcttagtttaaatttgagagccttaatataaacttgtacaattttgtttcactgtatgttttgttattatttgggaggtgaggagagttca

SEQ ID NO: 422317 - DNA, 600 bp, Homo sapiens
tttcagggtaagaagggatttcatagaatattatacttcaatagcacttcatcaaaatttcatttacagtaaatctaattatctcatttctttttttttgagacggagtctcgctctttcacccaggccggaatgcagtggcgcgatctccgctcactgcaagctccgcctcccgggttcacgccattctcctgcctcagcccccygagtagctgggactacaggattatctcatttcttacaaaagttacccatggtgctgagaaaactagaaactggactgtagatgatgcttggtattgttcctatttatttttaaaacttgatatttcttcagagagtaaactttgttatattatgacaacatgtcgggtatcatcaatttgaattttgttagattcatttttttttagaatcccaagataaattgctcagtttttatgcttagtttaaatttgagagccttaatataaacttgtacaattttgtttcactgtatgttttgttattatttgggaggtgaggagagttcatttgcagtacaattttagcatattttataatatagtcagtcaaaaaaagcctcacatgtatatattt

SEQ ID NO: 422318 - DNA, 636 bp, Homo sapiens
tgtgttaataaacctttctgaagccatcttagttaatggccmttcagaagtagaatctgaacacaagatttgagagcaagtgatgcaataaagaagttctgccaaaagaaaccactcagaaagtgtaggaaacacaactggaaaaaacaagtcaagcaaggctatgatttcaggtgaggcaccagcctcagtctgactggatggggagctctggagggtaaattgcactttatagttggtcctatggggaaacaggtgtgctgagctgttgtattccactaaccattcattagctatgggccataagctgtccacagacaactcagctctaaaaagataatctgtcctctaaactttccatgccagtctttagcagcaaagcacagagagcctaaggagcggtcacacagttcctacgggggatccacggtttttacatgaggcactaacactgtctactgtaggaagcatgttgaattttaattagcaattctaagaattgctcataatattgttgcagatattgccagccacctaccccagaaccattcaccactgctacaaccccattactgacaccaccacctgtagctctcttaccctttgctgatttagcctgatattattaaagcattt

SEQ ID NO: 422319 - DNA, 636 bp, Homo sapiens
tgtgttaataaacctttctgaagccatcttagttaatggcccttcagaagtagaatctgaacacaagatttgagagcaagtgatgcaataaagaagttctgccaaaagaaaccactcagaaagtgtaggaaacacaactggaaaaaacaagtcaagcaaggctatgatttcaggtgaggcaccagcctcagtctgactggatggggagctctggagggtaaattgcactttatagttggtcctatggggaaacaggtgtgctgagctgttgtattccactaaccattcattagctatgggccataagctgtccacagacaactcagctctaaaaagataatctgtcctctaaactttccatgcyagtctttagcagcaaagcacagagagcctaaggagcggtcacacagttcctacgggggatccacggtttttacatgaggcactaacactgtctactgtaggaagcatgttgaattttaattagcaattctaagaattgctcataatattgttgcagatattgccagccacctaccccagaaccattcaccactgctacaaccccattactgacaccaccacctgtagctctcttaccctttgctgatttagcctgatattattaaagcattt

SEQ ID NO: 422320 - DNA, 636 bp, Homo sapiens
tgtgttaataaacctttctgaagccatcttagttaatggcccttcagaagtagaatctgaacacaagatttgagagcaagtgatgcaataaagaagttctgccaaaagaaaccactcagaaagtgtaggaaacacaactggaaaaaacaagtcaagcaaggctatgatttcaggtgaggcaccagcctcagtctgactggatggggagctctggagggtaaattgcactttatagttggtcctatggggaaacaggtgtgctgagctgttgtattccactaaccattcattagctatgggccataagctgtccacagacaactcagctctaaaaagataatctgtcctctaaactttccatgccagtctttagcagcaaagcacagagagcctaaggagcggtcacacagttcctacggggratccacggtttttacatgaggcactaacactgtctactgtaggaagcatgttgaattttaattagcaattctaagaattgctcataatattgttgcagatattgccagccacctaccccagaaccattcaccactgctacaaccccattactgacaccaccacctgtagctctcttaccctttgctgatttagcctgatattattaaagcattt

SEQ ID NO: 422321 - DNA, 341 bp, Homo sapiens
ttctgggccactgtaacctccacagagctggatttttattaagcaaataaaaaaactaaataattgtcagttgggtctcctgtgttagaaaatgcatttttattaatataataatagctatcaagctattggcctttataaagagcctacaatgtgccagctatatttataagtactttacatatatcaattcattctggtgaaagagaacacatcccatagctactaataaatatcataattgtcacatataatcaagwtatttggctcgtattgaagacgttcaaattatgttgtgttgctcactgaagttactatacattatcactactacttccagc

SEQ ID NO: 422322 - DNA, 595 bp, Homo sapiens
atgatttaagaatatttattccttgatatgtctctattgtattctgtaatcaaaactctagaataaaaataaagtgtctctcattctagtttccaaacaggataacrattgacacttaacatttattttatttaaagtcctgttgtagaacattccactatggaacactgcttacgactgggaaaattctttcttctttaatgcaggaagtgttcaaccctgacacatgcatggcaaagacatccaggttgcacaattgtctaaactcctcgccaattacttgcaccaggactcccaaaaactttacgtccttttggcttctgctatgctgtttaaaacgacatagtcctaactaactgcattccactgctaaagaagaaccctgactccagataatcagtcactgaggtccttgccttatcaccaccatttcttcaaaacagagaccctgtgtccttttagctcctctttttgtcagaggcacattccagataaacaccactcttgcgcttccactcatgggtctttaacctttctgcatgtttctctctctgcctaggatggctatttctaccaatcacgttaaagtaactaa

SEQ ID NO: 422323 - DNA, 595 bp, Homo sapiens
atgatttaagaatatttattccttgatatgtctctattgtattctgtaatcaaaactctagaataaaaataaagtgtctctcattctagtttccaaacaggataacgattgacacttaacatttattttatttaaagtcctgttgtagaacattccactatggaacactgcttacgactgggaaaattctttcttctttaatgcaggaagtgttcaaccctgacacatgcatggcaaagacatccaggttgcacaattgtctaaactcctcgccaattacttgcaccaggactcccaaaaactttacstccttttggcttctgctatgctgtttaaaacgacatagtcctaactaactgcattccactgctaaagaagaaccctgactccagataatcagtcactgaggtccttgccttatcaccaccatttcttcaaaacagagaccctgtgtccttttagctcctctttttgtcagaggcacattccagataaacaccactcttgcgcttccactcatgggtctttaacctttctgcatgtttctctctctgcctaggatggctatttctaccaatcacgttaaagtaactaa

SEQ ID NO: 422324 - DNA, 595 bp, Homo sapiens
atgatttaagaatatttattccttgatatgtctctattgtattctgtaatcaaaactctagaataaaaataaagtgtctctcattctagtttccaaacaggataacgattgacacttaacatttattttatttaaagtcctgttgtagaacattccactatggaacactgcttacgactgggaaaattctttcttctttaatgcaggaagtgttcaaccctgacacatgcatggcaaagacatccaggttgcacaattgtctaaactcctcgccaattacttgcaccaggactcccaaaaactttacgtccttttggcttctgctatgctgtttaaaacgacatagtcctaactaactgcattccactgctaaagaagaaycctgactccagataatcagtcactgaggtccttgccttatcaccaccatttcttcaaaacagagaccctgtgtccttttagctcctctttttgtcagaggcacattccagataaacaccactcttgcgcttccactcatgggtctttaacctttctgcatgtttctctctctgcctaggatggctatttctaccaatcacgttaaagtaactaa

SEQ ID NO: 422325 - DNA, 500 bp, Homo sapiens
aatttgcagtttgtgatacaccatttaggctagaataagaaaccttttaagtatgaaataggaagacataaagaaattaattaatttttaaatttaattttaaattttcaattaatgtttatattttaataataatgcttatagtttaatattagctattgatgttttatctataaaggtagactatgaaatttactttttacatatttcaactttcttagttttcaagatttttcaaatcatgtacatatttgatgatttttatgattcattgaggtaactatttgataatattgttcaaaatgaccacattaattatgtttttagtaatgatttactccccaaaaggtatatgtttccaccttaamttcctgtaaataaaattcttgtgatagcttcttaaaaagtaagagaaaagaaagacagagaaaactgattcctttctacttggagcttgatttcaaatatgtaaaccccaactacgtaattctgtacacagg

SEQ ID NO: 422326 - DNA, 533 bp, Homo sapiens
ttccaccttaaattcctgtaaataaaattcttgtgatagcttcttaaaaagtaagagaaaagaaagacagagaaaactgattcctttctacttggagcttgatttcaaatatgtaaaccccaactacgtaattctgtacacagggatctcattatttattttcatagttgctgctttgtttaaaattttgtctctaaagtttrtatttggcaagacaaatagaaataagctggtttataatttttcttattctaagatgtgcatgtgtatatgtgtaagtatgttttaatttctaatggcctgtccagatgatggtatcactcctggagacatggcaacccatatgagaatgtttatatacactggggtggagaagaacaaccatgcccacatcctaatttaaatcaccttcacctttgaaatgttaaaactgtatgtgtccttttcaatttctctctgctcctccttttctcctatgctcttgctcagaaaacatttaatttcaactcaggtgtatttattagaaagaatcc

SEQ ID NO: 422327 - DNA, 474 bp, Homo sapiens
ttgatttcaaatatgtaaaccccaactacgtaattctgtacacagggatctcattatttattttcatagttgctgctttgtttaaaattttgtctctaaagtttgtatttggcaagacaaatagaaataagctggtttataatttttcttattctaagatgtgcatgtgtatatgtgtaagtatgttttaatttctaatggcctgtccagatgatggtatcactcctggagacatggcaacccatatgagaatgtttatatacactggggtggagaagaacaaccatgcccamatcctaatttaaatcaccttcacctttgaaatgttaaaactgtatgtgtccttttcaatttctctctgctcctccttttctcctatgctcttgctcagaaaacatttaatttcaactcaggtgtatttattagaaagaatccttccattttaattttttaaaagtcattggaagcagatcc

SEQ ID NO: 422328 - DNA, 474 bp, Homo sapiens
ttgatttcaaatatgtaaaccccaactacgtaattctgtacacagggatctcattatttattttcatagttgctgctttgtttaaaattttgtctctaaagtttgtatttggcaagacaaatagaaataagctggtttataatttttcttattctaagatgtgcatgtgtatatgtgtaagtatgttttaatttctaatggcctgtccagatgatggtatcactcctggagacatggcaacccatatgagaatgtttatatacactggggtggagaagaacaaccatgcccacatsctaatttaaatcaccttcacctttgaaatgttaaaactgtatgtgtccttttcaatttctctctgctcctccttttctcctatgctcttgctcagaaaacatttaatttcaactcaggtgtatttattagaaagaatccttccattttaattttttaaaagtcattggaagcagatcc

SEQ ID NO: 422329 - DNA, 474 bp, Homo sapiens
ttgatttcaaatatgtaaaccccaactacgtaattctgtacacagggatctcattatttattttcatagttgctgctttgtttaaaattttgtctctaaagtttgtatttggcaagacaaatagaaataagctggtttataatttttcttattctaagatgtgcatgtgtatatgtgtaagtatgttttaatttctaatggcctgtccagatgatggtatcactcctggagacatggcaacccatatgagaatgtttatatacactggggtggagaagaacaaccatgcccacatcctaatttaaatcaccttcacctttgaaatgttaaaactgtatgtgtcyttttcaatttctctctgctcctccttttctcctatgctcttgctcagaaaacatttaatttcaactcaggtgtatttattagaaagaatccttccattttaattttttaaaagtcattggaagcagatcc

SEQ ID NO: 422330 - DNA, 550 bp, Homo sapiens
ttgaaaaatctttaaaaaatcaactctaaattttatatcttgctccaaatatatagagatataaataggttatcatcaagatatggagaaagccatatcatggaaacactaaaataaagctgtggaaggactacattgatattagacacaacagagttcagaacaagaaatagtatcagaaatgagagataatagataatataataattctcaagaagatgtaaacatcctactaattagggtatgcagctaacaatagatcctccaaatacatgaggtaaaacaggaargaaatcaaaggtgaactagaaaaatccaaaattatatttgcagacttcaacacttttgtcttagtaatggacagactaggcacaaactcagtaatcatatggaagataagaacaacaacattaccaacaagatatccaatcttcaatggcagatactctttcaagtgaaaaaaaaaacagtatggcatattctccaacaaacccagaatttctaatatttgcggtcttccttccttctttccatcttcctttctcttctc

SEQ ID NO: 422331 - DNA, 439 bp, Homo sapiens
ttaatacactgctgtacctaaactgttttgttttggggcttgtgctatgtaactaaagcatgataactaaagcctttgcatatcaaaactaaggraaacaagaactgtctattttatgagccctatatcaatcattaaaattaaaacaaaatggaatggttaaaagttaatagtggagataaaagcggatcttaaaaactaaattctcaattcaaaagaaggcagaaaaagggggaaaatgaacagaaatgatgagatatttagaaaacatatagcaagagagtagttatacatccaatcatattgataattacattaaattgacaaaatattcttattaaaaggcagagatcataagacaggattaaaaacactgactcaactatatgctctttataagaaacttacttgaaccaaaaaaaaaaaaaagaaaaacaaa

SEQ ID NO: 422332 - DNA, 439 bp, Homo sapiens
ttaatacactgctgtacctaaactgttttgttttggggcttgtgctatgtaactaaagcatgataactaaagcctttgcatatcaaaactaagggaaacaagaactgtctattttatgagccctatatcaatcattaaaattaaaacaaaatggaatggttaaaagttaatagtggagataaaagcggatcttaaaaactaaattctcaattcaaaagaaggcagaaaaagggggaaaatgaacagaaatgatgagatatttagaaaacatatagcaagagagtagttayacatccaatcatattgataattacattaaattgacaaaatattcttattaaaaggcagagatcataagacaggattaaaaacactgactcaactatatgctctttataagaaacttacttgaaccaaaaaaaaaaaaaagaaaaacaaa

SEQ ID NO: 422333 - DNA, 439 bp, Homo sapiens
ttaatacactgctgtacctaaactgttttgttttggggcttgtgctatgtaactaaagcatgataactaaagcctttgcatatcaaaactaagggaaacaagaactgtctattttatgagccctatatcaatcattaaaattaaaacaaaatggaatggttaaaagttaatagtggagataaaagcggatcttaaaaactaaattctcaattcaaaagaaggcagaaaaagggggaaaatgaacagaaatgatgagatatttagaaaacatatagcaagagagtagttatacayccaatcatattgataattacattaaattgacaaaatattcttattaaaaggcagagatcataagacaggattaaaaacactgactcaactatatgctctttataagaaacttacttgaaccaaaaaaaaaaaaaagaaaaacaaa

SEQ ID NO: 422334 - DNA, 439 bp, Homo sapiens
ttaatacactgctgtacctaaactgttttgttttggggcttgtgctatgtaactaaagcatgataactaaagcctttgcatatcaaaactaagggaaacaagaactgtctattttatgagccctatatcaatcattaaaattaaaacaaaatggaatggttaaaagttaatagtggagataaaagcggatcttaaaaactaaattctcaattcaaaagaaggcagaaaaagggggaaaatgaacagaaatgatgagatatttagaaaacatatagcaagagagtagttatacatccaatcatattgataattacattaaattgacaaaatattcttattaaaaggcagagatcataagacaggattaaaaacactgactcaactatatgctctttataagaaacttayttgaaccaaaaaaaaaaaaaagaaaaacaaa

SEQ ID NO: 422335 - DNA, 341 bp, Homo sapiens
aaaaataacagaaaggcatataaacaamaaaattcatccaaaacaagacaaaaaattaacagaaacagaccaagaaaagacagaaattatgggattagaaaatattaagcagcttaacaacacacataattgaaatcccaggaaattgggggagggcaaaaactatttgtaaaggcagtggttgagatatttttaaaacttggtaaaactataaaccaacaggtaaaagaagtgcagtggaatcaaagcaaaatgaataaaaggattaagttgaagaaagttgtttttaaaaagaaaacttaaaaacagttggagaaaaagagatgtattattgacaatgg

SEQ ID NO: 422336 - DNA, 341 bp, Homo sapiens
aaaaataacagaaaggcatataaacaaaaaaattcatccaaaacaagamaaaaaattaacagaaacagaccaagaaaagacagaaattatgggattagaaaatattaagcagcttaacaacacacataattgaaatcccaggaaattgggggagggcaaaaactatttgtaaaggcagtggttgagatatttttaaaacttggtaaaactataaaccaacaggtaaaagaagtgcagtggaatcaaagcaaaatgaataaaaggattaagttgaagaaagttgtttttaaaaagaaaacttaaaaacagttggagaaaaagagatgtattattgacaatgg

SEQ ID NO: 422337 - DNA, 341 bp, Homo sapiens
aaaaataacagaaaggcatataaacaaaaaaattcatccaaaacaagacaaaaaattaacagaaacagaccaagaaaagacagaaattatgggattagaaaatattaagcagcttaacaacacacataattgaaatcccaggaaatkgggggagggcaaaaactatttgtaaaggcagtggttgagatatttttaaaacttggtaaaactataaaccaacaggtaaaagaagtgcagtggaatcaaagcaaaatgaataaaaggattaagttgaagaaagttgtttttaaaaagaaaacttaaaaacagttggagaaaaagagatgtattattgacaatgg

SEQ ID NO: 422338 - DNA, 341 bp, Homo sapiens
aaaaataacagaaaggcatataaacaaaaaaattcatccaaaacaagacaaaaaattaacagaaacagaccaagaaaagacagaaattatgggattagaaaatattaagcagcttaacaacacacataattgaaatcccaggaaattgggggagggcaaaaactatttgtaaaggcagtggttgagatatttttaaaacttggtaaaactataaaccaacaggtaaaagaagygcagtggaatcaaagcaaaatgaataaaaggattaagttgaagaaagttgtttttaaaaagaaaacttaaaaacagttggagaaaaagagatgtattattgacaatgg

SEQ ID NO: 422339 - DNA, 573 bp, Homo sapiens
atagcagccatgaaatcaacctagggtgcccattaatggtggaatggataaagaaaacatggcaaatatacatgctggaacactacacagccataaaaagaacaaaatcatgtcctttgcagcaacacagatgtagctggaggccattatcctaagcagattaatgcagtaacagaaaactaaatacagtcttttctcaattataaattggagctaaatattaggyactcataaacataaagatggcaacaatagacactgggtacagctagcaggtggagtgaaggaggagtagaggcaagggttgaaaaacctgcttttgtgtactatgtttagtaccttggtaaatgggatcacttataccccaaaccttagcatcagacaatatatccaagtaacaaagcagcacatatgccccatgaatctaaaataaatattggaaaaaactctgatattccttataaatacaaagcaaagaaaaaaaatcctcaatcaaatactagcaaactaaacccaataactttaaataggattacacaacatgaccaagtaggatttatcccagatacacaa

SEQ ID NO: 422340 - DNA, 573 bp, Homo sapiens
atagcagccatgaaatcaacctagggtgcccattaatggtggaatggataaagaaaacatggcaaatatacatgctggaacactacacagccataaaaagaacaaaatcatgtcctttgcagcaacacagatgtagctggaggccattatcctaagcagattaatgcagtaacagaaaactaaatacagtcttttctcaattataaattggagctaaatattaggtactcataaacataaagatggcaacaatagacactgggtacagctagcaggtggagtgaaggaggagtagaggcaagggttgaaaaacctgcttttgtgtactatgtttagtaccttggtaaatgggatcacttataccccaaaccttagcatcagacaatatatccaagtaacaaagcagcacatatgccccatgaatctaaaataaatattgraaaaaactctgatattccttataaatacaaagcaaagaaaaaaaatcctcaatcaaatactagcaaactaaacccaataactttaaataggattacacaacatgaccaagtaggatttatcccagatacacaa

SEQ ID NO: 422341 - DNA, 573 bp, Homo sapiens
atagcagccatgaaatcaacctagggtgcccattaatggtggaatggataaagaaaacatggcaaatatacatgctggaacactacacagccataaaaagaacaaaatcatgtcctttgcagcaacacagatgtagctggaggccattatcctaagcagattaatgcagtaacagaaaactaaatacagtcttttctcaattataaattggagctaaatattaggtactcataaacataaagatggcaacaatagacactgggtacagctagcaggtggagtgaaggaggagtagaggcaagggttgaaaaacctgcttttgtgtactatgtttagtaccttggtaaatgggatcacttataccccaaaccttagcatcagacaatatatccaagtaacaaagcagcacatatgccccatgaatctaaaataaatattggaaaaaaytctgatattccttataaatacaaagcaaagaaaaaaaatcctcaatcaaatactagcaaactaaacccaataactttaaataggattacacaacatgaccaagtaggatttatcccagatacacaa

SEQ ID NO: 422342 - DNA, 573 bp, Homo sapiens
atagcagccatgaaatcaacctagggtgcccattaatggtggaatggataaagaaaacatggcaaatatacatgctggaacactacacagccataaaaagaacaaaatcatgtcctttgcagcaacacagatgtagctggaggccattatcctaagcagattaatgcagtaacagaaaactaaatacagtcttttctcaattataaattggagctaaatattaggtactcataaacataaagatggcaacaatagacactgggtacagctagcaggtggagtgaaggaggagtagaggcaagggttgaaaaacctgcttttgtgtactatgtttagtaccttggtaaatgggatcacttataccccaaaccttagcatcagacaatatatccaagtaacaaagcagcacatatgccccatgaatctaaaataaatattggaaaaaactctgatattccttataaatacaaagcaaagaaaaaaaatcctcaatcaawtactagcaaactaaacccaataactttaaataggattacacaacatgaccaagtaggatttatcccagatacacaa

SEQ ID NO: 422343 - DNA, 595 bp, Homo sapiens
atctatatacatttaatgtaattactgatatatagaatttatgtttgccagtttaccagttgttttctatatgtcttctgcttttttatttctctatttttctaagattgccttttctttagtcaatagatatttttaatgcactgtattaatccccttatcactgattttattatagtttgtaagttattttcttagggttgcctgatgggctacaagtagtatcttaatttttgaaaatctagttagatttactatcaacttaattttaatagcatacaaaaattttgattctaaatagcattgttctctccttcttcctttgttgtattactatacatattacatctttattcaatgtatgaattcattgtattcatctttattcattwcatctttattcattgtattacttataaccattgctttatgcagtttatttttgaatcaggtaggagaaaagaaaatagttacaaaaaatacatttacattgtctttcatatatttctaatttttgctttttctattgttctgcatttgtttatatggactctagatattgtcaagtgtaattttatttcatattgaaatacct

SEQ ID NO: 422344 - DNA, 567 bp, Homo sapiens
tcatatctttttatcattgaatattatctcaccatatggatgtatcacagactatctgttcacctcttggggaacgtcttgattgctaccagtttggggtaattatgaataaagcatctataaaaatataaatagaatttttgtgggcaaaaattaacaaatmagtttagtgaaaatctaggagcatgattgctgaattatatgtttagcttgataagaaattgaaaagcttgggaggctgaggcaggagaatggcatgaacctgggaggcagagcttgcagtgagccaagattgtgccactgcactccagactgggtgacagagtgagactctgtcccagaaaaaaaaaaaaaaaaagaaagaaattgaaaagttgccttccaaggaatctgtacggtttttcatttccaccagaaaagaatgaaagttcctgttactctgcattcttctcagtattaagtattatcagatttttagattttagcaattctaataaataagtagtggttcctaattgttttaatttgcaatgttctagtaacaaatgatgttgaccatttttattt

SEQ ID NO: 422345 - DNA, 567 bp, Homo sapiens
tcatatctttttatcattgaatattatctcaccatatggatgtatcacagactatctgttcacctcttggggaacgtcttgattgctaccagtttggggtaattatgaataaagcatctataaaaatataaatagaatttttgtgggcaaaaattaacaaataagtttagtgaaaatctaggagcatgattgctgaattatatgtttagcttgataagaaattgaaaagcttgggaggctgaggcaggagaatggcatgaacctgggaggcagagcttgcagtgagccaagattgtgccactgcactccagactgggtgacagrgtgagactctgtcccagaaaaaaaaaaaaaaaaagaaagaaattgaaaagttgccttccaaggaatctgtacggtttttcatttccaccagaaaagaatgaaagttcctgttactctgcattcttctcagtattaagtattatcagatttttagattttagcaattctaataaataagtagtggttcctaattgttttaatttgcaatgttctagtaacaaatgatgttgaccatttttattt

SEQ ID NO: 422346 - DNA, 490 bp, Homo sapiens
ggtttttcagtttgcattgagtatttcaggttttttgacttttcatataaactttatatatctgtttgttgatatctaaaaaaagtatttttctaaaaaattgggattgcattgaatatattcatcaaataggagagaattaacatcttaacaatatttagtgaagtaatgttgaacttatcacactttatttagatcttctgtaatttctttyatcagaattttgtagtttttcacatgtagtaaaagacatgtagattattaaaaaattttgtctgatttatatcagtatttattttcatgtctgtgcaattgtaaatggcatttttagaaactaatattgtttctcattgctcactgcaaaggatgaatttcatagtaagtaactaacttttgtatattgaccttgttttctgagatcttatacttaaattagattttaaaaacttcttgtttttgcaaattccttgagatttgttatatagataat

SEQ ID NO: 422347 - DNA, 490 bp, Homo sapiens
ggtttttcagtttgcattgagtatttcaggttttttgacttttcatataaactttatatatctgtttgttgatatctaaaaaaagtatttttctaaaaaattgggattgcattgaatatattcatcaaataggagagaattaacatcttaacaatatttagtgaagtaatgttgaacttatcacactttatttagatcttctgtaatttcttttatcagaattttgtagtttttcacatgtagtaaaagacatgkagattattaaaaaattttgtctgatttatatcagtatttattttcatgtctgtgcaattgtaaatggcatttttagaaactaatattgtttctcattgctcactgcaaaggatgaatttcatagtaagtaactaacttttgtatattgaccttgttttctgagatcttatacttaaattagattttaaaaacttcttgtttttgcaaattccttgagatttgttatatagataat

SEQ ID NO: 422348 - DNA, 490 bp, Homo sapiens
ggtttttcagtttgcattgagtatttcaggttttttgacttttcatataaactttatatatctgtttgttgatatctaaaaaaagtatttttctaaaaaattgggattgcattgaatatattcatcaaataggagagaattaacatcttaacaatatttagtgaagtaatgttgaacttatcacactttatttagatcttctgtaatttcttttatcagaattttgtagtttttcacatgtagtaaaagacatgtagattattaaaawattttgtctgatttatatcagtatttattttcatgtctgtgcaattgtaaatggcatttttagaaactaatattgtttctcattgctcactgcaaaggatgaatttcatagtaagtaactaacttttgtatattgaccttgttttctgagatcttatacttaaattagattttaaaaacttcttgtttttgcaaattccttgagatttgttatatagataat

SEQ ID NO: 422349 - DNA, 490 bp, Homo sapiens
ggtttttcagtttgcattgagtatttcaggttttttgacttttcatataaactttatatatctgtttgttgatatctaaaaaaagtatttttctaaaaaattgggattgcattgaatatattcatcaaataggagagaattaacatcttaacaatatttagtgaagtaatgttgaacttatcacactttatttagatcttctgtaatttcttttatcagaattttgtagtttttcacatgtagtaaaagacatgtagattattaaaaawttttgtctgatttatatcagtatttattttcatgtctgtgcaattgtaaatggcatttttagaaactaatattgtttctcattgctcactgcaaaggatgaatttcatagtaagtaactaacttttgtatattgaccttgttttctgagatcttatacttaaattagattttaaaaacttcttgtttttgcaaattccttgagatttgttatatagataat

SEQ ID NO: 422350 - DNA, 581 bp, Homo sapiens
tttgaactcctcatgcttctcaatcaataggcaaataagggagttaaagtactatctggggtgatcctgactaccaaggggaaattggactgctagttcataatgtaggtaaggtaaaatacatytagagtgtgggtgatcccttatagttttccttagtattaccatgccctgtgattaaggttaataggaaacaacagcccaatgaggacaaggttgttagtgatcacagcccttcaggaataaaaaattgggtaaccacaaaagacaaaaaaccactaccagctgaggtgcttcctgaagacaaagggaatacagaatggttagttgaataaagtagttataaatactagctatgactacatgaccagttacagcaatgataattttgattgtcataaatatgatctccccattttgttataaatgcatttttgattgtgtatatattgtgtatataataccgttgttttcttctttctcctattctcttatcatgtaacataagatatattggctttatatcatagtatttaagtatgtaaggagatgaatataagtgccacattgacaattagtgt

SEQ ID NO: 422351 - DNA, 581 bp, Homo sapiens
tttgaactcctcatgcttctcaatcaataggcaaataagggagttaaagtactatctggggtgatcctgactaccaaggggaaattggactgctagttcataatgtaggtaaggtaaaatacatttagagtgtgggtgatcccttatagttttccttartattaccatgccctgtgattaaggttaataggaaacaacagcccaatgaggacaaggttgttagtgatcacagcccttcaggaataaaaaattgggtaaccacaaaagacaaaaaaccactaccagctgaggtgcttcctgaagacaaagggaatacagaatggttagttgaataaagtagttataaatactagctatgactacatgaccagttacagcaatgataattttgattgtcataaatatgatctccccattttgttataaatgcatttttgattgtgtatatattgtgtatataataccgttgttttcttctttctcctattctcttatcatgtaacataagatatattggctttatatcatagtatttaagtatgtaaggagatgaatataagtgccacattgacaattagtgt

SEQ ID NO: 422352 - DNA, 581 bp, Homo sapiens
tttgaactcctcatgcttctcaatcaataggcaaataagggagttaaagtactatctggggtgatcctgactaccaaggggaaattggactgctagttcataatgtaggtaaggtaaaatacatttagagtgtgggtgatcccttatagttttccttagtattaccatgccctgtgattaaggttaataggaaacaacagcccaatgaggacaaggttgttagtgatcacagcccttcaggaataaaaaattgggtaaccacaaaagacaaaaaaccactaccagctgaggtgcttcctgaagacaaagggaatacagaatggttagttgaataaagtrgttataaatactagctatgactacatgaccagttacagcaatgataattttgattgtcataaatatgatctccccattttgttataaatgcatttttgattgtgtatatattgtgtatataataccgttgttttcttctttctcctattctcttatcatgtaacataagatatattggctttatatcatagtatttaagtatgtaaggagatgaatataagtgccacattgacaattagtgt

SEQ ID NO: 422353 - DNA, 548 bp, Homo sapiens
aattgcatgtgattagtttagaaattattgatcagccattattccagatactcccattcctgatgtccattcttgctgctcccagtccccacaggtgggtcaacatctggactttgcaccagcagagcttactacttaaaatayaggaagaaaagaacgacgactgtatgcactttcaaatatattattgtttcaatgactctaatgtaattttgtaaaatatatgcaagcatagattttgtacatcaaattgtaattcaggaaaagttaaaatactgagaatcacatgatttgctttgagaaccatcctatcaaccttcatgtgtggtcatttatgaagcaacccacatacttcagtttgtatgcatgggattcaccctgtgtacctagagaaagacacaaacataatgagcctcacctggaggacattaggtctcctccaatggacttaaccatgtgactaccaatcatgtgtaagtcttaaaaatcttgtggactttgttattttacccattctgtttataatctgtttcagtttttaatttgat

SEQ ID NO: 422354 - DNA, 475 bp, Homo sapiens
tgctgcctgtggcttgagtggatcacccaaggtttctgctacttgtggaagacaaccactatttttcagtatccgtgagctgcccaggggcacgctcccggatccatgttacaaaatagcctttcctcccgttcgttctcctcattacacaaacatatgtccatagtgtgtatgagagaccatgagttcgagcttccctgctctcctgttctcagaggcctccgtcgtcttacagacacccagctgtcctgctggatgggcttacacactttactgtcacacttagtgkggtggcaactgaggaccattgtcatgaaatctctcaacttttctgtattctcaactccaatcttgcaatattgcatttccaactaactataagcatcttcatttggccatccctttagcaccttagattctgtctgggcccagctttctagggctaagagttggggcaggtctttgcctgctgtgc

SEQ ID NO: 422355 - DNA, 585 bp, Homo sapiens
gagtgctgttgtcttgctattttatatgcttgaaacttgagtcggcgttcttaaattgattggccaagaaaacaaagtggtcaagctgagacaagatcatgaatctttggttttccattcaaattacagagctaaagaaaaaaagaaatggagattttccttccaagcttacaaaaactgctktaactaagtatgattttataagatcccaagccaattgaaatattgtcatttgtattaataaaacctatatatgattagcactttgcatttttcatttattcattcattcaacaacaaatacctccacacgccagactcccaagaaatgaggctgcggtggtaaacaagagagatacaatgcctgccttcagggacctggtctgttttcctatctgattatctaagctcttttcaggaagtttggtaacctctgtgatccctagacagtgtagcttcaactcaaggctctgaagtttattaactgcaaaacacaaggtaacataataaactcttcgagcttccttatatgcataatagtgttggaaatattatccacctgatggggtgtagcagtcagggttc

SEQ ID NO: 422356 - DNA, 585 bp, Homo sapiens
gagtgctgttgtcttgctattttatatgcttgaaacttgagtcggcgttcttaaattgattggccaagaaaacaaagtggtcaagctgagacaagatcatgaatctttggttttccattcaaattacagagctaaagaaaaaaagaaatggagattttccttccaagcttacaaaaactgctgtaactaagtatgattttataagatcccaagccaattgaaatattgtcatttgtawtaataaaacctatatatgattagcactttgcatttttcatttattcattcattcaacaacaaatacctccacacgccagactcccaagaaatgaggctgcggtggtaaacaagagagatacaatgcctgccttcagggacctggtctgttttcctatctgattatctaagctcttttcaggaagtttggtaacctctgtgatccctagacagtgtagcttcaactcaaggctctgaagtttattaactgcaaaacacaaggtaacataataaactcttcgagcttccttatatgcataatagtgttggaaatattatccacctgatggggtgtagcagtcagggttc

SEQ ID NO: 422357 - DNA, 585 bp, Homo sapiens
gagtgctgttgtcttgctattttatatgcttgaaacttgagtcggcgttcttaaattgattggccaagaaaacaaagtggtcaagctgagacaagatcatgaatctttggttttccattcaaattacagagctaaagaaaaaaagaaatggagattttccttccaagcttacaaaaactgctgtaactaagtatgattttataagatcccaagccaattgaaatattgtcatttgtattaataaaacctatatatgattagcactttgcatttttcatttattcattcattcaacaacaaatacctccacacgccagactcccaagaaatgaggctgcggtggtaarcaagagagatacaatgcctgccttcagggacctggtctgttttcctatctgattatctaagctcttttcaggaagtttggtaacctctgtgatccctagacagtgtagcttcaactcaaggctctgaagtttattaactgcaaaacacaaggtaacataataaactcttcgagcttccttatatgcataatagtgttggaaatattatccacctgatggggtgtagcagtcagggttc

SEQ ID NO: 422358 - DNA, 393 bp, Homo sapiens
gtgtgctacaaaatagctgtgcctccctcaaccttccagctccaaagggaaagaggatgttactcatggcccaccctaaccagaacasgtgagaaaaggaattctgggtgacacaggatcaataaaaccctagtcaagacgacacatcaaaaacccatcatatagggttattgtgaggattaaggagaccctgtatgtaaaacatctggagtacacatagtaacgaattaccccttagcagatgacaaaattgagctcagaggaaaaaaaaaaaaaaaatagtgcttctgtaacagttggtgtgtagagttgaaatgataatctggttttcctcagtcagaaaccttatttcttgccatggtttctgcgcaacttgtgttccttttctagact

SEQ ID NO: 422359 - DNA, 502 bp, Homo sapiens
tatccttgtgactggtttatttaacatcatgttctcaaggttcatccgtgttgttggatctagcaggatatctttatttttttaaggctgaataatagtccattgtgtgtatgtactatattttcttcattcattcatctgttgatgggcatttaggttgttttctttccttggctattgtgaacagtactgtaataaacaagggagtgtagatatctccttgagaccctgatttcatttcctttggagatataaccaatagtgggattgctggatcatacggtagttctatttttaattatttttgagaaccttcatactcttttccgtaatggccatacgaatttacattcccaccaacagtatgcaaaggtttcctttctcccacatcctcatcaacacttgttatcttttgttttttgtttgttttctgcaacatggtctsccctaggttgtccagactggagtgcagtggtacaataatggctcagtatagcctcaa

SEQ ID NO: 422360 - DNA, 646 bp, Homo sapiens
tttagtcaaaagtggagatgcatctgttgaaaaaatagaaaagagcatgcctgtggtttctagtaaatagaattcatcaagacccagcaaaaacaattcagattatgaaaactaattttttaaacagggataaggacactttctaatgggttagttagaaaagaagtggcttgcattgtttcactggctgatgggagactgataattttatagcagattaaggagcttgtattagtccatttccacactgctgataaagacatacctgagatggcacaatttacaaaagaaagaggtttaatggatttacagttccacatggctggggaggcctcacaattacggtggaaggcaaggaggagcaagcagtatcttacatggayggcagcaggcaaagacagcttgtgcagagaaactcccacttataaaaccatcagatctcatgagacttattctgtatcacaagaacagcacagaaaagacccatccccatgatacaattacttcccactggatccctcccacaacacatgggaattgtgggagctaccattcaagatgagatttgggtgggaacacagccaaaccatatcactctacccctgaccccccccaaaatctcatgtcctcacatttcaaaaccagt

SEQ ID NO: 422361 - DNA, 597 bp, Homo sapiens
tttgcaaaagttataaacatcttgaaaaaggaagctctaagatccccaaatagattcaatccaaaaaacgttttcttcaaagcagattatagcaaaactgttagaagtcaaaaacaaatgaggatattctcaaaactgcaaaagaaaagcatcaagtcacatttaacggaatctctaacggcagatttcttagcagaaaccttataggccaggaaagaatgggatgatatattcaaagtgctcaaagaaaaaaaaatttatcagtcaagaatactatacccagcaaaccaatccttcagaaataaggaaataatgtatttcccagacaaacaaaacagggaattcagcatcaccactagactgctcctataataaaggcttacaggagtccgacatctggaarcaaaaggacagtatctatcataaaaatatagggaagtcaaaaactcactggaagagcaaatatacaaatgagaaatagaaagaaatcaaatgttatccactacaaaaagccaccaaatcacaaatatatgcaataagaatgtttacaccaaacaatctgaaaacaattgacaaaatgacagaagtaggttctca

SEQ ID NO: 422362 - DNA, 543 bp, Homo sapiens
aaacgttttcttcaaagcagattatagcaaaactgttagaagtcaaaaacaaatgaggatattctcaaaactgcaaaagaaaagcatcaagtcacatttaacggaatctctaacggcagatttcttagcagaaaccttataggccaggaaagaatgggatgatatattcaaagtgctcaaagaaaaaaaaatttatcagtcaagaatactatacccagcaaaccaatccttcagaaataaggaaataatgtatttcccagacaaacaaaacagggaattcagcatcaccactagactgctcctataataaaggcttacaggagtccgacatctggaagcaaaaggacagtatctatcataaaaatatagggaagtcaaaaamtcactggaagagcaaatatacaaatgagaaatagaaagaaatcaaatgttatccactacaaaaagccaccaaatcacaaatatatgcaataagaatgtttacaccaaacaatctgaaaacaattgacaaaatgacagaagtaggttctcatctattaatcg

SEQ ID NO: 422363 - DNA, 600 bp, Homo sapiens
ggggtgggcctgggcacaggtagtttttacgactctccaggtgatgctaaagtgcagccaagactatgcacactggcctagtgctttcaggtaggcaggctggatgcatgagcctcaggggacccattaattacacctgcacctaaaggcaatttggggaggagcccacctccagctggcccgtaacttcactttcatggggccagagtgtttaaaccttggctagactctcagatccccagacyctccatgggcagctttaagtcttcacagctctcaccttaagatctactttctcaattacctcccttgtcccacatgtttatatctccatttcccctttcccatcttagataacctttacaacatagccttcttcctatcaagatctgtgtagaacagatcttctcaaagtgcagccctggaccagtgcaccagggtcacctgggaacttgttagaaatgcatgttctgtggcccaccccagatctgtgaatcagaagctcaaagtaagtcctggaactctgtgtttcaacaacttttccaggtgattctgaagcatactcaagttttgagaaccaaggacataaagaaataaagg

SEQ ID NO: 422364 - DNA, 605 bp, Homo sapiens
gaaaaactatgcattgcctaaagcatattccatgggagctattttataacactgtagcatgtcagtaactgacagaaaaccgctaaaacaacacgaaaccctgactcctgtctgtagacaaattctgtccagtggagacatttcaattgacttccctcccctgaccggaagagaacagatttgtctccatttgtacattcattttaatattcctaatctatacatttgcttttttgtttctcctttgaattggtggtaacactcaccactttcttcataaataatatatttaatgtgttcatttttatatctgacagtcataattttactcttataatgaaaattacttttattctatagtgttggttcacagtttggtgtaaataacttgttctttttcatttctacaaatgtagaaaggttgcactgatgcatcaaggttttcttgttggaagtctgaggactttttctgccaaatttcctgcataggcagtctgrcaaaccctgcatcgtcatgtgcaatgccctggtcctatctcttcctgctcccattcttctgggcacttggacatgcatagcttctattgcctctcctggatccttca

SEQ ID NO: 422365 - DNA, 422 bp, Homo sapiens
aagttccaaaaaggaggaagtgatgaactgtatccgacactgctgatagggctactaaggcatgaagtgaaaactgacatagaatttagcactagtgtggtcactggaaactctgacgagaccagctttactggagtgagaaggacaatgaatatttacggccattcgggtaaagtgtcccagttcactgggggccttggagtttttcccctcttattagtactgcaaaagtagcttgctggagggaaagatcagtctttctaattgcagatttttgtactctatgaaaggagttcatccrgtttcaattattgtgccttttttcattagatgtttattttgtattgatgtgtgattgtgtgtacatgtgtgtgggtgttttaatttccaatccagagctgctttgatcctagaaacagaat

SEQ ID NO: 422366 - DNA, 422 bp, Homo sapiens
aagttccaaaaaggaggaagtgatgaactgtatccgacactgctgatagggctactaaggcatgaagtgaaaactgacatagaatttagcactagtgtggtcactggaaactctgacgagaccagctttactggagtgagaaggacaatgaatatttacggccattcgggtaaagtgtcccagttcactgggggccttggagtttttcccctcttattagtactgcaaaagtagcttgctggagggaaagatcagtctttctaattgcagatttttgtactctatgaaaggagttcatccggtttcaattattgtgccttttttcattagatgtttattttgtattgatgtgtgattgtgtgtacatgtgtgtggrtgttttaatttccaatccagagctgctttgatcctagaaacagaat

SEQ ID NO: 422367 - DNA, 603 bp, Homo sapiens
cattcagcagtccaaagtcccccccattgcagcaaaggtactcttacatattggcaaatgaagagttgatgtttttcaaactatttccctacaagactcaactgtagagtaattttggaagacacaatatggattttaattttttatgggctctaacttgacatttgtgtgttaagaatggacaattttatgtctgcacaaaagtcatctcactgggtcagctccaaaacttcttggtaatatcaataatgctaccattaaaattatacaacatgtattaggtgcttggtatatgctagacaatgttctagggctttataactattcatcatttaatccttaaaacaatttaatgagataggtattattatcttcattttacagacaggcaacctgagcttcctgaacccaagcattctggctccggaatctgtataagtttaaacactacactatctgcctcttagaatcatttttcatgrcatggatacatttacatatctaataggcacactcagtggctgacctcagctgaaacactccaaaagttccccttccattgtaatgaatgacatctatgtgcccctgtagagagccaaacct

SEQ ID NO: 422368 - DNA, 574 bp, Homo sapiens
ggaaggaatgagaatgtgttaaattacttttggttctggatactgggagccttacttcacttccctaaatgcacagtctaagtcacctaagttgaaaacgatsactttttatgtgtatgaagtaactcattttacaaactgtgtcaaattgaagtgaataatctaagtggtcatgcccaagtttagaaaacaatgttagggagaagctgtaatatacacttgaaatactttatgaaagtgtatggaaatccacttgagctcgagttagtagcagggattttctgtggtattgtgagacactttcctaatggaacttccaggtgtttaggattgtatttttaaattatgtgactaccctatgaaagtagaagcttacaattaagtatcatatttgcaaatatcactcaataatgtttaggccatttaaatgttactagatttgtcttttgtctttcagttggtggttataggtgaggtctcctgcagttccttgcaggaaagcattttaaagcaggatacgtcttgttcaacaaattttaaatgcagtcctgtctgaaggcaggctgatgaagca

SEQ ID NO: 422369 - DNA, 574 bp, Homo sapiens
ggaaggaatgagaatgtgttaaattacttttggttctggatactgggagccttacttcacttccctaaatgcacagtctaagtcacctaagttgaaaacgatcactttttatgtgtatgaagtaactcattttacaaactgtgtcaaattgaagtgaataatctaagtggtcatgcccaagtttagaaaacaatgttagggagaagctgtaatatacacttgaaatactttatgaaagtgtatgraaatccacttgagctcgagttagtagcagggattttctgtggtattgtgagacactttcctaatggaacttccaggtgtttaggattgtatttttaaattatgtgactaccctatgaaagtagaagcttacaattaagtatcatatttgcaaatatcactcaataatgtttaggccatttaaatgttactagatttgtcttttgtctttcagttggtggttataggtgaggtctcctgcagttccttgcaggaaagcattttaaagcaggatacgtcttgttcaacaaattttaaatgcagtcctgtctgaaggcaggctgatgaagca

SEQ ID NO: 422370 - DNA, 533 bp, Homo sapiens
ccttgtaatgcatatgacctagttagttagatgtaggctctttttctggagcaagagaagaggaaactagaaccttttctttctttctttcttttttagttgaaaggccaagcttggagaagcaaayagctgtcagctttgagtaatacaaatcatttttatgtatggttccttagcagtctctagagaagtttatattgatgagattaaaattcaaatatgtactctttgtccagcatcttaacttctaggaattcatccaaagggtgaattatgtatgtgcacagagatttaaccacaaacatgttcatggtagtattattattaatagaggaaaagtaaatgtctatttaattcacttatttaagaatacacgttgagctagtgctttgagtcacatattattctatttgctaatcaatgttagattgaaacaaatgttaatgataactcatggagtgaaatactatacaggcattagcagtgctgtataagaatagtcaatgacatggcaagatgctgatgacatatta

SEQ ID NO: 422371 - DNA, 523 bp, Homo sapiens
ggtccccatctttgtttcaggaagaaaatgtattcagttctctttttcataggaaaaatcaagaaaacaattacatagtctgtatttaaactttgaaatggctcagttctcttctcatgtagaataaaaagtgatagagtattgaagtttgacttggagaacagtgtctaaatcaaataacctgttgttttacttttgtgcaataccactttaaatataagattcccaagggctgtttttacccatgtggctccaagaatgttttgtgactctttrtctataaactgcagtctatctgacatgcaaaagtccttattcctagttgcaaaacagggagacaccacgacataggcttaattttgctgtcatgaaaagggaccatagctggatggcttgatcataagaggaccaaggatagatatagttctcctggataaacatatgcaatctacacacattttcataaaatgtttccaaagatcatagcagtcattaatgggagcatattttttcttagaaagtc

SEQ ID NO: 422372 - DNA, 552 bp, Homo sapiens
atcgtaagctgacatgtcattaagtcatagagagaaggaagacaaacaaatatttgtcatcactgtgtgtcagccactgactaagtgttctgtctcttttcttattaaattgagtcaactacactgtcagatacaatcctaggtgcaaacagaggaagaggaagaaaaaaagaaactcagaactaaatctaaataattatacttgcaccaaataataaagccatagagtgtggatccaaacctgattgtctgagacactcactcactggtttagatgatgggaggaatccaattgggttattttgtagaatttttttaaagtgatactaccttatgattaaaccaagattatattctaagacattttttactatacttgttcaaaaatatttttcagcacctactatatgctggataktgttctaagttctcggaaaacatcaacaaactaaacagaaaaaaaaagaaaaaagaatgttgagtccttctagattcatatcttataagagaaagcattttgctcatcttgtattaaagttttttgaacctccc

SEQ ID NO: 422373 - DNA, 605 bp, Homo sapiens
ggtatctgtgggtggtcctggaaccaatccttcatggatacagagggatggttgtactaggcattgtacattatctcatcaactccttcaatcattctaggctatggataatgttttccaagggagggttttgggttgtcagtaatagaaaaggccaaattgactggcttaaccagaaaagaaaattcatcatctcaggaaacaaggaaaggttcagtggctccaggattgtttaattcagtgacccaccaatgttaacaagamccttcattctctctatatttccacttgaccatttgcagcatgtcatcttcatttcaaagctgcaaaatgaacagagttatggctgtccaatagaataaaatgagctgtttattcttaagcacctccttttagggcaagaacatccttcgctttgctagaattttgtcatataaacttgtcagaggcagttcttggcagagatattagacttccatgattgtcctagactttggtgttaaggttaggttgggatctcctcatgagcacacagttgggtggaagaagggaaattcttgaagaaaattgtggttttggcaggaaggaagacagaaaggaatttt

SEQ ID NO: 422374 - DNA, 546 bp, Homo sapiens
acaattcccacactgtcagtgagggtcttctgccctaattcaatgtccccacatcctcagctattcatcacatagctcatgtcagtccccttctctaccctatcatctcctgtgaatattctatattttattaatattaaacttgcagttttctcttattaaaattatgttgcctctccccaaacagacagccatatagtcctttattatagacgcttttggccygtgcactctgatggtctgtgatttcctgtaactttctggaatctgtcttaacatgaaggacttgcatttgttacctggcagttttctcacacagaggtcaattcaagcaatggattatacattttggtcatcagttccccgatttcatccttgagtgacttccaaattctctgggagatgctctctgatcttcatgatttatacacatttattctgccacgttgggcctagaacatcctgagtattgatcactgtttgatatagtattttaaccctaccaatttcagaaaacaatttgagagtgagaatctcatcaccatc

SEQ ID NO: 422375 - DNA, 606 bp, Homo sapiens
atcaccatcaatatatatcttttaagctctcattatatgccaagcactgtgcaaggtgctaggcttacaaaggggcttaagcaatggtttttcccatttctgggtgtgcagaaccattaaggagacaaatcaatggcatgcaacacagtatatgtgtatatggtagcacggcagcagttcacatgcacgaagcttgtcagagagggtgttcctggcaatatatgaatgtgaggggcttagactacttgaaccagaagagaccatrtttaagttatgttggcttgtcagcaactacagagtactgtatgtgtaacaaaaattcaataaatatacaaaaaaatgggaagagaaaatggtgaaagtgaggtgcattcacagcaggagaaatgctataagcaaaatcttaaaggaagatgtattaaggacacaaaaaaataataaattagatataagatatagctggttagtgatagaaaatgaatttgaagagagagactggatagatattgtagactaagagcacactcgtatctttttaagctaatacattattatttattagccattgtaacaaagtttgttaacacttctctgttttaatttttt

SEQ ID NO: 422376 - DNA, 325 bp, Homo sapiens
caatatttataaagtctcattttgtgcmtattctcagagaggcaatcaggatagctttgggtaaaataaagtctagacctcaaggagctccgaggccattgagaaatatagagatgtaaacaaataaataaactgatgaggaaatttaggagactttcactatgattacagcgaaccagtaaaattggtatctatcagtccagactctcaggcaagtgataagttttgttcttccagacctgtgcaatcccctccatcatgaggtgctgacctccaggagaactaagcttccagagcccattaacttgtggcaataactgccatt

SEQ ID NO: 422377 - DNA, 325 bp, Homo sapiens
caatatttataaagtctcattttgtgcatattctcagagaggcaatcaggatagctttgggtaaaataaagtctagacctcaaggagctccgaggccattgagaaatatagagatgtaaacaaataaataaactgatgaggaaatttaggagactttcactatgattacagcgaaccagtaaaattggtatctatcagtccagactctcaggcaagtgataagttttgttcttccagacctgtgcaatcccctccatcatgaggtgctgacctccaggagaactaagcttccagagcccaytaacttgtggcaataactgccatt

SEQ ID NO: 422378 - DNA, 571 bp, Homo sapiens
ctcactagccacctcccatttttaacatctttcacagacagcatctaagttataaggtacactttaattttctaacacttgtggaggcttgaaagtgaccaacagtgaaagaacaaaaagtcctatgtttattttcaccgctttttccctccctcaatattgtcacyggtaaactgagatcttttcccattttgtgtggattgcacagaagaacctccagctggaaaagacaatcaggtttttttttccgctggccagggaatggagaaggcactctcttgctctaaatgcacctctccccaaacattagaaagcatagggtttttaaggactgggtacatggccagagaggaatgtttgcatgtgcagagtgggactccagacgtgcagacttaattcataagtatgtcttcatacaacccacgtaaacaaaatagcagaagttttcttttagaggtggaatttttgcattataataatatgttaatgatctaaaggccactagggattgtctgctccagtgttgctggtttggggttcttatctccctctggtaatctggacagaggtc

SEQ ID NO: 422379 - DNA, 520 bp, Homo sapiens
ataggaagcagtatatgaattgcccagtaatatctgctacatttgagagcaaatattttaatgattttatttctgggatcttttttctcttccacaaaacttgcccacaaattggtatcataaatagctcattcacattaaaggtttacaactggccagatgaacaggataaggtgaagtggaggggtaataaaatgggtgaagacacgagcctgcataaagatgacattgcgccttcattctctcctctgcaggtctgcagcattgtggagactgggtcagtactaccccaagcacatggctggggagcaaggaaagaacatgttatctccctcagtgctcctgcagccttcaataagcaaacctgtgctctccttcaatttcakgctccacatgcatctcagacttctaacagtgtgtctgaacaatgctgaatccatcactctgttcctccaaaagtgtatgtgaatattcattagtgtttaatgtagaaaagaagaaggggtgaagaaactggggt

SEQ ID NO: 422380 - DNA, 483 bp, Homo sapiens
tgcatttgggtaagtgtgatagagacagccaaggtggcgcatgggccacggtgagctgtgtcagcctttcccattgcatatggctgcctggctgcctctatggtgaaaggtaactgtgggtagtagaaaaatgattggtgaaaagagaacaggaataggaaaagggcagaaaatgcccaccgagacaggtaatyggggaagaacaaatagacagagggagtggaaagaccgtgttcacagaccccatggcacatcccttctagctgtgtgaccttgcaccagttaccctggcttccatatctcttacgtaggaaacccaacaggctcttgtggctgtgttctgatccattagccatttgagaagcccctaacttcctttcccatcttctctaccctgccatgtaggttgattttattttttattcatttctaagttgctgagaactatagtaacaaccccatatggctgtcactcagatagaa

SEQ ID NO: 422381 - DNA, 483 bp, Homo sapiens
tgcatttgggtaagtgtgatagagacagccaaggtggcgcatgggccacggtgagctgtgtcagcctttcccattgcatatggctgcctggctgcctctatggtgaaaggtaactgtgggtagtagaaaaatgattggtgaaaagagaacaggaataggaaaagggcagaaaatgcccaccgagacaggtaattggggaagaacaaatagacagagggagtggaaagaccgtgttcacagaccccatggcacatcccttctagctgtgtgaccttgcaccagttaccctggcttccatatctcttacgyaggaaacccaacaggctcttgtggctgtgttctgatccattagccatttgagaagcccctaacttcctttcccatcttctctaccctgccatgtaggttgattttattttttattcatttctaagttgctgagaactatagtaacaaccccatatggctgtcactcagatagaa

SEQ ID NO: 422382 - DNA, 553 bp, Homo sapiens
ctaaaaacttccagtagctgcgcatagcatttagcatcaaattcgagctcctcacaaagacctataagcctccaaatacctctacattcccttcttgtacccatctcatccttattctgttctggaacttcaggtactggccttcctccagttcttcaaactgccaagcttgatcctgccccagggcttttgcacttgtcattttgtggtttccactgcctagatttcttctcctctggtactaaagatggctggactctatagwccacatatcatcttttaagagagacccctgctgtgttaattcagaatatgtttacattgaactccagcctgaggattaaaaaaaaaaaattcctgttttacttattttataatacttctcattacttaaaatattaccttattttttttcatgtattgctattgcatttatctgttgtgcccaagactcttttcctgggatcagaagagtgtctagtacgcagaaaacaaggtatcactaaatatttcttgaataaatatgctatgtgggatagtagcataattacca

SEQ ID NO: 422383 - DNA, 553 bp, Homo sapiens
ctaaaaacttccagtagctgcgcatagcatttagcatcaaattcgagctcctcacaaagacctataagcctccaaatacctctacattcccttcttgtacccatctcatccttattctgttctggaacttcaggtactggccttcctccagttcttcaaactgccaagcttgatcctgccccagggcttttgcacttgtcattttgtggtttccactgcctagatttcttctcctctggtactaaagatggctggactctatagaccacatatsatcttttaagagagacccctgctgtgttaattcagaatatgtttacattgaactccagcctgaggattaaaaaaaaaaaattcctgttttacttattttataatacttctcattacttaaaatattaccttattttttttcatgtattgctattgcatttatctgttgtgcccaagactcttttcctgggatcagaagagtgtctagtacgcagaaaacaaggtatcactaaatatttcttgaataaatatgctatgtgggatagtagcataattacca

SEQ ID NO: 422384 - DNA, 516 bp, Homo sapiens
taatttgctgaacattatgttactacaaagtgctattgatattcttttagttatttaaaacctatttcaaaatatttttgtttcaattatgcattggattgttattaactacattggattatgcatagaattaaattatgcattggaattttaatatttttatttcttgatattcagagaatacyattcaatgcaattcagttttgaaatttttgtaagatttagaaattccagtacttggaatctatcctaacaaaatgatcagaattgcaaagggagagatacccatttctgttgagtacagtagaggaagtagaactatcctaaatgatctacagtaaggaaagggttaaatatcatattaaacaccatatgagagatgattttcaagtataaaaaaatttaaaaatttttaaaaatatttatttgctgaatcacaaactgactttattatattggtgggatttttaaacttaagaaataaaacaattttcaccaataaaattatttttaaaa

SEQ ID NO: 422385 - DNA, 516 bp, Homo sapiens
taatttgctgaacattatgttactacaaagtgctattgatattcttttagttatttaaaacctatttcaaaatatttttgtttcaattatgcattggattgttattaactacattggattatgcatagaattaaattatgcattggaattttaatatttttatttcttgatattcagagaatactaytcaatgcaattcagttttgaaatttttgtaagatttagaaattccagtacttggaatctatcctaacaaaatgatcagaattgcaaagggagagatacccatttctgttgagtacagtagaggaagtagaactatcctaaatgatctacagtaaggaaagggttaaatatcatattaaacaccatatgagagatgattttcaagtataaaaaaatttaaaaatttttaaaaatatttatttgctgaatcacaaactgactttattatattggtgggatttttaaacttaagaaataaaacaattttcaccaataaaattatttttaaaa

SEQ ID NO: 422386 - DNA, 516 bp, Homo sapiens
taatttgctgaacattatgttactacaaagtgctattgatattcttttagttatttaaaacctatttcaaaatatttttgtttcaattatgcattggattgttattaactacattggattatgcatagaattaaattatgcattggaattttaatatttttatttcttgatattcagagaatactattcaatgcaattcagttttgaaatttttgtaagatttagaaattccagtacttggaatctatcctaacaaaatgatcagaattgcaaagggagagatacccatttctrttgagtacagtagaggaagtagaactatcctaaatgatctacagtaaggaaagggttaaatatcatattaaacaccatatgagagatgattttcaagtataaaaaaatttaaaaatttttaaaaatatttatttgctgaatcacaaactgactttattatattggtgggatttttaaacttaagaaataaaacaattttcaccaataaaattatttttaaaa

SEQ ID NO: 422387 - DNA, 487 bp, Homo sapiens
ctctcccttcccagtcgaattgtgtatggtgggtagaagctgggacatccaccaggagcttgttacaaatgcagaatcttggcttctacccagaactcctggatcagaacccgtgcattaacagctggtgcttctgcaaattgaaatttgagatgcagcattctagagkatcactgaaccttttgttatttcagttctcacctctatgacttatttactgtggatcttaggggtaggagagagtagaaagaatcaaagttggctaagttattaaaaagaaggaattgtgttgaaaacttttgttcttcatttctgtcatcacttcagtactctggtactcatttttctcattttttaagatggagaaacagagtcagagaggttaagtcagtggcccaaaactacacagctaattttggtagggcttgaatttgaatctaggtctgtctacttcacattaatcaatatctttattgatgttgatgta

SEQ ID NO: 422388 - DNA, 487 bp, Homo sapiens
ctctcccttcccagtcgaattgtgtatggtgggtagaagctgggacatccaccaggagcttgttacaaatgcagaatcttggcttctacccagaactcctggatcagaacccgtgcattaacagctggtgcttctgcaaattgaaatttgagatgcagcattctagaggatcactgaaccttttgttatttcagttctcacctctatgacttatttactgtggatcttaggggtaggagagagtagaaagaatcaaagttggctaagttattaaaaagaaggaattgtgttgaaaacttttgttcttcatttctgtcatcacttcagtactctggtactcatttttctcattttttaagatggagaaacagagtcagagaggttaagtcagtggcccaaaactacacagctaattttggtagggcttgaatttgaatctaggtctgtctactycacattaatcaatatctttattgatgttgatgta

SEQ ID NO: 422389 - DNA, 402 bp, Homo sapiens
atcaaggaagaaagagaaacctatatatcttgccttttgaatgcccctaaaatcatactgtgtggcctaatatgcctgagggaaaaactaaccttgacctggatatttaaacaatgccttaggcctcttcttttactaggacagctatagatcattgaaagatacaggacagaaaccttctgctatttaayaggagccttgggaccctgtctcaaattgagacaaattcaatgtgatagccctctattcaggctggctaattgcaaaaccacatgatgaggaggaggagaaggaaagggattatagaaaatttgttactggctactaatcaaaagatttgaacatcaccatttggcacaaaaaaaaagttccaagaaagaagcgaatttcatgtacttcatc

SEQ ID NO: 422390 - DNA, 606 bp, Homo sapiens
tacaggacagaaaccttctgctatttaacaggagccttgggaccctgtctcaaattgagacaaattcaatgtgatagccctctattcaggctggctaattgcaaaaccacatgatgaggaggaggagaaggaaagggattatagaaaatttgttactggctactaatcaaaagatttgaacatcaccatttggcacaaaaaaaaagttccaagaaagaagcgaatttcatgtacttcatcctttacttttttttttcctgattgtaagtcacttcctttgaaaggccaggttgcgatgacttctaagcagcactccatgaaatgcagtaaaccatcactttgatgtttctaacactttgcaaagagacaagagcttctttaattcattagttcattgaatttaacttaaagcattgcaacaaamctgtaagaatagaattaagagcatgattattagtgacatatttgtctagtgattggcagtttataacagcaatttacaatgtcagtttacaatgttttcaatgtgtgtcacatttaggaggaaataagctatgttcagctggaacattgtgtggtagatgtttttccttcgtctaactggga

SEQ ID NO: 422391 - DNA, 484 bp, Homo sapiens
cagaggcctgggcttgagatttagccctgagctctgcccatgcccttcccttccagtgagaaaatatctttctagaagagaataaatatagaaagcagagacatccatcatggatcaaagagactagatggtgactggggacaaaccatgccagtttattgtccattcctgacaaataaatagctctcatccccaaaatacaaaaatccagaccaagaggcctagtgataaaatcgggagggagtggtagctactgaaaactaaaaacattctcgtgttacaacaataggatttcaatttattcatgttctaaatatcatttccttactcaaaaatctttacagaggttcacaggatagttataattgcaaagctgtagctatcattaattaagcattttctttgtrccaaccacttttgtctttgttggtggttcatgacaaccctcatttgtcatgacctccccgtgggaaacaggcatcat

SEQ ID NO: 422392 - DNA, 575 bp, Homo sapiens
ccctcttgtacttcctgtctctgtctcctccctctccaccctctctttctctccaaggtacatatctaccatctgctaaagagtcaaacctcaggtctggaattcagaagatttaacaggagttagcttaaaaataaatgcttcacatttcataaactaattgtagaataaagaaaagaaatactagggtgaaatttcgctccctccttgtccagtgaggtattgttttccaagtgaaacgttagtggtttggtatctgtttatatcataacaaggtgtttgcttttcacaatcaggaatgccaacctagagcttcagggatatttcttccccaygctgagtaaaattccattttacgttaatcttaaaacagcttgctgttcagactttccctcaatttaacagacatctattgagcaaccactgttttcccacatagccctggatgcttgggatatatcaatgaacaaaagatacaaagatctctgccctgaaaaatactaattcttagctagtggagatagacaataaacagtggacataataaataagtcaactataggttatgggttgaa

SEQ ID NO: 422393 - DNA, 550 bp, Homo sapiens
gtgcagtttaaacagacgctcttctttagtgtggctggtgctcattcctgcaccgagtttgggagatgaataaagcatcctctgaataactctgggcctccagtgttgtcttcattctccttgaaatcacacctctgtatggtttgacaggggatgaaaatttttaaaaagtatgaaggtaacccaaaagagcagaaggctgcatattgagatactagatttttaatttatttctggctcttccactgctagtctgataatcaaacatttattaggagtcttttatacgcctaatactaagatactacagaagtgtcctggaaaatgctaaaatttgtccttgccttttggcagcttacagtccagtgggtggcaatatgagttcacaagccaaaaccaaacaaggtctcagagaggaaccttgtgcagggctsagtaatgctgacatagtaagtggcagggagaagaaactgtgggctgaacattttggtagaaaatgtggagtttcagcttggatttgacatgcaaaaggaattttaataaggaaact

SEQ ID NO: 422394 - DNA, 596 bp, Homo sapiens
ggagtttcagcttggatttgacatgcaaaaggaattttaataaggaaactaaggcagaatatgtgtatatgtgcagatatccttatctgtcaattgggttaatgataactgtttcctgactgcaaagccattgtgatgtagatagaagatactgagtatgggaagaaattgaaaagttcaaatcattatacaaacacgaatatggggcatgtttgaatacttctccttgagacccaggataaatgcagtgggtctttgtttcctatgttttattacaacagtatcgattttaccccacagtcttcagaggaaatgtgcacacatgccatcttcttcccagtttaaagtatggttccatcttaggtccagtgctcctgtaaamcctggagcactaaaatctcctatttgttccagaatatccattgtctttctcttcaggctgtgcctctctgggtctcagccatggtaacaaagttgtccacatcctgcactttagcacaatgtaataaatagcaatgccattgtgactcaaagggtgaatgcagattttaataggttgtcccttgaatcggcctttctgccttgtcctttcttct

SEQ ID NO: 422395 - DNA, 539 bp, Homo sapiens
tgtgacacattgaatatacatctcattctcaacttttcacaagacttgaatgtatttcaaaagaaactagacatttttactatttatcaaaaatagttaagatggaaaaccattaaaggtttttaagattaccataaaataattagtagagaacattcccttctggagctaacactataacatgaatcagagaaacagaattttttaagcaacctcatttttagacacacatttcattcatccattaaattgctcccgtattctaccactaatggaatgtttattaaatgccagtcactatagccaagtggtaggaatatagcaattaatgtccatagagaagaatctaaatcataccaatgtacctagtagtcttcctgataaaagtgatatcttcaccaaatataaagggttggtacaaattacaaaaataaataagcaaaaggtggagggtcttccatgttgaaggatttatttgctatttacttgctacttgtgagaatgaagaagaaaaatsctgtcataagcagaggctcctt

SEQ ID NO: 422396 - DNA, 588 bp, Homo sapiens
ttggataaggtctagtggaaagcaacacttctattcaaaagatagaggaattagacagcaaggaataataaaggaattgattttatagcctagcggatgcctgggtaaatgagggtgttaatttctacacgtacagtgagttcaactgaaagaaatacatcactgagaaaagatagttgcttagtatgtgcaataacccaggagttgacaagaagggatgctgaagaacacaaacaataaaaaagtaaaccattggctgggcatggtggctcaggtctgtaatcccagcactttgggaggccgaggcgggyggatcacgtaaggtcaggagttcgagaccagcctggccaacatagtaaaactctgtctctactaaaaatacaaaaattagctaggcgtggttgtgggtgcctgtaatcccagctacttgagagactgaggcaggagaattgcttgaacccaggaggcagaggttgcagtgagacgagaccatgccactgcactccagcctaggcaacagagcgaaactctgtttcaaaaaaaaaaaaaagtaaaccataaacaaaacaaacaaaaaataaccaacca

SEQ ID NO: 422397 - DNA, 469 bp, Homo sapiens
tctgtttttccctctcagtctgtaaacattagatcatactctatttgtccaatcaaagtttggagaactgtccaaacttcactgaacctaagcacaaaagtggagtttctcttgtattttcagctcttcactctgaaggctcctgtgtcatgtaaaactataatcaagtaaatttgtatgcctttcttcctattaatctgccttctgwcagtgattttcagctacctttcagaggcaatggggaaattttcccttggcccctatactatccaattgagtgcttcctgatgtaaaggtgacaagacccttagaaggaggactgcttcagagctctgagtttcctactttgacaatctttcatcatcaagttcagtaaatggctttccttctctttatttcatccatagaaattaattcatgttcccccagaatgagatgtgaaatagtggtattgtctcctcttacttaa

SEQ ID NO: 422398 - DNA, 506 bp, Homo sapiens
acatatgttaatgtcttaaaatataaatggtgctaaacaattccatttgctttcctgttttgttcttctttctgttgaggccaggtctaatccccaaatgagattcttgcagatatttgaaagtattaaggggatattttgtaacgtacctttttcttcctccaaccacatcggagcaggtttgctccaactctttcttaacatccatctgaatgtttacaagrtgaagaactttttgtccgacaaatggagtcatttgggtgaagggacattgagcttatgcttgccactatcactgccaaactaataaaacccatgctaagaaaatactgaaagttgaaaaatatgcattagcacgataaagctttaccttctgctctctaacagtccaacgtccgggcagactctttaccttgcttgctcaccttcctaagataatttgttaggaaatgatcagagatacccatctatgctatagtgtggacttataaacacagagcgccagt

SEQ ID NO: 422399 - DNA, 506 bp, Homo sapiens
acatatgttaatgtcttaaaatataaatggtgctaaacaattccatttgctttcctgttttgttcttctttctgttgaggccaggtctaatccccaaatgagattcttgcagatatttgaaagtattaaggggatattttgtaacgtacctttttcttcctccaaccacatcggagcaggtttgctccaactctttcttaacatccatctgaatgtttacaagatgaagaactttttgtccracaaatggagtcatttgggtgaagggacattgagcttatgcttgccactatcactgccaaactaataaaacccatgctaagaaaatactgaaagttgaaaaatatgcattagcacgataaagctttaccttctgctctctaacagtccaacgtccgggcagactctttaccttgcttgctcaccttcctaagataatttgttaggaaatgatcagagatacccatctatgctatagtgtggacttataaacacagagcgccagt

SEQ ID NO: 422400 - DNA, 506 bp, Homo sapiens
acatatgttaatgtcttaaaatataaatggtgctaaacaattccatttgctttcctgttttgttcttctttctgttgaggccaggtctaatccccaaatgagattcttgcagatatttgaaagtattaaggggatattttgtaacgtacctttttcttcctccaaccacatcggagcaggtttgctccaactctttcttaacatccatctgaatgtttacaagatgaagaactttttgtccgacaaatggagtcatttgggygaagggacattgagcttatgcttgccactatcactgccaaactaataaaacccatgctaagaaaatactgaaagttgaaaaatatgcattagcacgataaagctttaccttctgctctctaacagtccaacgtccgggcagactctttaccttgcttgctcaccttcctaagataatttgttaggaaatgatcagagatacccatctatgctatagtgtggacttataaacacagagcgccagt

SEQ ID NO: 422401 - DNA, 606 bp, Homo sapiens
agtacactgtcactagaaacttgaggtccccttttttgtcaacttcaagggatgacttttactttagagaaaatttctttcaaaggactctgtctgtctttggaatttctacttggttaatgatgtttagggatatgaggaggtgcagagaggagcagaaatcatggtggcatgcataaaaaacatgccttgaaatacattctatgatgtgcttgccattattatgattattatagttattgattcacataggcatatagaaactaaataattccaagcttacttttcaaaaagacaaaaattagtgtttttctcttaattttagataaaatcytagtttaaaaaattttaatcttacccttatcttgatttctacttttcactcttcatttcacactacatgtgggggtaggacagaaataaagagaaggaatcatgtttcctttattttaacccccaagtcatctttcccaaatcaatgataagggttttatctgcatactgtggatgacttgagaaaaaactaaccaggtggcaagccagctacattggactttgtgtgggtgtaaagtccagctctgccacctttacttggtgtggcatcac

SEQ ID NO: 422402 - DNA, 606 bp, Homo sapiens
agtacactgtcactagaaacttgaggtccccttttttgtcaacttcaagggatgacttttactttagagaaaatttctttcaaaggactctgtctgtctttggaatttctacttggttaatgatgtttagggatatgaggaggtgcagagaggagcagaaatcatggtggcatgcataaaaaacatgccttgaaatacattctatgatgtgcttgccattattatgattattatagttattgattcacataggcatatagaaactaaataattccaagcttacttttcaaaaagacaaaaattagtgtttttctcttaattttagataaaatcctagtttaaaaaattttaatcttacccttatcttgatttctacttttcactcttcatttcacactacatgtgggggtaggacagaaataaagagaargaatcatgtttcctttattttaacccccaagtcatctttcccaaatcaatgataagggttttatctgcatactgtggatgacttgagaaaaaactaaccaggtggcaagccagctacattggactttgtgtgggtgtaaagtccagctctgccacctttacttggtgtggcatcac

SEQ ID NO: 422403 - DNA, 573 bp, Homo sapiens
ctttagccactgttactattttgttgttgctgttttgttgttgttgctatgtttatttttcctatcatagccttatgaaaccagtacaaacacatgtaatgctgcagccataatgatctgatcatacttagttagcattcctttgtctctctttattacttctttttgctcttcaagatttacttcatgtttcaatcccgtgaccagcctccacataggttgcctgctcatatgacatataagtacttctgtgtgtgtatatatatatatatatatatracacttaagcttctttgttatctatattaaaagattgtaaatattttaaagtcaggaactggtttgttgtgagcttttcatttctaatccctgaacctctaacaaaacaaagtctggtgtatacatatattaaatatttgatgaatatttgaatcatttttgtgaaatagagacaagcagactctcctcagttgaattttcttctctctgttaaaacatcacttgctactttggggttttattgttaaggtttttttttcagtgcatctagaaagaaatctaatactcagaacc

SEQ ID NO: 422404 - DNA, 620 bp, Homo sapiens
aagactctgtctcaaaaaaaaaaaaaaaaaaaagaagagtcacagaggcagtgagtggccaagccaggacagaaatcaaggtcttctgacatatcttccttgctttactaggctagctgccaaaaagaattggatccagcagaccttgctatatgaaattttctgcatgcagaggctcatgaaacatcatatcaacaatctctaaatgacaatttccactggctatgtgtaaactaggaccaatatcaccaaggaatgagaactctcycttcatgactctgggattctaaacctttctctagaacaatgacctagttaatttattaatctaatcttttaaatgttaaccttttgaacctttcccatttcataaagtcactgggcccagcttcaccagtctgcttttactcatgatagaattatagaagttcaaatcagttaaataatttagccctcattttacagatgagaaaaagcaagcagagagaaagacagcagtcttaccaaatgggtggcagggctggaatggaagcccagatctaccttcttcctgcctctttcttgaatgtgcatgtgctagttttctccttagagaaggaaatcaaaaagagaaatcaagc

SEQ ID NO: 422405 - DNA, 620 bp, Homo sapiens
aagactctgtctcaaaaaaaaaaaaaaaaaaaagaagagtcacagaggcagtgagtggccaagccaggacagaaatcaaggtcttctgacatatcttccttgctttactaggctagctgccaaaaagaattggatccagcagaccttgctatatgaaattttctgcatgcagaggctcatgaaacatcatatcaacaatctctaaatgacaatttccactggctatgtgtaaactaggaccaatatcaccaaggaatgagaactctcccttcatgactctgggattctaaacctttctctagaacaatgacctagttaatttattaatctaatcttttaaatgttaaccttttgaacctttcccatttcataaagtcactgggcccagcttcaccagtctgcttttactcatgatagaattatagaagttcaaatcagttaaakaatttagccctcattttacagatgagaaaaagcaagcagagagaaagacagcagtcttaccaaatgggtggcagggctggaatggaagcccagatctaccttcttcctgcctctttcttgaatgtgcatgtgctagttttctccttagagaaggaaatcaaaaagagaaatcaagc

SEQ ID NO: 422406 - DNA, 603 bp, Homo sapiens
ggtggtgatgtcggattgcccaggacattgtataggctagtcccacatgcctctggtgtttgtccatttgcccatctgccagatcttagtcataaagcacagctaactgtaagggaacctgaagaatatagtctacctgtgtgcccaggaggaaaggggaaaagttttggtgaacagctagccagcctcttccaccaaattactgttacctggaaggtagttgtgttttcagtgtaaataaaaaggtgaagataaataagcaaaaatatgttgtttgattgagctggyggaagatgagctaggaggcattggtggagatgttgcctttggataagggggtagaaaaatttgttctttgagactagagagaaggcaatgtaagtgttgataggtacccagtagaggactctgcaaccatgaaatcacattttagtcttcatggaactaatgagacagacaacagattcaaaatcaagatcattgtgtagacttgtgcagtttgtgtttcacagaaatgtcgtgccaggaaagcaggaaatgatagaaatcagccaacagcctgctctctaagcagtgccctcgggggttgtctgtatcctcctg

SEQ ID NO: 422407 - DNA, 596 bp, Homo sapiens
agtagtaaaacaaatttaaaacatttgatatgtttttgtgtatattttagaatactgcttgtcacttagcaaatgcagtgtaggtatatgttattgttattgttactattattaacacttttttcttactgggaccaataatatagagtaaatagtctaactgtaatcaaaaaaattcttccaaacggaagttgcctttcagtgagtttggaataagtttctagattccttcattctgatgtggctttgactttctccaaggatactagtgagcttttcctgaaatactttttcctttgggaaaaccagtgtgcatgactacaaatattaaaatggcttggtttccaaacaagatattctctttgtgtttttaatcatacagtgcatcccatcttgytgttttttgaaatatgtttctggtccttaaatttctccattggtcacctttatcatcttatttctgattccttaataggagttttaatcaagtcttcagtacttgaatgtgttggtacacatcttcggggggtactattttatccctgattatataatcaaaatgtcatcaaatatttattgtatcatcatcattaaaa

SEQ ID NO: 422408 - DNA, 581 bp, Homo sapiens
agctctttttgagaattctaatcctgtttacactattggggaaaaagtagagcataacataattcatatgagtttaaggaaattaacctatttgttactcttattggactgctttcatttgtcattagtttttagcatagattaacaattaacaaatagtgtatttatytttttataacttttacattaactattataaactaagtataatcggatgtttcatttgaattttttatacaagtaacaaggcaataatttggagcacaagaaatatttatcacagaatgtgaggtacaattaggccttgtagataaattactctttttttttcacatttttaaacactgtattacctatcagcactctagaagcaggcatagtttttgtgtgtgaaaactaagaagacacagttaagtattttaaagaatcttctactaaaaatctgtttactttcatattaaatccagtagtttctatgatttatataatgttctaaacgatttgagttataccaagataaaccatagttattttctttataatttttcattttggtgagcaaaacagaccgagtttggaga

SEQ ID NO: 422409 - DNA, 495 bp, Homo sapiens
tgatgccactgcagtgctaaccacaaagccagtctcataacgcttattactattgttaaaacaactgcacgccaagtctggaaacccaaggcagacaacaacactccgttttcaaaaccatttgaatttttttttgcttcagggtgagtttgaagagaataaaattcccatgttggctaaaagaagaggaatctagccagattccaagataattaaactggtcaaccggctctaagacattaacagctggtgttttaatcactaatgagataatcagtttctataatctgggagatggrccaaaaaacatgggcttggtttttcctttcattttaaatcagttcattggagaggagctattcttctatcttagtgctgtcactctgcaagctgctgataacctgtagccgagaaagaacattgcagtttcaccagtacacatatgcacagaagacagggcacattcagttagaccgttcttaacaaaataaacag

SEQ ID NO: 422410 - DNA, 517 bp, Homo sapiens
cattatgttggtcttgcaatacagttctctgtcattactttgttatttatgattttcacttgatataactgcatgaatggcacaggaggcttgtcagagctggaatcagaaaacacttgttcacaagaactaggagatctggtgatgtccagatatatccgtttaagaagtgttttaaagcaacaggcaacccagcagaaatacttagtctgtttcagttgtattttcattttacagtggattaaaaagttcagaggaagtataaggaaatgattataggttgttgactaataatggaacagtmaggtggagaagtatgattctaatgattattagcaatttattatagtgtttctaaaggcacattacactttaacattttgtaggtacctctaccacagcacacagttcatatattatattgaaattgcctatttacaaagtgctttccataggtaaatgtgtgcatgctttggacatgggcagtcttttaaatctttttatgatgctggcatgc

SEQ ID NO: 422411 - DNA, 579 bp, Homo sapiens
ccagtaattactgccctggggaaactattaagcaagggtgtgtgtatgcgtgcgtgcacatctgtgtctctgtaggaaaaatatataataaaatgtaggccaggcayggtggctcacacatgtaatcccagcactttgggaggccaaggtggatgatcacttgaggtcaggagtttgaaaccagcctgaccaacatggtgaaaccccgtcgctactaaaaacacaaaaattagctgggtgtggtggtgcatgtctgtaatcccatccactcaggaggctgagaatcgcttgaacctgggaggcagaggttacagtgagccgagatcacgccattacactacagtctgggtgatagagcaagaccctgtctcaataaataaataaataaataaataacaagaatatatactgaaatgttaatggtaattctggttgacaggaatctttatttctccctgtaaactttcttgtattttctgggttatttgaaattagggtgtaattcttataaaatcagaaaaaattacagctacatttttcttgatagtactttgaattgattcagatctcctctatctg

SEQ ID NO: 422412 - DNA, 533 bp, Homo sapiens
gtggtgatatgtcatatgataaattttataagtttcagatttattagtgtgggaaattttatttgttctgtggaagttacttgcatagggcacatggtatagaagaaaatgcgccagaatctagcaatctaggtcaaggtcactagtatctaccattaatatttggagcctaccataaattggacataagggaagtagaaataacctctctgagttatattgtatagccaacagaggacggattggarcagaggtatgtaatgattccttagacaggcaaaatggcttttcagatattgttttccagtaacaatattgaatatcagcatacctaatcaaccagaagagaaaatcggtgatctcgtaatgtctaagagataggtacattttaagagaggagctttggtgtaaaagtcccattgcaaggccagaacttttctgaacagggatgaactggacatatttggcctgaagttattaaactttggaatcatttaaataattttcccttgttttaattttgacgtcagcct

SEQ ID NO: 422413 - DNA, 601 bp, Homo sapiens
gtttttgttctatgtgatttgaaaaaaaaaaagaactttttcttttaaagacttcagtttgaagaaatgtttacatctcactccttagctatgtgtttctcggctgcctgcatctatgtgatgacagtctcttgcgtttcacaatagtagaatctcccaatgaggacaatttgaacttcaagggaaagaagatgtgatttgagagccagaaagccaaaaaggtaagaatcacatatagaggcaactggctgccaaatatggatgtgaacaaacaggcaaaggaagcagttctaacaattwgttattatgctgggtaggaatatttagataaccagcatgtaaggatcacaagtgcaaaggaagaggctgcctaatgaggttcccctcatctttacattctatagtaatgttcagcttacacagaacttccatctcctttatttcattcagctctcacaacaatcccatgatggataccaggatactaatgttttccctgttttacacaggaggaaactgaggctttcaaaaagattgctgaatttcctaatattatgtttcaataagagacaatctaagacacagtaaagaagatggagtt

SEQ ID NO: 422414 - DNA, 474 bp, Homo sapiens
gataaactagaatatggcagattatttcattcaatttaccccaatttttttgcatttcatcaggaaaatgcaaatcaaaaccacagtgaggtacttaccgtctcacaccagtcagatgattattactaaaaaggcaaaaaacaacatatactggcaaggctgtggaggaaagagaactcatatatgccattggtgagaatgtaaaataattcagctactgtgaaaagcagtttgaagatttctcaaataacrtaaaacagaattactatttgatggagccatcttattactgagtttatatccaaaaataaatgattctaccaaaaagacacatgcaatcatatgctcattggcagcaccattgacaataccaaagacatagaatcaacctaggtgcttataaatggtagattaatttaaaaaatggcacatataaatcatgaaatactatgagccataaaaaagaatgaaatc

SEQ ID NO: 422415 - DNA, 474 bp, Homo sapiens
gataaactagaatatggcagattatttcattcaatttaccccaatttttttgcatttcatcaggaaaatgcaaatcaaaaccacagtgaggtacttaccgtctcacaccagtcagatgattattactaaaaaggcaaaaaacaacatatactggcaaggctgtggaggaaagagaactcatatatgccattggtgagaatgtaaaataattcagctactgtgaaaagcagtttgaagatttctcaaataacgtaaaacagaattactatttgatggagccatcttattactgagtttatatccaaaaataaatgattctaccaaaaagacacatgcaatcatatgctcattggcagcaccattgacaataccaaagacatagaatcaacctaggtgcttatmaatggtagattaatttaaaaaatggcacatataaatcatgaaatactatgagccataaaaaagaatgaaatc

SEQ ID NO: 422416 - DNA, 474 bp, Homo sapiens
gataaactagaatatggcagattatttcattcaatttaccccaatttttttgcatttcatcaggaaaatgcaaatcaaaaccacagtgaggtacttaccgtctcacaccagtcagatgattattactaaaaaggcaaaaaacaacatatactggcaaggctgtggaggaaagagaactcatatatgccattggtgagaatgtaaaataattcagctactgtgaaaagcagtttgaagatttctcaaataacgtaaaacagaattactatttgatggagccatcttattactgagtttatatccaaaaataaatgattctaccaaaaagacacatgcaatcatatgctcattggcagcaccattgacaataccaaagacatagaatcaacctaggtgcttataaatggtagattaatttaaaaaatggcacatatamatcatgaaatactatgagccataaaaaagaatgaaatc

SEQ ID NO: 422417 - DNA, 301 bp, Homo sapiens
tgttatagattggaatgtaggcaggaatgacttaatttgctgcaaaaggagctaaatgagaaggataatactcgggaactggtattgattgttaagttggagcactgccagaggtggtaagatatgaagactcataggcatttactggacttggcaaaataataaagtaacagttgctctwatagggtgcagcacaattctctgggtgggcttgtacttactcagttctcccccctttcttgcttgtagttttcaagaataactgcagaatatattgggaatgctagatcctgagataggt

SEQ ID NO: 422418 - DNA, 475 bp, Homo sapiens
taaactgaaatttcagaaaggaaagattaccaaatgaggagaaattttcattcaggtttttttcccaaagagcatatgtctatttcaggcctgtgctaaggttcagcccatacaaaagtttcaatgggaaggagggaacagcagatattttagcagatgtacggatctagaggacaacattgaaaacttgagaggcctcaaacatatagccattttcttctatacacyatttggtaagtttgagggctctacaggagcatggagagctaagccaatagcttctaaaacacagagtaaaagttccctgtttttttatcatggttagaaaactcatgcctgccaggaggagtaggtctgtccccaagcattctgctcctttctccttcaagacctttgccagattttggggctgaataaaaaaggtggctgatgagctgagctggagatcactaaaggacagagatggacctccttc

SEQ ID NO: 422419 - DNA, 573 bp, Homo sapiens
gctaagccaatagcttctaaaacacagagtaaaagttccctgtttttttatcatggttagaaaactcatgcctgccaggaggagtaggtctgtccccaagcattctgctcctttctccttcaagacctttgccagattttggggctgaataaaaaaggtggctgatgagctgagctggagatcactaaaggacagagatggacctccttcagtcttttagtgctatggagttaaggatgtgccagtctttcaaacagaaattgagaagccacactcaggagtacatcagatatagatgatatatagaaagtcctacccaaaatgcaagggcaccagagaccagatcaatgtaagactgaactaacatgactggatcrcctcctcctgtctgcttgcagaagaaaaaggatttgaataaagcataaacagaggagaggacaccgtgccagcacaaccttttctgaaaactctgtttctttgatttgcgatgtctagcgtatcttttaaaaaatgcaaagcatgtgaagtaaaaaaactaaggctaaccatcaagagaaaaagaaaacagaagta

SEQ ID NO: 422420 - DNA, 573 bp, Homo sapiens
gctaagccaatagcttctaaaacacagagtaaaagttccctgtttttttatcatggttagaaaactcatgcctgccaggaggagtaggtctgtccccaagcattctgctcctttctccttcaagacctttgccagattttggggctgaataaaaaaggtggctgatgagctgagctggagatcactaaaggacagagatggacctccttcagtcttttagtgctatggagttaaggatgtgccagtctttcaaacagaaattgagaagccacactcaggagtacatcagatatagatgatatatagaaagtcctacccaaaatgcaagggcaccagagaccagatcaatgtaagactgaactaacatgactggatcgcctcctcctgtctgcttgyagaagaaaaaggatttgaataaagcataaacagaggagaggacaccgtgccagcacaaccttttctgaaaactctgtttctttgatttgcgatgtctagcgtatcttttaaaaaatgcaaagcatgtgaagtaaaaaaactaaggctaaccatcaagagaaaaagaaaacagaagta

SEQ ID NO: 422421 - DNA, 462 bp, Homo sapiens
attgcctgttcatatcctttaaacattattttttgatagtagtcacattttataaatgttagtcattgaacaaatattgtcctatgtcaagaatgtgcaaagcaatattttagggaacaaaatagagaacaaaaaaacaaatttttgctctcctagtrtttatatatttgaagaatgctgtaatgatttgtttcacagtttggcatttggcatttcaatattgccaatgctatttttagagagaaagttttgaatatttgtacattaaaaatcttttttcattgagcgctcttgtaatattgaaaactaattccttcaccatgaattgtatttatctacatatattttattcattaatattttgtgtgtgttagaattttcttttaaatatttaatttaaaatttatattggtatataaatgagacacattataaaaattattaaaaagcacagtgtactga

SEQ ID NO: 422422 - DNA, 617 bp, Homo sapiens
tcagctcctggtatacaggctgttcctccaatattgaagcagggcccgccagtgtgaacaacagagtatgacagaagagagagtatgtgacttctgacgtaaggataagggtattaaatcyttcttgctcttgatctggttctggggaagccggatgttatggaatcaggacacttaagcaaccctattaaggggcccatgtggagaaaaactaaggctatatcactatataaagtagtaagtaccaatttgctactttacataaattaacattttgcaaatggcgcctccatcccagtaaggccttcagatgaccagagccccagaataactcattggaaccttaggaaacaatctgaacaagaactgcataatcaagttattctggatttcccaattctctgaaattataaagatgtaataattacaattgtttaaactacttaagttttggagtgatatgttacaaaacatgaggtagctaatatagtgtcagaaaaaaagttgttcttaaatatatccataaagtaaaagaaggaaaaaaattgttggagagtttgttttgttatgttttatatttgttcttacaacttaaactagatatttataaactgcat

SEQ ID NO: 422423 - DNA, 448 bp, Homo sapiens
gtcaagtacaatatcaacttacaaaatcaataatgtttcttcataaaagcatttaccaatttaaaaatatagcagccacagattgctgggtcttaccctttgtatttctgactcagtaggattggggtggggctggataacttgcattattagcaagtttccaagtggtattgatgttactggtccagggttcacactatgagagctgctgygcaacagaagtctgcacctgtgtaccaagagacatgtatagggaagcttatagcagcatcagtcatcattataaagtattgacaacaactcattatgtcaatcaacaacagaaactataaataactcagagtatattcagacaattgaacattctatagtggtattaaagaatgaactacacttatatacattaacatagctcattctcgctttgagcaaaagaaaaatatctcag

SEQ ID NO: 422424 - DNA, 558 bp, Homo sapiens
aaatgaaatatgaacagaagatagagtgtcatatagtggagtaattttatcagtaaaagccaacttacgtctgatttcagtagctctttgccatctcttcactcttatcctgaatgcatataataccaagatggaccttcatttgactgtgtctctaagtaaatacaatgaggagactcctcaggataacccctatgcatcatgtagcataagagaagtataaacttcaatgttttaagctgctacaatgtttgagattggctatttccattatataaccaacatyttcgaaatgacaggtaaaatggaaccaaaagaagttcatgaatagcatcaaatatatggcatagcctttgaagcaagtcaggatactgtgagataaatgttatttgaggttggaagttattagagttacatgctattggatctatttttgttatgtagtagcagaaatttggtaaagcacttgcatataataagcttttggctctagatcaagggttggcaaatattttttataaaggggcagatagtaaatattctaggttttgggggcca

SEQ ID NO: 422425 - DNA, 454 bp, Homo sapiens
gagcacataggcttctaaacactctacaaagtaactctttatgtgattatatcctctcagttttcggattattgacaaacaatagattattgaaataaaattataattattaccagagcttaatcttaaatgccaaatattctaacaggagtaagattttgaatttcaatggactatagcagatgacaatgttctattaatatttttcactattactgctttgttgcagtcgcagacatttcctttttgtctttgtttctttgtgttatcccagytttgggatattttcctagtggtgacattttcctggttcttcctgggcattttggatattatgttatgcgtccctgtgttttatttgaatcctctgttttatcaggcctcctgtgatactatgcatgttgaggaaggaagcaatgcatcattattcccaggtgagggtggaagttgaggt

SEQ ID NO: 422426 - DNA, 553 bp, Homo sapiens
ttcgtagtaacagtcatttatcatgcagagaaatagcactggtgttgtgtctaacacaaaatatggagcagttgcctcaacagatctctaagttgtcaaatatgacattccatgtggagaaaagctatattccaacagaaagcacaggccaaaaaaagaaaaaaaaaagcttaagatgtagaattaaattagatacaacagaggaaatctttagcctggcaatgcaactacacactttattacttttgtcagtaagtatacacaggcacacaatagctttttacttttttccttttagcatataccttatttgaaacctttgaggctgattgtttaatgaaatataatactgcagcttataattttaaattgctgttgaacttggtattttwattaaatattgtctgtctcattcccaaacctcagcaaatgcatacaaattggcaactattaatactccattggatctgatttttagaatataataaatatttacttttgtatagtttactaatataaaatactagctgattaagcaagtttatttgaggat

SEQ ID NO: 422427 - DNA, 622 bp, Homo sapiens
tttcttcttccttctccagaaatttctgacaatatcctgattctttttcctgtacaaagtctgtttcttctattatatcttcatgttgaaaagcctcagcagrataacttcttcctgaaatcctgagagtggggcagtgtgtgaaatatgtggaaaatttttcactgtccacagcggcactcatagaatcaagtagagatcagaatgtttttgtaaaacttcctttaagacagttagtaggaagtctgactggacacttcttgtacgaacctcatttgcaataatgtgagacacattagtaaaaagaccatcttcttgaagtttccttgacaaaacccctgttgtacagtagagtacactggtagattcacaagcttcagataacatccagatctgatatccacacaaagaattccttcctccagttccattttcacagcccaattcatcacacactctggtggctaaactcactgctgagatcctttgaggttaggtataggcaatgttacatttacttgctccccactcatttagaagcaaatcttccaacagaaaatgtggtacctgagtactttcatcactcctggttttacctgccacaaccactccccagtgcctt

SEQ ID NO: 422428 - DNA, 622 bp, Homo sapiens
tttcttcttccttctccagaaatttctgacaatatcctgattctttttcctgtacaaagtctgtttcttctattatatcttcatgttgaaaagcctcagcagaataacttcttcctgaaatcctgagagtggggcagtgtgtgaaatatgtggaaaatttttcactgtccacagcggcactcatagaatcaagtagagatcagaatgtttttgtaaaacttcctttaagacagttagtaggaagtctgactggacacttcttgtacgaacctcatttgcaataatgtgagacacattagtaaaaagaccatcttcttgaagtttccttgacaaaacccctgttgtacagtagagtacactggtagattcacaagcttcagataacatccrgatctgatatccacacaaagaattccttcctccagttccattttcacagcccaattcatcacacactctggtggctaaactcactgctgagatcctttgaggttaggtataggcaatgttacatttacttgctccccactcatttagaagcaaatcttccaacagaaaatgtggtacctgagtactttcatcactcctggttttacctgccacaaccactccccagtgcctt

SEQ ID NO: 422429 - DNA, 513 bp, Homo sapiens
ttctatctccaatccccataacaacccctgacacaaaaatgtgtataaaatggactatgtcatcattagtagtactctctttatttttatgaaatagcattatggctacttttcaatgtggtaaacagaagagaaagtagccatgtaaataaaactcactgttgaattacaattctctgttggaataaaatgaaaactgagagtacctgatacctacaagaaacttttgctaagsgaaataggtgatgttcacatatacattgacttcaaggggcttaaaatctagcaaattagacagctatgcaattctgtgtcaaataaaacagaatagtcaatcatgcacgaagacctttgaaattaaagataatgagaatattatcagtttaaggacctaggattaaaactattctcctgagtgacatttgagatgaaacttaagaaccaaattgatttttggtgcatacaatgcacttcatgaacactggcatacattgcgaatatggcttgggacta

SEQ ID NO: 422430 - DNA, 513 bp, Homo sapiens
ttctatctccaatccccataacaacccctgacacaaaaatgtgtataaaatggactatgtcatcattagtagtactctctttatttttatgaaatagcattatggctacttttcaatgtggtaaacagaagagaaagtagccatgtaaataaaactcactgttgaattacaattctctgttggaataaaatgaaaactgagagtacctgatacctacaagaaacttttgctaagggaaataggtgatgttcacatatacattgacttcaaggggcttaaaatctagcaaattagacagctatgcaattctgtgtcaaataaaacagaakagtcaatcatgcacgaagacctttgaaattaaagataatgagaatattatcagtttaaggacctaggattaaaactattctcctgagtgacatttgagatgaaacttaagaaccaaattgatttttggtgcatacaatgcacttcatgaacactggcatacattgcgaatatggcttgggacta

SEQ ID NO: 422431 - DNA, 589 bp, Homo sapiens
gtgcattgttatagcataaagggtactgcagcaaaagtaacaacagtagttatttctatttacatttttttctttaccataatccagaaaaaaaaattttatctcaatctgaatctccaacaatctatgccaatcattgacatttccactgccattacatggcagagtaaaaaatcagtccgacagtactgtaacattcctatagctttatttctacacttgtcctgtcacttagtttgctgcttaaccagtggcataatagtaagtgtgttaggcagctgtcatttgttacagaccaataattaaaatgttaattgtactaaaactgcaaatgtactttttgtactagataataaagaagtcccttacaaccacattttctgacagagaaacatttgacataatttttttgatttttttttctgttctcttttagagacataaataaggtttttgtttgatgtgatgggtggtgtagagccactttcatgataaacaacataaaaccattaaaactaaagaaatttagttatcctacrcactactttattttattatagaacatcaaccgatctaatagactttttgt

SEQ ID NO: 422432 - DNA, 602 bp, Homo sapiens
tttaaaaatcaattattttaaaggcaaattttaaaaattaactgtagaaatgacaaaataaaattaaaatcgtaaaaaacttacatgtaaaccacttcagatacaagtgtccctagatacacaaagattacagaaactaaaatttgtgtggttggtcrctgttgtataacagatttcttcgtaatgatagtgtgattgtttatactgcgtgtaaatttttaaaccccaaactgtctctttaataaattcaacctgatgcatcttttgaagttgaaagatttactgctattttaattgactcaaaggcaatatagctttctctggaatcattgccaaaaacaaatgacatgccattggatctatgctttcaattcctggggcagcagtatcttcaaagggagaagcatttgattcatactatgtaacctcaggctaattctctaattaggtgataatttagatgcagtgcatgccctaaatgctgtgtggagtgtgaggtgcagacaggaagatgcctaactgtggtaatgtaaagagagcagatggccgagaaaacacaatttctacaattattttagagttgtaattctgttagtcaatta

SEQ ID NO: 422433 - DNA, 602 bp, Homo sapiens
tttaaaaatcaattattttaaaggcaaattttaaaaattaactgtagaaatgacaaaataaaattaaaatcgtaaaaaacttacatgtaaaccacttcagatacaagtgtccctagatacacaaagattacagaaactaaaatttgtgtggttggtcactgttgtataacagatttcttcgtaatgatagtgtgattgtttatactgcgtgtaaatttttaaaccccaaactgtctctttaataaattcaacctgatgcatcttttgaagttgaaagatttactgctattttaattgactcaaaggcaatatagctttctctggaatcattgccaaaaacaaatgacatgccattggatctatgctttcaattcctggggcagcagtatcttcaaagggagaagcatttgattcatactatgtaacctcaggctaattctctaattaggtgataatttagatgcagtgcatgccctaaatgctgtgtggagtgtgaggtgcagacaggaagatgcctaactgtggtaatgtaaagagagcagatggccgagaaaacacaatttcyacaattattttagagttgtaattctgttagtcaatta

SEQ ID NO: 422434 - DNA, 602 bp, Homo sapiens
tttaaaaatcaattattttaaaggcaaattttaaaaattaactgtagaaatgacaaaataaaattaaaatcgtaaaaaacttacatgtaaaccacttcagatacaagtgtccctagatacacaaagattacagaaactaaaatttgtgtggttggtcactgttgtataacagatttcttcgtaatgatagtgtgattgtttatactgcgtgtaaatttttaaaccccaaactgtctctttaataaattcaacctgatgcatcttttgaagttgaaagatttactgctattttaattgactcaaaggcaatatagctttctctggaatcattgccaaaaacaaatgacatgccattggatctatgctttcaattcctggggcagcagtatcttcaaagggagaagcatttgattcatactatgtaacctcaggctaattctctaattaggtgataatttagatgcagtgcatgccctaaatgctgtgtggagtgtgaggtgcagacaggaagatgcctaactgtggtaatgtaaagagagcagatggccgagaaaacacaatttctwcaattattttagagttgtaattctgttagtcaatta

SEQ ID NO: 422435 - DNA, 617 bp, Homo sapiens
agcttagtagaaagtgaaaaagctgtaaaagatatttagtccatcctatggagaggcaagggagaagtaattatcaggaggaattaaaatttgagctaaatcttgaaaaattactttgcagtatttggctacacaagagttgaaacagagttcttggcagaaggagtagcatggaaaaatgtcggaaggcttcaagaatgatacaattttaaaggaattatatgtagtatattctgactgccaaagataaatgacagtataagaggaaagcaggtcaaattataaagggcttagagatgtaaaccttgccatataagtaatcatgagcaactatcaggtctgaaatagaaggctratctacaatttagggcaatttggaggatgtgttgaataagtgtaaggcagtaagtgtcattgctattaataaagcttcttattcttgctcagtatccccgaatttattcatatacactttaatgtaaaatcctcatcctacaccttatatcctcttgataagaactactttataaattctacacatattgcattatagttacttcattgaaaaaaaatctcccagaatccagaatgtttaacgtgcagaaaacaacagtttt

SEQ ID NO: 422436 - DNA, 589 bp, Homo sapiens
ttagaataatcacttcaacaattatagtaattgtttgactcttgctaagtaagtatcttggaacatatttcaacttttaatgcacattttattcactatatatataaagaatatatataattccttcttaacatacaataaaatttattaaatattaaggattattaagaggatataattgaaatattagaaagctatttaacattttttactttttaaagtatttattcatattaaatcatttcaagtatttctacacattacaaacactgtgagataatcatatttcaaattraaaacaaaaatccttctccacaaatcacctttaccaactgtcttcaccaatgtttaccctttcaaaatatttttatctcatatacaagagataaagtgataataatataattaggggtgagtagagtaagtaaccagttcctctgagtatgtgctccaattactttaggtaatgtgatgaaacagtgattggtgagaatattgaaaactatatgaggagaagcagagaaaaataagttaatcagccacttaggtaaaaatgatcagttccatttgagactgtcctctaccagtc

SEQ ID NO: 422437 - DNA, 538 bp, Homo sapiens
tctgggtgatggatattcatggcaatgcctgccagtgcagtagctgttggcttcctaaactctatggagcagcagcttttgactcatgcaaagaaaaaaaatatatacgtagaaggagaagagagggtagaaaagatgaaggctggagttgggggacaaaaagtgctggacttttctaaatatagctttttgtgaagatttaatttagaaccatgtaaatatttacataattmtaaatcaaaattacattttaaaatagcagttcataaaatcagaggcaacttgaggaaagtgaaactgttgtgttcctgtttcaactgattttaaacaaagaatgcaactgcacattttcatagatacagataaaaaagtaatgtgaaaaattttaaaattatgttcatcattatacagtgatagtgttgaagtgtgttttgttattataacaaaagtgttgtgtgtgtaatttgtgataaagaaattaattctatatttatgtcattaagaacttagattttgatgtgagggaaaggtcatatag

SEQ ID NO: 422438 - DNA, 600 bp, Homo sapiens
tatttttttaagctttcatacagtgattgttttcttagtttattgttctgtcaggtcattactataagactacagtaatcaaaaagcacagctttggcacaaaaacagacacatagataaatggaacagaacagacaaccaagaaatacagctgtacaccgcagccatctgatctttgacagggttgacaaaaacaagcaatggggaaaggactmcctattcaataaacggtgttcagatggctggccaggcacatgcaggagagtgatactggaactctatctttctccatatacaaaaattaacacaagatggattaaagatttaaatgtacaagcataatctataagaatcctagaaggaaatctaggaaacatcattctgtacatcagccatggaaacaaacttataactaaatcctccaaagtgatggaaacaaaaacaaaagttgacaagtaggacctaattaaaccaaagaacaacaaaaatcaataaatcaatcaatcaataaaaaaaagatcaacagagtaaacagacgacctacagaatgaaagaaaatattcataaagtatgcttctgacaaagtcctaaaatccagaa

SEQ ID NO: 422439 - DNA, 353 bp, Homo sapiens
aggggaataaatacaaataaaagaacgggaaattttaattacgattgccaatgtatgactcattkaaaaagtgatttgatttgagttattttttgacgtgtaatgctgctttgagaatagagtctaaagaataagcattacaactggaaaagtgctagtcttccaactgtgctaataattgaattatttggagaaaaaaatccggtaaagttagtgagaagtggtcagattctacatttttttcttaaaaaatagaatcaagatattttcctgacaggttagctatgggcattaaaagaaaagaagttaaagaagacatgaagcaaatggtagaatgaagtgccattaatgag

SEQ ID NO: 422440 - DNA, 604 bp, Homo sapiens
attcacctacatgggatagtaatatagttttattggaaggctgaagaattaccataaattttaatggaaagttctttttaatgtattagatattttttgacgatccattttagtagaatgacttttgttttcaaaagcatatataaaccaaaacttaaactatgctttagctactgatgtggaggaatgatgatgatgtcagtctgtaaagaacaattccascagcaaaacatttaataaagtgtttctccttgaatgctatgatggtatcatgccagtgaaaatagaagattgatgtaaaaacaatgtcactcttaacttgcttaaaaaaactttttatgaacatatttctcctatataaacaaaaaagtttcttatatcactatataaagacctttaagggtgtgtattagaatcataatactaataattaacattgactaaatgcacattatgagtctatactttcctaaagcactttacatttataatgtcacttaattcttgcactagaactgtacatttggtgttttaatagctccagtttacagatgaggaaactgaggaacagaaaagttaagtaattagtctaaactgaataggt

SEQ ID NO: 422441 - DNA, 567 bp, Homo sapiens
ttggcatttatcagacaaacataataaaagtttgtgtttttcttttgtcttgctttttgttttctacttacctgattagaagtggatgaaacttcttggcctggagaattaaaaaaaaaaaaaaaagaaagaaaggaaagcactgtgagacttttgccccatcacagattgaaggaaaaggtgaaaaaaacagaatgtagaagtcataaaactgcagaggcctattatctaaacatctgacatgacattgccccatcttataactgaagttctcaagactgagtgaaaaaatcaagaaagaacatgtgttctgagatagcatcaatagtatgttctttctgtaaataaagcacattaatgtactgaataaratggatttcaaaatttggtaataaaatgttcataaatgtgctatgtcaatgcaatatgataagcataaagaaagaatgattatagctgcaaatttaagatataaattttatgtaactatcacaggaaaatcatacaattctttaaaatgaacacttgctatagagataggtacagaaataacacgagtaactattt

SEQ ID NO: 422442 - DNA, 528 bp, Homo sapiens
tccaatacaacaatagctggagacttcaacaccccactttcagcattggacagatattccagacagaaaatcaacaaacaaacattggacttaatctgcactacagaccaaatgtacctaatagacatttacagaacatttcatccaagagctgcagaatacacatgcttttcctcagcacatggatcattctcaaggatagaccatatgttaggtcacaaaacaagtcttaaaacaccccaaaaattgaaataatatcaagcatcttctctgaccacagtggaatgaaactagaaattaataacaagaggaattttggaaactataaaaacacatggaaattaaataatatkctcctgaatgaccagtggatcaatgaagaaattaagatggaaattgaaaagtttcttgaaataaatgataatgaaaacacaacatatcaaaacctatgggatacagcaaaaccagtactaagaggaaagtttatatccataaaagcctacatcaaaaaagaggaaaactttcaaa

SEQ ID NO: 422443 - DNA, 531 bp, Homo sapiens
aatacacagttatttctttttttggggtgatagcagttctggatctgggcatgagcaatgcacatccatgaaagcaggtaaaagaaaagagggagtagtataatacgagttttgatgtgtggtgaattggatgagtctatatttcctttcagtggtgaaaggtgtgtgtgtgtgtgtgygtgtgtgtgtgtgtgtagtctcgatgtatggtgggattggatgagtctatatttcttttcagtggtgaaagttctgtatgtgtgtgtgttcaatgaaaaggatgtgcacatttaaacatgtttgcattgactgaattttaaaaaattcataataaaagagtcaattccaatgcctgtcaatgcataatagttctcactttagagtccttgatatttctcttcctgattagtgtcaccacatcattcctttaaacattttgataaaagagatatcaattaatggtgccctggtaaactgtaatcagaatagattcccaagatgaagttggttcttttacttggtcacaagaag

SEQ ID NO: 422444 - DNA, 589 bp, Homo sapiens
tctgccttttcctatgtggctttcttcaaaaatatcagtctaaaaatcattcagtaaaatagttctcaaaacctagctcagacactgttctctgcaactcttctataacaacacaaaataagaccaatctcttttctcgatacatccactattaccctttctcawcatgcctgctattgtttataataccagattccacttagtattttacctccctacgttctctatttgattgtttaagttttgaattcaagaactgtttcttatgaaatcttttactataagagccaaccattgtgctttttacgtgaggtgtttaccaaatgtctcctgatacttttttgaaaggctgtgactataacctcactaaatagttatgacataaggagcctttttttcagattactaataccactttgattttattttcataaaactgaaaagaactatgacaaaccacttgcaatgctgttctttaacacataatgagcaaataaaatgcttcaaaataaatatgtatattcagttgatgggaataatactcattttttgtccaagtatgcacactttattcttttgttaatactat

SEQ ID NO: 422445 - DNA, 589 bp, Homo sapiens
tctgccttttcctatgtggctttcttcaaaaatatcagtctaaaaatcattcagtaaaatagttctcaaaacctagctcagacactgttctctgcaactcttctataacaacacaaaataagaccaatctcttttctcgatacatccactattaccctttctcaacatgcctgctattgtttataataccagattccacttagtattttacctccctacgttctctatttgattgtttaagttttgaattcaagaactgtttcttatgaaatcttttactataagagccaaccattgtgctttttacgtgaggtgtttaccaaatgtctcctgatacttttttgaaaggctgtgactataacctcactaaatagttatgacataaggagcctttttttcagattactaataccactttgattttattttcataaaactgaaaagaactatgacaaaccacttgcaatgctgttctttaacacataaygagcaaataaaatgcttcaaaataaatatgtatattcagttgatgggaataatactcattttttgtccaagtatgcacactttattcttttgttaatactat

SEQ ID NO: 422446 - DNA, 526 bp, Homo sapiens
cagtgtggtccctgagaaggcagtgtggtatgctagatgaagaatttgattacggaccagactcttgaactcttgctctaatcaggcaatttgtaaactctctgggyttatattttcaattgattgctgagctctttcttgatttttaaattaaattcagctatagtttaccatactaaccatatttgggtgaattcaaccttagaatgcactaaaaggtacttcggggtgttcaaaacattagaacttgtgcttttattcatttttatgagttgtagatctcaaaattttataaattatattgtactcagtaatacaacatattaattaatataaaagtgaattactaatataaatgaattactaccgtatgtgtatattaattacagcagaacaagatcatatggattaaaaacaaccaaatggaaaataaacataaggtaacagtgtgtgctcagaatttcttcagcattataaaggatggtcaaataggctagagaccagtgttctgggagcatatctattg

SEQ ID NO: 422447 - DNA, 406 bp, Homo sapiens
atgctgtcattacttaactcattatctggctgccttgtctaatggctccttagctttcacgtggttcatagtccacatattctagttctatgatggtcaaatggcagcattttaaaaataatgacattgacacaaacaaatggaaacacatcccatgctcatggatgggtacaattaatattatgaaaatgaccatactgccaaaagcagtctacaagttcaatgcaattcccatcaaaataccaccatcactcttcccagaactagagaaaacaatcctaaaatttacatrgaagcaaaaaagagcccacatagccaaagcaagactaagcaaaaagaacaaatctggaggcattgttacccaacttcaaactatactataaggcagtagtcaccaaaacagcat

SEQ ID NO: 422448 - DNA, 615 bp, Homo sapiens
gactacaatgaatagttaccagtgtttttaaaagtatactgatctatactaagattattttagtcataaaaatccacaatkggataaaatgtaagttttttctgcggggggaggacaatctctacttatatgtgttatagtctctgctcaaatacattaccaaaaagcagttccatgcatgccatctaaactagaaactgagggggaagaataagatggccaaataaagggctctactaattttctcccctgcctctaccagtttcacatctacacaaaacaaaccacctttataagaaccaaaatcaagtgagcactcacaatacctggttttaacctcacattaataaaagagacactgaagaaggtaggaaagaaagtcttaaatccttgatattacctctctccagtcccttggcagtggccatgtggtgtgaagagagaatctgtgtgctgtaagaaggatagcacagcaactgtgagacgttgtattgaactcagtgctgtcctgccacagcagaaagcaaaactggactgaactcagctaacacctttccacaaaggaagcagataaatcagccctagctagaagggaataacacatgccagctgttg

SEQ ID NO: 422449 - DNA, 615 bp, Homo sapiens
gactacaatgaatagttaccagtgtttttaaaagtatactgatctatactaagattattttagtcataaaaatccacaatgggataaaatgtaagttttttctgcggggggaggacaatctctacttatatgtgttwtagtctctgctcaaatacattaccaaaaagcagttccatgcatgccatctaaactagaaactgagggggaagaataagatggccaaataaagggctctactaattttctcccctgcctctaccagtttcacatctacacaaaacaaaccacctttataagaaccaaaatcaagtgagcactcacaatacctggttttaacctcacattaataaaagagacactgaagaaggtaggaaagaaagtcttaaatccttgatattacctctctccagtcccttggcagtggccatgtggtgtgaagagagaatctgtgtgctgtaagaaggatagcacagcaactgtgagacgttgtattgaactcagtgctgtcctgccacagcagaaagcaaaactggactgaactcagctaacacctttccacaaaggaagcagataaatcagccctagctagaagggaataacacatgccagctgttg

SEQ ID NO: 422450 - DNA, 615 bp, Homo sapiens
gactacaatgaatagttaccagtgtttttaaaagtatactgatctatactaagattattttagtcataaaaatccacaatgggataaaatgtaagttttttctgcggggggaggacaatctctacttatatgtgttatagtctctgctcaaatacattaccaaaaagcagttccatgcatgccatctaaactagaaactgagggggaagaataagatggccaaataaagggctctactaattttctcccctgcctctaccagtttcacatctacacaaaacaaaccacctttataagaaccaaaatcaagtgagcactcacaatacctggttttaacctcacattaataaaagagacactgaagaaggtaggaaagaaagtcttaaatccytgatattacctctctccagtcccttggcagtggccatgtggtgtgaagagagaatctgtgtgctgtaagaaggatagcacagcaactgtgagacgttgtattgaactcagtgctgtcctgccacagcagaaagcaaaactggactgaactcagctaacacctttccacaaaggaagcagataaatcagccctagctagaagggaataacacatgccagctgttg

SEQ ID NO: 422451 - DNA, 615 bp, Homo sapiens
gactacaatgaatagttaccagtgtttttaaaagtatactgatctatactaagattattttagtcataaaaatccacaatgggataaaatgtaagttttttctgcggggggaggacaatctctacttatatgtgttatagtctctgctcaaatacattaccaaaaagcagttccatgcatgccatctaaactagaaactgagggggaagaataagatggccaaataaagggctctactaattttctcccctgcctctaccagtttcacatctacacaaaacaaaccacctttataagaaccaaaatcaagtgagcactcacaatacctggttttaacctcacattaataaaagagacactgaagaaggtaggaaagaaagtcttaaatccttgatatyacctctctccagtcccttggcagtggccatgtggtgtgaagagagaatctgtgtgctgtaagaaggatagcacagcaactgtgagacgttgtattgaactcagtgctgtcctgccacagcagaaagcaaaactggactgaactcagctaacacctttccacaaaggaagcagataaatcagccctagctagaagggaataacacatgccagctgttg

SEQ ID NO: 422452 - DNA, 587 bp, Homo sapiens
taaaactcagcaccatcccagctataggggctatggagaaaaaccctttctacttgagaaaagcagaggaaaaagtaaaggggactttgtcactggtttagccacagggggctagagaaccaagcaggtccttggggtctttgagtccaggctttggctcttcgatggcatttctggatctatcctgggccaaacgagagtccactgccctgaaaartaagtcctatcctaggcagcatttaccgcaagtagactaaagagccctttggccttaaggaaatactttcagtatcctggaatactccctgtgggccgtggtggtagtggtcacagattgaggctcctctgcctgtggaaaatggggggaagaggggatagaactgcatctcgtggtttgaatgccagcaaagccacagtacaatagaacaccaggtagacttctaaggattttactctagtccctggctactgaatggcacctctggacttggcaggggcctgtgggaagtctgtgccctgaggggaaagacacaggcctggctggctttctcacctgctggttatagagccccaaggccttgagaaaa

SEQ ID NO: 422453 - DNA, 451 bp, Homo sapiens
  misc_feature (1)...(451): n = A,T,C or G
nnnnnnnnnnnnnnnnnncttattgtaaatacaaaattcttctaaactgaagctacaaaagcagtttttaattctataaacaattgaaactgcggccaactctttaacttcctacactgtgcattacagggtgcgttatattatttgtttgacttaggtatattcctgccatctacttttggcttcacttcacctttcctcctttattatgtaatgatgtcagttttgatctaaaccttactacctataggcatctttccctaaagacatcctaaatatttcataattatgagcacatcaaagactaactgcttgcttgactgcagaggcctatacaagactgtattacttgtatatcttaagagatgtacagttttcagtaawcttattaagtatgctatgattatcaaacctttgttcctttctttgtggtgacataatgtcaatcaca

SEQ ID NO: 422454 - DNA, 590 bp, Homo sapiens
  misc_feature (1)...(590): n = A,T,C or G
tgtgtgttggcctcttatagccatggctggagctttcagctcgggacacagagcaccaaatcccaaggctgcacagagcagtcggggctctgagcctgacccacaaaaactattttttcctcctaggcctctggctgnntgatgaaaggggctgccttgaagatctctgaaatgccctggagacattttccccattgtcagtgatgattaacattggctcctcattatttatgcaaatttctgcagcctgcttgaatttcctctgagaaaatgggtttttcttttctaccatggtcagtctgcaaagtttccaaacttttacactctacttcccttttaaacataagttccaatttcatatcatctctttgtaaaagcaaggtcacctcttgaatgctttgctgcttagatatttcttccaccagataccctaaatcatctctctcaagtttaaagttccccagatctctaggacagggagaaaatgccaccagtctcttasgtaaagcatagcaagactcacctttgcttcagtccacaatagtaccagatccccatctgatgaggacttcattgtctatatcactgtc

SEQ ID NO: 422455 - DNA, 590 bp, Homo sapiens
  misc_feature (1)...(590): n = A,T,C or G
tgtgtgttggcctcttatagccatggctggagctttcagctcgggacacagagcaccaaatcccaaggctgcacagagcagtcggggctctgagcctgacccacaaaaactattttttcctcctaggcctctggctgnntgatgaaaggggctgccttgaagatctctgaaatgccctggagacattttccccattgtcagtgatgattaacattggctcctcattatttatgcaaatttctgcagcctgcttgaatttcctctgagaaaatgggtttttcttttctaccatggtcagtctgcaaagtttccaaacttttacactctacttcccttttaaacataagttccaatttcatatcatctctttgtaaaagcaaggtcacctcttgaatgctttgctgcttagatatttcttccaccagataccctaaatcatctctctcaagtttaaagttccccagatctctaggacagggagaaaatgccaccagtctcttacstaaagcatagcaagactcacctttgcttcagtccacaatagtaccagatccccatctgatgaggacttcattgtctatatcactgtc

SEQ ID NO: 422456 - DNA, 196 bp, Homo sapiens
aaatctacttttctgtaatttgatttataggtaatgccaaagaaagaaccaggaaacacttttaatgaactcttaattactracagacaacaatgtattagctaagtttgggcatggaattcaggcagctgattatgtcagaaatgcaattgcatgcttccataggtgaatacgctctctctttccagactggccc

SEQ ID NO: 422457 - DNA, 592 bp, Homo sapiens
ggtgtgctcctgattttgttcagtgttgcccaataacaatcccttgttgaagtcttgcccatgtctacctctgccataagactttcccaggcatctcagctcaaagtgatctagattcatagcacttattgctagtattgcacatatggcaccaaatacttatggccttgaattttcaytgggatatgttggattcgaattgactttgaaatattctaaaggagaattccagcagaaaattgtgagcttaagtctgtcactcaggaagggtgcagtctagagatatagagctataaaggtgaaaatcttcagaaaataggtggtaactgaaaccagaagaaagaacaggtgtacctaaataaaggtctgtaaaatgaggaaagaaagttcgaaaagaattcttaagaacgtcattacttaagaagtacatagtagaaaaattagtgaaagataattgtaagacgtcagaacgaatggttaagatggaagaaagaatggttgctttatgcgggcttttagtttccccaaagagcgaggtattgtattggtgatttttgcattttccagaacacctatcataatttcatgcatg

SEQ ID NO: 422458 - DNA, 636 bp, Homo sapiens
atgttggtaataatacttttggaattatatgccaccgttttgttaatgaattgaaataattttatcttttgggtggtagttattctcataataagctcaagagacatttaaattcattcacatgtttaaaattatttgrtatcttcccttaggtatcacaaagcttaatattaagaactaaagtgaaatgaaattgtattacatctaaatttatagacaatttcttttctcagcataattgagcagaaaaagtaaacttttgagattaggaactttcctgcatactttgaaaaatttagaaaaatgattgacattttgcaaatttcaaggtttactaaattgaccagaatttttactggaatgttaaactagcctatcattagaaagtatacctattatgtgctttttttttttaagtagtcagaaagaaaacatttagaataaatattttaggcacagtcataatatgtaaaaatgtaatctggaagatgctctacaaagtaaattcttagagtgactcattctctataactattctacagtaactttttctaaataaaggactattttgaagtgagaatctacatcacaagagagaaaataaaagcttctggacttaggaaagcacatttagtc

SEQ ID NO: 422459 - DNA, 636 bp, Homo sapiens
atgttggtaataatacttttggaattatatgccaccgttttgttaatgaattgaaataattttatcttttgggtggtagttattctcataataagctcaagagacatttaaattcattcacatgtttaaaattatttgatatcttcccttaggtatcacaaagcttaatattaagaactaaagtgaaatgaaattgtattacatctaaatttatagacaatttcttttctcagcataattgagcagaaaaagtaaacttttgagattaggaactttcctgcatactttgaaaaatttagaaaaatgattgacattttgcaaatttcaaggtttactaaattgaccagaatttttactggaatgttaaactagcctatcattagaaagtatacctattatgtgctttttttttttaagtagtcagaaagaaaacatttagaataaatattttaggcacagtcataatatgtaaaaatgtaatctggaagatgctctacaaagtaaaytcttagagtgactcattctctataactattctacagtaactttttctaaataaaggactattttgaagtgagaatctacatcacaagagagaaaataaaagcttctggacttaggaaagcacatttagtc

SEQ ID NO: 422460 - DNA, 593 bp, Homo sapiens
catttattttgagaactgtttcctctgcttcttctaagttaattttctaaaactattttctatagaactggaaataatttggccagagggaattgtcaaagccagtccgtaacaatagaggaatgaggtttagataatttatattggcccaggatttacttttacttatagaaaactttttaaaattgcttttaaaggcttctgtattggtctttttgtttgtttctctgtttcacttttgctttttaattttttatttatttatgtattttttgagatggagtctccctctgtcacccaagctagagtgcagtggcatgatctcagctcactgcaacctccagggttcaagtgatgccggtgcctcagtctcccttgtagctgggattacagatgtgtgtcaccatgctcagctaatgtaaaygtatgtatttttagtagagatggaattttgccatgttcctcaggcaggtctgagactcctgaggctcaagcaatccacccaccttggactccaaaagtgctgggattacacatgtgagcactgtgcccagcctgcttttgctttattaaagacaaaaatataaagttac

SEQ ID NO: 422461 - DNA, 545 bp, Homo sapiens
tcaaacaagtagcatcaagagcctgaagcctttcttcaaagaatcgtaacaggaaatcaaacagggctttaccagtgtgattytgaagatagagcacaatcaaagcaatgtctaccaagaggtgaaggtggtccaggcaaagcaaaagcaggctggtccagagcaaaggtaatgacaacagttttttggggatactcaaggcattttgctggttgactttctggagggataaagaatgatattatctgcttattatgagaatgtgttgacacagctaaaatttcagcagaaaaacacccagtaaagcttcgctaggaagttcccacctccaacaatgctcctgctcattcttcttgtcaaataaggacaatttcgcaagagtttcaatcattagcatcaaccttaccatcctgatatggctccttctgacttccttttgttttctaatactaaaaaatctttaaaggacacccatttttttcagttaataatgtaaaaaagactttattgacatgattaacttcccaggacccacagttctttca

SEQ ID NO: 422462 - DNA, 543 bp, Homo sapiens
aggacaaaacccccagaaaggcaatcactttgcaagtcagagtcccataagtccaggtagagccatttttgacagagttgaacacaaatgggaaacaaattgcagatctgaggatatctgaacagcaaagatccaacaggaagtagtaaggtgctctatgcaaggtcttatctttcactagcaaaatggagatcaggaggttgcccaccacgctgactcctattatgaaacccaaggaagtcagtttcagaaaggctgttagaggcgagagattttgcaaaatgttgtcagctgcatggctatagttcgccatagatggatggaggataagkatacagcctcagtcaagtctcatgatctagatataagaacaaggaaaagatagatccatacattttactgaaaatataatccacaaagagaactgatctgatctgcagtcatgcttcctcttttcttccacttgttttgccatcagaatatctgaaaaaaaaaaaaaaaaaaacctatcagttcttaagttaacaagcaatgatgtcagac

SEQ ID NO: 422463 - DNA, 617 bp, Homo sapiens
ttaactagtcttattctttaagcagatattgattccttaaaaataagggagagggtatatgtgtatgcaatattctttcatatccacatctcagggtatagtaaagctatttttttcctttgcagttgagcacagttacatccactaattcttcagcttttccagctgttggataagaatgtcattttcttgcctcacaaggggactcaagaaattaatgagatattttctatctagctcattaactctactggagaaaacattggaagctacatctttcatcagcagggctttaaaaaatatgtttaatagctgacaaaagtttcatatcatctacaagttctcaaatgtaaagttattgcttcaaattgtttagatcataggcttarttggtcttaactaatttcttttttttttatcccctacatcaccaaacccagaaaatttgattttcaggttaagagtaaaagaacaaagcaaatacaacaaaactatatgctctaatccttgggtttgaagggttctgaagatttacaaactgttggaatattacatgtactatattgatcagtgtattaggaaaactgatataatttgcttaatttggttcttataaa

SEQ ID NO: 422464 - DNA, 388 bp, Homo sapiens
gtgagataagtgttaaaggaactcttgtgtcaaggtagttccaacttctaacataatagctgctgtcttcctcccatgccagcttggtgttgtctgtggtctcagtaaacatagcttctatttaattaccttacgcagtcaagaaaagcttgtcagcctggatgttaggcagtgagctgctgatcagctacagggcaagatcaattcacttgacctcttagtcccttcaactgtataatgaaggggttgagctctaatattccactggcttgaaaaaaatctatgatttgcccatctgggtcactgatattccccggatataagtgayatggctattctgaatcaacatagcttcccacagctgacactggtccactgaaagccactt

SEQ ID NO: 422465 - DNA, 617 bp, Homo sapiens
tataggaaacaaatacctatagagacagaaactaaaagctaacagcatacaataaaagcaaggaaaactttgataatatagaaataattacagctttataagacttgcacctcaaaacctatcatctctagcaaaaaggtatgttcttgatctaggcatagagagtagaaccattacaggtaaggggtcagcttgtaatatggataactgctagttaaggctaatcttaaaaagagtagatgaccatctgcagtgtattacttgaaggaccatagaattctttctcctaaaatatatattatctcctatatggcctgaaattcctgtctggcaagagaagtaacctccagaaggacactgagaaatcatatatgtgtaacatcaccgatttgagaaggtcccactgcccaactcatcctctttcaaactacagagagaccttgtcctatcaattgtccccaccccactcctggaagttgaacctctcctcttctgctggcttttrctttcttgtatttggcatttgaatatgttcatgattctcttgcctcaaataaacaatgaaaaactcctcaatcctacatctccctccagctgtaatgccttctcacctcttc

SEQ ID NO: 422466 - DNA, 617 bp, Homo sapiens
tataggaaacaaatacctatagagacagaaactaaaagctaacagcatacaataaaagcaaggaaaactttgataatatagaaataattacagctttataagacttgcacctcaaaacctatcatctctagcaaaaaggtatgttcttgatctaggcatagagagtagaaccattacaggtaaggggtcagcttgtaatatggataactgctagttaaggctaatcttaaaaagagtagatgaccatctgcagtgtattacttgaaggaccatagaattctttctcctaaaatatatattatctcctatatggcctgaaattcctgtctggcaagagaagtaacctccagaaggacactgagaaatcatatatgtgtaacatcaccgatttgagaaggtcccactgcccaactcatcctctttcaaactacagagagaccttgtcctatcaattgtccccaccccactcctggaagttgaacctctcctcttctgctggcttttgctttcttgtatttggcatttgaatatgttcatgattctcttgcctcaaataaacaatgaaaarctcctcaatcctacatctccctccagctgtaatgccttctcacctcttc

SEQ ID NO: 422467 - DNA, 552 bp, Homo sapiens
tttacataactgattgtgacctttcttctttactaatataagaatttaatgtatacttttacccataagcacttgaaaaaatatattcttctaattttggggataggctgggccctgtctttgccattcaccatataatccctaaaatccagcacagtgcctggcacagagtccattcgtatttgttgaacaaatgaataaatgaatgcatgaatgattgcagatttcctctccttctctggctcatgccacttcattgctcacttgaatcactgcagaagccttctaactggagggactgtgtctgctattgccctccttccgaactgttttctgtacttcttccaaatgagctttctgaaaccaaacttgatgatgtttctgcccarttaaaaacccttgaattggccgggcgcagtgactcatgcctgtaatcccagcactttgggaggccaaggtgggtggatcaactgaggtcaggagtttgagaccaggctggcccacatgggtgaaaccccatctctactaaaaatatgaaaaattagctgggca

SEQ ID NO: 422468 - DNA, 674 bp, Homo sapiens
gaaaaccactttcccctggtttatccctgaggagaaaagcaaatgtttaagggacatatctgctctagagtaagcagtctatgtgcaaaggaggcatacagaacctttgtaattcaagcacacctatctatggtgatgatggtggggagtgaggagtggggagacagaatgatctaatatgtaaaatgaaacagtattaaccaaagatctatagcaatatttgcattcaaacaatgaacaagttagttgaaattatagatgggtcatatttgacaaggcatttgtaagattctctatgacagcttaaattatcatttgtaatacatactccatttaattgtcaaaagatttaggacagcttacaataaaagtagatcataagtaaacaggtgattaaacatgaaaatagacatcacaaccatgaaatagaaagatatttgyaggatagtagttgaaaaataagataattactaaaaattgagcactgaatttgaccctgagtgtcctcataggcaatgcaaaaatggaaacttaatggatgtttagctcttcttggttaaaaaatctcatgtcaattgcactagggggaaattaaaaaatctcatgtcaattgcactagggggaaaaatctttttctcatcctaagttccatgagaaattttctacatgccttc

SEQ ID NO: 422469 - DNA, 626 bp, Homo sapiens
tctttgctttttttcataacgaatatttagaaccccattgctgaatcaaacggcaagctatgtctaagtattttgatgcccataactagtttgccctcaaaacaaaacaagaaagttgtagaaatttacaattgtagcagatttgcttccttaggcagcaaattctgaaatggaagttagtgtagtagatgtttattaaagagagctcttagaatcaatttctgtggaaggaaggattgagcagaggcagcagtgcagccacaatgaaagctcaacaataactctcagctgactccatggggagctctgaaactagactggttcttcagaattgtcctgaattgggctgaaaygactagggatttatacatccccatttcttccactgaggccatctctgaatccctgcagataagacagttccagcagctagctcaacaagtgctccgttgaacgaggacctgggccacatatcacaatgtggccacacactaatatccctagcactgtatgagcaggtctgttcccctcactttgacaccacactaatatgacaccttttggtatcattaactatttcactcctgtcatttgaaaggtgaataagggcgtcttgtttgtggcaa

SEQ ID NO: 422470 - DNA, 545 bp, Homo sapiens
  misc_feature (1)...(545): n = A,T,C or G
acctactcataactccattctgtttttcttgatccttattcagctcctagtttaaggggttgtttctttgtgttcacatcaatgtgcacaaaagaatcacctggaaagcttgcacaaatgtggattccaagactcattctcagatattctgmctcaggaggtgtgagtgaagcccagaaatttgctctttaacaagtaccccaggtgatgataccgcaagtggtccatggtccccactttgattcttcagattttcaccttctgcagtcctactagtttgatgtgacaaggaatttatttctctgattcttgactatccctttgttgagagttcctggtagatactttttttttaatggtagggcagagaaagagatcagtaaaactttcanaagagtaactttttgcaaaaactgtagcagattgcaggtgtaggaaaatgatgtggacgcgggggaatgaaaccccaagacattgcttctnttcactcaaagtgtctaacaaaaataatgcaaataattacaatgaagctttgtggaggcaat

SEQ ID NO: 422471 - DNA, 545 bp, Homo sapiens
  misc_feature (1)...(545): n = A,T,C or G
acctactcataactccattctgtttttcttgatccttattcagctcctagtttaaggggttgtttctttgtgttcacatcaatgtgcacaaaagaatcacctggaaagcttgcacaaatgtggattccaagactcattctcagatattctgactcrggaggtgtgagtgaagcccagaaatttgctctttaacaagtaccccaggtgatgataccgcaagtggtccatggtccccactttgattcttcagattttcaccttctgcagtcctactagtttgatgtgacaaggaatttatttctctgattcttgactatccctttgttgagagttcctggtagatactttttttttaatggtagggcagagaaagagatcagtaaaactttcanaagagtaactttttgcaaaaactgtagcagattgcaggtgtaggaaaatgatgtggacgcgggggaatgaaaccccaagacattgcttctnttcactcaaagtgtctaacaaaaataatgcaaataattacaatgaagctttgtggaggcaat

SEQ ID NO: 422472 - DNA, 545 bp, Homo sapiens
  misc_feature (1)...(545): n = A,T,C or G
acctactcataactccattctgtttttcttgatccttattcagctcctagtttaaggggttgtttctttgtgttcacatcaatgtgcacaaaagaatcacctggaaagcttgcacaaatgtggattccaagactcattctcagatattctgactcaggaggtgtgagtgargcccagaaatttgctctttaacaagtaccccaggtgatgataccgcaagtggtccatggtccccactttgattcttcagattttcaccttctgcagtcctactagtttgatgtgacaaggaatttatttctctgattcttgactatccctttgttgagagttcctggtagatactttttttttaatggtagggcagagaaagagatcagtaaaactttcanaagagtaactttttgcaaaaactgtagcagattgcaggtgtaggaaaatgatgtggacgcgggggaatgaaaccccaagacattgcttctnttcactcaaagtgtctaacaaaaataatgcaaataattacaatgaagctttgtggaggcaat

SEQ ID NO: 422473 - DNA, 545 bp, Homo sapiens
  misc_feature (1)...(545): n = A,T,C or G
acctactcataactccattctgtttttcttgatccttattcagctcctagtttaaggggttgtttctttgtgttcacatcaatgtgcacaaaagaatcacctggaaagcttgcacaaatgtggattccaagactcattctcagatattctgactcaggaggtgtgagtgaagcccagaaatttgctctttaacaagtaccccaggtgatgatacygcaagtggtccatggtccccactttgattcttcagattttcaccttctgcagtcctactagtttgatgtgacaaggaatttatttctctgattcttgactatccctttgttgagagttcctggtagatactttttttttaatggtagggcagagaaagagatcagtaaaactttcanaagagtaactttttgcaaaaactgtagcagattgcaggtgtaggaaaatgatgtggacgcgggggaatgaaaccccaagacattgcttctnttcactcaaagtgtctaacaaaaataatgcaaataattacaatgaagctttgtggaggcaat

SEQ ID NO: 422474 - DNA, 599 bp, Homo sapiens
atatcagccactgaagtacacctgcatgcaggttccttctgatttccctgagattgagcaacaaataaagataaatctttatgagcccaagtgaagcctgcctcacaagttttccagtctcactacaccagaggaagaaatctgttgtccaccacacyagggcaatcactgtacatatttgccattttaaggattcatctacttggggtttcctcactccataaagacataccaagctctgtgatatgcaccaaataatggtaacttagagcactactctataagtgtaggccttcttttacttttagaaacatttggtttgagaaaatgataatcaagattctaaatcccaattctaggagaaggggctactaggttggggcaaatatcaaactatcatgggtgtttctattgtcaataacacattagaaagcgcaaagctgtaagactctttcccagtctcaattgacagtaaaattagacaggtctttcttgttatcaagacaggtctttcttgttattattcaagtccttaaacttataaggtttcataggcaggcagatgtattatgatataaaaatctgtgttaaggaactga

SEQ ID NO: 422475 - DNA, 599 bp, Homo sapiens
atatcagccactgaagtacacctgcatgcaggttccttctgatttccctgagattgagcaacaaataaagataaatctttatgagcccaagtgaagcctgcctcacaagttttccagtctcactacaccagaggaagaaatctgttgtccaccacactagggcaatcactgtacatatttgccattttaaggattcatctacttggggtttcctcactccataaagacataccaagctctgtgatatgcaccaaataatggtaacttagagcactactctatragtgtaggccttcttttacttttagaaacatttggtttgagaaaatgataatcaagattctaaatcccaattctaggagaaggggctactaggttggggcaaatatcaaactatcatgggtgtttctattgtcaataacacattagaaagcgcaaagctgtaagactctttcccagtctcaattgacagtaaaattagacaggtctttcttgttatcaagacaggtctttcttgttattattcaagtccttaaacttataaggtttcataggcaggcagatgtattatgatataaaaatctgtgttaaggaactga

SEQ ID NO: 422476 - DNA, 460 bp, Homo sapiens
tataagttaaatgttactttattgtctgtcaaaaccacacaaaccaggaaatgcattacagtatcagttttaatatttgtgtcaataatctattattttccaaacacagagagaagaaaaaggaattgctttctgcctccaagctgaacttggaacctaggtctttctgagcacgatgttgtcctacgtccccagaaggagccaaggaggcagctatgaatgtcaggtgtgaataattcaaaaccccaaaccacctgwggctttgaggccttttttttttttttttttcaattactcagagggaaacacagtctccttgatttcctctggggacctttcagggagccagtccttgtaataactgcctgttatggtgagaggaaaactggctttaaaagccttttaacccaaagggattgagcagctaatggacatcatccctttggcaaaaagggatgat

SEQ ID NO: 422477 - DNA, 394 bp, Homo sapiens
cttcaatggctgggcttacactccactgatccctccacattttcactgtggtcacccctctgtcctccctcccccctcccaggtattatggtgggcaccaaacattctcagcagcatatgccagttcctccaagtcttctcttcattagaccaacrtccccaggcccccagttttccccaacaggatatggaccacagatcagccatgtcctagcatcttcacctggtgcttctatccatgtcttcttgtccctggaaagcatgttctctgagagcagagattgtgtttcctgcatctctgtctcctgttgcccagcacagaattggtgctcaatgaagatttgtccatccagatgaagaatggatgggtggctggatgggtaggcagatggat

SEQ ID NO: 422478 - DNA, 562 bp, Homo sapiens
ggtggaaggggcggcacgcactgcaagaagacgygcaccagcgctcacacgcaggacagggcggccaagccaggagggctggggccaaggacagaaggacaggggccatgtgaggctccctcaaagaatcccaacatccaagactcccccccatgtggcaagtgccccgttctgcatgtaagccaggtgtgaaactctcacacacactcaacttgcacactcactctctctggggcaggggtccttggagtgggctgactctttgtgcttgcctaatatcctgtcaccagggaagtgaggagcaaaacatcacagacaggaattctccctaaatggacatatcacgccgatacttgcctatgggtgtcttgttagaaccacacaagtggagcgtgaaagctcccgtggaaagctaagcagaaatgaggggaacaaacaagatgagcaagacgccagagcaggccagcctaacacgagaacacacacagaccacaatcccgaacacgcagagccagacaggcctaacacgagaacacacacagaccacaatcccgaacacgca

SEQ ID NO: 422479 - DNA, 562 bp, Homo sapiens
ggtggaaggggcggcacgcactgcaagaagacgcgcaccagcgctcacacgcaggacagggcggccaagccaggagggctggggccaaggacagaaggacaggggccatgtgaggctccctcaaagaatcccaacatccaagactcccccccatgtggcaagtgccccgttctgcatgtaagccaggtgtgaaactctcacacacactcaacttgcacactcactctctctggggcaggggtccttggagtgggctgactctttgtgcttgcctaatatcctgtcaccagggaagtgaggagcaaaacatcacagacaggaattctccctaaatggacatatcacgccgatacttgcctatgggtgtcttgttagaaccacacaagtggagcgtgaaagctcccgtggaaagctaagcagaaatgaggggaacaaacragatgagcaagacgccagagcaggccagcctaacacgagaacacacacagaccacaatcccgaacacgcagagccagacaggcctaacacgagaacacacacagaccacaatcccgaacacgca

SEQ ID NO: 422480 - DNA, 580 bp, Homo sapiens
acactctcctttttaatattgaccattggctatgccattgtaaaatattctttttactttataattaggaaggatatgatagaataataacttgtttcatatccaatattgtcattccttttttttttttttttgagacaaaatcttgctatgttgcccaggcctggtctctaactcctgggctcaagtgatcctcccaccacagcttcctaattacctgakattacaggtgcacgccactatgcccagtcaatattctcttttctaaaactatagggtaatcaaagctagaactgccttcaatcactttctgtctccacagcagtcatcagatttagttgccaaaatcacttaccttaattttcaagtagagactcttggatatgccaatgagagaaaatcccctcccattagtgcgacatgcttaataaaaaagcagaggatgtccatgtctgaatctatcaaggccagagttcccatttatgcccctgtgcattaagaatgagcctttgctgtgtcagcaagataagccccaaaagaatgatcttttattgactaaactgtcaacctcaatcttgtg

SEQ ID NO: 422481 - DNA, 580 bp, Homo sapiens
acactctcctttttaatattgaccattggctatgccattgtaaaatattctttttactttataattaggaaggatatgatagaataataacttgtttcatatccaatattgtcattccttttttttttttttttgagacaaaatcttgctatgttgcccaggcctggtctctaactcctgggctcaagtgatcctcccaccacagcttcctaattacctgatattacaggtgcacgccactatgcccagycaatattctcttttctaaaactatagggtaatcaaagctagaactgccttcaatcactttctgtctccacagcagtcatcagatttagttgccaaaatcacttaccttaattttcaagtagagactcttggatatgccaatgagagaaaatcccctcccattagtgcgacatgcttaataaaaaagcagaggatgtccatgtctgaatctatcaaggccagagttcccatttatgcccctgtgcattaagaatgagcctttgctgtgtcagcaagataagccccaaaagaatgatcttttattgactaaactgtcaacctcaatcttgtg

SEQ ID NO: 422482 - DNA, 616 bp, Homo sapiens
agttttcttcctggtgtccttggatactgccaagcaataactgtataactatgtcgggaaagttgattatataaaaagcatttctgcagtcaaacctggaagtaatgattatatgacttctaagctgtctcctctgactttaagacttccagcttgtattttttttcacttatgtaacctttcaactctctcactggtatttatatttcgtcttattaattataggcataattgcacatgtctttagttcctttatagatgtttttctatataacaaattttataagataagtaactgcattgkttttatattcttctcttctgtgggaagtctagaagccttggacttagaacatgccgaaagcatttgagtgtatggtgaaattaatacaggatagtattttttaaaatagcatataagagaaatatttattatagtattaaaataacattttcctgagttatctttcaaaaactgtgaagagtctgagtttttacccaactggcatgttaacaaggtaacgtaagtcagttttatggatgctgattgaatacctgagacatcagggtcagaaggtaccacagtttcgtggatgttaacagaagactcaagact

SEQ ID NO: 422483 - DNA, 619 bp, Homo sapiens
tatcatgtacatttgcaggaacagtgtgacaaatgataaaacaaaataaggtcacttaatgtgattaaggacaagagtgatttgtgcaaaatattattgaaaattactatttaagttgcaytttgcgtgtacttttcagaattttaaaaagagtgatatgatgtgtggagatgatggatgagggtgagatggaaagcatattaatgtatgaagccactgaaacttctgaaaagatactcaagagttttacattaagcatctcaatacctaaaataaagctgtgagataagcattattaatttattttcagatcagaaatctaaggcacagagggtttgctcaaaaccaaacagctagtaagtgtcagagttggagtcttattaaggctatttgactccaaagactaagctcctatcgaccatgaagaacttgtaaaagacaaaaaaaaataaaataaaacaaaaacacatctttattatttattcacatccctaacacattactctggtaatttttataacattggtctccatttttgacatccttgtaatgactttttgtagacagagttatttctctttcctgatgtcagtattggccatgaaacttgctttggcta

SEQ ID NO: 422484 - DNA, 619 bp, Homo sapiens
tatcatgtacatttgcaggaacagtgtgacaaatgataaaacaaaataaggtcacttaatgtgattaaggacaagagtgatttgtgcaaaatattattgaaaattactatttaagttgcattttgcgtgtacttttcagaattttaaaaagagtgatatgatgtgtggagatgatggatgagggtgagatggaaagcatattaatgtatgaagccactgaaacttctgaaaagatactcaagagttttacattaagcatctcaatacctaaaataaagctgtgagataagcattattaatttattttcagatcagaaatctaaggcacagagggtttgctcaaaaccaaacagctagtaagtgtcagagttggagtcttattaaggctatttgactccaaagactragctcctatcgaccatgaagaacttgtaaaagacaaaaaaaaataaaataaaacaaaaacacatctttattatttattcacatccctaacacattactctggtaatttttataacattggtctccatttttgacatccttgtaatgactttttgtagacagagttatttctctttcctgatgtcagtattggccatgaaacttgctttggcta

SEQ ID NO: 422485 - DNA, 595 bp, Homo sapiens
gacagtctatttcagagtatagccattatgaacgcggttcctataaatactattattctgacaattttctgcaatgttgaaagtaaattaaggctcattattaaaaaataaagttttccaaatttcttagtgaatttttacctttgattactatctataaaataatcataaaatcaccatggaaacagaaattgttgtttcaatattargaaaacaactatttcattgcgacaaaatctaggtctataaccattacccaaggtataaatataaacttacattaaatagagaaattaagaaaataaagcataaacaagattttttaagggtagtgacatttacacacaaactaaggaggcacagaaaagaatatggcaggtttttttctatttttccactgaataactctagtttttaaaaatagaatttttattggtattacatttattacattgtaattttctgttttatgttgaaatttaaatttctactagataaaggctagagaagaatataaacggtacctggaatcagtcttttaaagtaattgtaataattatgtcaagtttctttaacaacataacttttcactgtt

SEQ ID NO: 422486 - DNA, 602 bp, Homo sapiens
cttgacttttagtatattccccagaaaggctaatgggaataatattccctgagttgttgcttttatcctcaaagttgtagcctttatccttgaaggtcacttttacttgttagctgttctcggtcaatttctccaggttaaaaatgtgttcccttagtatatattttcaaattagattttttttcaggaatgtgttctcaacttataatttatggtagctaatttatatcgtttaacatttctttgctaacttctacgtttatcactttttctcaaatcctttttatctttttttaaagtttatttttgatctttaaaatttacttcctttccatctcgtatttttcttaagtatgattttctgtgtttrtttgttcacatgtctcttctagcataggctttctttatgaaattattttctgtaattttcaaatatttcaagttctgtcgcatgtttacagatacctttttctccactcatgtcattgtagggactttcttattctaattgctatacttatttaatagttactaccatttccttaaaagttttagcacatgttgaaattatgtgttataattttgtttttttgtggccatgt

SEQ ID NO: 422487 - DNA, 602 bp, Homo sapiens
cttgacttttagtatattccccagaaaggctaatgggaataatattccctgagttgttgcttttatcctcaaagttgtagcctttatccttgaaggtcacttttacttgttagctgttctcggtcaatttctccaggttaaaaatgtgttcccttagtatatattttcaaattagattttttttcaggaatgtgttctcaacttataatttatggtagctaatttatatcgtttaacatttctttgctaacttctacgtttatcactttttctcaaatcctttttatctttttttaaagtttatttttgatctttaaaatttacttcctttccatctcgtatttttcttaagtatgattttctgtgtttgtttgttcacatgtctcttctagcataggctttctttatgaaattattttctgtaattttcaaatatttcragttctgtcgcatgtttacagatacctttttctccactcatgtcattgtagggactttcttattctaattgctatacttatttaatagttactaccatttccttaaaagttttagcacatgttgaaattatgtgttataattttgtttttttgtggccatgt

SEQ ID NO: 422488 - DNA, 602 bp, Homo sapiens
cttgacttttagtatattccccagaaaggctaatgggaataatattccctgagttgttgcttttatcctcaaagttgtagcctttatccttgaaggtcacttttacttgttagctgttctcggtcaatttctccaggttaaaaatgtgttcccttagtatatattttcaaattagattttttttcaggaatgtgttctcaacttataatttatggtagctaatttatatcgtttaacatttctttgctaacttctacgtttatcactttttctcaaatcctttttatctttttttaaagtttatttttgatctttaaaatttacttcctttccatctcgtatttttcttaagtatgattttctgtgtttgtttgttcacatgtctcttctagcataggctttctttatgaaattattttctgtaattttcaaatatttcaagttctgtygcatgtttacagatacctttttctccactcatgtcattgtagggactttcttattctaattgctatacttatttaatagttactaccatttccttaaaagttttagcacatgttgaaattatgtgttataattttgtttttttgtggccatgt

SEQ ID NO: 422489 - DNA, 596 bp, Homo sapiens
ttcacacagcttttatctgacagtttttaggtctttctgaggagaatttatgacagaaacgccatcagacaagcaggccaacagttgygtttggcgtaattacgcacttccttgagggaaggaaacagtcaatctcacagtttttagtcaggctgacactatccacatattttgcaaggtacattcacaaagttcaagtagttgattgactgaagctgagcaggaaaggctaaatgtcaggcttttaaggtgaaactagtggcagctctgtagcagcgtggcaggtagagtgaagtctggaattaagagtgacagacgaatggtgggtggtaaagaaaagactgtgtttgctggcagagaaggaagttgggctgtgctcagagcattcatggggtttgattagtgatagaaaggctaaaatatatacagatttaagtgttcaaaattatcttaacattccaaagaaaaactgtcagaattttactaaaataataacttttaatccctttacttttaaaatgttaatatgaattccccttttttttaaacagttttcaagatgttgagatttttgtctaaagattattgtacttatt

SEQ ID NO: 422490 - DNA, 586 bp, Homo sapiens
gtgaatttttttaacctaaattattgcagcctattgatcctagatctgaatcttcaaagaaaactgatttatttcattaattggaatattttaaccagagaagtctatcaagttggggtttcaacctgaatgaaccttttccatttagaaaattgatcttccagtcacacttttatgaaccttgagcttttagagcatggttgcttttaaagacagatcatctccagtaacatcttatatcattgacaggttggagtatggatgtkagagcaaactaagtttgtgatatataaccacccacatacagacaaaatgaacaaggcatatatttaaatatgcaagctagacaacatgcagagcagtgagtaaggagtaaatactgagtcacccttagaacataatatatgctggtaactaaaaaggtgggcacggggcaggaactccataaaaataataattctgccatgatgtcttttatttaccaaattacatctccaaatacattgctgtaccatctatataaagaattgaaagtgtctttgaacacaattacttgtgttgcctattgactcattaagagaagagc

SEQ ID NO: 422491 - DNA, 516 bp, Homo sapiens
tgctacagtgggggtggggggagtacatgaaaaaccttttaaaaaacaaaatcctggacaacttctgacttcatatgggtgtcctgagtctgtggatccacacagtaagcatttccccagttcctgattgtataattgaaactgatatgcttggtagatagtgcaactttcacattgagttcttggcccayggaggaagagctatcataggtaaaacacaaatggaagcctctaatactacagtttgtcaaaatagtaaatccaaaacagtatctggatacaggcagcagaaatttgtgctgcacttaagcatctgaaggatttggatagagtattaattcattatcatcagttttgattattactagttttgtgttttaccatctcatttttatgtctatcatcttctgattattttcccattttctgccttttgagagcaaaatggcattttctaatttcacagatggtttggaaaatatatttttttcctaatattttaatgcatatctctgc

SEQ ID NO: 422492 - DNA, 601 bp, Homo sapiens
acaggcagcagaaatttgtgctgcacttaagcatctgaaggatttggatagagtattaattcattatcatcagttttgattrttactagttttgtgttttaccatctcatttttatgtctatcatcttctgattattttcccattttctgccttttgagagcaaaatggcattttctaatttcacagatggtttggaaaatatatttttttcctaatattttaatgcatatctctgcattttaatgtgcatacttattttttaaagtctaaagttatccatgctggctcctccttcaacataaagatgttagcaaccttatggcgcccattcaatatcctattttattatttttcttagctttacttttatctttttacagcaaaaacaggcattagctttacagtcaagagtaaattaaatttaccaacaaatcttatcaattactaaatggaaaactctattagtttgcatatcttacatcttcccttaacatcattttcctttttaccaaaatgcatttttaaaagttctttaattatgttctgtggttattaaaaatgtcaaagtatttatatgtttcagtgtatatttaacttatg

SEQ ID NO: 422493 - DNA, 601 bp, Homo sapiens
acaggcagcagaaatttgtgctgcacttaagcatctgaaggatttggatagagtattaattcattatcatcagttttgattattactagttttgtgttttaccatctcatttttatgtctatcatcttctgattattttcccattttctgccttttgagagcaaaatggcattttctaatttcacagatgktttggaaaatatatttttttcctaatattttaatgcatatctctgcattttaatgtgcatacttattttttaaagtctaaagttatccatgctggctcctccttcaacataaagatgttagcaaccttatggcgcccattcaatatcctattttattatttttcttagctttacttttatctttttacagcaaaaacaggcattagctttacagtcaagagtaaattaaatttaccaacaaatcttatcaattactaaatggaaaactctattagtttgcatatcttacatcttcccttaacatcattttcctttttaccaaaatgcatttttaaaagttctttaattatgttctgtggttattaaaaatgtcaaagtatttatatgtttcagtgtatatttaacttatg

SEQ ID NO: 422494 - DNA, 601 bp, Homo sapiens
acaggcagcagaaatttgtgctgcacttaagcatctgaaggatttggatagagtattaattcattatcatcagttttgattattactagttttgtgttttaccatctcatttttatgtctatcatcttctgattattttcccattttctgccttttgagagcaaaatggcattttctaatttcacagatggtttggaaaatatatttttttcctaatattttaatgcatatctctgcattttaatgtgcatacttattttttaaagtctaaagttatccatgctggctcctccttcaacataaagatgttagcaaccttatggcgcccattcaatatcctattttattatttttcttagctttacttttatctttttacagcaaaaacaggcattagctttacagtcaagagtaaattaaatttaccaacaaatcttatcaattactaaatggaaaactctattagtttgyatatcttacatcttcccttaacatcattttcctttttaccaaaatgcatttttaaaagttctttaattatgttctgtggttattaaaaatgtcaaagtatttatatgtttcagtgtatatttaacttatg

SEQ ID NO: 422495 - DNA, 416 bp, Homo sapiens
gatttagggtgtcttttacaaaagttgaataaacagcacatccattaataggatcaatgtttccaataacaatagcgtacctgtgctgtacaacctcactaggtccacacttttgtataaaaatgtaagtctagacatttataaaatgttagtgttcgctttccttttctttggggggcaggcagtggttctcgctccaacatactggcttatcacaagttcagtttataraatttttaaactaacaagtgttattttcttttgaataatattcatttgtaaggaaaataaattcccatgaagtgatattttaatgaattttcaataaaaataaacttcaatccaatttctaagagaataatagattagaaagaaagagcacaaagcctatttcattctgtgaacaccaagagaaa

SEQ ID NO: 422496 - DNA, 608 bp, Homo sapiens
tctagggttgtctgctacttaattagaccttccacataggaaaataacaataagctggtgtcccgtctccaacagatgcctgagccagatgctcagagaaacacacactccatttcctataatgttgtctattgcttatttttatagtgttaaagaagcctgtctgagaatactttgagaatttacaataaaaatgaatacaatatgaagagcaaaaggactaacctctattttaatatttttgttgcatatgctttcttatgaataatctttttctattatactttacttttctcacattttaacttccacctagttcttttggccattcttaattggatttaaygtacaatgaaaaggtacattaaatccctgattatctacaatataccagagaacttataatgcctgaaattccaggggcagacctgaatctgtccaccttagggaagactttgataaaatgtaatgttgagggcactgacacctgatgtgttaaaaaaaaaaaaaaaaagagagagaaaagagaagaaagaatactcctgcaagaatgtgaagattttgaagaaaaaataagactcatgataaattatatccactgtgtcatt

SEQ ID NO: 422497 - DNA, 495 bp, Homo sapiens
ttgtctattgcttatttttatagtgttaaagaagcctgtctgagaatactttgagaatttacaataaaaatgaatacaatatgaagagcaaaaggactaacctctattttaatatttttgttgcatatgctttcttatgaataatctttttctattatactttacttttctcacattttaacttccacctagttcttttggccattcttaattggatttaatgtacaatgaaaaggtacattaaatccctgattatctacaatataccagagaacttataatgcctgaaattccagggkcagacctgaatctgtccaccttagggaagactttgataaaatgtaatgttgagggcactgacacctgatgtgttaaaaaaaaaaaaaaaaagagagagaaaagagaagaaagaatactcctgcaagaatgtgaagattttgaagaaaaaataagactcatgataaattatatccactgtgtcattttcctcaaggc

SEQ ID NO: 422498 - DNA, 557 bp, Homo sapiens
atgattttgtgggttaatgcrgctcagttggacatttcttactcggatatcggcagtatggcctcttcacttatatatatggcccttcggtgttcccccatgtgatctctatccctagaaggttcttggacttctgttttggtagttcagggctctaagatattaagaaaaagctacttatttcctgaaagatctagcatctttcaggatggggaactacaccccatttctcaatgggatgagcatcaaaaatgtgttgccatctttcattaacagtatatgtattgagccctcactagggattaagttctatacaaaagaaaaaaatttaaaaagtcatctcatttaatgctcacaatgattcattgagatacgtactaccattgctgtagtcacacagccagtgagttgtagagtgggctgtttattttatggtctgattgaatttaatgctcaagttctttatcactatgacatataaagtctgtttagctcaccaaaagatccttctagaaaaagttatcaccatctatcttccactgcatggccggcacagt

SEQ ID NO: 422499 - DNA, 666 bp, Homo sapiens
aacactactgcctttttaaattatcagcttctagcacagatctggcactgagagaatgctcaataatgtttgaaaaaaatgttcattgaattaagtgaaattgtagttctgrggaatggttattaaacataatcatatgaaaataattacttggccacactgggcatattttaaagagctcttcctccatttacctcaaaacttgtttctttaagtttttgttttcctaatattaattgagatatatttaacatataatcagctgaacaaattacatagcatcatttgataagttttgatatatatgtactcccatgaaactatgactacaatcaagaagtgaacagctccatcaccaggaaagtttactaggaccattttctaatccctccttcctactcccttcctattcccagacagccactaatctgctgtcacttttgattagtttttatatctagaacttttataaattgtgtaatataacatgtatcttttttctggatgctgttacttggcataataatttggagctagatccatgttgctgcatatataaatagtttatttatttgtattgctgatagtgaattgtattattcactattaacgaatatgaatatgccacaattgctttatcagatttatctgttaatgaacagatga

SEQ ID NO: 422500 - DNA, 572 bp, Homo sapiens
gcattgacagcttcattaaacatttcattccacatcactgacgtgcaactgatttcctctgaggttgcggaaaaccattagactttcatcaaaaggaacttgatctcctgcccagctctccacatgctacttataccctgtacgctgccgcttccatgggaattagcatcaacttgaagaagcatctcaccagaccaagttactaatttatggccagagaaggagaaaaaaatagcaataattttatttcacaaaccactgaaaataggaaatatctgtatgaattgtcataagtacataacgttaatctagagcraggtcatctgcttgtcactctaggtttggatgggcatcttttttttttcttttagtttcatgaggaatatgtattacctttacattttatatcatgaaacatttacatttacaaagagccacaatgaatcatgtaacaaatacctgtgtacccatcacacagctctagaataaaacatgaccaacacaggtaaagcctctcgtgtaaccttctccaatcacattcccttttttcccagaggtaccacaaccctgaa

SEQ ID NO: 422501 - DNA, 572 bp, Homo sapiens
gcattgacagcttcattaaacatttcattccacatcactgacgtgcaactgatttcctctgaggttgcggaaaaccattagactttcatcaaaaggaacttgatctcctgcccagctctccacatgctacttataccctgtacgctgccgcttccatgggaattagcatcaacttgaagaagcatctcaccagaccaagttactaatttatggccagagaaggagaaaaaaatagcaataattttatttcacaaaccactgaaaataggaaatatctgtatgaattgtcataagtacataacgttaatctagagcgaggtcatctgcttgtcactctaggtttggatgggcatcttttttttttcttttagtttcatgaggaatatgtattacctttacattttatatcatgaaacatttacatttacaaagagccacaatgaatcatrtaacaaatacctgtgtacccatcacacagctctagaataaaacatgaccaacacaggtaaagcctctcgtgtaaccttctccaatcacattcccttttttcccagaggtaccacaaccctgaa

SEQ ID NO: 422502 - DNA, 554 bp, Homo sapiens
atgaaaatttcagctttgtacaaagatttccagcttcaagcatcagaaactttaaattacctttttattttaattattgtaatcacctcatttctaaaggcttatcttttcttgcatcctgctaatccccagaatttaaattttgygtcctcctttgctagtaaagaactatctttaggaacagcttctattttggagggataaggggaaaggactgctttaaaaactaatgctgagagatttcaaagttttaaataaattccaggggctgactccttttggttgtaagtaaattgaagaaaaaatgcgttctgtattttatagtcttaatcaaagttccaggagtccggagaccagattttatggagctaataggcaaaggactccactgatccaactgatataaataagccatcttgagtcactaaggtttactaaattgccacgtccttcattgctcctcccagtgtttgttttgttttgttttcttttgtttcagggaatgaaaacaccatgtatccaatctgttcaagctaggaaagttttattctggc

SEQ ID NO: 422503 - DNA, 595 bp, Homo sapiens
aaactataataatttcagttttcaacatgttaagtttaaggtgcctctgagacattcaagttacctggggactattcacactgaagttctcaatagaaagatatttagatacggaattcagaagagaggtctgagtatgaaaatttcagctttgtacaaagatttccagcttcaagcatcagaaactttaaattacctttttattttaattattgtaatcacctcatttctaaaggcttatcttttcttgcatcctgctaatccccagaatttaaattttgcgtcctcctttgctagtaaagaactatctttaggaacagcttctattttggagggataaggggaaaggactgctttaaaaactaatgctgagagatttcaaagttttaaataaattccaggggctgactccttttggttgtaagtaaattgaagaaaaaatgcgttctgtattttatagtcttaatcaaagttccaggagtccggagaccagattttatggagctaataggcaaaggactccactgatccaactgatataaataagccatcttgagtcactaaggwttactaaattgccacgtccttcattgct

SEQ ID NO: 422504 - DNA, 587 bp, Homo sapiens
atgccttttcttttggcagagaactatataatactcaaaaaccagttcctactaatctgattggccaaaatgagaaggcgtatctgaccaggtgacatcaagtaaacatgcagcctgagctgtcattcaagagcttggtgtctgcagacctgtaaagtcaaaaggtcctgacttctatgtcatttgctgatgctattccagttcctatacatcatctcacatcaatgggcccataagattgatacccatgatagcaataacaacctactcatgaatccaacagcatgggctcctattcaacaagactgatctagttgctgtattgataaaagttaaacttgtcaggtaaagagctgccataatgtgataccatcccttgagggtggctattgattacattatacccgttctctagtagcagaagcagtgattcttctttaccagaatcaacaaatattcrgagtatgggtttgacattcttgcacctctattcaaggatataaggagtatctcatacagtaaacctggtaaactgcatagatcaaatctaaggcacacacttcaaagtaaaggaagtgcaagagata

SEQ ID NO: 422505 - DNA, 467 bp, Homo sapiens
catcccatggacttttgttattggatgaatgcagcatggagatatatcttaaattatttctttgattgaaaacgtaatcaaggctcatatatgaacaaacatgcmccatatttcaatataattacctcataactaagcgcagtgcaaaaaaaaccaaaatgtcaatcttttttttttttttttttttttggaaaattgtcctcctgtcaacgtagaataaatccattaccatatggcccaccaatgcagcagaaaacatggggtctaatggtgttctgttggcaaactcttgtaattgatttatttttctaagctaccaactggcttgttactgtgtgtgttttagttatactctcagtagacacatttgactgctttttgttgttgtttctatttttaaaagcctgcaatcaaagttccagaattctacagtatttccagatctgcaatttagaatggaaaagtgt

SEQ ID NO: 422506 - DNA, 528 bp, Homo sapiens
aggttgaggctgcagtgagccatgatcatgccactgcacaccctcctgggtgacaggttgggaccctgtctcaaaaaaaataaattattgaagatatgatctacattattaaatattgtgtgggtactcgaaaagaaygtgttgctgctgttgttagatgaagtgtcctataaatgtgatttagatcctgttggttgatagtgctgttgatttctatatccttgctcactcgaggattatatcctctatatcctcacgattttttgttactattctttcaatgcatgacctacttctctgtaaatgtggataaaatcaataaaattaggagagtaatcacagaagagtaatattttactgagagaaatggaggtttgggaaagctgaagaagtaggctcaccttgcattgagaaactgatattaattgtgggggcacacagctgcccaaaagactaaatatgcctccaactaaaagcataaaacttagtgagattgacccttctatcattatgtaatgcccctctctg

SEQ ID NO: 422507 - DNA, 458 bp, Homo sapiens
gacaaaccttagtatgatttcagaataaaagaaaactttcattctggagattaaaattagcactaagaataactgcaaacttgataatgatcttattcaaaaggaagttataattttctatccacacttagtaataaaggtagtctctgaataataatgagtactttctaaagacaacctctaaaatacggtttaaaaattaygagtttgggcttccttttgcctctagtgacttgactatttcaatttctaggctatgtccaagtcatgtttgtataattctgtatgtattaatatgaaaaacagtgaccaaagttgataaacgtaggacttagcaaaaacaaattcctgcagtgaggaagaaatagaagaggggtaggtacttcttaactgaatagtttattgaaataccaaaaatagatgagaagcagtatttgttgaaatgctgtcacttttat

SEQ ID NO: 422508 - DNA, 420 bp, Homo sapiens
aataaacaataagcagaaagtataggagattctagaaatatctataccatatatgtgcagactataaaatgatacaaaatcagatatggaaatttggcattttgcacaattgattcaaaaaataaaagtaaaaatgtacgaagacaatattacttttccatkagattgctaagatctcagttgcttctccagatatagcaagaggtcaagtagctgacctgaggatataaagctgcatcactaagactcccgttaatttctccatagctacagctgatgttgaacttagacttgaagggattactaagttttgttactattcttccaaggcatcgcctactttcctgtaatggtggataagatcaataaaattatggagaataatcacagaagaataattttttactgagagaaatggag

SEQ ID NO: 422509 - DNA, 420 bp, Homo sapiens
aataaacaataagcagaaagtataggagattctagaaatatctataccatatatgtgcagactataaaatgatacaaaatcagatatggaaatttggcattttgcacaattgattcaaaaaataaaagtaaaaatgtacgaagacaatattacttttccatgagattgctaagatctcagttgcttctccagatatagcaagaggtcaagtagctgacctgaggatataaagctgcatcactaagactcccgttaatttctccatagctacagctgatgttgaacttagamttgaagggattactaagttttgttactattcttccaaggcatcgcctactttcctgtaatggtggataagatcaataaaattatggagaataatcacagaagaataattttttactgagagaaatggag

SEQ ID NO: 422510 - DNA, 528 bp, Homo sapiens
tgtttaatatcacaaatacattttgaattgagaccattccagtggtgtaatagaacatattaaatttttcagtttacatgggaaaatgtatgtgaggctgagggtcaacttgtggtcagtccctgagcagagatctctactaatggtcagctatcctggaatgttccttaattttacytcttctcatctattttcattttaaaatctagagatttggtaaaagcttcctgtctttggtttgcataacagatagattgttttgaaatagtagtccatggtagtgtctctggggattcatgggtggtggatggcatgaaggagcagtggtagtgaaactcatttttgtatgtagatgaacttgtctctggaacttttcttcctctttttctgctgcttttctctacattccatacctcccttttcaagccgttagctggtaaatttttccccgctgacaatgagagagtgttattgcctgtacttttgttgatcatgtcttgatacatctggagaaaaggtcactttcaa

SEQ ID NO: 422511 - DNA, 532 bp, Homo sapiens
catatttttcttgatgtggacacttattcaccagtctagatggaggctactgatgcatttcacacaggccaccagagagctgtaagtgcttcccccatctgtcaactagtaattgctcaaatggttcctgcaagtccaaagctgctggtctatttccagggcttagtaacaatgataaactaaagtgatgacggcatgaataagggaaaaactaaacttgtaaagggacgtaaaactaaaagttaaaacgtaagcagtgcccttctgcaatgtttgaagtgtcataatcagagcatcaaaaaagtagttttccttgtatatatatattttttctaatgtcatggactcattgtatttttctaatatcaatcagtgagttaaacagaaaaagaagtcctatcargatgtttggccacctgattgtggaactcctttgaacattcaaacatcatatggattattgatgtaaacccatgcacacattttttaacaacatatgcagaagtgctactagggcaatgggctatgtggc

SEQ ID NO: 422512 - DNA, 548 bp, Homo sapiens
ttgaattaagtaaaaggagtcaacacaaatgattttacagcgttgatcccatttgtaagaaattctagaaaggcaaatctataaaggcagaagtcagatgtgtggttgcctggaggcataatcaggaaaatgcttgaatgccaaaggcagaatctttagagggtaagggaactattctgtaccttaattgtaatgatggttaaatatacgcaattactaaaactcatccaactatatacctaaaatgagtgaattctattgtawaaaatttctgcctataaatctattaaaaatttaaaaatagaaactagaaaatagaaagtgctatttggctttgattcactaattgtgttgaatgtatgcagagaagtcataaaatatcaatgaaaacaaaaggaggtcattgatgatctgattctatcaagagcagtttgaaaactgttagtaccaaaactcagaattcagtgggctttgcaaaaatgggcagtaaggacacaaacaataaatacatattacatttttaagaaattgaattgaatgaagaggag

SEQ ID NO: 422513 - DNA, 550 bp, Homo sapiens
aattaacttatataagacaacttcagaatgaaatttgctttctggtttctctaccactgctaagaaaagtagccccaaatttaattaatgaaatgttgtttgcctatattttctattaagcctttcatctaacataatttccatgtgttttatttagttaataattcttaggttttggtgttaataaggaatcattcaggggtgttgcttaaaaatttagattcttggctccaacctagacattcccagggagaaaatctgggaatctgcatatgttaaacaaacttctccgtctattctacwgtaaataatagtcgttcacacttgagaaaatattcatctcgttgttcttatttccaggcattttgggaaaaagatgctgtgaggtatacttcacaggtgtttggaggaaggttggttggctgttacagtttttctgcttgcagacccacaactatccttaacaaggtgtaggccatcccctgtgccctgtggtttttaggacacttcagacattttctttttcctcaagcatttgcacttccttcct

SEQ ID NO: 422514 - DNA, 550 bp, Homo sapiens
aattaacttatataagacaacttcagaatgaaatttgctttctggtttctctaccactgctaagaaaagtagccccaaatttaattaatgaaatgttgtttgcctatattttctattaagcctttcatctaacataatttccatgtgttttatttagttaataattcttaggttttggtgttaataaggaatcattcaggggtgttgcttaaaaatttagattcttggctccaacctagacattcccagggagaaaatctgggaatctgcatatgttaaacaaacttctccgtctattctacagtaaataatagtcgttcacacttgagaaaatrttcatctcgttgttcttatttccaggcattttgggaaaaagatgctgtgaggtatacttcacaggtgtttggaggaaggttggttggctgttacagtttttctgcttgcagacccacaactatccttaacaaggtgtaggccatcccctgtgccctgtggtttttaggacacttcagacattttctttttcctcaagcatttgcacttccttcct

SEQ ID NO: 422515 - DNA, 578 bp, Homo sapiens
ggtttttatctaagactcagtgaatcttaaagagattaagccatactaggaactcttatgtgagaaagattgacatagctgtgggacacagactatttctatgcagcatagctgtttttaatgaaaaaataatcaaggcaatggagcttcaaaaatgtatgctgcaggtgatgaggaagaatggcagaagataaaacaatagaagaaagggagagaattacatagcataagagggttgacctacatctgttcatttaccttataaactaatatctattctaacgttgccttatccatttttcttgctgtaargaaatacctgaggctgggtaaagggcttatttggctcatggtgtttctgcaggctgtacagaaagcatggtgccgacatttgcttttgatgacagcctcaggaaacttccactcatggagaaaggcaaagggatttaagcatcatgtgcagatcacatagtgagagaggaaggggagtgagagtcagtcaggcaactaccctgcatttaactgaaaatgcactaatcctttctccagaatttcgcttttaggattttaatatttgg

SEQ ID NO: 422516 - DNA, 578 bp, Homo sapiens
ggtttttatctaagactcagtgaatcttaaagagattaagccatactaggaactcttatgtgagaaagattgacatagctgtgggacacagactatttctatgcagcatagctgtttttaatgaaaaaataatcaaggcaatggagcttcaaaaatgtatgctgcaggtgatgaggaagaatggcagaagataaaacaatagaagaaagggagagaattacatagcataagagggttgacctacatctgttcatttaccttataaactaatatctattctaacgttgccttatccatttttcttgctgtaaggaaatacctgaggctgggtaaagggcttatttggctcatggtgtttctgcaggctgtacagaaagcatggtgccgacatttgcttttgatgasagcctcaggaaacttccactcatggagaaaggcaaagggatttaagcatcatgtgcagatcacatagtgagagaggaaggggagtgagagtcagtcaggcaactaccctgcatttaactgaaaatgcactaatcctttctccagaatttcgcttttaggattttaatatttgg

SEQ ID NO: 422517 - DNA, 593 bp, Homo sapiens
tagaaatgcaaagaaaataaaatatgtaattttgttttgttttggaactttaaagctgggcctgmgcttcaacaataactttggaaaaacacgtatagagtaattgcttcccttccacacaggggagctacaagtgtctgggctggagcattgaggaagtgagtcaggaaagaaaagttaattgctggtagggatgtctgagaaggtaccttgttttgtactccactccatggggtatgggggaggggaaacaacaaactgagataatggtcctgcttggcattcattatgttctgctctgtaagaaggctttggggacttcttatgtatcttttcaaatatccctttctattctccatgttgtgcatgtcagcaatttggtagtttttattgttgaataacataccattgtacaaatatgttatagtttgttatccattcagcttctcatggacatttgggttgtttccattctcatcacttgctttggctaatggaatgaggtggaagtgaggatgtgctagtttcaagcctaggcacaagaggccatacatacttctaattgcttcccagagattttgccatccccatga

SEQ ID NO: 422518 - DNA, 634 bp, Homo sapiens
agttttcccataaggaaattccttgtgaacaagagacrgaactcagagtcatccctgtgctcacgtgagtcagagtccagcctgggcagcatagtgaggccctgtctcgacaaaaatttaaaaacttagctgagtgtgattgtgtggttggctcatgcctgtagttccaattacttgggaggctgaggtgggaggattgcttgagccaggttgctcaatgctgcagtgaggtatgacactgccactgcatgtcagcctggaagacagagtcagatcctatctctggaaaaaaaaaatgcttgtagaatgtaaacatgaggccctgtctctacaaaaagttgcttgggtgtggttgagcccaggagtttgaggttgcagtgagcaatgattgcaccattgcattccagcctggataacagagtaagatactgtttgaaacaggaaaaagaaacaaaaacaacatttgtatgtgggtatgttttatttccggggggctgctataacaaagtattatagattgtgtcttcatattttggaaggggaaaacaagctcattggggccgcttttttaagggcactaatcccatttatgagggctcttctgtcacgatccaatcaccatccaaaggcccaa

SEQ ID NO: 422519 - DNA, 615 bp, Homo sapiens
ctagtcaaatgcttattcacgtttatgtaacttaagtaaaatctttaataaataagctagctttaaaattattggtaaagtaatattagaaatgtcttaagaattgccagcatacatttttgttttgtatttattaatcaagcaatttcatacttatccctgtcaaatgctatgaggtgtcaaaatttggcatagtggttacaaaactataaaaccagcccaagaaaatgatctttccctgtgtaatctttaaataaattagagattgatattggtgtaataagctacatcattttattttatttatttatttatttgtgtttttttgagacagtcttgctctgtcaccgaggctggagtgcagtggcacgaatctcggctcactgcaacctccacctcccaagttcaagtgattctcctgcctcagcctgagcctcctgcctcagtcyggagtagctgggactacaggcgcatgcaccacacggagctaattttttgtagttttagtagagatggggtttcaccttgttagccagggtgatctcaatatccttacttcgtgatccgcccacctcggtcttccaaagtgctaggattacagtcatgaaccaccat

SEQ ID NO: 422520 - DNA, 615 bp, Homo sapiens
ctagtcaaatgcttattcacgtttatgtaacttaagtaaaatctttaataaataagctagctttaaaattattggtaaagtaatattagaaatgtcttaagaattgccagcatacatttttgttttgtatttattaatcaagcaatttcatacttatccctgtcaaatgctatgaggtgtcaaaatttggcatagtggttacaaaactataaaaccagcccaagaaaatgatctttccctgtgtaatctttaaataaattagagattgatattggtgtaataagctacatcattttattttatttatttatttatttgtgtttttttgagacagtcttgctctgtcaccgaggctggagtgcagtggcacgaatctcggctcactgcaacctccacctcccaagttcaagtgattctcctgcctcagcctgagcctcctgcctcagtccggagtagctgggactacaggcgcatgcaccacacggagctaattttttgtagttttagtagagatggggtttcaccttgttagccagggtgatctcaatatccttacttcgtgatccgcccacctcggtcttccaaagtgctrggattacagtcatgaaccaccat

SEQ ID NO: 422521 - DNA, 551 bp, Homo sapiens
gatatcaaggttccatgttgggttattttgaaaaagcccatatatttatgtgactggatttttaattcattttataattatgaaacatgcctattgaacaatgtctaccgattacaaattttgcatgctcagccagacacagtgactcatgcctgtaatcccagcactttgggaggccgaggtgggtgggtcatctgaggtcaggatcacctgaagtcatgtaccrgagccgggcttggtggcatgtgcctataatcccagctactcagaaggctgaggcaggaggatctgggctcactgcaacctccaccttacttgagctcaggaggtagcggttacagtaagcccagattgctccactgcactccagcctgagggacagagagagactccatctcaaaaaaaaaaaaaaaaaaaaaaaaaagtatgtcctacataatatgttgtaaatgaaagaaaagcaaatgaagtaaatgaggagaaacaagagtctttataggtagataccgagacattaattagctgcagagtagggcatgtacctgttcaac

SEQ ID NO: 422522 - DNA, 554 bp, Homo sapiens
tggtgtaatgtggcatgatacatgaaactcaggaaacatttactggcggctttaattgctttcacttgaacaaatagctatatatttgtttatatatgtgtatatatgtacacacacacacacacacacacacacacacacttatttatttatttatttttgagacggggtctcactctctcacccaggctggagtgcagtggcgtgatgttggctcactgcaacatctgcctcctgggttcaagtgattctcctccctcagcctcccgagtcctgagtagctaggattacagctatacactgccacacctggctaatttttttttatttcttggtagagacaktttcaccattggtcaggctggtctcggactcctgaccttaagtgatccgtctgccttggcctcccaaagtgctgggataacaggtgtgagccactgcgcctggcctatacatttttcaaaaagccaaagtaaataagagagcaggaacatgttttagaggatccctagatgcccaacatctacatggcagcagaaaatcctaaatgatac

SEQ ID NO: 422523 - DNA, 471 bp, Homo sapiens
cataatgtatacatatatcaaaaatctcatgttgtacaccataaacatatacaatttttacttgtcaaataaataaataagaacctccacacacatacaaaaagaagaatactgttgagggggttaggcaggtacatagtatcccrattttacggatgagaaaaatgaagctcaatgattagcctctagattgcctggttggtgagcagtacaccttggattacaactacagaggtttgtaaatttcagtgaggataagaatcaccagaatagtgactaaaatctggattgctgggctccatccccaaagtttctgattcagtaggtccagaagggggcccaagaatgtgaatttcttaccatagctcaagtgatgtggatgctgctgatcttgccacactttgcaagccactgagctgtactagagcaatgattcttgaatatgcctgcccattagaatctgctggaagc

SEQ ID NO: 422524 - DNA, 585 bp, Homo sapiens
gctagcactttgggctccggccccatggtatcatctaggggtgactctcgaagcccgtgggcatgttacagtgtcgcttttttagctttgctgtccacagatggcttaagtgttaacctgttcagtgccctcttggtacccaggtccttgtcyggagtccaggaagaatcaggtcacacacgggcttgaagagtgaatgcgggggttttactgagggttgaaggtgggatggatggagagctggaagggggatggagtagaagatgctcttcctctggagtttggctgtccagtggccaatcttttctctgatagtcccagctgaactcctctcggtgttcaacattccttctcttctctccttctctgttgcgctcttctgctgtttgtctgtttgttttctcctggagctgggggtttggggttaatatgggtacaagatagggggtgggcaggccaaaaggcaacattttgggcttgaaaacaggaatgtctgtacccatttagggccaccggtttccaggcttgagggtagggtctttgccggggaactaccctcttctacccagtatttgcctgtctcct

SEQ ID NO: 422525 - DNA, 507 bp, Homo sapiens
gaagtatacctatctaggtgcagaaattctgaaagtgaccttgagttaatcacacaatgttacaagtattccaaaatattatacacaactaacagcaaggaaagtgctggactgaagtgagaccataacagaacttcatccattcactcaatgataaagaaaaacaaaaataaaaaatattttgagtggtcataacacgccaggaactgcgctaattattttgggaacaaagactagtaaaccgcagtctttgctctcaggtagaagtcttattagcaggggtatatattaatagaaacaaagccatcctgctttagtaagtgctaaaataaagcgcattggcagaggagctagggagggcacctcaagaggtgatatgtgaactrggtcttgtatgaaagaaaggaatgttccagatatagatatgaagagggactggagacagaaaagattccaagttggaagtatgtctattacgtgtgtggctatttggtagtgaaatattaa

SEQ ID NO: 422526 - DNA, 555 bp, Homo sapiens
aaatagtagctactgatggcctgcataaaacagatagttgttctttctttttttgcatatattattaaatgggctgtatatcgagcgtgcattccttatgctttgccatgtttcacacgattttctccatgtaaatgtttattcctaactcagcgagcaattgttgtgcattatgcataagccttcaactttcaatattcagataacttagaatttctatatataatttaaattcccttcagacaaatgactctcaatacatttcagttaaatactgctaattctcaggttattcaggataggaagagtgggcttggcaagaacaattcaaaatagctgataatgcccatgcatttttcaggatgtgccacatctgtcccgtgtggatytgaataatcaagcattatgttaagactgattatttcccctgtggccatgtgaagtcccctggcagacacacatcttccatttcctcctcggtgttctgtgtttggcttagcacaatccactaaacactattaaatgaataactgtgaaggtaataaaaacaataac

SEQ ID NO: 422527 - DNA, 470 bp, Homo sapiens
tgtgcacataataatcttttatgaatcctaatatctttcaaaacacatcttgaaaaacctacaatttttttggcttatagaaattgctgagaaaagatgagagaagaactctatttttctgcttttaaactaatttcccatcatttgcagatcactcagctttcaaattttcacataaggaaagaactacaattatccagctctggcytcttaaacccatggtttagactttgctttatcctgactccagataccttctaggactgtaaaacatatcggtagatcctcttttcatcacctgactgcttagaaatagtttgtataccacttctcaaaagaacacatttatgtggccaacaaacatatgaaaaaaagcttatcatcactggtcattacagaaataaaccaaaaccacaatgagataccatctcatgccagttagaatgtgatcattaaaaagtcaggaaaca

SEQ ID NO: 422528 - DNA, 470 bp, Homo sapiens
tgtgcacataataatcttttatgaatcctaatatctttcaaaacacatcttgaaaaacctacaatttttttggcttatagaaattgctgagaaaagatgagagaagaactctatttttctgcttttaaactaatttcccatcatttgcagatcactcagctttcaaattttcacataaggaaagaactacaattatccagctctggcctcttaaacccatggtttagactttgctttatcctgactccagataccttctaggacygtaaaacatatcggtagatcctcttttcatcacctgactgcttagaaatagtttgtataccacttctcaaaagaacacatttatgtggccaacaaacatatgaaaaaaagcttatcatcactggtcattacagaaataaaccaaaaccacaatgagataccatctcatgccagttagaatgtgatcattaaaaagtcaggaaaca

SEQ ID NO: 422529 - DNA, 470 bp, Homo sapiens
tgtgcacataataatcttttatgaatcctaatatctttcaaaacacatcttgaaaaacctacaatttttttggcttatagaaattgctgagaaaagatgagagaagaactctatttttctgcttttaaactaatttcccatcatttgcagatcactcagctttcaaattttcacataaggaaagaactacaattatccagctctggcctcttaaacccatggtttagactttgctttatcctgactccagataccttctaggactgtaaaacataycggtagatcctcttttcatcacctgactgcttagaaatagtttgtataccacttctcaaaagaacacatttatgtggccaacaaacatatgaaaaaaagcttatcatcactggtcattacagaaataaaccaaaaccacaatgagataccatctcatgccagttagaatgtgatcattaaaaagtcaggaaaca

SEQ ID NO: 422530 - DNA, 553 bp, Homo sapiens
gagatcagtgagagacagaaaagtatgagaaggcttcattgagatggcagagtcagaggccaatctctaaaaacagatgggaccactggaacactttatgcactcttgtcttacagcatttatcacactggatgatagctgttaacatgtctgtctacccttatagattgtgagacacttgaggccaataatcatgtccttgtattccaagtacctcacaagagagatttttctgagttcttagagaaaaatctatcttgcaagctttctttccacatagaatttagggggaaactgctgtaagaagatgaaccaagacttaggtcaaaatattatgtgtttacatgaaccagtgggttatctccctgactccacagtggctgtttctaaggaagtaccactctgaagatggaagccaaggcagaatgagragaaaagggtagggtttaccacgaaaccaaagcagcttaagctttggggcccattgcttgcactgagctctctccaaggccctgttgagaattgcatatgcctgattttgtattctttttct

SEQ ID NO: 422531 - DNA, 625 bp, Homo sapiens
atttctctctttaacattgaacaagaattcagagtttcactctaattaaataaaattacatcacacaatcacctctgggcagtcactatggcaagaagtgggagactgccttgatcattgactcaggctcgctacccagtagcctaagttgggtcaaccccaagaaacacttatcaatgcctgggatggccaccaaggaatatattagagaaatagaaaaaaaagtcatttgctcatattttaggtgtggatgtaaagacacggaacatcaatgaagaacttttctattttcaagtgaaaaatgtatgaatgtgatgagataatcatttggtggatttagcgaattttttatttgtttgctttaagcaagtattggtattaaaatctgtaaatcttttttttttctttgagtccttctgatccccagcaggtaaacaaataatactttaaacttaaaagcaatgaatacacaaaattgctgagctcctaagtgcttaatcagctcatggttgttacattattkcattcacatcaacgttataaaaatattgcatggcaaaattctggaaatgaaatggttaactctggggaaccaagtgtgttagcaactctggttcacaggcgc

SEQ ID NO: 422532 - DNA, 619 bp, Homo sapiens
gaatggtgattttttgcttatggccactctcaagagagaccttggaaccaagtaaaataaatgaaagtgacaacatacagtcaaatgttgctgagtgttttctgttgccagaagcatacagttataccacatttggtactttacataaagattctaatttttttcaaagttgtaatataaacagttaaacacttctagctatgtgggaaaattctcctattatagaatgacttctttcctaatcagtgaaggcaacaaaggtttgcaatgaagtgtcttacctttcctcctcccccatcaatatctttaaatgtaaaatgcttataatacaaggataaatatgtttcccaccagactcggagtgrgtgggggaattatgcctcattataggatatattttatggggggaaagtaaattagaggcttatattaggacgtgcccaggggccacccatggcaatgacctttaaagagcagtattaagttacgtgacagcataaccagcaagtgaatgatctcactatgaaaggtcacctgcaacttgaacaatatttcctattttggcacataatctggtaccttttgacacatttctcttcctcaggatatgatttttgtg

SEQ ID NO: 422533 - DNA, 598 bp, Homo sapiens
ataagttgccaacataacccaactgcatcagtctgcatttgtagatgtcattctacatacaagtgtgaccatctgacataattatgcccaccagtgatgccatgtctaagcattacagattgcaatgcatattattttattataatttttccttttatytcttcattttggtaagttttagtttggtttttaaaaatatatgcatgttagttatatcatttatgaattacatttcaaggtgagaaagataaaattagaaaatatttatattaaaacggggtgttaggtgtgatagggttgagacccactggtgtaaataaaatagtgcatcaggagatttggtttcctgctgtcttggccaaccattatgtggccttagagaagtgatgttatttccctgtgtccactcaatggaaatgattggctgaactatgtctcttacagcaccttctaattttaaatcttgactacctgactttgacaccagtttaggtttgggaatatttaaacccattaaaaaagtgaagacaactgaacttactgggcaaagtaagtattttggaaccaggacagtgtggttctttgtgacacatatgtt

SEQ ID NO: 422534 - DNA, 598 bp, Homo sapiens
ataagttgccaacataacccaactgcatcagtctgcatttgtagatgtcattctacatacaagtgtgaccatctgacataattatgcccaccagtgatgccatgtctaagcattacagattgcaatgcatattattttattataatttttccttttatttcttcattttggtaagttttagtttggtttttaaaaatatatgcatgttagttatatcatttatgaattacatttcaaggtgagaaagataaaattagaaaatatttatattaaaacggggtgttaggtgtgatagggttgagacccactggtgtaaataaaatagtgcatcaggagatttggtttcctgctgtcttggccaaccattatgtggccttagagaagtgatrttatttccctgtgtccactcaatggaaatgattggctgaactatgtctcttacagcaccttctaattttaaatcttgactacctgactttgacaccagtttaggtttgggaatatttaaacccattaaaaaagtgaagacaactgaacttactgggcaaagtaagtattttggaaccaggacagtgtggttctttgtgacacatatgtt

SEQ ID NO: 422535 - DNA, 593 bp, Homo sapiens
aagggaatagttataaactcatctctttcacatgtatagacacaaaaacccaaacaaagtattaacaatctcaatccagcaatgcataaaaaagatagtacttaatgataagactgttttgtcctagtcaaacaaggtttgtttcacattacaatgtctattaatacaattcactacattaatgatttaaaatgataatacaattaaaaattatatcatcagttcaatagacttagaaaaagccatgtatagtttctaggaatctaagcaaaacataaaattttctttaagacaaaattgtaaatcccactattacctgtttaacttaaactattacttgtttaactttttaaacctccttcatacttaagaatgagatataaagcatcttagatgaaaaacttagagatacagtagaacyattaggactaagaggctctgcctacacctggtagacccaacctcaggtacttttagtgactgctaaggatcttatgatttcatttgtttgtagaagtgagttgagaatttaaggaaatgaaaatatgcttttctactttaaaaatattctttctccccatatttatttagct

SEQ ID NO: 422536 - DNA, 344 bp, Homo sapiens
cagcaagtatcatgtattctgctttaccacaaaaactgtatctgctgcatcatcttgtggtcaaaggcaaattatggttcaaaagtgtctggcaggccaggcacagcggctcayacctggaatcccagtactttgggaggccaaggcaggtggatcacttgaggtcaggagttaagaccagcctggccaatatggtgaaaccccgtctctactaaaaatacaaaaattagccgggcatgatggtgcatgcctgtagtcccagctacttgggaggctgaggcaggagaatcacttgaactccggagttggagattgcagtgagccgagattgcgccattgcactt

SEQ ID NO: 422537 - DNA, 344 bp, Homo sapiens
cagcaagtatcatgtattctgctttaccacaaaaactgtatctgctgcatcatcttgtggtcaaaggcaaattatggttcaaaagtgtctggcaggccaggcacagcggctcatacctrgaatcccagtactttgggaggccaaggcaggtggatcacttgaggtcaggagttaagaccagcctggccaatatggtgaaaccccgtctctactaaaaatacaaaaattagccgggcatgatggtgcatgcctgtagtcccagctacttgggaggctgaggcaggagaatcacttgaactccggagttggagattgcagtgagccgagattgcgccattgcactt

SEQ ID NO: 422538 - DNA, 344 bp, Homo sapiens
cagcaagtatcatgtattctgctttaccacaaaaactgtatctgctgcatcatcttgtggtcaaaggcaaattatggttcaaaagtgtctggcaggccaggcacagcggctcatacctggaatcccagtactttgggaggccaaggcaggtggatcacttgaggtcaggagttaagaccagcctggccaatatggtgaaaccccgtctctactaaaaatacaaaaattagccgggcatgatggtgcatgcctgtagtcccagctacttgggaggctgaggcaggagaatcacttgaactccggagktggagattgcagtgagccgagattgcgccattgcactt

SEQ ID NO: 422539 - DNA, 344 bp, Homo sapiens
cagcaagtatcatgtattctgctttaccacaaaaactgtatctgctgcatcatcttgtggtcaaaggcaaattatggttcaaaagtgtctggcaggccaggcacagcggctcatacctggaatcccagtactttgggaggccaaggcaggtggatcacttgaggtcaggagttaagaccagcctggccaatatggtgaaaccccgtctctactaaaaatacaaaaattagccgggcatgatggtgcatgcctgtagtcccagctacttgggaggctgaggcaggagaatcacttgaactccggagtyggagattgcagtgagccgagattgcgccattgcactt

SEQ ID NO: 422540 - DNA, 573 bp, Homo sapiens
ggcacatttactaatagatggtattgaattccatttgaggcagtgcagtgggaagggcacagaaatgagaaccagaaagaaatcacctccagatctggcactcccaagctttcagatttgsggagaattagcatttcctgggtctcagcttagctctaacaattggactccctgaaaagatgcaaaataaaagcaaatataagtaagatgtgatcaaatgtcctattcgacttgaactttagacattagaacatctgtgtgtctaaatgctttgcttaacttctcagtaaccttttcacaatcagcaaagaatagaagggcattcttcgctgtgtggggaagcccttcaagctgtgaactactgaagaggtcagagtggtggctgtggaagcccagtgtctcctacaatatgcagacactgatctgttcatccttggctaagaggctcctgtggaaaagctgcagctccagctgtagacccctaaggggcttgccaagagaatccgcaattagacagaagaatgaagagatggtgaataatttctctttctttctgattacaatctaaatact

SEQ ID NO: 422541 - DNA, 573 bp, Homo sapiens
ggcacatttactaatagatggtattgaattccatttgaggcagtgcagtgggaagggcacagaaatgagaaccagaaagaaatcacctccagatctggcactcccaagctttcagatttggggagaattagcatttcctgggtctcagcttagctctaacaattggactccctgaaaagatgcaaaataaaagcaaatataagtaagatgtgatcaaatgtcctattcgacttgaactttagacattagaacatctgtgtgtctaaatgctttgcttaacttctcagtaaccttttcacaatcagcaaagaatagaagggcattcttcgctgtgtggggaagcccttcaagctgtgaactactgaagaggtcagagtggtggctgtggaagcccagtgtctcctacaatatgcagayactgatctgttcatccttggctaagaggctcctgtggaaaagctgcagctccagctgtagacccctaaggggcttgccaagagaatccgcaattagacagaagaatgaagagatggtgaataatttctctttctttctgattacaatctaaatact

SEQ ID NO: 422542 - DNA, 573 bp, Homo sapiens
ggcacatttactaatagatggtattgaattccatttgaggcagtgcagtgggaagggcacagaaatgagaaccagaaagaaatcacctccagatctggcactcccaagctttcagatttggggagaattagcatttcctgggtctcagcttagctctaacaattggactccctgaaaagatgcaaaataaaagcaaatataagtaagatgtgatcaaatgtcctattcgacttgaactttagacattagaacatctgtgtgtctaaatgctttgcttaacttctcagtaaccttttcacaatcagcaaagaatagaagggcattcttcgctgtgtggggaagcccttcaagctgtgaactactgaagaggtcagagtggtggctgtggaagcccagtgtctcctacaatatgcagacactgatctgttcatycttggctaagaggctcctgtggaaaagctgcagctccagctgtagacccctaaggggcttgccaagagaatccgcaattagacagaagaatgaagagatggtgaataatttctctttctttctgattacaatctaaatact

SEQ ID NO: 422543 - DNA, 573 bp, Homo sapiens
ggcacatttactaatagatggtattgaattccatttgaggcagtgcagtgggaagggcacagaaatgagaaccagaaagaaatcacctccagatctggcactcccaagctttcagatttggggagaattagcatttcctgggtctcagcttagctctaacaattggactccctgaaaagatgcaaaataaaagcaaatataagtaagatgtgatcaaatgtcctattcgacttgaactttagacattagaacatctgtgtgtctaaatgctttgcttaacttctcagtaaccttttcacaatcagcaaagaatagaagggcattcttcgctgtgtggggaagcccttcaagctgtgaactactgaagaggtcagagtggtggctgtggaagcccagtgtctcctacaatatgcagacactgatctgttcatcsttggctaagaggctcctgtggaaaagctgcagctccagctgtagacccctaaggggcttgccaagagaatccgcaattagacagaagaatgaagagatggtgaataatttctctttctttctgattacaatctaaatact

SEQ ID NO: 422544 - DNA, 564 bp, Homo sapiens
tctctttctttctgattacaatctaaatactgggaatagcacaacaggaaaaatgtatgtaatgcttatattgttcccaatgcttctttttttttttttttttctgagatggagttttgctctgtcggcccaggcttgagtgcagtggcacaatcttggctcactgccgctgccacaagtgattctcctgcctcaggctcccaagtagctgggattacaggtgcacgccaccatgcctggctaatttttttttattttatttttagtagagatggagtttygctatattggccaggctggtcttgaactcctgacctcaggtgattcacccgcctcggcctcccaaagtgctgggattacaggtgtgagccaccactcctggcccattctattgcttcatcttgcctgagagtatgaatcccagaacagatacccatgttttatagacagatcaggagatgagaaatactgtatgtgcacgaacatcattttatctgtgtttttagatgtcatctttgaatgccaaatgttgttccttggaaagttggttgtttttttccccct

SEQ ID NO: 422545 - DNA, 564 bp, Homo sapiens
tctctttctttctgattacaatctaaatactgggaatagcacaacaggaaaaatgtatgtaatgcttatattgttcccaatgcttctttttttttttttttttctgagatggagttttgctctgtcggcccaggcttgagtgcagtggcacaatcttggctcactgccgctgccacaagtgattctcctgcctcaggctcccaagtagctgggattacaggtgcacgccaccatgcctggctaatttttttttattttatttttagtagagatggagttttgctatattggccaggctggtcttgaactcctgacctcaggtgattcacccgcctcggcctcccaaagtgctgggattacaggygtgagccaccactcctggcccattctattgcttcatcttgcctgagagtatgaatcccagaacagatacccatgttttatagacagatcaggagatgagaaatactgtatgtgcacgaacatcattttatctgtgtttttagatgtcatctttgaatgccaaatgttgttccttggaaagttggttgtttttttccccct

SEQ ID NO: 422546 - DNA, 564 bp, Homo sapiens
tctctttctttctgattacaatctaaatactgggaatagcacaacaggaaaaatgtatgtaatgcttatattgttcccaatgcttctttttttttttttttttctgagatggagttttgctctgtcggcccaggcttgagtgcagtggcacaatcttggctcactgccgctgccacaagtgattctcctgcctcaggctcccaagtagctgggattacaggtgcacgccaccatgcctggctaatttttttttattttatttttagtagagatggagttttgctatattggccaggctggtcttgaactcctgacctcaggtgattcacccgcctcggcctcccaaagtgctgggattacaggtgtgagccaccactcctggcccattctattgcttcrtcttgcctgagagtatgaatcccagaacagatacccatgttttatagacagatcaggagatgagaaatactgtatgtgcacgaacatcattttatctgtgtttttagatgtcatctttgaatgccaaatgttgttccttggaaagttggttgtttttttccccct

SEQ ID NO: 422547 - DNA, 582 bp, Homo sapiens
ttttttaagaatactaaaacacagtgttggcaaagatacaggaatacrtgtactctcgtacactgctattaggcaagtagcaaccaggggaaggattaaaaaatgataggaattacagcttacttttaacccatttagccctcacctccactccttaaggtaaaggaaacttcaagtcagggaaattaagttgccagagccacagagctgatgagcggctgagccaggcttttgagctaagcccagttggctccaggacccgagccactgtattggttatctgccgccacgtaacacatacctccagatttagcagattgggatcctatgtttattatctcacagtttctgcgggttgggactccaggggtgacttagccagatcctctggctcaaggtctgtcatgagggtgtaatggagctgtcagctggggctgtggtctcatatgatggctcaacttggcggttggacgatctactggcagtcccacttacggggttgtggctggattcagttccttggatgctgtcagccagaagccactctcagttccttgatacgtggacctcttcacagagccg

SEQ ID NO: 422548 - DNA, 603 bp, Homo sapiens
acccacaggtactgtaagataataaatgtttgttgtcttaagcttctaagttttggggtattttgtcatgcagcaaatagataatacagttcctttccccaatgccccacacagggcttggcttattttagagtcttctaactattgggaagaggcccagcaggtttgagttactcccttttttcccttcccacatggtggctggatttatgtccaccttcastttgctgctatgtccattagcgttctctgtaaaaatgtaatgggctagaaacatggataaaacttatggtggaacttcagcctttagtacagatcatggccacactcccctgggtctggacatgacaaatttcccactggggaaccagacaacatggagttcagatgagcctggcatagtctcattctatgcattctgaggctcagttggaggagcaccaagcccagggtcttgtagccccagacccacccaagggatgatttgccctccgaacttttctctgagtctttctagaacctttgggctaaaataaattttatttcccaaaagcttggcttgacctatctgttttcaaatacatctcttgttagagagtagca

SEQ ID NO: 422549 - DNA, 538 bp, Homo sapiens
aaacaaactcttccaatttgctctggagaaagaataatcatagtaaaagtaccagctcccatttatttacttactgttcacctaccacatgcaatagaccttccatagatcctttcggtaatctgcaggattggctggcgttataaaaccggttcagaagcctaaaaggcttkttcaaggtcttagagctcaaaagccagaaatttctagcgttggctgcacctgacgctcgctcaccagaagcttacacttgtgtcaaagccccacccagactaagtaggtctgagtctcacaggtgtgacctgggcaccgggggaagctctggaggctcggaggctgagaactactgttaattaccataaagagtggacggtgggccctgcatatgaccacaggacttcatgatcctcaaatccctggaactggaggtcaaacatcccatggatacagggagaaaaaagcctgtggaggcagagtgtgaggtgctggatatgaaactgcttcttccctgcatctccccaatcttgcatccttcaaa

SEQ ID NO: 422550 - DNA, 614 bp, Homo sapiens
  misc_feature (1)...(614): n = A,T,C or G
agagaggttaagtgatttgcccgacatcacacagccatgtagtatctttagtactaaatttcacaaaacagggggtgggggcataatgtggcctgggcttacaacatagctgtgcctctgttttctccactggaaaatgggtgtgatagagctctcccatccccaagctgctctgaggatgaaatgagataatccacgcgcaaagctaagcacngtggcagcctgggcactggaaaatcttcagacccacataaaagttatgaacatagttccacagccgcttgtaatcctcgaaactgttaacattttgccacactcgtgcccactctattatctgtcttctgaattatttgagttagttgtggacattgtgatatttcatccttgaatccttcagcctgtatcttctaagaacaagaaygttctcttacataacctcagtacaaatgatctgagatacaaagtcactctcatgaaggtaccattaataaaatactattatctttttttaatttatttattattggcatattcatgacataaaaatactataaatactattatctaacatacaatctatattcagatattcccacttatccctaaaacttctt

SEQ ID NO: 422551 - DNA, 623 bp, Homo sapiens
atatatagaaggagtcatgaatatttgtgaaaggagaaacatgcctatatgcaattatgcttcatcttccccatggaactgaaggtgaagttttcagccctctgacatcatgactgaggacatgaaggcactcagtgacatcctccatctactggtcagaaccgctgcatgctcagtagtctcttatccgaaaggaatgctggtcacttgkgggaaactgcaaaaggaaggggcagcctcaggtggttggttgatatcaggagtggaaagagtctttcaaaagggctggtttctgttagagaagaaagcctaatggcacttagcaaagaaggggatatagcaaggcatacttgatcttgcatcccatcatggccagtaactcagtttccatggtttctctgtggtcctcttggccaggatgatggtccgttctgtcagctgggggccatgggattttctttttctcaactgtgcaatgcttttgtttcggctaagtgtgatggtcagaaagggttaaatgctctcttccattctgtctaaagttccaatacatcaaggaaaacatcgcttttagagtcaataatgcccagaatctcaaaaaccaaataacataataccaatct

SEQ ID NO: 422552 - DNA, 490 bp, Homo sapiens
tttaaggaatactctggccaaggtcttacaacatttacctgacagtgattttgataaacggattcatcactgggttggaaaagggccagaatgagatggctcttggaccaatttactgtggccatgtgtattggcagaagagtgtgggtctggtgtgaccttgtttacacagggtatttccacagctgtgctagctgaaagtctcaacttcaattgcttatctccattgaccaaactggctggtctaatcacctgttgatgktgttccacatcaaatagtcattttccaatttcaagagaggatacttaggaatttaaactggttatattgatgtgtaggtaaaataacaaagtggggatttagctctgataatcacattgcaatttaagtcaaagagcagatgattaaaactgctatttcaaggtggcctttatatgacctgtggatcaggtactatgcgtgataagggcaatttcaggagaggacgta

SEQ ID NO: 422553 - DNA, 538 bp, Homo sapiens
ctgtactgaacatgtacagatttttatttcttgccatgattccccaaacactacagtataataactatttacaaaacatttacattgtactaggtattataagtaattagaaatatttaaagtatacagggggatgcatataggttatatgcaaacattacaccattttatttcagggatttgcaaatcctcaattttggtattcctgggaagtcctggaatcaatctcccatggatactgaggatgactgcatatgatttaaatctaaaactaaatgaaagtctactttacatatattgctatgcagaaatacacattaatatagaaaaatatataatacaaatatactgaacatttgtatatttaaataaattwtatatatatatacacatatatttttggtatcttgatccaatttggcatttttccagaaatgtgtgtatttctaaattgtttgacttcatgttcgcctgattctcccaatggaaatttaccctgatgtaatttcaaaatacatttctttaaaatcatagtaaa

SEQ ID NO: 422554 - DNA, 339 bp, Homo sapiens
ctaaacaaaactacaaaaccaataaaactcaaatgaacagcattcatttaaagtagtggatgatgttctgcagacaccaaataggctgtctcatgggaggaaggagcggctgccaggacccaggttcttcggagctcagcgcctgtcctgggtgccaagcagtgctttagctcccttctgcttgccactcaggccctgtgacaaccgtcagcacgtttcccccatcctcctggggtcaagcagcactgaccccttggcactgatacaatcctaagtcgtgggtccctcttccctccctctcttccraatgctccaggatttctttaaattgattttaaa

SEQ ID NO: 422555 - DNA, 515 bp, Homo sapiens
cagtatggcgttgtgttgaccttgaggaatctagctatactggctaaaccaaccaacttttaaacagctccccaactctctgcaggaataaaaaattcctaaaacgttagatttgagaactcagcactscgttcgccatagaaactcatttaactcaaaagtgtagttgacttcaaacaaacagccccatagagtctaaccaagtatgtggtgtcccctaggctacagcttagacctggggatagagacactctcatgcatgactcttgccccttttcttcagcactggctgtggaggcctcaatcctgagcatccccctccaccttctctccctttccactctgggggtagctatttgatggggggaaaggggtcaaggggcttctgaaaggaagggttctgcatacggctgaagtcttctcaggggcagtgatagtcaggggttccaactttgcctgcttctaggtatgaacagagtgttctcaaatctagggcctgagtcatcagtcaacaa

SEQ ID NO: 422556 - DNA, 325 bp, Homo sapiens
ggtcatacttaacacctctttctctcatcccccacatccaaatttaccagcaaatcttcttagcttttcctttaaaataaacctagsacgtgtctagtctccaaagtgcatttttaaaatttacattacttccaaaagcaaaagccactattcctcaagttcaaatatggctgaagtgagttaccatgtacttacctattactctttctactatctgatactgtttattcaactctgaagccagctcctgttggcaattgaaatattctacatcttcaggagaaactttccctaacctgaatggcagacagacagaaaaagtaca

SEQ ID NO: 422557 - DNA, 549 bp, Homo sapiens
caccatatgcaaagagtcaaaacgcatgaaaagtggccaatactgtgaatggggaaaaagaggtaatgacagcagaaaacctaggagagaggtggtggccacacagtaaaatatattttaggccattttaagtaatgatcaccagctccctctccccatcaatttcagctggaagactcaaataaatgattttttttaaatctccattttgatatggctattactggccttattgcttagagcaatgtcaaggtgctacatatagccctaacattgtcaatgtcttctttagatttgacacactagaattaaaatgaaatcactcttaacattattttygctaatcaactcatgttctcccacattatgattcaggagctaaggcttctaaaattacagacttctcaaagaagctaaaaagaacttgtgaataagattatgaatgaaatctaagaagacacgttaaatctgctcccaagtataaaagccaaagaatttatccattagcatctgaataataagtgccaacacagcaagctgtcatctgaa

SEQ ID NO: 422558 - DNA, 595 bp, Homo sapiens
agttactatcatgataacagcatggaaaagacctaccccatgataaaattaattcccacaataggtgggaattatgggagtgacaattcaagataagatttgggtggggacacagccaaaccatatcagctgatgatgtctttctttttttgagaaggagtcttcctctattgccaggctggagtgcagtggcgtgatctcggctcactgcaacctccgcctcttgggttcaagtgattcccctgcctcagcctcctgagtagatggggctacaggcatgcrccaccacggccagctaactttttgtattttagtagagatgggggttcaccattttagccaggatggtgtcgatctcctgaccttgtgtccgcccgccttgcctcccaaagtgctggaattacaggcgtgagccaccacacctggccaatgtctaccttttttatcttgaacattgaactaattataatttcactggtcttattttcagttttgaatcaaaatgaaaagataattataagttatagcacatggatagtatttaccttagtaaatttaaagagtatttcaaataaaagccaaagtcataaataat

SEQ ID NO: 422559 - DNA, 466 bp, Homo sapiens
tttctgaattttggggcatttagaaccagaggcattgtcccataattcagtatctgagagtgatatggagctatattgtggtggaatgtttggctgagaaacacccatacactatttaggaaccatggtgattctgtatgctactttytctgcaacccgctatggattagtaatcaggaaggctgtgagcgtaaaataaatgccatactgacttccaggggagacaagattagaaaaggaaagactgtcagatcttattagaaaactaaactagattagaagagaatatcagatcccattacctaaataactttatatacagaaacagcctaccataaatgttatgtatagaaatagctgaagtggttaattcttttttattaataacatcattagtaaagcctaactgtactatacattttatactgcttcattcttttcaaaaatgaaatgccttcacggatat

SEQ ID NO: 422560 - DNA, 466 bp, Homo sapiens
tttctgaattttggggcatttagaaccagaggcattgtcccataattcagtatctgagagtgatatggagctatattgtggtggaatgtttggctgagaaacacccatacactatttaggaaccatggtgattctgtatgctactttctctgcaacccgctatggattagtaatcaggaaggctgygagcgtaaaataaatgccatactgacttccaggggagacaagattagaaaaggaaagactgtcagatcttattagaaaactaaactagattagaagagaatatcagatcccattacctaaataactttatatacagaaacagcctaccataaatgttatgtatagaaatagctgaagtggttaattcttttttattaataacatcattagtaaagcctaactgtactatacattttatactgcttcattcttttcaaaaatgaaatgccttcacggatat

SEQ ID NO: 422561 - DNA, 556 bp, Homo sapiens
ttaaatgtgatttccaaagcatggactccgaaggacggaataccatactgtatttcagaactacagtgtagatattaagcctgaatcctcaacaagtatttgttcaagtgtaaattatttttggcaccagtggtagcagaaaagcatccacatgcctcatctgttgcagcatccaataaggtatctgcagggtgatcagatttgcaaaatcaaaaaagatgatgatgctagtatgtaagaacctcttggggtgctgaaaaatatagttaaaaatgggatagtgtcacagaattgatactattggaaggttttgtgtaagaaacaggcttcattaactgtttatattattctttaacttttataggattatctctaggttggaaaataatgttcaatatygtttgctgttttgaatctctgttcttctcccatgaaacaatgaattttgttgttgttgttgttgttgtttttccaaaggagcatttttgttgagttgtcagtggaagttttaggccaaggtagataggcagaagaacttgattcgtgatgcattgat

SEQ ID NO: 422562 - DNA, 551 bp, Homo sapiens
tatgtgtaaaaatatacgtataaaaaattttttttacacaaatggtaatgtatcatctgttatttgaaccctcctttcctacttatttttgtcttggagaatgttccatgtttattcccatattcctgtagtttaggtaatatatagctatttcactatgtgggacatagcacagctgtatcaatgggcttttgtgttctttccmttctttattaaaaacaaaacctttgaatactctttgttagcaaacttttttttgtgcgtatgtatatgtatacacacacacaattatataggctggatgtggtggctcgcacctgatagcaccactttgtgaggttgaggtgggtggatcacttgagatcaggagttcgagaccatcctgaccaatatggtgaaaccccatctctactaaaaatacaaaaattagctggatgtgttgggacatacctgtaatcccaattactccggaggctgaggtatgagaattgcttgaaccttggaggtggaggctgtagtgagccgagatcgtgccactgcactccagcttt

SEQ ID NO: 422563 - DNA, 667 bp, Homo sapiens
agtgtgtctgtcgcagggatggggcctgtgggggaggagggagggacataggagataaagtagggagagagagaagccaggttatgtagagctttgtaggtgatttgtgaggaatttgacttttactgtgaaaggaagccagtggaggtttttgaaccaggaaataacttcctctgactatattttaacaagatccatctggctggtgtgtggagaatagagtataagagaggcaagtgtagaagcagagaggccaattagagggctgttttatacagtctagagatgaaaactgttcacggggaatagagcgtcggtggtagatatggtacttggatgggcagcactgtggatggagcaggtttgcatggagagaagattcagraatctgatttggacttgttgagtttgagatgtctgttagttctccaagtggaattgttgaataggcagttagacatagagttctggagttcagggggaaagccccgggttggtgtcttgcatatggaagtcaccattatagacggcatttgaagccatgagactaaaggggattacttagggagtgggtatagattgagaaaaggtccaaagatctgcatctggggcactgggcactcttacatatggaagctagagatattcactatttattcaacaagtt

SEQ ID NO: 422564 - DNA, 667 bp, Homo sapiens
agtgtgtctgtcgcagggatggggcctgtgggggaggagggagggacataggagataaagtagggagagagagaagccaggttatgtagagctttgtaggtgatttgtgaggaatttgacttttactgtgaaaggaagccagtggaggtttttgaaccaggaaataacttcctctgactatattttaacaagatccatctggctggtgtgtggagaatagagtataagagaggcaagtgtagaagcagagaggccaattagagggctgttttatacagtctagagatgaaaactgttcacggggaatagagcgtcggtggtagatatggtacttggatgggcagcactgtggatggagcaggtttgcatggagagaagattcaggaatctgatttggacttgttgagtttgagatgtctgttagttctccaagtggaattgttgaataggcagttagacatagagttctggagttcagggggaaagccccgggttggtgtcttgcatatggaagtcacyattatagacggcatttgaagccatgagactaaaggggattacttagggagtgggtatagattgagaaaaggtccaaagatctgcatctggggcactgggcactcttacatatggaagctagagatattcactatttattcaacaagtt

SEQ ID NO: 422565 - DNA, 565 bp, Homo sapiens
taatgttggcttcatactggtcaagtaagagacattattagtgacaagtaaaaccaggagatttgcaattatgactttgttcagttacctgttgaaaagtgcacacaattcgtctgaattcctgcattttttgatattatttgtagacatagcttttgtatttgctgaaatttgcatgaggtatgcattagctttaggaaagagagtggaaattttgtgtctcagtgaccaggtctaagtccatarcctccaaaacataaaaaagtctaaacatgtggttcatttaggctcatcagtttccagccatggtaactttcatctcctccgtgaccatgtcaagcccattcccaccctagagcattcctcaatatggagaactcttctcctagatattcccatggctagcttctcactatttaagtctcagcccaaatgtttcctctcagaaaggcctttggtgatcacaaatagcaacatttcctcccaccttgaagcaccctctacctcattattctcatttgtcttggcaattatcaacatctgaaagtgtctgcttgcttgttaa

SEQ ID NO: 422566 - DNA, 583 bp, Homo sapiens
acgtttaggtgcaagacgccaccataggagccagggaacagggaagagaaagttgaattcacacagtgtcagtcctgcaggggctcagatgggcagtggaaggaaaagattcacactgaccaattcaatcaagtcaagtaagtaccacctctagaatgcaacctaccttttatggtgactcttttggtctggcctcactctattttataaaaagattctacacttgttcatttaacatacaactaggactagttagttaaactctcaatatatactggaattaaactaaatctagattctataatttttatattctaaatcgttatatatttttcattagaaaatgtgtcaggggatagtggctcacacctgtaatcccagcattttgggaggccgaggagggcggattgcttgagctcaggagttcaagacaagcctatataacatggtgataccgcttctctacaaaaaawttttaaaactagccgggtgtggtagtgcactcctgtagttacagctactcgggaggctgaggtgggaggatggcttaagtcctttttgagtgggaccgtgtctcaaaaaa

SEQ ID NO: 422567 - DNA, 603 bp, Homo sapiens
gaaactaacatctttgaattcccactattcaaaccgtggtctgagggtcagggccattccatttcctgggagcctgtggtgattgctgaattacaagtccaggcaaactcaatcaaaatctgtaggacaacaagatccccaggtgacttatttgagaaatcaagcttagagcaacagtgctctaaaccaagtattagatatagaactgtacatggatctcagtagaaactgatacagtgattaaaaaaaacactttcctacaagtttctctgatgtcttgtatctgaagatgcagaacatgaaattarattttcttgatgaccattattaggattgtaaacatctataattgttcagctttttcttccaaacttttctttcttaatggttgattagagaaaattttgcatttattatatatgccttgggtgcctccagccccctgcagtatttatcacctgaaatgggcaaataatctgtctcaaaaaaaaactgtggaaaaatctcgaaaatgtagtctgcaggtgcctttaagtttggaggatccctttgcaaaataaatatttaaatattttatgaacccacctgacagtagagatatat

SEQ ID NO: 422568 - DNA, 484 bp, Homo sapiens
aggtaaactgaggcacaataaaattttaaagagtttacttgagcaaatagcaattcatgaatcagacagctccaaactataagtggttcatgggctccactaaaggaatgcaaggggagggcttttacaggacaaccacggaactaaagcaaagaaaatatttgattggttacctttatacaattgccttagttggcctatactgctggaaagtctttagttatataacttagttggcagcttctgagtggttaatcttaaatttcattttgctttratacaagtatttataagaaatagttcaagttaattttcacttgtgtttgcaaatcagtctgggttaggtcacttatgaggcctaactggctttccctgctccaggaaaagtgattccataagtgacctaacccagcctgaatcatctaagtgattctccatgtctggtttccattttaattttctttaacaaatcttcactacaaat

SEQ ID NO: 422569 - DNA, 605 bp, Homo sapiens
cactcaacaatttacttctaacaacagatacgttgaggtttttccccacacacctagcaatctgcaatggacaccgactgcatgccctaaaaatcaattcaattctgacactatctactgggagacagtgtcagatcccacaagcctgttccccccacccaacactacagatggtaattgcaagcctcaggttgcgacctgtgcttctgttcaactggctatacattgggactctcatgacccccckccttaggctcaattaatttgctaaagtggctcacagaactcagggaaacactttacttaagtttgaccatttactacgaaggatattacaaaggatagagatgaacatccagatgagagagatgcatctggtgaggtattggagaaggggcatggagcttccatgacctctctgggcacaccaccctccaggaacctccatgtgttcagcaatcaagaaagtctgcaaaccctgtttggttttctgtaaagccttcattacacaggcatgattgattacatcattggccattagtgatcaactcaaacttcaggccctctcccctccccagaggttgaggtataggctgaaagtccca

SEQ ID NO: 422570 - DNA, 605 bp, Homo sapiens
cactcaacaatttacttctaacaacagatacgttgaggtttttccccacacacctagcaatctgcaatggacaccgactgcatgccctaaaaatcaattcaattctgacactatctactgggagacagtgtcagatcccacaagcctgttccccccacccaacactacagatggtaattgcaagcctcaggttgcgacctgtgcttctgttcaactggctatacattgggactctcatgaccccccgccttaggctcaattaatttgctaaagtggctcacagaactcagggaaacactttacttaagtttgaccatttactacgaaggatattacaaaggatagagatgaacatccagatgagagagatgcatctggtgaggtattggagaaggggcatggagcttccatgacctctctgggcacaccaccctccaggaacctccatgtgttcagcaatcaagaaagtctgcaaaccctstttggttttctgtaaagccttcattacacaggcatgattgattacatcattggccattagtgatcaactcaaacttcaggccctctcccctccccagaggttgaggtataggctgaaagtccca

SEQ ID NO: 422571 - DNA, 574 bp, Homo sapiens
ttaaatcactgaggtttctttcagcagtccgagctgccaaccaattatcatgtcctcttttctcgtaggaaataacctgcttttgataaaaatgaacagttctctccaattcttcttcaagatctttggctagctttctataggtctccagcycttcagtggcacggctgatcttttcttccactctagaaagcttctcttcttcctctattcggtaattttcctccactgttaatttcctgtagagtttcatttcattttcttgatagaattcagtcattattttaagtttctgttgaagcttctgattctcactttcaaaatatatgttttctgattgcaaagatgcttgttgagtctgaagatttttaatatgctctgtaagctcttcctttgttttgtccacttcagataactgaataataatgtggtttctttctccttctaagctttttaaagaaacatttaacttagcagcatgaatcagtttcttcaaagctcctttcagaggatcatctaagttagcaccattttcccattgactgttcacttctaattccaggttatcatcatc

SEQ ID NO: 422572 - DNA, 574 bp, Homo sapiens
ttaaatcactgaggtttctttcagcagtccgagctgccaaccaattatcatgtcctcttttctcgtaggaaataacctgcttttgataaaaatgaacagttctctccaattcttcttcaagatctttggctagctttctataggtctccagcccttcagtggcayggctgatcttttcttccactctagaaagcttctcttcttcctctattcggtaattttcctccactgttaatttcctgtagagtttcatttcattttcttgatagaattcagtcattattttaagtttctgttgaagcttctgattctcactttcaaaatatatgttttctgattgcaaagatgcttgttgagtctgaagatttttaatatgctctgtaagctcttcctttgttttgtccacttcagataactgaataataatgtggtttctttctccttctaagctttttaaagaaacatttaacttagcagcatgaatcagtttcttcaaagctcctttcagaggatcatctaagttagcaccattttcccattgactgttcacttctaattccaggttatcatcatc

SEQ ID NO: 422573 - DNA, 574 bp, Homo sapiens
ttaaatcactgaggtttctttcagcagtccgagctgccaaccaattatcatgtcctcttttctcgtaggaaataacctgcttttgataaaaatgaacagttctctccaattcttcttcaagatctttggctagctttctataggtctccagcccttcagtggcacggctgatcttttcttccactctagaaagcttctcttcttcctctattcggtaattttcctccactgttaatttcctgtagagtttcatttcattttcttgatagaattcagtcattattttaagtttctgttgaagcttctgattctcactttcaaaatatatgttttctgattgcaaagatgcttgttgagtctgaagatttttaatatgctctgtaagctcttcctttgttttgtccacttcagataactgaataataatgtggtttctttctccttctaagctttttaaagaaacatttaacttagcagcatgaatcagtttcttcaaagctcctttcagaggatcatctaagttagcaccattttcccattgactgttcacttytaattccaggttatcatcatc

SEQ ID NO: 422574 - DNA, 602 bp, Homo sapiens
agcaaccttctgtcatattatgtctctttactctatcaaatttgtagtataattgtcttacatccatttagaataacactagacaatgctatgatttttgcttgaaacatcaaacataatttaggaaattagaatctatgaaaataaagtgagcattttaaagcttccagaaagaaatctgacacaacctgttttgtctttcattttttctttctttcctttatattcatcatagatgttatgatgccctatctgttaactccaatatctggattatctatgagtttgtttttaataactgatttatttcttatcagtctgttttacttgcttttttgtatatttggtattttttttaaagtatgctgaatttatggataatatgatatagaactactcaagaattttgaattttttttctgggcagaatttgtaattacttgcagatcatcttgctgctctcaagacctagttttaagctgtgttatggtaattatattttattttcctcttagaacatatgcctcactcctgggatactgcayctctcctaagagaatttttagagtcccaactgagtttctcagttgtttgccaacatt

SEQ ID NO: 422575 - DNA, 542 bp, Homo sapiens
aggtcaggaagatgcctttctggaaaatcctggcaaatgtggtactaacctcatgtgcctcaccttccttaaagatctcatacctgacttgctacaacaatgttcttcaatgcctgctgatatggtttggctgtgtccttacgcagatcccatcttgaattgtagcttgcataattcccacatgtagccagcccacctgaaccatgctcagcagctggtgagaggtaattgaatcatgggggtgggtctttcccatgctgttgttgtgatagtgaataagtctcatgagatctgatggttttacaaagsggagctcccctgcacatgccctctctcttgtctgccatgtaagatgtgcctttgcttttcctttgccttctatcatgattgtgagttctccccagccatgtggaactgtgagttcactaaacctctttcttttataaattacccagtcttgggtatgtctttattagcagcatgagaacagactaatacacctgccaagaattttttctatattttggccagattgtatagtt

SEQ ID NO: 422576 - DNA, 561 bp, Homo sapiens
caccccctaaaatgatcaccaaccatttcatgcttaactctcacccatagactgcaattttacctcctccatttgtttatggttaccgtttgaggttgggtgctaatctcgggaggtttggttataggttgagatgtaggaagaggagggaacaagagagaacttaaccaaagatggagaatgctccctagatgtctgcacaaggggtcaggagctcaggaaagaatggacactgactgaggatgtaccaccctcctgttccattgcacagagtgattctgcatccacattgaacttgaatarcttccttccgtcctctggtggtgagccaaattaggcaaatgacaaattaggcaatgaaggaagaaacatcaattagaccttattggttctatgcttgagatcctgctttagtatgttaagggctaaagggagcatgagaaggagggtaaacaaccaatttgtataaaaagagaagtgggtggtgcctgggagaagggcgagatgggactgaaaaggaccagaaagatgaatgaagggtgaagacagtagtataagaag

SEQ ID NO: 422577 - DNA, 559 bp, Homo sapiens
attaattttaaatgtctatttaaatattatttgcggaaatggaacacaaaacagaaacaggctacaaaagacaattaggcttttgttggccccactccaagtaaatggtctttattagtcaacagcaaatctgcttccctggaaatgatgcaccttcttcattcayccccaagtgctgatattcgagtccagagggccagtccgggagattcagcgttcttgtgtttgtagtttagttcatactgttctttcataaatatcctttcatttgagtttataacaaagccctgagatatagggcagacatccattccatcaggtgacgggggtttacaggcacagacagtactgggtcagcacaaagataaacaaaatctcgtctcagctttcagggaactgccactctctctggggagtctgacaatcacatgaccagttacaatacagggggccaatgctgtgaggtgccagcctgggaacaaagagtggcaggaactcaaatggaggaaaagccacgtaagaaagctctagagtctaaggcattaaagctagctcgtga

SEQ ID NO: 422578 - DNA, 621 bp, Homo sapiens
ctcccttcctattcatctttattctttaaaaaaattttttctgtccaggcgtgatggctcatacctgtaatcccagcactttgggaggccaaggtgggtggaacatttgagatcaggagtttgcgatcagcctggccaacatggtgaaaccccacctctactaaaaacacaaaaattagccgggagtggtggtgggcatctatagtcccagctactcgggaggctgcgacaggagaatcgcttgaacctgggaggtggaggttgcagtgtgctgagatcacaccactgcactccagcctgggtgacagagcgagactctgtctcaaaaagaaaaaaaaaattttaaatagagatagggtcccactatgtttcccaagctggtcttgaactcccgggctcaagcagtccttccgcctccacctcccaaagtgctgagattacaggcgtagccactacacyggtctcatctttattcttgtctccatttttctctattttattctgtgcctctgtgccttggcagtcaaaaatgtgacatagctgtacagtcagccctccttatccacaggctccacatcgtagcttcaaccaacaatggatcaaaaaattcaggaaaaaaaa

SEQ ID NO: 422579 - DNA, 551 bp, Homo sapiens
ggtgatgatgtagcagatgcagcttcagaagttgaagtgtctagcacatctgaaacaacaacaaaagcagtggtttctcctccaaagtttgtatttgkttcagagtctgttaaaagaatttttagtagtgaaaaatcaaaaccatttgcatttggcaacagttctgccactgggtctttgtttagatttagttttaatgcacctttgaaaagtaacaatagtgaaactagttcagtagcccagagtggatctgaaagcaaagtggaacctaaaaaatgtgaactgtcaaagaactctgatatcgaacagtcttcagatagcaaagtcaaaaatctctctgcttcctttccaacggaagaatcttcaatcaactacacatttaaaacaccagaaaagggtaggtactttgttgttaaagttaagcacaatttttctttcttttaatgtttagcttgatgcagactctttgtgggatactaatgttgggatataaacgatgctttgtgaacacccccaaaatatttgagcaattttttttctcccttaataag

SEQ ID NO: 422580 - DNA, 551 bp, Homo sapiens
ggtgatgatgtagcagatgcagcttcagaagttgaagtgtctagcacatctgaaacaacaacaaaagcagtggtttctcctccaaagtttgtatttgtttcagagtctgttaaaagaatttttagtagtgaaaaatcaaamccatttgcatttggcaacagttctgccactgggtctttgtttagatttagttttaatgcacctttgaaaagtaacaatagtgaaactagttcagtagcccagagtggatctgaaagcaaagtggaacctaaaaaatgtgaactgtcaaagaactctgatatcgaacagtcttcagatagcaaagtcaaaaatctctctgcttcctttccaacggaagaatcttcaatcaactacacatttaaaacaccagaaaagggtaggtactttgttgttaaagttaagcacaatttttctttcttttaatgtttagcttgatgcagactctttgtgggatactaatgttgggatataaacgatgctttgtgaacacccccaaaatatttgagcaattttttttctcccttaataag

SEQ ID NO: 422581 - DNA, 551 bp, Homo sapiens
ggtgatgatgtagcagatgcagcttcagaagttgaagtgtctagcacatctgaaacaacaacaaaagcagtggtttctcctccaaagtttgtatttgtttcagagtctgttaaaagaatttttagtagtgaaaaatcaaaaccatttgcatttggcaacagttctgccactgggtctttgtttrgatttagttttaatgcacctttgaaaagtaacaatagtgaaactagttcagtagcccagagtggatctgaaagcaaagtggaacctaaaaaatgtgaactgtcaaagaactctgatatcgaacagtcttcagatagcaaagtcaaaaatctctctgcttcctttccaacggaagaatcttcaatcaactacacatttaaaacaccagaaaagggtaggtactttgttgttaaagttaagcacaatttttctttcttttaatgtttagcttgatgcagactctttgtgggatactaatgttgggatataaacgatgctttgtgaacacccccaaaatatttgagcaattttttttctcccttaataag

SEQ ID NO: 422582 - DNA, 551 bp, Homo sapiens
ggtgatgatgtagcagatgcagcttcagaagttgaagtgtctagcacatctgaaacaacaacaaaagcagtggtttctcctccaaagtttgtatttgtttcagagtctgttaaaagaatttttagtagtgaaaaatcaaaaccatttgcatttggcaacagttctgccactgggtctttgtttagatttagttttaatgcacctttgaaaagtaacratagtgaaactagttcagtagcccagagtggatctgaaagcaaagtggaacctaaaaaatgtgaactgtcaaagaactctgatatcgaacagtcttcagatagcaaagtcaaaaatctctctgcttcctttccaacggaagaatcttcaatcaactacacatttaaaacaccagaaaagggtaggtactttgttgttaaagttaagcacaatttttctttcttttaatgtttagcttgatgcagactctttgtgggatactaatgttgggatataaacgatgctttgtgaacacccccaaaatatttgagcaattttttttctcccttaataag

SEQ ID NO: 422583 - DNA, 570 bp, Homo sapiens
gaggcaggaggatcgcttgagcacaggagatggaggtagcagtgagctgaaatcatgccactgcactccagcctgactgagtgactgagtgagactttgtctccaaaaaaaacaaaaaacaaaaaaaaacatgatattgagatgttctcattttatgtgttgtatgtcagtcttgctcatgtattaaatgagcaaagaatgaaactacagggataaatgaatatgtaagacagtcagattggtggtataaattgagggattctggctttttatgttttaaaagcatattcattttgtttcctaaaatgttaaaaaatgaaatattctttattttctaggatttaattttagcctttttaaatctaatcccatrgccttttggactagcaccccttcctcacagcctgagagcaaaggtatagaactagcattctcagtatgagataacagcagtttttagcagctgggtagcccttagcaaagtattaattactgtggctgtatgaaatgaagtacttaccactacaacatgcatgttaaagaatgccagtttaagcaaagtaccttttg

SEQ ID NO: 422584 - DNA, 585 bp, Homo sapiens
agaatatttattatactattgtatgttgatagactttctctccaatgattaaaatgtgttaacatttaaggaagatgaaatacaagttcattttggaaaacttttctcattcactgaaactacctcatgactacaaagttctgcatctttaaaagagacagtataggtaattccaccatgatgcataaaatgatcttttagagacaccatgaaagcccttgttcaagttttctttgcccaagatgtctccmtgtactctcaatacccccacccacaccatctgtcttccaagacttagttcaaaggccacctatttcatggaagcctttgttttttaattcaatttttcctctttccatcctccacccaagtcccaaatatggtctcttttctgaatcaccagtgttgaaaacttcctttttcatgtgtgttcttgtcttaatttcctcatttgacaataacactaatatgtacaacctacgccttactcatccttgcatctcccacagaaaccagcacaaggtcttctacttaagagatgatcaataaatatttgttaaacgaattaaatgaaagcaacagtta

SEQ ID NO: 422585 - DNA, 585 bp, Homo sapiens
agaatatttattatactattgtatgttgatagactttctctccaatgattaaaatgtgttaacatttaaggaagatgaaatacaagttcattttggaaaacttttctcattcactgaaactacctcatgactacaaagttctgcatctttaaaagagacagtataggtaattccaccatgatgcataaaatgatcttttagagacaccatgaaagcccttgttcaagttttctttgcccaagatgtctccctgtactctcaatacccccacccacaccatctgtcttccaagacttagttcaaaggccacctatttcatggaagcctttgttttttaattcaatttttcctctttccatcctccacccaagtcccaaatatggtctcttttctgaatcaccagtgttgaaaacttcctttttcatgtgtgttcttgtcttaatttcctcayttgacaataacactaatatgtacaacctacgccttactcatccttgcatctcccacagaaaccagcacaaggtcttctacttaagagatgatcaataaatatttgttaaacgaattaaatgaaagcaacagtta

SEQ ID NO: 422586 - DNA, 585 bp, Homo sapiens
agaatatttattatactattgtatgttgatagactttctctccaatgattaaaatgtgttaacatttaaggaagatgaaatacaagttcattttggaaaacttttctcattcactgaaactacctcatgactacaaagttctgcatctttaaaagagacagtataggtaattccaccatgatgcataaaatgatcttttagagacaccatgaaagcccttgttcaagttttctttgcccaagatgtctccctgtactctcaatacccccacccacaccatctgtcttccaagacttagttcaaaggccacctatttcatggaagcctttgttttttaattcaatttttcctctttccatcctccacccaagtcccaaatatggtctcttttctgaatcaccagtgttgaaaacttcctttttcatgtgtgttcttgtcttaatttcctcatttgacaataacactaatatgtacaacctacrccttactcatccttgcatctcccacagaaaccagcacaaggtcttctacttaagagatgatcaataaatatttgttaaacgaattaaatgaaagcaacagtta

SEQ ID NO: 422587 - DNA, 451 bp, Homo sapiens
gacactctctgtgactgcaagaataaactagctcagattcaaagccacagtcaccactaataaattccaatttgttcaattggaaaatgatgtccatcaattagaaaaagttcttagggattaaaataagattctcttttgccattaatctgtacctcctccttcctccttcaaaaaagtttttctatgatcaatcaaaggaagaagytttcaatggtctttaaaatgtatattgctctaatacaataattcataattaacaggtatactttcctaactatggtagtttattttcaaatttttaattttaataccatttagggctctctctctttgttattttagtaggaccttaacttccagtccatcgaggttttgttttgtaattaatttcggagctgtccttataagctgagagatatgtgaagtactctagaaaatggcaattgtc

SEQ ID NO: 422588 - DNA, 543 bp, Homo sapiens
ccatacgcttcacccatttaaagtgtacagttcagtggcttttastatgttcatagagtattaccactgtcaccacagtcagttttagaagattttcatcactccgtgaggaattccttacctattagcagttactccccattttacccaaacctctcagccttggcaaccgctaatctgtctctgtaggtttgcctcttctgaacatttcacataaatggaatcatagtatgtggtcttttgtgactggcttctttgatttagcaaggttttcaaggttcatctgtgttatagcatgtatcagtactttatccgaggactatgattttttgattgcttactgtaaacctatggcataaaaatctctgggaacaaggcctggaaataattcttttttttttttttttttcctgagacagtcttactctgtcgcgcaggctggagtgcagtggcgtgatctcggctcactgcaagctccgcctcccgggttcacgccattctcctccctcagcctccccagtagctgggactacaggcacccgc

SEQ ID NO: 422589 - DNA, 543 bp, Homo sapiens
ccatacgcttcacccatttaaagtgtacagttcagtggcttttagtatgttcatagagtattaccactgtcaccacagtcagttttagaagattttcatcactccgtgaggaattccttacctattagcagttactccccattttacccaaacctctcagccttggcaaccgctaatctgtctctgtaggtttgcctcttctgaacatttcacataaatggaatcatagtatgtggtcttttgtgactggcttctttgatttagcaaggttttcaaggttcatctgtgttatagcatgtatcagtactttatccgaggactatgattttttgattgcttactgtaaacctatggcataaaaatctctgggaacaaggcctggaaataattcttttttttttttttttttcctgagacagtcttactctgtcgcscaggctggagtgcagtggcgtgatctcggctcactgcaagctccgcctcccgggttcacgccattctcctccctcagcctccccagtagctgggactacaggcacccgc

SEQ ID NO: 422590 - DNA, 434 bp, Homo sapiens
tcaggcttaattttttttacagacatacttcataagtagtattgatagtttctttgaatctggtttttwataatctttctaatgatgaaggaggaatgttctcaatactgacagtaatctcagttcttcaaactataggataggtttctatagccacaatagtatttttgtcacaagggcccaaataagaatacatcatgtatatttttaatacttattcaaattacaaattcactgtctttaatttattctaacaaaagtaaacctaattttatagttataaaaaagaagaaatctacttctagtcacctaagagtaaaactgcccttataaaaaacaagacagaaatctcaaaattataactaattttatagttataaaattaaccaggactttaagaacgtttgcattttaaaattaaagttttcaatagt

SEQ ID NO: 422591 - DNA, 434 bp, Homo sapiens
tcaggcttaattttttttacagacatacttcataagtagtattgatagtttctttgaatctggtttttaataatctttctaatgatgaaggaggaatgttctcaatactgacagtaatctcagttcttcaaactayaggataggtttctatagccacaatagtatttttgtcacaagggcccaaataagaatacatcatgtatatttttaatacttattcaaattacaaattcactgtctttaatttattctaacaaaagtaaacctaattttatagttataaaaaagaagaaatctacttctagtcacctaagagtaaaactgcccttataaaaaacaagacagaaatctcaaaattataactaattttatagttataaaattaaccaggactttaagaacgtttgcattttaaaattaaagttttcaatagt

SEQ ID NO: 422592 - DNA, 434 bp, Homo sapiens
tcaggcttaattttttttacagacatacttcataagtagtattgatagtttctttgaatctggtttttaataatctttctaatgatgaaggaggaatgttctcaatactgacagtaatctcagttcttcaaactataggataggtttctatagccacaatagtatttttgtcacaagggcccaaataagaatacatcatgtatatttttartacttattcaaattacaaattcactgtctttaatttattctaacaaaagtaaacctaattttatagttataaaaaagaagaaatctacttctagtcacctaagagtaaaactgcccttataaaaaacaagacagaaatctcaaaattataactaattttatagttataaaattaaccaggactttaagaacgtttgcattttaaaattaaagttttcaatagt

SEQ ID NO: 422593 - DNA, 434 bp, Homo sapiens
tcaggcttaattttttttacagacatacttcataagtagtattgatagtttctttgaatctggtttttaataatctttctaatgatgaaggaggaatgttctcaatactgacagtaatctcagttcttcaaactataggataggtttctatagccacaatagtatttttgtcacaagggcccaaataagaatacatcatgtatatttttaatasttattcaaattacaaattcactgtctttaatttattctaacaaaagtaaacctaattttatagttataaaaaagaagaaatctacttctagtcacctaagagtaaaactgcccttataaaaaacaagacagaaatctcaaaattataactaattttatagttataaaattaaccaggactttaagaacgtttgcattttaaaattaaagttttcaatagt

SEQ ID NO: 422594 - DNA, 613 bp, Homo sapiens
tgaatctggtaaggataagcaattatttcttgaaactctacatayatacatgagtgttggtaaatacctgactgtatcatcagctctagatataaaatgtttatgatgttggctgtgagttaatgaggaatagttttcctttctgtgggtttgggtgtatttgggaaacattagcttaggggggtaaagtaggttacccaactccgaaaagcagcatcaaaatctttataataaacacatattaggggcccaacttaaatttcaagcagatgtcatgagctgctcagagtagcgtgttacaactctgcgttataaggtaaaatgacttagagtgtagcagtagtccccaatgtcaaatagacagtggtaagtatagattgctcttctccttgcatcacaaatgttaattcaccctgcccccacacgcattaaaactcagcatatttcacaaattgagtgtttcatttctatttgagatagacttatggtaagtcagctttgctccccaaataagttagccatatagtacttctatatgcaaaatttgaatctcaattttactactcaagctggaagtaaaagtcatttttgtatatcttctttgctcccagac

SEQ ID NO: 422595 - DNA, 613 bp, Homo sapiens
tgaatctggtaaggataagcaattatttcttgaaactctacatacatacatgagtgttggtaaatacctgactgtatcatcagctctagatataaaatgtttatgatgttggctgtgagttaatgaggaatagttttcctttctgtgggtttgggtgtatttgggaaacattagcttaggggggtaaagtaggttacccaactcygaaaagcagcatcaaaatctttataataaacacatattaggggcccaacttaaatttcaagcagatgtcatgagctgctcagagtagcgtgttacaactctgcgttataaggtaaaatgacttagagtgtagcagtagtccccaatgtcaaatagacagtggtaagtatagattgctcttctccttgcatcacaaatgttaattcaccctgcccccacacgcattaaaactcagcatatttcacaaattgagtgtttcatttctatttgagatagacttatggtaagtcagctttgctccccaaataagttagccatatagtacttctatatgcaaaatttgaatctcaattttactactcaagctggaagtaaaagtcatttttgtatatcttctttgctcccagac

SEQ ID NO: 422596 - DNA, 613 bp, Homo sapiens
tgaatctggtaaggataagcaattatttcttgaaactctacatacatacatgagtgttggtaaatacctgactgtatcatcagctctagatataaaatgtttatgatgttggctgtgagttaatgaggaatagttttcctttctgtgggtttgggtgtatttgggaaacattagcttaggggggtaaagtaggttacccaactccgaaaagcagcatcaaaatctttataataaacacatattaggggcccaacttaaatttcaagcagatgtcatgagctgctcagagtagcgtgttacaactctgcgttataaggtaaaatgacttagagtgtagcagtagtccccaatgtcaaatagacagtggtaagtatagattgctcttctccttgcatcacaaatgttaattcaccctgcccccacacgcattaaaactcagcatatttcacaaattgagtgtttcatttctatttgagatagacttatggtaagtcagctttgctccccaaataagttagccatatagtacttctatatgcaaaatttgaatctcaattttactactmaagctggaagtaaaagtcatttttgtatatcttctttgctcccagac

SEQ ID NO: 422597 - DNA, 613 bp, Homo sapiens
tgaatctggtaaggataagcaattatttcttgaaactctacatacatacatgagtgttggtaaatacctgactgtatcatcagctctagatataaaatgtttatgatgttggctgtgagttaatgaggaatagttttcctttctgtgggtttgggtgtatttgggaaacattagcttaggggggtaaagtaggttacccaactccgaaaagcagcatcaaaatctttataataaacacatattaggggcccaacttaaatttcaagcagatgtcatgagctgctcagagtagcgtgttacaactctgcgttataaggtaaaatgacttagagtgtagcagtagtccccaatgtcaaatagacagtggtaagtatagattgctcttctccttgcatcacaaatgttaattcaccctgcccccacacgcattaaaactcagcatatttcacaaattgagtgtttcatttctatttgagatagacttatggtaagtcagctttgctccccaaataagttagccatatagtacttctatatgcaaaatttgaatctcaattttactactcaagctggaagtaaaagtcatttttstatatcttctttgctcccagac

SEQ ID NO: 422598 - DNA, 600 bp, Homo sapiens
ctttaaaaaggtgaattatgtggtatatgaattatatctccaaaacgatttaattaaaaacctgtacacaattattcrtagaaactttctttaaaattgctaaaaacgaggaagatctcagttatccttcaactggcaaatgaataaacaaactggtacagccgtgcaattgaatactgctcagcaataaaaaagaatgcactgccagttcagcaacatgggtaattctcaaatgcattatgccagttgacagaggtcagactcaaaatactatgtacagtgtgattctacttatatgacactgaaaaaagcagaactataaggacagaaaacaggttagcggttgccaaggagtgggagaagcagccagggagaactttgaggagatgaaaatgtgccaggccttggtcggtggtggtacgtaactgtgcatttgtcaagactcagtgctatatgctgaaaagggcaggttttactataagtaagttgtacctcaataaacatgatttttaaatgattaaaactttggtttttgtttgttgtggttcagttttaaggtttcccataaatctattggttttagattctaagttgtatata

SEQ ID NO: 422599 - DNA, 600 bp, Homo sapiens
ctttaaaaaggtgaattatgtggtatatgaattatatctccaaaacgatttaattaaaaacctgtacacaattattcatagaaactttctttaaaattgctaaaaacgaggaagatctcagttatccttcaactggcaaatgaataaacaaactggtacagccgtgcaattgaatactgctcagcaataaaaaagaatgcactgccagttcagcaacatgggtaattctcaaatgcattatgccagttgayagaggtcagactcaaaatactatgtacagtgtgattctacttatatgacactgaaaaaagcagaactataaggacagaaaacaggttagcggttgccaaggagtgggagaagcagccagggagaactttgaggagatgaaaatgtgccaggccttggtcggtggtggtacgtaactgtgcatttgtcaagactcagtgctatatgctgaaaagggcaggttttactataagtaagttgtacctcaataaacatgatttttaaatgattaaaactttggtttttgtttgttgtggttcagttttaaggtttcccataaatctattggttttagattctaagttgtatata

SEQ ID NO: 422600 - DNA, 616 bp, Homo sapiens
cttaatttatatcacaagatagttgggtaaagtaaaaatgatagattcttagcttaagggattgggacatattaaaacagatgacaaaaataactttaaatgtttttttaaaaaatcttagagaataagacgttaaataacgttagttatttttgaatattttaagttaggttaaaaaaaatccacttggctggcaaaattccagaaaggcacgaattaatgttgggaagggcaaagggttcagagccatccagcaatgggttcagattctgacatgccatttactagctgtgccatctttagtaactcagcatctctgagcttcaggttccttatatataaatgagataatactgtcactgatttgttatggggattaaattagataatgttcttttrtactatcaaagatctgtgccttactgtgtggttttctttttactggaatttattatctcgtgaatttttatggcaaaaaagggggactgatgaagaaagtcagtgaaatgtttccatccaaagggctaaagttttcatgtgataggtttaaaatattagggaaattgtctttgaaagtgtttgccttcaccatgtagagagtaaggtatacttatat

SEQ ID NO: 422601 - DNA, 554 bp, Homo sapiens
tttttactttcttttttgtatgttgattttgtatcctgtgacctcgctgagtgtattcatgagttctaatagttgtgtgtgtatttyttaggattttatatatatacacatgattatgtcatctgtgaatagagatagttttgctttttcctttccaatctggttgcttttaatttttttttcttgcccgattggcctggctaggacctccaggagaatgttaaatagtagtggagtgagtagacatctttggtttgtttctcatcttgaaaggaaagctttgtcattcactgttgagtatgatattatctgttggtttttcatagatgccctttatcaggttaaggaagtttccttctgttcctagtttgttgagtgtttttaagcacaaaaggatgtgtgatttttgtcaaaggcttttctacatgtattgagatggtcatatgggttttaatctattaatactttaatatactttaatagactttaatctattaatatacttttatatactttaatacattgactgatttttatatgttgaaccaaccttg

SEQ ID NO: 422602 - DNA, 554 bp, Homo sapiens
tttttactttcttttttgtatgttgattttgtatcctgtgacctcgctgagtgtattcatgagttctaatagttgtgtgtgtatttcttaggattttatatatatacacatgattatgtcatctgtgaatagagatagttttgctttttcctttccaatctggttgcttttaatttttttttcttgcccgattggcctggctaggacctccaggagaatgttaaatagtagtggagtgagtagacatctttggtttgtttctcatcttgaaaggaaagctttgtcattcactgttgagtatgatattatctgttggtttttcatagatgccctttatcaggttaaggaagtttcctkctgttcctagtttgttgagtgtttttaagcacaaaaggatgtgtgatttttgtcaaaggcttttctacatgtattgagatggtcatatgggttttaatctattaatactttaatatactttaatagactttaatctattaatatacttttatatactttaatacattgactgatttttatatgttgaaccaaccttg

SEQ ID NO: 422603 - DNA, 554 bp, Homo sapiens
tttttactttcttttttgtatgttgattttgtatcctgtgacctcgctgagtgtattcatgagttctaatagttgtgtgtgtatttcttaggattttatatatatacacatgattatgtcatctgtgaatagagatagttttgctttttcctttccaatctggttgcttttaatttttttttcttgcccgattggcctggctaggacctccaggagaatgttaaatagtagtggagtgagtagacatctttggtttgtttctcatcttgaaaggaaagctttgtcattcactgttgagtatgatattatctgttggtttttcatagatgccctttatcaggttaaggaagtttccttctgttcctagtttgttgagtgtttttaagcacaaaaggatgtgtgatttttgtcaaaggcttttctacatgtattgagatggtcatatgggttttaatctattaatactttaatatactttaatakactttaatctattaatatacttttatatactttaatacattgactgatttttatatgttgaaccaaccttg

SEQ ID NO: 422604 - DNA, 460 bp, Homo sapiens
tggaacttttgatattataaagatacacgaaattggacaatctatataaatccttcataataaattttatttctccaatgtgtataataagacatcaaacagaattccccttttatggaaaaactattttatacctatgcatattttatggttgtgttcattttctttttctaagaaatttaactctatgatttaacttatttttaaacgatgcataatacgtgcacatttttatagggtacgtataatataatattttgttacatgcatacgacgtgtaatgatcaagtctggttgtgttcatttmactgtcgaactgtcaaacacaagcagtgctttttggtactgttacatttttcctcgttgtgtgggttggttgaaggcaggaaccgtaatgattaagaacacagactgtgaaccagatagtctgagttctgatcccctgctctgccaccagcta

SEQ ID NO: 422605 - DNA, 460 bp, Homo sapiens
tggaacttttgatattataaagatacacgaaattggacaatctatataaatccttcataataaattttatttctccaatgtgtataataagacatcaaacagaattccccttttatggaaaaactattttatacctatgcatattttatggttgtgttcattttctttttctaagaaatttaactctatgatttaacttatttttaaacgatgcataatacgtgcacatttttatagggtacgtataatataatattttgttacatgcatacgacgtgtaatgatcaagtctggttgtgttcatttcactgtcgaactgtcaaacacaagcagtgctttttggtactgttacatttttcctcgttgtgtgggttggttgaaggcaggaacygtaatgattaagaacacagactgtgaaccagatagtctgagttctgatcccctgctctgccaccagcta

SEQ ID NO: 422606 - DNA, 431 bp, Homo sapiens
agggactgtaccgattactgtaaagttttgttaaatagaatacttttttttctaagctatttccatcctgtatatgcccaaaggcatcaacaatttgtagtagaatagtttaatcartgagagagaatatttggtcagaaagattggtgtggtcacgtggaatagctaatggcactgtgggcaagggagcgtttttgatgaagtcatagaactttgtggctttcactgggaatctcgagcctgagccagaacccataccgtctgattccaggctgagacaagggcagcactttgttcagtggctggtcctggagctggctcactccgtactcccttctctccctctctgcctctccttccaccaccccctccattcttcctcccttagccttgtaaagctgaggatccttaacctggaggtcagggaatcc

SEQ ID NO: 422607 - DNA, 431 bp, Homo sapiens
agggactgtaccgattactgtaaagttttgttaaatagaatacttttttttctaagctatttccatcctgtatatgcccaaaggcatcaacaatttgtagtagaatagtttaatcaatgagagagaatatttggtcaraaagattggtgtggtcacgtggaatagctaatggcactgtgggcaagggagcgtttttgatgaagtcatagaactttgtggctttcactgggaatctcgagcctgagccagaacccataccgtctgattccaggctgagacaagggcagcactttgttcagtggctggtcctggagctggctcactccgtactcccttctctccctctctgcctctccttccaccaccccctccattcttcctcccttagccttgtaaagctgaggatccttaacctggaggtcagggaatcc

SEQ ID NO: 422608 - DNA, 431 bp, Homo sapiens
agggactgtaccgattactgtaaagttttgttaaatagaatacttttttttctaagctatttccatcctgtatatgcccaaaggcatcaacaatttgtagtagaatagtttaatcaatgagagagaatatttggtcagaaagattggtgtggtcacgtggaatagctaatggcactgtgggcaagggarcgtttttgatgaagtcatagaactttgtggctttcactgggaatctcgagcctgagccagaacccataccgtctgattccaggctgagacaagggcagcactttgttcagtggctggtcctggagctggctcactccgtactcccttctctccctctctgcctctccttccaccaccccctccattcttcctcccttagccttgtaaagctgaggatccttaacctggaggtcagggaatcc

SEQ ID NO: 422609 - DNA, 431 bp, Homo sapiens
agggactgtaccgattactgtaaagttttgttaaatagaatacttttttttctaagctatttccatcctgtatatgcccaaaggcatcaacaatttgtagtagaatagtttaatcaatgagagagaatatttggtcagaaagattggtgtggtcacgtggaatagctaatggcactgtgggcaagggagcrtttttgatgaagtcatagaactttgtggctttcactgggaatctcgagcctgagccagaacccataccgtctgattccaggctgagacaagggcagcactttgttcagtggctggtcctggagctggctcactccgtactcccttctctccctctctgcctctccttccaccaccccctccattcttcctcccttagccttgtaaagctgaggatccttaacctggaggtcagggaatcc

SEQ ID NO: 422610 - DNA, 541 bp, Homo sapiens
ctcaaactatgaaactactccacaaaaacattggggaaaccctccaggacattggcctagataaagattttttgagtaataccccacaggcatgggcaaccaaagcaaaaatggacaaatgggtcacttgtttaaaagcttatacacagcaaaggaaacaatcaacaagtaaagagacaacccacagaatgggagaaaatatttgcaaactgctcatctgacaatggattaataactagaatacataaggagctcaaacaactctataggaaaaaaatcgaataatgtgattaaaaaatggacaaaaattctgagtagacatttctccaaagaagacatataaatggcaaacaggcrtataaaaaggtgctcaacatcatcagtcagcagagaaatgcaaatcaaaactacaatgagatatcatcccaccttagttggaatggcttttatgcaaaagacaaccaataacaaatactggcaacaatatggagaaaagagaatccatgttcactgttggtgggaatgtaaattagttcaacca

SEQ ID NO: 422611 - DNA, 570 bp, Homo sapiens
aacaaaacaaaaatagacaaatgggattatatcaaactaaaaaacctctgcacagcaaaggaaacaatcaacagagtaaagagtcaacttgcagaatgggagaaactgtttacaaactactcatttgacaagggattaatatccagaataaacaaagaactcaaataacarcaaataaaacacaacaacaaataacccaatgtttttaaatgggcaaatgatctaagtagacatttctcaaaagatctacaaatggccaacaagtataagaaaaaatgcttaatatcactaaccatcagggaaatgcaaatctaaactgcaatgagacttcatttcaccccagttaagatagctattaccaaaaacacaaaaaaataacaaatactggagaggatgcagattaaagggaattcttttacactgttggtggatatgtaaattagtacagcgactgtggaaaacagtatggaggttcctcaaaaaactaaaaattaaactaccatatgatccagcaatcccatcactggatatacatccaaagaaaagaaaatcagtacgttaaagagatat

SEQ ID NO: 422612 - DNA, 570 bp, Homo sapiens
aacaaaacaaaaatagacaaatgggattatatcaaactaaaaaacctctgcacagcaaaggaaacaatcaacagagtaaagagtcaacttgcagaatgggagaaactgtttacaaactactcatttgacaagggattaatatccagaataaacaaagaactcaaataacagcaaataaaacacaacaacaaataacccaatgttttyaaatgggcaaatgatctaagtagacatttctcaaaagatctacaaatggccaacaagtataagaaaaaatgcttaatatcactaaccatcagggaaatgcaaatctaaactgcaatgagacttcatttcaccccagttaagatagctattaccaaaaacacaaaaaaataacaaatactggagaggatgcagattaaagggaattcttttacactgttggtggatatgtaaattagtacagcgactgtggaaaacagtatggaggttcctcaaaaaactaaaaattaaactaccatatgatccagcaatcccatcactggatatacatccaaagaaaagaaaatcagtacgttaaagagatat

SEQ ID NO: 422613 - DNA, 570 bp, Homo sapiens
aacaaaacaaaaatagacaaatgggattatatcaaactaaaaaacctctgcacagcaaaggaaacaatcaacagagtaaagagtcaacttgcagaatgggagaaactgtttacaaactactcatttgacaagggattaatatccagaataaacaaagaactcaaataacagcaaataaaacacaacaacaaataacccaatgtttttaaatgggcaaatgatckaagtagacatttctcaaaagatctacaaatggccaacaagtataagaaaaaatgcttaatatcactaaccatcagggaaatgcaaatctaaactgcaatgagacttcatttcaccccagttaagatagctattaccaaaaacacaaaaaaataacaaatactggagaggatgcagattaaagggaattcttttacactgttggtggatatgtaaattagtacagcgactgtggaaaacagtatggaggttcctcaaaaaactaaaaattaaactaccatatgatccagcaatcccatcactggatatacatccaaagaaaagaaaatcagtacgttaaagagatat

SEQ ID NO: 422614 - DNA, 570 bp, Homo sapiens
aacaaaacaaaaatagacaaatgggattatatcaaactaaaaaacctctgcacagcaaaggaaacaatcaacagagtaaagagtcaacttgcagaatgggagaaactgtttacaaactactcatttgacaagggattaatatccagaataaacaaagaactcaaataacagcaaataaaacacaacaacaaataacccaatgtttttaaatgggcaaatgatctaagtagacatttctcaaaagatctacaaatggccaacaagtataagaaaaaatgcttaatatcactaaccatcagggaaatgcaaatctaaactgcaatgagacttcatttcaccccagttaagatagctattaccaaaaacacaaaaaaataacaaatactggagaggmtgcagattaaagggaattcttttacactgttggtggatatgtaaattagtacagcgactgtggaaaacagtatggaggttcctcaaaaaactaaaaattaaactaccatatgatccagcaatcccatcactggatatacatccaaagaaaagaaaatcagtacgttaaagagatat

SEQ ID NO: 422615 - DNA, 456 bp, Homo sapiens
ccccaaattagcttttcacttaaccctgtgttcaaacaaaatacaactaattctcaaggtgatgttcaaatgctccaccaggaaagggaaaaaagtagtagctgcagagaatttattatgtatataataatacgtccaatgcacttaaactcttaatttttatacyatctacactgttaggtaaacaatattagctcctatcttaaaatgagagaaacggatgcagggaataacagctggaatttgaaacacatctgactccaaaaatgttttcttaacacaactctgctgccttgacaagatggcagatagatccaatgccgtctagtgtagctatgtggctacctgatctctgctgaagaaaactaaatgacagcaccatacccaacaccctagaacctacaaaatgtccccttacaaaacagacacttaacaggaaattctttttccaaagaa

SEQ ID NO: 422616 - DNA, 586 bp, Homo sapiens
acctacaaactaaacttctttccccaactttcacagtcctctaacattacactgaccatcctttcagtgtgttctttctacactgcaatctggactacctgacattccaaatcacctccccaaattagcttttcacttaaccctgtgttcaaacaaaatacaactaattctcaaggtgatgttcaaatgctccaccaggaaagggaaaaaagtagtagctgcagagaatttattatgtatataataatacgtccaatgcacttaaactcttaatttttataccatctacactgttaggtaaacaatattagctcctatcttaaaatgagagaaasggatgcagggaataacagctggaatttgaaacacatctgactccaaaaatgttttcttaacacaactctgctgccttgacaagatggcagatagatccaatgccgtctagtgtagctatgtggctacctgatctctgctgaagaaaactaaatgacagcaccatacccaacaccctagaacctacaaaatgtccccttacaaaacagacacttaacaggaaattctttttccaaagaaattgtagtggtat

SEQ ID NO: 422617 - DNA, 586 bp, Homo sapiens
acctacaaactaaacttctttccccaactttcacagtcctctaacattacactgaccatcctttcagtgtgttctttctacactgcaatctggactacctgacattccaaatcacctccccaaattagcttttcacttaaccctgtgttcaaacaaaatacaactaattctcaaggtgatgttcaaatgctccaccaggaaagggaaaaaagtagtagctgcagagaatttattatgtatataataatacgtccaatgcacttaaactcttaatttttataccatctacactgttaggtaaacaatattagctcctatcttaaaatgagagaaacggatgcagggaataacagctggaatttgaamcacatctgactccaaaaatgttttcttaacacaactctgctgccttgacaagatggcagatagatccaatgccgtctagtgtagctatgtggctacctgatctctgctgaagaaaactaaatgacagcaccatacccaacaccctagaacctacaaaatgtccccttacaaaacagacacttaacaggaaattctttttccaaagaaattgtagtggtat

SEQ ID NO: 422618 - DNA, 586 bp, Homo sapiens
acctacaaactaaacttctttccccaactttcacagtcctctaacattacactgaccatcctttcagtgtgttctttctacactgcaatctggactacctgacattccaaatcacctccccaaattagcttttcacttaaccctgtgttcaaacaaaatacaactaattctcaaggtgatgttcaaatgctccaccaggaaagggaaaaaagtagtagctgcagagaatttattatgtatataataatacgtccaatgcacttaaactcttaatttttataccatctacactgttaggtaaacaatattagctcctatcttaaaatgagagaaacggatgcagggaataacagctggaatttgaaacacatctgactccaaaaatgttttcttaacacaactctgctgccttgacaagatggcagatagatmcaatgccgtctagtgtagctatgtggctacctgatctctgctgaagaaaactaaatgacagcaccatacccaacaccctagaacctacaaaatgtccccttacaaaacagacacttaacaggaaattctttttccaaagaaattgtagtggtat

SEQ ID NO: 422619 - DNA, 626 bp, Homo sapiens
acccttggcaaagcaggagccctcggtgtctttccaggtgtgttactatcatcagccagataatctctctgtaccccgcccccaccctggcccaccctgagccaagatcagggcagaggcaaatgttccctctgcaccagccattccaaagcctaagttgagaattcttccggctaactggagggaaaatgaccctggatgggaactcatccctagtgacagggccctagtggctgtgtgaccttgggcaaattactcccactctctgaacatgtttcttcatttgtaaagtgtgtttactggtgctggcctgcttcttttattgttgatatatttactacttttattaacataattatgataataaaatgaygctggcattttcttccattctaagccttatcaaatcttaaccaaatgtttcttcttccatgcagtcctcctggattcctcacagcttatgatctctgccttatttgagtggcactgaaaatgttcagcttgtaattccagggccaatattaccaccaccccctgtcctctaggatccccaactacatagagctaaacactagctttggggggaaggggtggcactgatgggtcttgtcactttcctctctagc

SEQ ID NO: 422620 - DNA, 626 bp, Homo sapiens
acccttggcaaagcaggagccctcggtgtctttccaggtgtgttactatcatcagccagataatctctctgtaccccgcccccaccctggcccaccctgagccaagatcagggcagaggcaaatgttccctctgcaccagccattccaaagcctaagttgagaattcttccggctaactggagggaaaatgaccctggatgggaactcatccctagtgacagggccctagtggctgtgtgaccttgggcaaattactcccactctctgaacatgtttcttcatttgtaaagtgtgtttactggtgctggcctgcttcttttattgttgatatatttactacttttattaacataattatgataataaaatgacgctggcattttcttccattctaagccttatcaaatcttaaccaaatgtttcttcttccatgcagtcctcctggattcctcacagcttatgatctctgccttatttgagtggcactgaaaatgttcagcttgtaattccagggccaatattaccaccaccccctgtcctctaggatccccaactacayagagctaaacactagctttggggggaaggggtggcactgatgggtcttgtcactttcctctctagc

SEQ ID NO: 422621 - DNA, 572 bp, Homo sapiens
tccttcctcccttgggccagactctggctgtcttggaagcaggcagggcccagctgtggacctgggcacacatgagctgacacccaagggaaagccctgttytcaggcaatgtgtgccttcccaggtcagcacagttcttggaactggctgagaaggcacaggctgggagtctaggcctcctgcttcgctcccaggggcttctaggctgtcccgactcccatggttcctgtcttgcacccgtgcaccaggctgggcttaggctgagttgccagagatagcacctgccaccaccttagggcatcccagcagaaccgggatctagctggaattgggcaggtggggcccagagcaggaggctcactggcagactgcgggaactggggcaggagagggggtccctatgcctcagtttcttcatttgtcaaacatggtggctatggtggtgaggtgggaagggtagtggaaactcaggcattactgaccctctcagagccttgtttccttatcttttcaacgaggtgtcatagcagatgatcccacaggccttgcccagctctaaacaactccagac

SEQ ID NO: 422622 - DNA, 572 bp, Homo sapiens
tccttcctcccttgggccagactctggctgtcttggaagcaggcagggcccagctgtggacctgggcacacatgagctgacacccaagggaaagccctgttttcaggcaatgtgtgccttcccaggtcagcacagttcttggaactggctgagaaggcacaggctgggagtctaggcctcctgcttcgctcccaggggcttctaggctgtcccgactcccatggttcctgtcttgcacccgtgcaccaggctgggcttaggctgagttgccagagatagcacctgccaccaccttagggcatcccagcagaaccgggatctagctggaattgggcaggtggggcccagagcaggaggctcactggcagactgcgggaactggggcaggagagggggtccctatgcctcagtttcttcatttgtcaaacatggtggctatggtggtgaggtgggaagggtagtggaaactcaggcattactgaccctctcagagccttgtttccttatcttttcaacgaggtgtcrtagcagatgatcccacaggccttgcccagctctaaacaactccagac

SEQ ID NO: 422623 - DNA, 465 bp, Homo sapiens
actttctgactggcagatgtgtscttaattaattttgatggggaaagaaattaattatggttctaacaatgatttattcagtgcctgctctaaagagtatccacactgcactgatcaccacatcgaacttcataaataaaatcttccaaaattttgcctctgtgaatgggtgagtgaacagagaaaataataaaaggcagtgggaaaagctgggaacctcatctcttgccctatcttccatgtcacagatgaggaaacctgaggcccagaaggaacttgccaagacacaaagctgtctttgatcagggtcaggtcagaccccagatctcctgcctcctagccccatgctctttcctctgcccaaggctgtgccagcatcctggccttgtgccagctaggccaagggtaggaggtcaagcaagcagactagcaggcataggaggccagtgggaaacaagcagccaa

SEQ ID NO: 422624 - DNA, 559 bp, Homo sapiens
ctcaatgcaattatgcgccatcaaaatgataattacacagactatgtagcaacaagaaaaagcatttatgcctaatggaaaagagcacagaataaaattgtatctatgtatgtctacgatattataaaataaagcttgcctaggggaaaagacggcaaaagaaaatagaaaatgaaaatttatgttagggtcgttggrtgctaaggaattgatttcttaaaattttattttattggtgtcatactacgttaacaataaataaaaagcaaattaaaaaagaaagtgcactccagagacaatttgctaagcaagcaaaacaactttccttcctagggggttggaggcaggagcttttcttctctcttctgcttcactctctgcagggcaagggctgaacccaggcagagctgaactcctggctcccagacccagtgaggggctgatgtgcactcttctcctgtaaggcctggcaggagacaggaatcctattcagctcagagctcaataagaacggaagttcagtggaagatggccccagctcatcgcaccatctttgagt

SEQ ID NO: 422625 - DNA, 559 bp, Homo sapiens
ctcaatgcaattatgcgccatcaaaatgataattacacagactatgtagcaacaagaaaaagcatttatgcctaatggaaaagagcacagaataaaattgtatctatgtatgtctacgatattataaaataaagcttgcctaggggaaaagacggcaaaagaaaatagaaaatgaaaatttatgttagggtcgttgggtgctaaggaattgatttcttaaaattttattttattggtgtcatactacgttaacaataaataaaaagcaaattaaaaaagaaagtgcactccagagacaatttgctaagcaagcaaaacaactttccttccyagggggttggaggcaggagcttttcttctctcttctgcttcactctctgcagggcaagggctgaacccaggcagagctgaactcctggctcccagacccagtgaggggctgatgtgcactcttctcctgtaaggcctggcaggagacaggaatcctattcagctcagagctcaataagaacggaagttcagtggaagatggccccagctcatcgcaccatctttgagt

SEQ ID NO: 422626 - DNA, 613 bp, Homo sapiens
tactaatacagtggggaaaattaaaatcaatcagggttgatgtattagtaggctcacttgtatttactttaagaaccaagtagtaacgcatgctctatcaattgctttgggtcaragagtagagcctatttggtgctgataaaccatgaagttaatattatgactcttacagttgtatctggtttgttaaatgctgttagtcatcattttaaataattgttaagtgaacccaatgtctatctgcatggacttaataatcatattttctaagatcttttttggactcactatgtcacactctccctattttgtactttagaaatatttattgacactatattgtttagttgcttctgtccttccctttcagactatgatcattttaaaggaagagatctgttttgtttatctttgtaaaccaatacctaataaggcaccatcacagataaacgactaaactaatgaataaatgaattaggctagataaaccaaacacaagagaaaggtaggaaattcacataaaagtggacataagagtaataggactttatgaagcctcctgtaggaataattgtaatgaatggtggagtgggagtgataagaaaataaagaa

SEQ ID NO: 422627 - DNA, 445 bp, Homo sapiens
gtactaatacagtggggaaaattaaaatcaatcagggttgatgtattagtaggctcacttgtatttactttaagaaccaagtagtaacgcatgctctatcaattgctttgggtcagagagtagagcctatttggtgctgataaaccatgaagttaatattatgactcttacagttgtatctggtttgttaaatgctgttagtcatcattttaaataattgttaagtgaacccaatgtctatctgcatggacttaataatcatattttctaagatcttttttggactcmctatgtcacactctccctattttgtactttagaaatatttattgacactatattgtttagttgcttctgtccttccctttcagactatgatcattttaaaggaagagatctgttttgtttatctttgtaaaccaatacctaataaggcaccatcaca

SEQ ID NO: 422628 - DNA, 604 bp, Homo sapiens
tatggtgattttagctttgtgactacacaattatgattgttcttagcacaaagtgcaaccagattgtgatgttaggatatgggctcctggttgactaccattgttcactgctttagacctgcagtgttcttctccaatccttacctctcccaaccactgacatgatcttaccctatctatacactttaagagatattttatagcagagatatttttgaattacctttaagcataccaaatgtcacagataaattttgctccgtcttattttgaatgcaaatacagcacccraaaagaagatcaccaaatgattctttgggggtgtatttatttatgttttcatttgataactttcatgtttagttgttgtatttatgtttttttaagtgattactagaaaataaacctttcgtgaaagattgaccaggtaaataaactgggtcaaagaggcagcataaaatgcgcaacagagcagaccgttttttttgtattttgtctgccggttttttaatttgaatcctcttctgactttaccagttacaacatgatcaacttcccagcttatctggaataaaggactttaagatttaaaactggggcattc

SEQ ID NO: 422629 - DNA, 614 bp, Homo sapiens
cttacacgatgatttattttctctggtagcactgtgcttaatgtttaagaggtacatcarcaacatttggttagtatgaaaagttcttattttgaactgaaataacagtcatctcattacattaatgtacacatggctgaaaaatagtgttttgagaaactggttacaactaggcaatttgcatctaaacaaatacctgaaaaatccagtttatctcctggcatgtgaacttctagcacagtttgtggtaaatacatgctttaaaaatagacatagcttttcaactcccaaataagcatttagaagcaatgtttcatttgaattgtgcatgtttttgggctgttagagagaataaaagagcataagggtgagtaaaaatgaagagcattggaatttgaccttattttgcaacagtcgaaataaagaaattgctcagcatgagaaaaattaggaagatgtgtagtaaaaaaaattaactttacgtaaaaagagatctggtcttcacccttggctcctaggaggtgatctttaagcccttggaatgtcatgcctgataaaaccaattttgtttacctgggaccattgggccacattagatagtttaacaatgtgat

SEQ ID NO: 422630 - DNA, 631 bp, Homo sapiens
tgtttctacatctgtgcttacaaaagaaatgaaaaatcacattaagaagaaatattaaagtacattctatttggaattgtgttaaaatgacaccatacttacataaagcatttaagaattgctttatttatttatttatttatttatttattttgtttatttaagaattaccaatgaggaagctttctcaatctttatgaattaagtaatagagattagagtaaaatctaattaattcagacttcagtgatcagaacttataacaatctatgtaaaggttagaataagaattatacttgtaatgcttataaagaaaagctttgaaatataaatacatttcttaataatgattaaactactagttgtatactgcatgtctgtatcccccagaaatttatataaaatttatacccccaaatatgatggtatttgcaggtagagkctttgggaaatagttaggtttagatgagatcttgaaggtggggctcccataaaaggattagtggccttttaagaagcagaagagatgatcagagctcattctttgtccaccatgttaggccatagtgagtagatcacctcctgcaacccaaagggtgagccctcgcctgacatggacacttctctcact

SEQ ID NO: 422631 - DNA, 631 bp, Homo sapiens
tgtttctacatctgtgcttacaaaagaaatgaaaaatcacattaagaagaaatattaaagtacattctatttggaattgtgttaaaatgacaccatacttacataaagcatttaagaattgctttatttatttatttatttatttatttattttgtttatttaagaattaccaatgaggaagctttctcaatctttatgaattaagtaatagagattagagtaaaatctaattaattcagacttcagtgatcagaacttataacaatctatgtaaaggttagaataagaattatacttgtaatgcttataaagaaaagctttgaaatataaatacatttcttaataatgattaaactactagttgtatactgcatgtctgtatcccccagaaatttatataaaatttatacccccaaatatgatggtatttgcaggtagaggctttgggaaatagttaggtttagatgagatcttgaaggtggggctcccataaaaggatyagtggccttttaagaagcagaagagatgatcagagctcattctttgtccaccatgttaggccatagtgagtagatcacctcctgcaacccaaagggtgagccctcgcctgacatggacacttctctcact

SEQ ID NO: 422632 - DNA, 570 bp, Homo sapiens
gtttttgggtttttttccattcttcctgttctccttttagattaaatattttagggtctcatttttctctcattgacttattgtcattttctctctctctttttattttacctgacgttttctgatttatagttatctatcacagtctaacgataagtgacactgtactaacattaggtaagaaccttaaaatagtacactaaaatttttcctctcctgaatgttttactttcatgttaaaagttccacactatttacatctttttgtttataaacagcgaataatattttaaagatatttaaataaaaatatatttacataaaaatatttaaataaaaatatttaaataaaaaaataaaatatttaaataaaaatattttatatttacataaaaatatttttaaaaattacataaaaatatttaaatatagatatttaaataaaactataaacycttatatttttactgatgggctaccatttctcatgttcttctttcctttgggtagatccatatttgatttggtgtcaatttccttcctctaggatgattgcccttaatattcctt

SEQ ID NO: 422633 - DNA, 590 bp, Homo sapiens
tcttaggtgggtgagtgtgaggcttctagaacatccttttaggtagatttccttagtgccatgatctgggattttgacttagtgccctaacaaataggtgtgcctgaataagtgttaacagatgatgaattcagtgagcataaaaggttctgattaattataattgagctggccagctgctgagacaaagaaatagccttggccatgcgacactggcttttacaagttgtcatcatttccatgtccgtctcatagccacagcttacagaatgctgctcagggggcatttcagagaggagctactgggaattttagcttaatctcccactagattgtcagagagaggatcaagtcaggacacsaagcttctagagaattaatgcgccgttctagggtgaggcagccttgagggagaaagaaacagctccaaagtatcttagcattgtcctcagagtttcacaaaataatgtctgctggacaaagtaggccaaggactatttttatacaagtgtcagctaagaatggtgtttcacacgcacaggcatgtttattgcagcactattcacaatagcaaagacttggaaccaacc

SEQ ID NO: 422634 - DNA, 587 bp, Homo sapiens
tttattatcattacttatataatatttaaacgattagccatataaagcttagtaagagggctatgaaaaaagtataaaggacaaattattattatctgtgcaaacttcgcataacttttccatgctatctctaacctttttgatgaacacttttagaaattaattgatgtaatgtgtttgctgctaagtaatgaaagcctcctactgggttaggtttttgtttatttattttttgactttttggctgttataggtgtcatttagaatttggttagcatttacgtaagaaatttatatgtcactgctggatatatacccaaaggagaggaaatcagtatatcaaagagataagtaaatattcttaagcaagaattcctgaaatggctcagtgaggaatatccattttctgggcatgttgtgactcacaggcagcttgttaagtcctgccagctgaacagccagtcttcaaataaccatcttctttcacrgtgtgtcagacgtttatcttcttcctacctggctgaccttgccacatgtgtttcacaatacacccttgtttctgttacagccaaatatttattcaccca

SEQ ID NO: 422635 - DNA, 635 bp, Homo sapiens
ccttttttctattgttactttttagacttaatggttgcatttatttttgttattaatatatccacagtcagaaggcaggaaaactatatccaattcccagcgagtggatgttcactgacatcagactaagtctccttttaatgattatttatcctatctgagtttggagaagtgagaatttaataaaaggagcatggaagagagagagtctatacaagacagtagcctcctacctggtgaataaagcaattacctcaactacatgtatgtttttcttatatgccacatatccatgggtttatcaatacagagatgcttcaaagtcaatttgtagaaataatctgttagtcatgtagatatgataaactagcagatattttagtgtggctattgtccatatcaaattttagtaggagaatattgaggagttctgcttctgatgaaaaacctatgtgtgatttttaggcctgaccagatgcagctacaaagactttatttgacaggcctcaccagggaaactgccctacccacaccagactyggtgcccagtgaagggtactgcattctctgaagggagttgcagtcaagaatacaggctctctttgctggtcataatctttcacatatttgcattt

SEQ ID NO: 422636 - DNA, 609 bp, Homo sapiens
gtgttcttttgaagctcaaggattttattgaatgtggcagkcatcatgtaaatgtaatgtactgtgagatatcagtgggtatttttgtgactcatctgggtgctccctgaagagccctgcagagtgcctttcacacagtaagtgtctgaggaatatctgttgaaatgagcaaaacatgtcaatatttagggagttgtactatatgaaggcacagatgcacagtcatgcatgtgtgttttggtcattggagaggtgggtatgctccatttgttccaggatattgaaaaaataaaacaattcttctggcaggttagcctccttctttctgaagacccagtggctgtgtgctttcggctaaatgttgtcatcctccaaacccagagaaagcaaaaagcaggggttggaataatcatgtgcaaagagggaatgatatgtcgtctcattgttttagaagttttataagcctagaagcattaaagacgagttgcaactttgaaaaccaccctgttgaatcacgatgatctcaaactctttcttggcctccccttttcctgtgtgcatgtgtgtgtaatgcttagtatttatgtttgcctgtttacttaggtcatt

SEQ ID NO: 422637 - DNA, 564 bp, Homo sapiens
aacacttagtattttcaggactttatttttttagccattccaataggtgactagggatgtctcattatagttttaacttgcaaatccctgatggttaatgatattgagcatcttttcatgtgcttcrctgccatcctatatcttttctggtaaagcacatctcagaaatttttgtatattatgttttcatttaatttaattctgaatattttctactttcccttgtgacttccattttgaagcatgagtatttatttatttatttatttatttatttatttatttatttttgagatggggtctcactctgtcacctaggctggagtgcaatggcttgatctcagctcaccgcaacctccgcctcctgggttcaggcgattctcctgcctcagcctcccgagtagctgggattccaggtgcctgccactacacctggctaatttttgtaattttagtagagacagggtttcaccatgttagtcaggctggtctcgagctcctgacctcaggtgatctgcctgccttagcctcccaaagtgctgggattgcaggcacgagccacca

SEQ ID NO: 422638 - DNA, 506 bp, Homo sapiens
ctacactttcccaccaaactacaaggagtgagagtaccgccacccctcccaagagggcaaacggggaagtccaggaggtctgggttgttggcctagagttataaagcaacatgttggaagagttgaaaaatggagctcaagcctcagaaatggggaaggaaggacagygtcctcctcttagggagaggctgaaaactccaaacagatgactcccaggcactcctccatcccggagtagacctcctgaggccccaattacacaaggacccgtggatttcccatggctgtcattgcctttaagagatttgagcctggaggccacctgccctgcattgccaagggtgagtttgtctctgcagcacagaaggaagaggatgtccaccagacatgtgaatagatgtcatccagacacccaacaaaacaaagaaaataatgatgacaacccaagctgaatggtatgatttaatttctaaattgagatgattttggaaacttaccaaatctcc

SEQ ID NO: 422639 - DNA, 506 bp, Homo sapiens
ctacactttcccaccaaactacaaggagtgagagtaccgccacccctcccaagagggcaaacggggaagtccaggaggtctgggttgttggcctagagttataaagcaacatgttggaagagttgaaaaatggagctcaagcctcagaaatggggaaggaaggacagtgtcctcctcttagggagaggctgaaaactccaaacagatgactcccaggcactcctccatcccggagtagacctcctgaggccccaattacacaaggacccgtggatttcccatggctgtcattgcctttaagagatttgagcctggaggccacctgccctgcattgccaagggtgagtttgtctctgcagcacagaaggaagaggatgtccaccagacatgtgaatagatgtcatccagacacccarcaaaacaaagaaaataatgatgacaacccaagctgaatggtatgatttaatttctaaattgagatgattttggaaacttaccaaatctcc

SEQ ID NO: 422640 - DNA, 615 bp, Homo sapiens
acaataatgcagatgagctttgggataggcatcaagagacctgtgtaagcatgagaaggaaaaatggcttttgcaattgccacaagaataagccgggttcaaatcctaaattcaccctatagctgagtgatctcattcaagtaattcaacctctcagacctccaattcctaatctataaaacaaarttagtgcacctacctgatggggctgttctgagggtcacatcaggttccatatacaagaaagtgctccagaactgggaggcacactcaaaacagtaattgttattattaaggccctattgagaggcagcagaacatggaagagaaacagaatgagagtccctagttctaaatctgttgtccattagccagttgaaatatgtaaacaaaaggattaattgagatgatgtgggtgccttatatcacaacacagctacttacatatacagagctactgttgtataatgggtaggggggaaagcaagtccttccttgggaatgagtcaccacaggctttctaaggctctctggataatctctgtgagccagtttaaaagaacggagtgaactgggtgaactaccaagcccctcctctcctgggagccaaggatc

SEQ ID NO: 422641 - DNA, 615 bp, Homo sapiens
acaataatgcagatgagctttgggataggcatcaagagacctgtgtaagcatgagaaggaaaaatggcttttgcaattgccacaagaataagccgggttcaaatcctaaattcaccctatagctgagtgatctcattcaagtaattcaacctctcagacctccaattcctaatctataaaacaaagttagtgcacctacctgatggggctgttctgagggtcacatcaggttccatatacaagawagtgctccagaactgggaggcacactcaaaacagtaattgttattattaaggccctattgagaggcagcagaacatggaagagaaacagaatgagagtccctagttctaaatctgttgtccattagccagttgaaatatgtaaacaaaaggattaattgagatgatgtgggtgccttatatcacaacacagctacttacatatacagagctactgttgtataatgggtaggggggaaagcaagtccttccttgggaatgagtcaccacaggctttctaaggctctctggataatctctgtgagccagtttaaaagaacggagtgaactgggtgaactaccaagcccctcctctcctgggagccaaggatc

SEQ ID NO: 422642 - DNA, 616 bp, Homo sapiens
atgagcttaataagtatctgttgaatgaataaatcgaatatttccagtgcgtccctctgaagccatcttgattgttaaagccttcttgcttggtctctagagcatttgatcaaggktgtggtgcctatgaaataggttctaattccatgaggtgtggagtggaatggacctggaatccgtactttgcattttgtgggattatccttggttgaagttgtttctcacgccagtggaacagaggcttcattcataattcatgcatttgacatctctgtcaagtattgcttaccagatgggattctcaacagtaacagaaacagaaagcaggttgctgcatagagttggagtgaaatcacaggtggaggtatggtatgaactgaagttttctagttaaggcagagacctttgagaggtcactgagttgcaacctctgttggttctacaaggtaatgagaggcgaagatgaagcaataagacagaaatgctacctctggaagctgatggccactgctgtcttctgggagggaaaacaaggcctagaatgactaagaggctgcttattgttacaggttaaccctggagtagaataggcccaaaccaatattgcaaggaaaat

SEQ ID NO: 422643 - DNA, 616 bp, Homo sapiens
atgagcttaataagtatctgttgaatgaataaatcgaatatttccagtgcgtccctctgaagccatcttgattgttaaagccttcttgcttggtctctagagcatttgatcaagggtgtggtgcctatgaaataggttctaattccatgaggtgtggagtggaatggacctggaatccgtactttgcattttgtgggattatccttggttgaagttgtttctcacgccagtggaacagaggcttcattcataattcatgcatttgacatctctgtcaagtattgcttaccagatgggattctcaacagtaacagaaacagaaagcaggttgctscatagagttggagtgaaatcacaggtggaggtatggtatgaactgaagttttctagttaaggcagagacctttgagaggtcactgagttgcaacctctgttggttctacaaggtaatgagaggcgaagatgaagcaataagacagaaatgctacctctggaagctgatggccactgctgtcttctgggagggaaaacaaggcctagaatgactaagaggctgcttattgttacaggttaaccctggagtagaataggcccaaaccaatattgcaaggaaaat

SEQ ID NO: 422644 - DNA, 643 bp, Homo sapiens
tttttcaataataactgtacatttcctgtgttctcaaacagtacgtaccaaatctaatttgactcctcctttaagagttcagatagtgtatacagtagtaggagagtgttgacttcaaagcctattgagctgggtgataatatttgcctytagacaaagtggccgaaaaatatcttgtagttactaagtctgtgtcttgagggctttaatgctgcttttgttgtcagactctgaacttttactgcttttctgtgggccaggtctcttgcctcctccacatttgctaaggaactgtaagacacattcattcaagttttgcataaaatgaggacaaaaagatgcagaatcaggggcaaaaagtttctgcaaatctcctgaattttagcacctggtcttgggcactcctgcttttttcttcttggaagcctgctatggggacccttgcccacctttccacaggggtctacgtgggcaatatcgccagctccaggatcatggatggagaaggcagaggtttaataacaacttggctcaagaatcaattggcacacatattacaaaggtacatctatgatcaaaattaaggggctctctgagcaaacataaattcatctcctaagaaaacactgactagttttcttca

SEQ ID NO: 422645 - DNA, 595 bp, Homo sapiens
ggattcacaaggtaaagtgcacaaaaaaggtcgtctttaataattatcatcataataatcattcatttttaaagagcagtgtataaactagtccaataccatgactttcattcatatcatatacatgaattaaagtttaattctttgaaacttagcattgcagtatttcatgcataataacagtttgtaatacttgtttgtctgttaccaccattcctctaaggtcctccaaaggtacctaagattattatcctacactttgtatttgaggagactgaggcactgattttgaaaaggattgcctgtgctgctctattacagcagctcaagcatgcaagttttcaggaacaaatcacagagaacacttggtatgacttttccccacaccatccactcagcctctcagacctctaaagcaaagtctgcccatcagctctgccccagcctgaaaagggcccatgtccaactttcaagcatttgtctcttacrtcatcgtcagccttgtgcactagacttggaatcaacatcaaggtaagccttggggagagatcagatttgtagatctggaaacttcaagccaatacgacagcagttc

SEQ ID NO: 422646 - DNA, 520 bp, Homo sapiens
aggacagcatacttacccttggagaaagagtaacatttttggtaattatgtaaaaggacttgattccttggtgggcagcctaataatctgatatgcactggtttccttcccaaagcaaatggaacaacttcagtcctttcttccaaccatattataaacatgtgcacatcacacatctaaaaacctagtcagctcttcctgcaaaatgtttttttctccactgttttactgagcttttcttcaaagttttcttgagctttcagagggatgagcaaaggagatactataaatgaaagcactatccaggttatagttacattttcctgttgccagagagactggcacaggtaacacataaatcagaataagcaaataagtctatgtcttttcatgcctaccattggccagcaagsgtcaagctatgcaaggaatgtttagaataagctgttccaggcttacagatgcccagggcaccttcgcccgttaacccttctgctgcctctccccagcacaaggagga

SEQ ID NO: 422647 - DNA, 520 bp, Homo sapiens
aggacagcatacttacccttggagaaagagtaacatttttggtaattatgtaaaaggacttgattccttggtgggcagcctaataatctgatatgcactggtttccttcccaaagcaaatggaacaacttcagtcctttcttccaaccatattataaacatgtgcacatcacacatctaaaaacctagtcagctcttcctgcaaaatgtttttttctccactgttttactgagcttttcttcaaagttttcttgagctttcagagggatgagcaaaggagatactataaatgaaagcactatccaggttatagttacattttcctgttgccagagagactggcacaggtaacacataaatcagaataagcaaataagtctatgtcttttcatgcctaccattggccagcaagcstcaagctatgcaaggaatgtttagaataagctgttccaggcttacagatgcccagggcaccttcgcccgttaacccttctgctgcctctccccagcacaaggagga

SEQ ID NO: 422648 - DNA, 582 bp, Homo sapiens
tttaaggttaaaatattataaattaacatttataacagttgctctgattactacttatatatgcacatctgggtccacatttataattatttccttaaattagatttacaaaaaatatcagtgtattaaagtaacaaattttttaaaataacttattttcccctttaacaaatgtmacattgctttattctgtgcaaaacttaaaaaactttagctgtgcaacaagaaaatagcaatgggaaatatctactaataaaattttattgtataaatacttgaaatttatttaattgtaagaataacattttccagagttcaaaaaatagggatgtattttacaattgattcttcccttgaatgtgtacttttctccacttcctccaaagtaagtggatgctgatcttaacgatgggtacagcctaaccacggaaagataattttatctgtaattcaaataacagtgagttagatgacatcactgtagtctgagcaaaagatgaactgcattagttaaactgcaattaatgatgtggatgaggtgcccaactggtcaaatccagcatctgttttgaagatagagtt

SEQ ID NO: 422649 - DNA, 582 bp, Homo sapiens
tttaaggttaaaatattataaattaacatttataacagttgctctgattactacttatatatgcacatctgggtccacatttataattatttccttaaattagatttacaaaaaatatcagtgtattaaagtaacaaattttttaaaataacttattttcccctttaacaaatgtcacattgctttattctgtgcaaaacttaaaaaactttagctgtgcaacaagaaaatagcaatgggaaatatctaytaataaaattttattgtataaatacttgaaatttatttaattgtaagaataacattttccagagttcaaaaaatagggatgtattttacaattgattcttcccttgaatgtgtacttttctccacttcctccaaagtaagtggatgctgatcttaacgatgggtacagcctaaccacggaaagataattttatctgtaattcaaataacagtgagttagatgacatcactgtagtctgagcaaaagatgaactgcattagttaaactgcaattaatgatgtggatgaggtgcccaactggtcaaatccagcatctgttttgaagatagagtt

SEQ ID NO: 422650 - DNA, 540 bp, Homo sapiens
ctctctggggcttgagagagaaaggcttgtgttagagatgtaaacttgtaaattatcagtgtagagatggtattcaaacctatgactagtgagtagatgagctcactcagggagtgacatggccaagaggaccaaggagtaaactctgatactctccaaattttagagtatataaaatgaagaacagagaaattaagaagttgtagtcagtaygataaaaggaaaagaaggaggtatagtatattggaagtcaattgcaaaaatgtttcaagaaggagggagtggcctactgctttgtattctaaaatgcttttggaagtggagtaacaggaggaataagtcctgaccactggatttggcaagaaccatttcagtgggatgttcatgacagcagcctagtatagacgactgctggggtgttttgcgctaaagagaatcagataattagggtggtagattgagggagatgtggggagattcattttaagttgggatataacatagaatatttgtgagctaatcagaataatctggtaaaaa

SEQ ID NO: 422651 - DNA, 540 bp, Homo sapiens
ctctctggggcttgagagagaaaggcttgtgttagagatgtaaacttgtaaattatcagtgtagagatggtattcaaacctatgactagtgagtagatgagctcactcagggagtgacatggccaagaggaccaaggagtaaactctgatactctccaaattttagagtatataaaatgaagaacagagaaattaagaagttgtagtcagtatgataaaaggaaaagaaggaggtatagtatattggaagtcaattgcaaaaatgtttcaagaagragggagtggcctactgctttgtattctaaaatgcttttggaagtggagtaacaggaggaataagtcctgaccactggatttggcaagaaccatttcagtgggatgttcatgacagcagcctagtatagacgactgctggggtgttttgcgctaaagagaatcagataattagggtggtagattgagggagatgtggggagattcattttaagttgggatataacatagaatatttgtgagctaatcagaataatctggtaaaaa

SEQ ID NO: 422652 - DNA, 593 bp, Homo sapiens
taggggatatcatggtgagtgttcaaatttcaaataaggtggtctgtgaaaggctcattgagaaggtgtcatttaaacaaagacttaagggagatgagtgagttagccacgcagatatctggaggaagaatcattcatgcataggacaaaataaatagaaaaaaawtcccaaggtagagcatgcctaacatgtttttaaaaacacattcagaagtccaatgtagctagagcagaatgagcagggcagaggtgactatgagatggtgtcaaagaggtaaggtgtgggtgggagatcagtaaggtcttctggctattgtgaggatctgggctttccctctgaaagacatagaagccactgttgaaggtctggcatgacagactctggctaatgtgataatcatgggcagtaggtgtcaagagcaaagttgaggaggtcacttagagaccatgacaatcattgagatgagagatgatgggggcttgaatcaggggagttgcagtgtaagtggtaagaagtggccagattttggatatattttgaaggtaatagccaacaggatttccttctcagaggtgggatgagaaaaagagag

SEQ ID NO: 422653 - DNA, 566 bp, Homo sapiens
ctgacctactgaatgagaaactctggagattggactcagtaatctgggtttttaacaagccagtcaagtggttctsatgcatgttcaggtttgtgaaccactgtgctgggctgatgtttccaaaagtctagttcagataccacatgcatcaacactattcctggttgttactaaaattgcagacttctaggccctaccccagacttgctcagtcaaaacctattctgaatctcctttataaagtgcaacccaggcaattgtgatgcacttttaggttgagaactacttgacaaattggtgtcaaaatagcaggtgatggcatttgagcatttgtggaggtcaggtcagaattcctgtttccttttctttgtgaccctggagagatagcaggggggatagctgcataagccatggcagttggctctagaggagtggcctttaatggctttgtggttgccctctaaccttgggagaagcatgtttgttggtgatcagcgggaacaagccacaccacccaatctgctctctcaacccaacatggctcagaccgtcatttcctaatggca

SEQ ID NO: 422654 - DNA, 590 bp, Homo sapiens
ggcatcactgcaaagccccgattaggagcatacctgtgtttctcagaagcagcacagcaggcactatggctggaaaggaaggagcaagagggagattagcagggggaaagttcaagagataatggggcctgcaggtatggtgaggtctttgctttcccctctgagtgaaatgaaagccattgctggtgttatggactgaaggtatccctctaaaatccatagattgaaattttaactctcattgtagtggtattgggaggtaagacytttgggaggtgattaggtcatgggagctgaaccttcatgaatgggatttgtgccctctgaaaggaaccccagagagctctctagcctttgtgaagttcagcaatctgctacctgggagagagccctcactagactccaaccatgctgggactttgatcttggacttgttagcttccaaaactgtgaagaatacatttctgttgtttatgagccaccccgacctgggctatagccagtgaactagttcccaaatgaactaaaacagccaagttttgagcagaggagtgacctgacctcatttatgaagagcatgcattcttaag

SEQ ID NO: 422655 - DNA, 590 bp, Homo sapiens
ggcatcactgcaaagccccgattaggagcatacctgtgtttctcagaagcagcacagcaggcactatggctggaaaggaaggagcaagagggagattagcagggggaaagttcaagagataatggggcctgcaggtatggtgaggtctttgctttcccctctgagtgaaatgaaagccattgctggtgttatggactgaaggtatccctctaaaatccatagattgaaattttaactctcattgtagtggtattgggaggtaagacttttgggaggtgattaggtcatgggagctgaaccttcatgaatgggatttgtgccctctgaaaggaaccccagagagctctctagcctttgygaagttcagcaatctgctacctgggagagagccctcactagactccaaccatgctgggactttgatcttggacttgttagcttccaaaactgtgaagaatacatttctgttgtttatgagccaccccgacctgggctatagccagtgaactagttcccaaatgaactaaaacagccaagttttgagcagaggagtgacctgacctcatttatgaagagcatgcattcttaag

SEQ ID NO: 422656 - DNA, 623 bp, Homo sapiens
ctaaataagaaaaccagccctagcactgctgcaaagtggtctcctgctggatccagatattttaccatgtctctcacggttgccattgyccctcctgatcagtattatgtggccatcaggagttcctttctggtcctcatgaataaaaaaagcaaccttatctattccaggtccctcacttgaatgcttttcccccatattgctacttggctggcttattctcaaacttgagatagcaatataaatgccatttcctcagaactcctctctgaaactatagttctctcttccgccccatctaaagtggcctccccaagtttctatcacattaccttaaatatttccttaacatcactataattaccttatgtactgtttttattgtttgctctcttatttcccaacaacatgtagagatattgttagtattgcctgtaatatatcaccaccaatcctgacatacagtagatgctcaataaatatttgatgagtgaataaatcgatgaaaaactgagttcataattcacatatcattgaataacttgcttttttcccatgaacaatgaattatgaaaacagtcctatgtcagcacatacagagcttttctttctggttgctgaat

SEQ ID NO: 422657 - DNA, 641 bp, Homo sapiens
tcccaacaacatgtagagatattgttagtattgcctgtaatatatcaccaccaatcctgacatacagtagatgctcaataaatatttgatgagtgaataaatcgatgaaaaactgagttcataattcacatatcattgaataacttgcttttttcccatgaacaatgaattatgaaaacagtcctatgtcagcacatacagagcttttctttctggttgctgaattgtagtccaaaatgtggatacatatcagtaaattaagtacatttctactgatggatgttcagggtttttttaatctcttgttatcaggcacagccctgaactatacagattcgcatttgtatttggatatgtttgcataacttgttctgcaggatagatttctacatgtgaaactgcaataaaaaaggtttttaaatatacatagataaattcaaatggcccttaacgaatgctgtcaaaaactrcaaagggtctgagactttcacctagttgataagtcagcctgacacaatttcatggatgctggcagaagaagacctgagactcctggttagaggcaaaggactttgctgctcatgtcactggaggcagtctgatttttatgtttgctatggtctaaatcacccccaaaggct

SEQ ID NO: 422658 - DNA, 581 bp, Homo sapiens
ttggtttttgctaaatcaaaggatatagtctgcgtgtgatgactttaggagccttttaacacctcacctgctcagtggttgctaaaattatctaaaagtgtttacttgttaattatacaaattacagataaggtttaaaaaacagagcacctggaagtggtcatgcatggcagtaaaattacactaaagtatacatgtctacttgttacgcatctatctatctatctatctatctatctatctatcatctatctatctatctatctatctatcatctgtcatctatgctttaaacaatcagaattgatggggatttcaggaatcccaakatttctgaaatggagggtgaggaataatcaaacctcaaaccacagagtttttgttatggacagcgtattcttgtcttattgagtacataccttgtttattaaacagttctgctccagtttgaccctagccaaaggagtttgtatggctctgttgaaagactgtgaaggtatgtaatggacatacctgggtgaaagtcctcttttcctctcctctggctgtgtgattgaaggctgggtattcagtatctctga

SEQ ID NO: 422659 - DNA, 561 bp, Homo sapiens
caaacctcaaaccacagagtttttgttatggacagcgtattcttgtcttattgagtacataccttgtttattaaacagttctgctccagtttraccctagccaaaggagtttgtatggctctgttgaaagactgtgaaggtatgtaatggacatacctgggtgaaagtcctcttttcctctcctctggctgtgtgattgaaggctgggtattcagtatctctgaggcctggtttctgtatctgtcaaatgaaggtcgtgtaaaccaatgatctactctatgccaaacactgcaatgtgtatgcacttgacatgtgtttaatctttgaattcactcccatttcgtggatgagaaaatattgaggctcattggtttgttacggcgggttaaaagagagaaggcttgtaaagtacaaggcacaggtgtcatgtctcataggcactcaataaatatttttccaatactccaatgtcctttgacaagggcaaagcacaccaagagaactaactccaaccgtaaattaatgactttaactttttaagcacctatttattttctgccc

SEQ ID NO: 422660 - DNA, 511 bp, Homo sapiens
ctgacagcttgaacaacaatagcaaaaaaaacccaaaaaaacaaaaaacaaacaaaaaaaamcagaaaagatgaaataaaagacttcagaaattctctaggcagtaaacaggctaataaacaacctacctggaaacttgtgcgattcctccctggaaaggcaaggcagcctcaaagagggaagtagccagcccaaaggacaacagtggcatgttctcaagcactggaaatagagggtataggattttcttttgagagttacaaggtaatatgagtataaataacagtaagaacagcaatggcagcaagaggtgtcatttactgagtgcactctagacaacattctgtgtgtgttttatatattaaaagtaatggcaaggaccataattatttttgcaccaacctaatattatctcatttgatcattttaccaatcctgtgaagtaagtagtcacacgcccattttcaaacatgtgcaaattatggtttggagagaccaagaaacttgccca

SEQ ID NO: 422661 - DNA, 593 bp, Homo sapiens
gtcctactgaacaggttgataaaagcctctatgatttgtgtttgattttgtttatcattggacgcatataccagttaatctcctctatcagtacttctctaatttctgctttgcaaggttttattcccacagttttcattcartaaagtcaggaccacagagatcctcaatattccactacaccatgagggaaattgcagtgagtgagcaatttcagccataactctctggtcatacacctagactgagagaaagaaaaccctcaacatctgtcaaaagattaataatttttatgtacagttcaaagctgtcaggtatagttcattagaataataaatctattaaatattggaaggattaacatctcattatctcacccttgttataagaatgcaggttttattatcctgatgactttaaataacccttcccacatagtgcattctcctcacctccttcccccaagccctcacagttaggctttgacataatttttttaaattgggcattatcattttaagagagcatcagaatgtcaatcctggctatgggaggctgatggaagacttcgttttaaacaattcttcacacgt

SEQ ID NO: 422662 - DNA, 600 bp, Homo sapiens
tatctctcgtggtccaaccctctgagcaccttgaagcatgctcactccctcctgctggagacaatgcaaagactcaggcaggccctgtatccagcccaggcgcaggctctccagatgctgtgtggcttcttacggtggagagtcacttgccctccacagatacatgcacacttaataagcaatggtggaccagggtcaggaaaaygacaataaaaattcctagtctgaacataaaagaatggagggcacacagaagttactgacccagttataagacccagctgactcacagggcagggcagttccttgactaggctttgatattgtcttgtgataggaatacttctgtccatctcccactattctccttgttatatctgaaaagggttaaggaggtatgtcttccttgggaactggtccacttccccatccttcttgctgcaccgaaatgtagtgtcctagagatcaaacatgcaaagtggtctttaactagggggaaggagattgttttcattttgttttgtattttccaggattacacaattttgttggaaataaaatttcttcaaaaacgcatttagattctgatctatttgattc

SEQ ID NO: 422663 - DNA, 600 bp, Homo sapiens
tatctctcgtggtccaaccctctgagcaccttgaagcatgctcactccctcctgctggagacaatgcaaagactcaggcaggccctgtatccagcccaggcgcaggctctccagatgctgtgtggcttcttacggtggagagtcacttgccctccacagatacatgcacacttaataagcaatggtggaccagggtcaggaaaatgacaataaaaattcctagtctgaacataaaagaatggagggcacacagaagttactgacccagttataagacccagctgactcacagggcagggcagttccttgactaggctttgatattgtcttgtgataggaatacttctgtccatctccmactattctccttgttatatctgaaaagggttaaggaggtatgtcttccttgggaactggtccacttccccatccttcttgctgcaccgaaatgtagtgtcctagagatcaaacatgcaaagtggtctttaactagggggaaggagattgttttcattttgttttgtattttccaggattacacaattttgttggaaataaaatttcttcaaaaacgcatttagattctgatctatttgattc

SEQ ID NO: 422664 - DNA, 600 bp, Homo sapiens
tatctctcgtggtccaaccctctgagcaccttgaagcatgctcactccctcctgctggagacaatgcaaagactcaggcaggccctgtatccagcccaggcgcaggctctccagatgctgtgtggcttcttacggtggagagtcacttgccctccacagatacatgcacacttaataagcaatggtggaccagggtcaggaaaatgacaataaaaattcctagtctgaacataaaagaatggagggcacacagaagttactgacccagttataagacccagctgactcacagggcagggcagttccttgactaggctttgatattgtcttgtgataggaatacttctgtccatctcccacyattctccttgttatatctgaaaagggttaaggaggtatgtcttccttgggaactggtccacttccccatccttcttgctgcaccgaaatgtagtgtcctagagatcaaacatgcaaagtggtctttaactagggggaaggagattgttttcattttgttttgtattttccaggattacacaattttgttggaaataaaatttcttcaaaaacgcatttagattctgatctatttgattc

SEQ ID NO: 422665 - DNA, 564 bp, Homo sapiens
ccttcttgcttgcattctatgtgcctgcaggcttaacacatggaagccaccaagggcttatgacttatgctctccagagtggcagcccaagcagtatcttgtgccctttcagccttgggtgtagctggagcagcctggatgcaggaagcagtgtcatgaggctgcacagggcagcagcacccaggcctggtcccaaaaccattctttccctgtaggtctctgggcctgtgatgggagaggctgcatcaaagwtttctgaaatgacttcgcatctagtcatgctcccttttagtcatgctaatctctctagcaagtggttgctatccagaccacttggattctttctctacctcagtaccaggctgcaaattttccaaacttttatgctctgcttcccttttaaatatgaattccaactttaagtcgttcctttgctcctgcatctgatttagggtgttagaagcaggcatgtcactttttgaatgctttgctgcctagaaatttcttctgccagatactgtaggtaatcactcttgagtttgaacttccacaaagccctaggac

SEQ ID NO: 422666 - DNA, 641 bp, Homo sapiens
agttaacgcccttccttgcattgactctgtagctgaaaggctgtggctttattttcagctaagtgagaaaagaagcacatgcaatagaataggaatagctcattgaaaaaaatacgctattttaaaagccaataytatttccaagacaggcactttgatcaagtatagagagcattttgttagagcatcaaaccatttggaagtcagttgaaaggaatggctcgtggaaagcaggatctttaaagggaaacatagcaacattcacactgttttgttccaaattgtaccttaaaaacagctgtgtgtgtgtgtgtgtacgtgggtgtgcgagtagaaaggggagaggaaaaggatcttcacttgagtttaagcagggtatttcactaggattcagttgtatttggccaaactagtgagtggaaagctggtctagtaaccaaaggccggctgtatgatgggagggtaaatctgagtgcagggcagctcctttctctctgtctcactcccaggacaacccctcaagggatggagagagctactagcaagctgagctgcagcaccaaaaccttgatgctctaacagagcttaacaaagaggagagaaaggcattgtttctcttttagcatgatgggacacatagt

SEQ ID NO: 422667 - DNA, 641 bp, Homo sapiens
agttaacgcccttccttgcattgactctgtagctgaaaggctgtggctttattttcagctaagtgagaaaagaagcacatgcaatagaataggaatagctcattgaaaaaaatacgctattttaaaagccaatattatttccaagacaggcactttgatcaagtatagagagcattttgttagagcatcaaaccatttggaagtcagttgaaaggaatggctygtggaaagcaggatctttaaagggaaacatagcaacattcacactgttttgttccaaattgtaccttaaaaacagctgtgtgtgtgtgtgtgtacgtgggtgtgcgagtagaaaggggagaggaaaaggatcttcacttgagtttaagcagggtatttcactaggattcagttgtatttggccaaactagtgagtggaaagctggtctagtaaccaaaggccggctgtatgatgggagggtaaatctgagtgcagggcagctcctttctctctgtctcactcccaggacaacccctcaagggatggagagagctactagcaagctgagctgcagcaccaaaaccttgatgctctaacagagcttaacaaagaggagagaaaggcattgtttctcttttagcatgatgggacacatagt

SEQ ID NO: 422668 - DNA, 641 bp, Homo sapiens
agttaacgcccttccttgcattgactctgtagctgaaaggctgtggctttattttcagctaagtgagaaaagaagcacatgcaatagaataggaatagctcattgaaaaaaatacgctattttaaaagccaatattatttccaagacaggcactttgatcaagtatagagagcattttgttagagcatcaaaccatttggaagtcagttgaaaggaatggctcgtggaaagcaggatctttaaagggaaacatagcaacattcacactgttttgttccaaattgtaccttaaaawcagctgtgtgtgtgtgtgtgtacgtgggtgtgcgagtagaaaggggagaggaaaaggatcttcacttgagtttaagcagggtatttcactaggattcagttgtatttggccaaactagtgagtggaaagctggtctagtaaccaaaggccggctgtatgatgggagggtaaatctgagtgcagggcagctcctttctctctgtctcactcccaggacaacccctcaagggatggagagagctactagcaagctgagctgcagcaccaaaaccttgatgctctaacagagcttaacaaagaggagagaaaggcattgtttctcttttagcatgatgggacacatagt

SEQ ID NO: 422669 - DNA, 590 bp, Homo sapiens
gacataactgccatagttaaaatttgagattcagagtaagaaatattttcccaaataactgagataaagcctgataacaccaatacaattgttttgttcaaaaawttatgtctcaagaaatgatgtctcacatgtaaaatctaatgcaacacagagacaagggaaggcactgtgaccatgacaagggtgtactagcaacactaatgaaaatgaggtgtctactcttcttggaaagccactagaagaacttgcatgtacatttgaagaaaaatgatgcaagccacttgcccattaacagagcccttctggtttgattgctgtgacatatttgatatttttacaattaacctttgatttggactacaatagaaaactatgcatgctttttcttccattgtaggttccaatgccacatggcctttgctatttcagattaagtcttaattttggaaacattttcactgatggcacctattctacggcaatgtatgtaacttgcaactcatcatttatatttaaatggtagaaccatttatttcttcagaaaggactttagaaatattctaaactttgagattttttttccacac

SEQ ID NO: 422670 - DNA, 590 bp, Homo sapiens
gacataactgccatagttaaaatttgagattcagagtaagaaatattttcccaaataactgagataaagcctgataacaccaatacaattgttttgttcaaaaaattatgtctcaagaaatgatgtctcacatgtaaaatctaatgcaacacagagacaagggaaggcactgtgaccatgacaagggtgtactagcaacactaatgaaaatgaggtgtctwctcttcttggaaagccactagaagaacttgcatgtacatttgaagaaaaatgatgcaagccacttgcccattaacagagcccttctggtttgattgctgtgacatatttgatatttttacaattaacctttgatttggactacaatagaaaactatgcatgctttttcttccattgtaggttccaatgccacatggcctttgctatttcagattaagtcttaattttggaaacattttcactgatggcacctattctacggcaatgtatgtaacttgcaactcatcatttatatttaaatggtagaaccatttatttcttcagaaaggactttagaaatattctaaactttgagattttttttccacac

SEQ ID NO: 422671 - DNA, 559 bp, Homo sapiens
taaaaattacaggtaattttgaattggatacaatttaagagaacagttaatttccttttaattttataaaacaatttatttccttttaaactatgaaaatccaagagagatttcttgttaagaaaatcacgtatgcataaatgctgaactagtagcttctataggaaattatgttgttaagtcagatgggaaccataatggcctcatccctgaagcaatcattgttaatataaatcccaaacatatttctatatggttccaatttactccaatgtgtttcaccatcctgtcaaaattactagatatcaaataagcaagatttatatgctcaaaactgacaacaatcagcgttctaaatatatatggcaattgagagtagctaaatctacggaatcttttaaattaaaaaatattgcccattctgatgaaactgcttayaatgactacaagtaaagatggtggccattaagttttatcgtgagcacctgaggaactgtttgcatccaatacaaaatgtttctttcttttgaattactgacactggcaaattaaaatgaag

SEQ ID NO: 422672 - DNA, 624 bp, Homo sapiens
gactcaccaaatgcccagcataacgattaaaagaaaaatccactgcaaggcccttcatgtgaaatttcataataccaaggttacagagatttttgaaactctagaaacaccaggaactggaaggagattgtgccagttactaagctattgtccctcagccccgtcccacccacagcagggactctcccagctgcatttctcccttgcacaatggcttcctggtacagtcgttaacaggtggtatagacggagattggcaacctggatggagaacaaggacaggctctttcctgttttcttttatccctatcagcatcacctctgtcatagcccttcccctggctgtggcacttgatcgatctccagcttttgggtattttacttttctggaattccaaacccaacctcatgctacccttcagggtctcagtgctggttggcctcacytcttcctcaaagttctgtatctcagcttcaagaggctccttcttcaaactcttgggttctgattttcccaagccttccttttgttgccataggtgtgctgatggcttcctctagttactagctttgtgttatctcagtatcccatcttcatttcctcagttctttaacacccgttta

SEQ ID NO: 422673 - DNA, 471 bp, Homo sapiens
cctgtccaaaaaacgttgattacaacgttagtgcccatattttatctagcraattttctctgattttggccctgatttgctaactcattaggtatctaatccctggccatgccatcattattaccaccccaagaggctttggtgtttagcagtctttttccaatatcctgattcttcaactcatcaaatggcttttggttctatctctcatattcgagcattaaatgtgcccatgagtcctgtcttcttggcatggcctgataggataagtgtttactccctttcagacaccatgaatatcctagtgccacaaagatgaacagtctttgcaatcagataattcagtcagtgctgtcaaatttaactccctgcaatgatagaaatgccctatatatgtgctatcccagctatcccatctggtagcactagccatatgtggctattgaatccctgaaatggcaagtgcaacta

SEQ ID NO: 422674 - DNA, 601 bp, Homo sapiens
acattgtaacatctgtggcatcagattcctccacccatcccaaagttttgtggcttttgctgttgtttttctggttgccacttgtttagcaacttttctagactctttattccctgaagtatgtggcctctgctagtttttttgtaaagtccttgcttttatttttaagcctggcctcctaagggtcacatctggtttagtataatttagtggtcaccaactgattggtcagaagagatgcttaaatgccttgcytttcaatctttcactgttgccaaggggacctgtgtgagaaggtaacccttcaaacttcagtttataaggtatccttagctcatatttcttacttgcaaaaggacaggaagttgtgagtgccttttcctttcccggttctttcctaggcatttgctcaggtttgctcatgtgcagtcttttagatctcaaggaacatgtatgagctttctaaagtttcctatagttgtctagttctccaggattgtctttaaaattacccaaacaggctcttgtttggccaactgaaatcatagccttgggcaactgaaatgtcaccagcagtttgctattgttttaaataatgtcc

SEQ ID NO: 422675 - DNA, 587 bp, Homo sapiens
tgcgcaggtaaagtcagcaagtgagcgaatgaatgaataaaacagtgaatgatatgcttactgcagtgcttgacatgggaaatacccgacagttttaaaagatgtcatcaggacccactcatttcatctctcagctcaattacctttggtgtgggctccattttcaggcagtggcaatatgggcttcccagagttccaggctttcatcctatccagccatcccagaggaggaaagagtttcttttctcaacagtagcacaaaggtcattggttttgactgggcatgtgaccacttatgaaccactcatcacttgggccaggaaaatacaattgctctgattgactagackttggttacagccccttgtggggatgaaggttgactcagctccactcaaaccacagggactgagagtggagaggggtggtccctgagaaataccaagggtcttgcaggaagagaatggatattgggcaggtaagataatggatgtccactacacccaactatggcacctgattcattctgtcttgcattatagttagatgttttcatgtttgtctgccctcagattgagagcttccaa

SEQ ID NO: 422676 - DNA, 587 bp, Homo sapiens
tgcgcaggtaaagtcagcaagtgagcgaatgaatgaataaaacagtgaatgatatgcttactgcagtgcttgacatgggaaatacccgacagttttaaaagatgtcatcaggacccactcatttcatctctcagctcaattacctttggtgtgggctccattttcaggcagtggcaatatgggcttcccagagttccaggctttcatcctatccagccatcccagaggaggaaagagtttcttttctcaacagtagcacaaaggtcattggttttgactgggcatgtgaccacttatgaaccactcatcacttgggccaggaaaatacaattgctctgattgactagacgtkggttacagccccttgtggggatgaaggttgactcagctccactcaaaccacagggactgagagtggagaggggtggtccctgagaaataccaagggtcttgcaggaagagaatggatattgggcaggtaagataatggatgtccactacacccaactatggcacctgattcattctgtcttgcattatagttagatgttttcatgtttgtctgccctcagattgagagcttccaa

SEQ ID NO: 422677 - DNA, 474 bp, Homo sapiens
ctgcatagtaacatctcagtcaacaacagactgcatgtgcgactgttgtcccatgagtatcatggagctgccctctacaggtgtaccattttttatcttttatacagtattttaaatgtaccttttctatgtttagaccacatatattcaccattgtgttacaactgcctgcagcgttcagtacagtaacatgctatagaggtttgtagcctargagcactaggctgtagccagagtgtttagtaggctatgccgtctaggtttgtgtaagtaaattctgtgatgttcacacaacaaaattgcgtaacgacacatttctcagaacatgtccccattgttaagcaatgcatgactgtatatggtccccaacttagggtggtttgactcatgactttttgacttacaatgacatgatagcaatatacattcagtagaaatagtacatcaagttcacatacaaccatgctgtttctc

SEQ ID NO: 422678 - DNA, 649 bp, Homo sapiens
catgtaggtgataggatttaactacttttcaccagaagttgtaaaaagagaaaacaaagaaaaaaatgatcaatttctaattctttcatgtcctttgaaaaacacagtcataggaagatctctcaaagtaaactgcatttaattctggacatgttatcaattaacttgaaatcataagttttgaatctaaagagatagctttgaatatgtcacatatatacctaatgaactgtactagtgtctcaatatttaaagcctgtgaagctcctaacatggaggtgggaatggagaagaagagccccatagacacttgcaaaggtcattccaagtttatgaaaaaatcagattgttgaagtgaagcaggaagtttccaagaaagaatcagattttctttctacctgagaaaacacataacrtctttggcaaatgaaattaaaactgcacatgaaagattgagttcctgtaaaagtcacttaactgggaaagacacaaccacatattttataccatggagctgcagaaagttcagtgtcatatcaaataattattttctcagcacaaaatgtaagacatcttgaggatgaaatttcaagacagtaagtttcatttggcatcaacattttagcatccgatcttaagggacccccaa

SEQ ID NO: 422679 - DNA, 555 bp, Homo sapiens
tacctaccttatagtgttgttgtgataagtacttgaattagtatacattaagttcctgaaacagtggacagtaccgtaatataacatggttggtatttattatattataaaaatgtttactattttaataacatatcatatatataaatttgatataaataaattgaatcatacatgttatgattcaaaggaattgtttagtcaattatgattaagtgtgtggcaagttggccgggcacggtggctcatgccttcaatcccagcactttgggaggctgaggcgggtggatcacaaggatcgagagcatcctggctaacacggtgaaaccctgtctctactaaaaaatataaaaaaattagccgggtgtggtggcgggcgcctgtagtcccagctactcrggaggctgaggcaggagaatggtgtgagcctgggaggcagaggttgcagttagccaagatcgcaccactgcactctagcctgggtgacagtgtgagactccatctcaagaaaacccaaaaaaacccaaaaaagcctgtgacaagtcactttctttc

SEQ ID NO: 422680 - DNA, 555 bp, Homo sapiens
tacctaccttatagtgttgttgtgataagtacttgaattagtatacattaagttcctgaaacagtggacagtaccgtaatataacatggttggtatttattatattataaaaatgtttactattttaataacatatcatatatataaatttgatataaataaattgaatcatacatgttatgattcaaaggaattgtttagtcaattatgattaagtgtgtggcaagttggccgggcacggtggctcatgccttcaatcccagcactttgggaggctgaggcgggtggatcacaaggatcgagagcatcctggctaacacggtgaaaccctgtctctactaaaaaatataaaaaaattagccgggtgtggtggcgggcgcctgtagtcccagctactcgggaggctgaggcaggagaatggtgtgagcctgggaggcagaggttgcagttagccaagatcgcaccactgcactctagcctgggtgacagtgtgagactccatctcaagaaaacccaaaaaaacccaaaaaagcctrtgacaagtcactttctttc

SEQ ID NO: 422681 - DNA, 478 bp, Homo sapiens
tgtcagtggatggattttcatgccttatatrggtgaagttttttttttttccatcctcatccttttttttcaaaggggtgatgtgagcagtaaataatagttgttgaatataatagtcattttttttaattcgcgagatatttggagacaatagtacacacactacaattatgtggctgactaactttgaaaatgagactgtatatcattaatttagctatcaagtgaaatcaaatgtgctccactataaatagtgcataaagaagggggtgaacagttgaccaagttgttggaataagtagatgaatcaatcattaaattaattatgaatttttgagggctggctaggaggcagaaatatttaattatgaatggtagtagaaatccctgtgagaaaataatcacatttaagagataacaatctttacaaaaatatgtactgaaatacattttaccaattcaaggttttacaaccctg

SEQ ID NO: 422682 - DNA, 478 bp, Homo sapiens
tgtcagtggatggattttcatgccttatatgggtgaagttttttttttttccatcctcatccttttttttcaaaggggtgatgtgagcagtaaataatagttgttgaatataatagtcattttttttaattcgcgagatatttggagacaatagtacacacactacaattatgtggctgactaactttgaaaatgagastgtatatcattaatttagctatcaagtgaaatcaaatgtgctccactataaatagtgcataaagaagggggtgaacagttgaccaagttgttggaataagtagatgaatcaatcattaaattaattatgaatttttgagggctggctaggaggcagaaatatttaattatgaatggtagtagaaatccctgtgagaaaataatcacatttaagagataacaatctttacaaaaatatgtactgaaatacattttaccaattcaaggttttacaaccctg

SEQ ID NO: 422683 - DNA, 460 bp, Homo sapiens
ccttttttttcaaaggggtgatgtgagcagtaaataatagttgttgaatataatagtcattttttttaattcgcgagatatttggagacaatagtacacacactacaattatgtggctgactaactttgaaaatgagactgtatatcattaatttagctatcaagtgaaatcaaatgtgctccactataaatagtgcataaagaagggggtgaacagttgaccaagttgttggaataagtagatgaatcaatcattaaattaattatgaatttttgagggctggctaggaggcagaaatrtttaattatgaatggtagtagaaatccctgtgagaaaataatcacatttaagagataacaatctttacaaaaatatgtactgaaatacattttaccaattcaaggttttacaaccctgttttagaactgtatgaactattttgatatcttgggtagcctg

SEQ ID NO: 422684 - DNA, 432 bp, Homo sapiens
caattttaaacaagtaggatcttgatctacagtatttcttcaagaattgttacaggagataaaacgtggctttaccagtatagtcttgaaggcaaagcacaaaccaatgtaatggctgccaagaggtggaagtggtcttagtcaaagcaaaagtggacttgtcaagagcaagctcagcggcaacggtattttcgggaatgctcaaggcattttcctttttgacgttccagaggaccaaagaacagtaactgttgcttattatgagagtgttttcagaaagcgagccaaaacttttaacagaaaaacacccagaaaagcttcaccagagagtccttcaccatcaggaaaacmctcctgctcattcctcttatcacaaatgggcagttttgcaagtttccatggaaaatttagcttatggtcctgatttggcta

SEQ ID NO: 422685 - DNA, 576 bp, Homo sapiens
cagtcctttctcataggaacacacagtgttcagtctaattttaaaatgcctatttttctccttcccctgccataaatgtaagggaatttttctataagattcacaatgagaacaagatagggcacctagaggtaaaactctaaaactctaatgtttatttagcctgggcctccagagattttaatctcccaagctagcccaccccagttcagcaatttgtccattaccctgtcagcattctcacccagggctggctccatcagcacttctgactagttggtgctcctgatgagctgtgactttccttatcctcctgtctttccagctttttttagagactgcagaatgtgatgagatctcagttatccartggatctcaagagaattgaatttcagcatttttagtgttgcgagaatcaaaggacatgacttccaaactcttcacattttggactggaagccagatgtcaaaatgactttttcaaatggttttcacgcttttgaaattaccaaatcatgtcctcatcattactcagtatcaacaacatcgtacctcttacttcttacctttttatc

SEQ ID NO: 422686 - DNA, 582 bp, Homo sapiens
ccctatgtataaaactacaatactctgatgaaagaaaacaaagaaattcagttatgtgagggatactgtttgctcattgacaagaacgctaaatattattaagatgtcaactcctctcaagttgatatatagattctacgacttcccactcagtatctcagccagttgttttgcrgatattgacacactaattgttaaatttatatgggaagtcacaagactcagatttgccaatacaatactgaagaagaacaaagttgaaagactgtcactaccctaattcaagataaattataaagctactgtaattgagtcatgtggtattggtgaaaaatagatacataaataaatataacagaatacataatacaaaaatgaaaccacacaaacccagtgaagcaatctttgaaaagggagggaaggtaatttaatagaaaaaataatagtcttttcaaaaaacagtgttgaaacagctggatctgtatatccaaaataatataatcagacgcaaaccttacacaaccttacatcaaaattaactcaaaaaagaccatagacctaaatatataatgcaaaactgta

SEQ ID NO: 422687 - DNA, 582 bp, Homo sapiens
ccctatgtataaaactacaatactctgatgaaagaaaacaaagaaattcagttatgtgagggatactgtttgctcattgacaagaacgctaaatattattaagatgtcaactcctctcaagttgatatatagattctacgacttcccactcagtatctcagccagttgttttgcagatattgacacactaattgttaaatttatatgggaagtcacaagactcagatttgccaatacaatactgaagaagaacaaagttgaaagactgtcactaccctaattcaagataaattataaagctactgtaattgagtcatgtggtattggtgaaaaatagatacataaataaatataacagaatacataatacaaaaatgaaaccacacaaacccagtgaagcaatctttgaaaagggagggaagrtaatttaatagaaaaaataatagtcttttcaaaaaacagtgttgaaacagctggatctgtatatccaaaataatataatcagacgcaaaccttacacaaccttacatcaaaattaactcaaaaaagaccatagacctaaatatataatgcaaaactgta

SEQ ID NO: 422688 - DNA, 368 bp, Homo sapiens
gattggttggtgagaggggacagtcttgcttgcttttggttttaggtgaaacaaatatagtttttcactattatgaataatgttagctagaggtttttgtagatgttctttatgaagttgtgggagttcccctctaattctaatttttttttcatgaataggtgctaggttttgtcacataatttttctgcattgattgatktaatctgatcatatgattttcttctttagcctgatgatgtgatgaattaattaatcttcaagtgttgacccaggcttacatacctgaataaatcccagttagatatgttgtgtatcttagttttttgtttgtttgtttgtttttctttttctgttgcttacaacag

SEQ ID NO: 422689 - DNA, 447 bp, Homo sapiens
cttttgctcatgctaaaccacaattttcacaatgtcatgtcccttgtgtacaatttgtacagtgatagacattgtttacaaattgaaaaagctctcatctttccccaaagatgttttacttgtcctctgcctggtagaaagattaggctagatagaactaatttaaggttgtgctgcaattctggtaaaaggwtttttttgtttgttttttgtctttttttttttttttcacctgtgcctcctctcctgctattgtgcggtttcctcaattttccaactgagatcatggggtgcttccagtccttaaccccactgctggacctcccaaactctgatatttgtttccccagtaccacaagactgctataaattccagtgttctttagatttttctgctttgctttttatcatcctatgccatccagttttaaattttggcaagtagca

SEQ ID NO: 422690 - DNA, 571 bp, Homo sapiens
tttgttcaaattattcactttccgcagaaaaatagtattctcctctgtgtgttctgagaaagtatatgatattaatttgtcctgttattggggtgaagctaacttggatcacttggtgaagatggtgcttcccagatatctccattatgtgattttttttttccctaattagtttctggagtacccattaaaattattatatatgtagcttgttcctcataatgtcacttcactagttcctttcagtcactagttttagcatctattgattatcttgcctaactcagttattaataatgattcaaaatgtgttgttctgactctataattgcttttacatttattagttggcaactttagtataaaaaatkcttcattcacttacctatctattatctatctgctctctatctgttatctatcatctgttatctatctgctatctgtcatctatctatccatcagtatagactcatggatttttttattcagtgggttgtacttcattgttgtcattttttggtgcttaattttcctatatctagggcttctaagcatgctcctctgtctt

SEQ ID NO: 422691 - DNA, 607 bp, Homo sapiens
agcaaccttctgtcatattatgtctctttactctatcaaatttgtagtataattgtcttacatccatttagaataacactagacaatgctatgatttttgcttgaaacatcaaacataatttaggaaattagaatctatgaaaataaagtgagcattttaaagcttccagaaagaaatctgacacaacctgttktgtctttcattttttctttctttcctttatattcatcatagatgttatgatgcctatctgttaactccaatatctggattatctatgagtttgtttttaataactgatttatttcttatcagtctgttttacttgcttttttgtatatttggtattttttttaaagtatgctgaatttatggataatatgatatagaactactcaagaattttgaattttttttctgggcagaatttgtaattacttgcagatcatcttgctgctctcaagacctagttttaagctgtgttatggtaattatattttattttcctcttagaacatatgcctcactcctgggatactgcacctctcctaagagaatttttagagtccaactgagtttctcagttgtttgccaacatttccccat

SEQ ID NO: 422692 - DNA, 632 bp, Homo sapiens
  misc_feature (1)...(632): n = A,T,C or G
nnnnnnnnnnnnnnnnnnnnnnnnnnnnnnnnnnnnnnnnnnnnnnnnnnnnnnnnnnnnnnnnnnnnnnnnnnnnnnnnnnnnnnnnnnnnnnnngttcgttcatcacttaggttgctttgtggtttctattgtgtagttgctttacagaatctgtgggctatgtacttaagtgtgtttttgtagtagaagacatcattcttttgtttccatgtttagagctcccttaagggtctcttgtaaaccccgtctagtggtaacactttcccttagcacttgcttgtctgggaaagattttatttttccttcatttatgaagcttagtttgacagaatatgaaatttttggttggaatttcttttctttaagaatgctgaaaatagttatctaatctctcctggcttgtagagtttctgctgagaagttcgctgtcagcctgatggggttgcctttgtatgtaatctgaccttttcctgtagctgcccttaagattttttttctttagcactgactttggacactctcatgactatatgtgttggtgaggttcactttgtatagtatcycgcaggtgttttctggattttttgtatcttggtgtctaagtttctggcaagattaggaaaattttc

SEQ ID NO: 422693 - DNA, 540 bp, Homo sapiens
ttgggggattcttttgtttgtctacaaccagctaccatagaaaggaaggtgatagcctgtttccttacatttcattgaaagtctatgtaatcagcctataaagagagtcttctagggaatgagagtagattcttataaggaagctcttcagacacctgttaagtgtatacaggtttgtcagtaaaaactgtgaaaagagttatattcctattttgaagatatgttgcatgctcaagataaaattaaaaaggaagaggcatttgataycaaatgtcatctatttgagctgatatgccttctatactcagttataaaagtcttatggatgggttataagtattaaacatctttatggccctgataataactaaaatagtattggatgaaacaggaaaatagaaaatgctagttaaacatattgttatatttagttgaaaaatacatatactaatgtcttctatttgtcagtttctatcaattaccaagacatgattttaactttactaggaaacgttcagagttataagttaatcatttgaa

SEQ ID NO: 422694 - DNA, 540 bp, Homo sapiens
ttgggggattcttttgtttgtctacaaccagctaccatagaaaggaaggtgatagcctgtttccttacatttcattgaaagtctatgtaatcagcctataaagagagtcttctagggaatgagagtagattcttataaggaagctcttcagacacctgttaagtgtatacaggtttgtcagtaaaaactgtgaaaagagttatattcctattttgaagatatgttgcatgctcaagataaaattaaaaaggaagaggcatttgatatcaaatgtcatctatttgagctgatatgccttctatactcagttataaaagtcttatggatgggttataagtattaaacatctttatggccctgataataactaaaatagtattrgatgaaacaggaaaatagaaaatgctagttaaacatattgttatatttagttgaaaaatacatatactaatgtcttctatttgtcagtttctatcaattaccaagacatgattttaactttactaggaaacgttcagagttataagttaatcatttgaa

SEQ ID NO: 422695 - DNA, 643 bp, Homo sapiens
tgggggattcttttgtttgtctacaaccagctaccatagaaaggaaggtgatagcctgtttccttacatttcattgaaagtctatgtaatcagcctataaagagagtcttctagggaatgagagtagattcttataaggaagctcttcagacacctgttaagtgtatacaggtttgtcagtaaaaactgtgaaaagagttatattcctattttgaagatatgttgcatgctcaagataaaattaaaaaggaagaggcatttgatatcaaatgtcatctatttgagctgatatgccttctatactcagttataaaagtcttatggatgggttataagtattaaacatctttatggccctgataataactaaaatagtattggatgaaacaggaaaatagaaaatgctagttaaacatattgttatatttagttgaaaaatacatatactaatgtcttctatttgtcagtttctatcaattaccaagacatgattttaactttactaggaaacgttcasagttataagttaatcatttgaaaatggatttattaaaatgtcatgaataattcacataatttgatagacattatttctataggatatacttgaataagcttaaacaaaagaactgtattatatctg

SEQ ID NO: 422696 - DNA, 619 bp, Homo sapiens
tattgatgttaattccacttttatgtaaacctactttttgattctagggtatttttccccactttgtggaaggcaataaacaactatgtttgcctcctgcaagattctcgatgggayatatgaagacaattatcctgtttgctttattcctccttttttccgggctatggaaacacagtcatttcaaaaattatttatggctatgcactcatttatttgctcatctatatatctctttcctaatatgattagtatccagggcaatagtaaggccagggagaccaatataaggagttggctactatgagtgccaaaatttcagccaactaacaaggtgtcaccagggtgagtttctatctctacatacagagactgagatttcctagaggagctattctagatacacagttgatgagaattcttagtgtgtgggtaggagaatgaacgtaacaaagctatggactaattatttttgtatatatttcctatctggatgctatctcaagaatccttttcgaattgaagctatatagagaatgtaacattttatgtaggattcttcttacagttttgtctactagcaggaacaatgaacaccatttcatacccaacctcctgt

SEQ ID NO: 422697 - DNA, 619 bp, Homo sapiens
tattgatgttaattccacttttatgtaaacctactttttgattctagggtatttttccccactttgtggaaggcaataaacaactatgtttgcctcctgcaagattctcgatgggacatatgaagacaattatcctgtttgctttattcctccttttttccgggctatggaaacacagtcatttcaaaaattatttatggctatgcactcatttatttgctcatctatatatytctttcctaatatgattagtatccagggcaatagtaaggccagggagaccaatataaggagttggctactatgagtgccaaaatttcagccaactaacaaggtgtcaccagggtgagtttctatctctacatacagagactgagatttcctagaggagctattctagatacacagttgatgagaattcttagtgtgtgggtaggagaatgaacgtaacaaagctatggactaattatttttgtatatatttcctatctggatgctatctcaagaatccttttcgaattgaagctatatagagaatgtaacattttatgtaggattcttcttacagttttgtctactagcaggaacaatgaacaccatttcatacccaacctcctgt

SEQ ID NO: 422698 - DNA, 554 bp, Homo sapiens
gaattcttagtgtgtgggtaggagaatgaacgtaacaaagctatggactaattatttttgtatatatttcctatctggatgctatctcaagaatccttttcgaattgaagctatatagagaatgtaamattttatgtaggattcttcttacagttttgtctactagcaggaacaatgaacaccatttcatacccaacctcctgtgtactaaccttcaacctcctttggtggagaccttccccaatatcaccaaccaaataaaaacaaagacaggcacagaaagttgcaaacacaaagagctgagattttttgagaaacttccattgttcagtaagtatcataataatttatgaatcattaaaataaaattggattttgtagttttatagttgtttagtcatgaattttaccagctcttagtcttactatgtaatcatttttcattttcattgtccttatatccttctcacaaaaatacatcacttcaaatcagagtcacataaagtctttcatttagcattcataaaagttatataaggcacctagctgaaacc

SEQ ID NO: 422699 - DNA, 554 bp, Homo sapiens
gaattcttagtgtgtgggtaggagaatgaacgtaacaaagctatggactaattatttttgtatatatttcctatctggatgctatctcaagaatccttttcgaattgaagctatatagagaatgtaacattttatgtaggattcttcttacagttttgtctactagcaggaacaatgaacaccatttcatacccaacctcctgtgtactaaccttcaacctcctttggtggagaccttccccaatatcaccaaccaaataaaaacaaagacaggcacagaaagttgcamacacaaagagctgagattttttgagaaacttccattgttcagtaagtatcataataatttatgaatcattaaaataaaattggattttgtagttttatagttgtttagtcatgaattttaccagctcttagtcttactatgtaatcatttttcattttcattgtccttatatccttctcacaaaaatacatcacttcaaatcagagtcacataaagtctttcatttagcattcataaaagttatataaggcacctagctgaaacc

SEQ ID NO: 422700 - DNA, 527 bp, Homo sapiens
gggcactctgaatccctggatgtctgcctgggcatgaagtggagatggtccccttgcacaaggatctctgcacaggaaggaaggggcaacccaggctgccagcccatgtgagcaagtgctttaaatgcttggcgatctgcttatgtgtagaatggagaaggccctgctacaccacagtctcaaggaagtaggctgggtcacccaaaaataacacacacagaccagttctagttcatcaagctggcgctggctraaagtctcattgtccaggagaaaccacagccatagcagctctcctcttgcccaaggcctgtgactggggaaaacacaattccagtgcctactgttgagatgttttccacagttctagctgtggaggaccctaccctgatccagagcaggtgctccaatctctatcaataatgtttgatatgagttggcccatactcaactgaaaataagaaaaatttttatgtgcaaggatagtctctgaggttgagcatttttgttcagtgatgaggcatttg

SEQ ID NO: 422701 - DNA, 552 bp, Homo sapiens
  misc_feature (1)...(552): n = A,T,C or G
nnnnnnnnnnnnaaaaccaaaatcatatttccctaatcatcaacatctatgttgtatcccaggctcagtctcaaatttattgagtcccatgtgtacagtatgggatacctccactgtgatcccttcaaaactggcatttatactgaacctataacctcctcttcagatttcttcttatggcacacacagatacscagattctcacacttctacctccgagatcattttggagctaccactactctccttcacaaataattcaatcccatatactttactaaatatgtattgaactctattaagtgcctgagaaataaagctaaataaaagaacaatcctaccttccagagactcagagtgtggtgtgaaagaaagacacatatgcaagtgactacaacacaagttggactaggatcagctctagcgtagacatgcagaatgaaatgactgaggagtagagtttcaacaggcagaatgtgagggaaagcattcgaagcaactgtgacaacatgagtacaagcacagcgtgagagactagtgagtatattcaag

SEQ ID NO: 422702 - DNA, 609 bp, Homo sapiens
  misc_feature (1)...(609): n = A,T,C or G
ctcctggtgtctacctgcttggtgcactccctcagttctagtgggtgtctctcttgatatgttatcagagaagcctctttttgacctattccatcaatgatcagcccctacaccggagcttctttactccctaccttgctgcattgtcctttgtggtatttatcactctctaaaacctctcttcacttgcttattgtctctttgaaccctccattcccataccacactgttcttcctgcttcctgcttcttggtctgctggggcatcctcatttctgacccttaccaagtatccttgcaaagctggcctctgagcctcaaggagccccaggatatscttgtagtaaattcctttcttcttaagttagtcatagtctaaccacaatcaatcagcatatgctaagaatcttaaactgacataccagatctctgttttcttgancctaaaataaaaggggattgtttgtttacatttcaaagacccttttgccacaagagaatcttttcaaaattgagctttctgattcttaggagaaaactacaatccctttggaaggtgaattgaagtcattttctacttacaattacatctcatgatttaaaaaaaaaa

SEQ ID NO: 422703 - DNA, 617 bp, Homo sapiens
  misc_feature (1)...(617): n = A,T,C or G
ggattgtgcttttctcaagaatacactgcatctgatttttctggtgaattgggrtcacattctgctgataagagttaagagttaatagtatttagtaatcactcactcatcaggtattatttagagactctgcctcagttctctatttcatcttttagtggcctnaaagagctaattcagtgctttactttagcaaaagcatgacttaatcactgngaataaattaacaatagagtaaaaataggatttacctgcatttctgtgtcagtgttgagctcattgaattgtccttggtaaaaataaaaattaatataaaagtgaattataccatgtaaatatctttgtgtgtatatcaaggttttatttttaaagtacttatgattcattgtttttaatggtacataatatatttattactattggtattcattatatcattaagttctaagcaaaagtaagttttgtctaactgtacataattgtgttgtcatttttatgggaaatgctttatcagcctaataacagagtgcttgcaaatccataactaaacactgaaaaacttcacttgctcaccaaagcttctgttactatttgaaagtaatatatgtgcatgctct

SEQ ID NO: 422704 - DNA, 549 bp, Homo sapiens
catgactaatgctgaatgtgttgcaagcttgctttcagttctccctctcccttcttctctgattaactttataaagtttatagggacagttttaccatctatctctaaagttttggttagctgtaatagcctatattcttttttcttctgatgtaagttatggtaatgagacatctttcaaactgtttgaaattaactgtggattgaaaagtaaatcaaacatatcataaaaataaacattgtcagaagatattaccagcatttttcaagcagtaacggtttctgaagtaatatgattataaatcccttttatgccagtcagcctgaatatctccctccctctcctccctccctctccactctttctctgctttcctctctccctctctcgcttatctcactctgtctcgctcatgtccatatgcctcatacagtgtattgtagggctcacaattattttcaaggctatttccatcattttaatgatctgaatatttagaaacacctagaagtatgacatattacytaaatttgcagtagcgttttagt

SEQ ID NO: 422705 - DNA, 543 bp, Homo sapiens
aataatactgataaatataaagacaaaacaagttactaatacttctgcaactcagagagggccactattatttctctcccctgtgtgcatgagttatataattggcatcatactatatttccagtttagtattcagtatggataatttttaatagccatggttaatctagaagattcatacattatgtatgagcattgttggaaacaaagtttcattaaatgcacaaacctgtgttttctttttttatataaattrtcataatgccttaatttcatgaattagttgtggggaattacacttgccagttgaacataatattattacttatactcagcttccaggacagggttagagcacatacacaaaaatgcacacaaacaggtaacacaaaacacacattttggggacaaacatgagcacaaactccagctttgttacttgtctggctgtgtgacttagggcaagttactccaactctttgtgctcagttctctcacatgtaaaatgagaatactattaatacctacctgaacgtgcttagg

SEQ ID NO: 422706 - DNA, 600 bp, Homo sapiens
tacatgatgtcaccaaacaggaatgtgagatgatgcaagacagtgtgaatatgactgctagatggatgaaggagaagccttttgagtcctgagaacggaccaatttgtgagatgggtgggtttgagaaagacttatagagaaggagagtaaactaggtttccaaataggattttaatattcaaagaggagagaaaatttcaatccaggaattgatgtaagtaaaagtgcagtggtctttatttttgttaccccagtttttcaaggtaaagttctaggagaacctgtttttctctckcagggttcctctgacttcttcactcctggacactgccatctcctcttcagtgtcccccaaatgccatttctcttcagctggtgatgggctcaggggagccatctagtctatctcagacccattcttgatcagtagattggtcactttatgttgcaggcaaaaacctgctgacagtggaaagctaagttgaagagagaatgttgaaatataagtcctagatcggtggttgaaattccaaactttgatttttgtaagatctagggtaagccaaagcatgcttctgaggctaatggtctgacacaat

SEQ ID NO: 422707 - DNA, 453 bp, Homo sapiens
acagaaacaaacaaacaaacaacaagaccctttatgttacctcctagaggtaggagtcaaggaagagaggcaccttaaaagttgaacaggaaagagagcaatacatttttattaaaaaattgtttggcatagcaaggattcaagaccctgtctctaaaaggaaaaaagtatttggaagcatatgcttttggttacttctcttttaacattgattaaatgcttttctgtacaartgacagtctcattatagaaaaggtttttaaaaatctgttttatccatctccccagtgtatatgctactctaaaagtttacgtcctttgggaggagtaggtgctattttaagtaattacttgctttaatgtattcagaccttagagatggcttcagggcccagtacatagggttctcccaaagaaatacacaaaccttcaaaagaatttaattaatttatg

SEQ ID NO: 422708 - DNA, 453 bp, Homo sapiens
acagaaacaaacaaacaaacaacaagaccctttatgttacctcctagaggtaggagtcaaggaagagaggcaccttaaaagttgaacaggaaagagagcaatacatttttattaaaaaattgtttggcatagcaaggattcaagaccctgtctctaaaaggaaaaaagtatttggaagcatatgcttttggttacttctcttttaacattgattaaatgcttttctgtacaagtgacagtctcattatagaaaaggtttttaaaaatctgttttatccatctccccagtgtatatgctactctaaaagtttacgtmctttgggaggagtaggtgctattttaagtaattacttgctttaatgtattcagaccttagagatggcttcagggcccagtacatagggttctcccaaagaaatacacaaaccttcaaaagaatttaattaatttatg

SEQ ID NO: 422709 - DNA, 599 bp, Homo sapiens
ttagctatttgtaataaaaagctgaaaacagtagcttgaatcaatggaagactttatytttctcctaatacagctgacaataatgttgttgcctttatgatatcaaagccccaggttccttttatctttctgcttaacctgccttggcaaatgcttgctgcttcatagtcacatgatggctgacttactgtaaccttcaggtagaaagaaaggaagaggtaaagagataaaggtacatcccagctgattcagtatctccttctctttgaaaactctcacagaaactgccctataacttctactgacatctcatctcaatggctagatcagtgctatataacaaaactttctgcaatgatagaaatgttctatatctgaactatccaagatgttagctactagccacttatgactgtttagcatttaaaatgtcacttgtggaactgacaaaatcaacttttaattttacttgattttaataaatttaaatttaaatagatacatgtgtctagtggctaccacaataaatagtgcagggctagaccttaatcacatcactaccccatctgcaagaaaagctggaaaatgaaggtttggag

SEQ ID NO: 422710 - DNA, 599 bp, Homo sapiens
ttagctatttgtaataaaaagctgaaaacagtagcttgaatcaatggaagactttatttttctcctratacagctgacaataatgttgttgcctttatgatatcaaagccccaggttccttttatctttctgcttaacctgccttggcaaatgcttgctgcttcatagtcacatgatggctgacttactgtaaccttcaggtagaaagaaaggaagaggtaaagagataaaggtacatcccagctgattcagtatctccttctctttgaaaactctcacagaaactgccctataacttctactgacatctcatctcaatggctagatcagtgctatataacaaaactttctgcaatgatagaaatgttctatatctgaactatccaagatgttagctactagccacttatgactgtttagcatttaaaatgtcacttgtggaactgacaaaatcaacttttaattttacttgattttaataaatttaaatttaaatagatacatgtgtctagtggctaccacaataaatagtgcagggctagaccttaatcacatcactaccccatctgcaagaaaagctggaaaatgaaggtttggag

SEQ ID NO: 422711 - DNA, 599 bp, Homo sapiens
ttagctatttgtaataaaaagctgaaaacagtagcttgaatcaatggaagactttatttttctcctaatacagctgacaataatgttgttgcctttatgatatcaaagccccaggttccttttatctttctgcttaacctgccttggcaaatgcttgctgcttcatagtcacatgatggctgacttactgtaaccttcaggtagaaagaaaggaagaggtaaagagataaaggtacatcccagctgattcagtatytccttctctttgaaaactctcacagaaactgccctataacttctactgacatctcatctcaatggctagatcagtgctatataacaaaactttctgcaatgatagaaatgttctatatctgaactatccaagatgttagctactagccacttatgactgtttagcatttaaaatgtcacttgtggaactgacaaaatcaacttttaattttacttgattttaataaatttaaatttaaatagatacatgtgtctagtggctaccacaataaatagtgcagggctagaccttaatcacatcactaccccatctgcaagaaaagctggaaaatgaaggtttggag

SEQ ID NO: 422712 - DNA, 486 bp, Homo sapiens
atctacactcctcttctgcagccttcactggcctctcctatctccaagagccatcactgtccttctaactttccctatccttataggctcatgccaagtccatctcttccaaatccactgttttaatatgtgttaggaaatacatattgtatttttacatacatattgtacrtaaaatactatgcaagctacgatagaatgggacatctctaatatcagtcttgattgtgaggtataatgcaaaaagactctgtcaaggagacacataattcccgattcaaatcctgactcctccattcactgaccatgtatccttgggcagggtatttaacgtctcagatggtaatatctatcttgaagaggtgctgtaaagagcagattaaataatatatgtaatgtgattaccacaataccaggtatattgtggatgctctgatagtggtagctattggtattgtgctctgacttatctccagataaaatcat

SEQ ID NO: 422713 - DNA, 466 bp, Homo sapiens
tggcacgtgtatcaaactgtcctccattttcattgctatatggcattccatcttatgaattgaccacgatctagttattccccatccttttcttaggctgcatgttgctgttgttwtttctaatttactcattcaggattggaaagaaatctatccagctggcatttaccagtggacagattaagtggagtctcatcaatccgcttcactattcacttagtgctagcatttgctacttctcagttgactatctgaaggtcaccttgatatacctgacttaagttgctgaatccagcaggcatttatttagagtagaccttccaggctagagctggaactctgacttaaccacaagctcagcacccagtgtagtacatgaaagacagcacctcctacactgcactgtttcctgggcattctcacttcggctccctacaacacttttcatagtaaataaaatattccc

SEQ ID NO: 422714 - DNA, 596 bp, Homo sapiens
  misc_feature (1)...(596): n = A,T,C or G
ctggggtctctcctataagggcactaatttcattcataagggcccttccttcatgacctcatcatctctcaaaggcccaaccaccaaatatcatcaaaattngggttagggtttcaccaaataaattttggtgggacataaacatttagtctatagtatattgtgtatgtatttctatgtgcagtasattcatatctgatttttactttgatcctctcaaaaaatggaatatttaatgagagatgcagatgagaaaacagttaagtataacagagtatgataagcatcatgatcaaaatatgaataggatattactggaagcacagacctaacctgaaaggtagactgaaagaaggcttcttagaggggttaaccctgaggcaagtcttctttaccagcaacaaccccagtgtacatctactttcccagtgtaattattaatacagccccctatgactatcaagaatgtcatggtttgaatggtaatatggtcttgggtatatacttttccttgtcctctacagagagaagatggggtagtgtgataattctagaactcttttgatagttatggattttatttatgaaatgaaata

SEQ ID NO: 422715 - DNA, 571 bp, Homo sapiens
ttctggcccttcctgctacaaatctgtgaagggaaaggagtattttcaggccagcctacccacaactcccatataccagttgttagcatgcatgcagggaggatccttagagttgctaatccagtcactaccttcctattttacaggtggggaaacaggtccatggagagagagtaacccaggtctcctgcccctcactgtagggaccttgtctgtttttgggccagaattctgtgagcttgattctccaaaagcaygatttttttcttggaaataataagcttgacatcataggttgtaatctattcgtttctgggttttgtcgggcctcagatttgaaatccagattcttccagaagggtctcagacatacactggagtttctttccagcctgtgaatatggcagaatctagctctgccacataccagctgggattgataccttgaacaagctacatatacactgtgagtcttaagtttctttctttgtgatctggaaaaagtatccatgcctgctaccctctcagagttgggaggatccagtgaggtaaggtgagatctttgacacat

SEQ ID NO: 422716 - DNA, 514 bp, Homo sapiens
tactaccacaatgttaaaattgattttaaatgattgataggragaataattgggtccaggaacaatcaaactattaacttgtaaatagttcgtgaaatttaaatgatcctttgagacagtctttatacatggaaaaaggtctgctcgggtgtagccacatcttggtcttcttttctgctacagataatgagataacgtggaggggaagaaaagaaaaacactgtcgtcctccttggtgggtctggatcgtaggcagatacaggaacttcagcttctttggaagagaaaatgaagagagaggtcagagagaccaatgaggcttcttcagtttagcatgtcaaaatggcatatttggcggtcttgctttctgaatcccaacacttacaacatggtggctgggttaaagaacacgcatcctaataaagaaatggtgctggttgggtgcagtggctcacgcctgtaatcccattacttcgagaaggctaggtgggtggatcatctgaggtcaggagtt

SEQ ID NO: 422717 - DNA, 514 bp, Homo sapiens
tactaccacaatgttaaaattgattttaaatgattgatagggagaataattgggtccaggaacaatcaaactattaacttgtaaatagttcgtgaaatttaaatgatcctttgagacagtctttatacatggaaaaaggtctgctcgggtgtagccacatcttggtcttcttttctgctacagataatgagataacgtggaggggaagaaaagaaaaacackgtcgtcctccttggtgggtctggatcgtaggcagatacaggaacttcagcttctttggaagagaaaatgaagagagaggtcagagagaccaatgaggcttcttcagtttagcatgtcaaaatggcatatttggcggtcttgctttctgaatcccaacacttacaacatggtggctgggttaaagaacacgcatcctaataaagaaatggtgctggttgggtgcagtggctcacgcctgtaatcccattacttcgagaaggctaggtgggtggatcatctgaggtcaggagtt

SEQ ID NO: 422718 - DNA, 514 bp, Homo sapiens
tactaccacaatgttaaaattgattttaaatgattgatagggagaataattgggtccaggaacaatcaaactattaacttgtaaatagttcgtgaaatttaaatgatcctttgagacagtctttatacatggaaaaaggtctgctcgggtgtagccacatcttggtcttcttttctgctacagataatgagataacgtggaggggaagaaaagaaaaacactgtcgtcctccttggtgggtctggatcgtaggcagatacaggaacttcagcttctttggaagagaaaatgawgagagaggtcagagagaccaatgaggcttcttcagtttagcatgtcaaaatggcatatttggcggtcttgctttctgaatcccaacacttacaacatggtggctgggttaaagaacacgcatcctaataaagaaatggtgctggttgggtgcagtggctcacgcctgtaatcccattacttcgagaaggctaggtgggtggatcatctgaggtcaggagtt

SEQ ID NO: 422719 - DNA, 514 bp, Homo sapiens
tactaccacaatgttaaaattgattttaaatgattgatagggagaataattgggtccaggaacaatcaaactattaacttgtaaatagttcgtgaaatttaaatgatcctttgagacagtctttatacatggaaaaaggtctgctcgggtgtagccacatcttggtcttcttttctgctacagataatgagataacgtggaggggaagaaaagaaaaacactgtcgtcctccttggtgggtctggatcgtaggcagatacaggaacttcagcttctttggaagagaaaatgaagagagaggtcagagagaccaatgaggcttcttcagtttagcatgtcaaaatggcatatttggcggtcttgctttctgaatcccaacacttacaacatgrtggctgggttaaagaacacgcatcctaataaagaaatggtgctggttgggtgcagtggctcacgcctgtaatcccattacttcgagaaggctaggtgggtggatcatctgaggtcaggagtt

SEQ ID NO: 422720 - DNA, 562 bp, Homo sapiens
atatatagattagcagaaaggattacaaaaaaaacaaataaaccaagatttaaacatatgctgcttttaaaaaacccacctaactggtaaagacctttatagactgaagataaagtgctggaagaagatattccatgcaaacagaaaccaaaagccagcaggaataactctaccaatctcagagaaaacagactttaaatcaacaacataagaaaagacaaagaaagtcattatataatgataaagggatcagttcaacaaacaagcyaacaatcctaaatatatattgtgctcaacaccagaacacctagaatcataaaagagacactgctagacctaagaaaagagatagacagcaatacaatagtgggtgatggcaaaactccagtaacatcactagacagataatcaaggcagaaaatcaacaaagaaactatggactttaattggactatatgaaatggacctaacagtcatttgcaaaacattttacctagtaactacagaatatactttcttcttatctatatatagaacattctccaaaactgactatatatta

SEQ ID NO: 422721 - DNA, 562 bp, Homo sapiens
atatatagattagcagaaaggattacaaaaaaaacaaataaaccaagatttaaacatatgctgcttttaaaaaacccacctaactggtaaagacctttatagactgaagataaagtgctggaagaagatattccatgcaaacagaaaccaaaagccagcaggaataactctaccaatctcagagaaaacagactttaaatcaacaacataagaaaagacaaagaaagtcattatataatgataaagggatcagttcaacaaacaagctaacaatcctaaatatatattgtgctcaacaccagaacacctagaatcataaaagagacactgctagacctaagaaaagagatagacagcaatacaatagtgggtgatggcaaaactccagtaacatcactagacagataatcaaggcagaaaatcaacaaagaaactatggactttaattggactatatgaaayggacctaacagtcatttgcaaaacattttacctagtaactacagaatatactttcttcttatctatatatagaacattctccaaaactgactatatatta

SEQ ID NO: 422722 - DNA, 472 bp, Homo sapiens
ttaaaaaacctacattattattttctagggtattactcagataaattcatttgatgatagctagtggatcttttgaagatatcattttcaattcaacaaaagaatggtttcagcatactctaagaaattagaaatcaatccccaatattatatattttatctcctttatttaactgctctaggtcatattattattattagacagaktcttgctctgctgccaggctggagtgcagtggcacgatctcagctcactgcaacctccgcctcctgggtccaagtgattcccctgcctcagccccccaggtagctgggattacaggcatgcgccaccaaacctggctaatattttgtattttagtagagatgggatttcaccatgttggccaagatggcctccatctcctgacctcgtgatccacccggctcgtcctcccaaagttctgggattacaggcatgagccactgcgcc

SEQ ID NO: 422723 - DNA, 634 bp, Homo sapiens
agcaggaagtaggtcctagcctggaataggaccagattccagattcctggaatattagtcaggatgaagagaggacagagctgagcagaaggtatgtcaggtagcagtccagtgatatatatgtatatgtctccaaaccatggctaagtctgtcaatcaggaaatcatttaaatgaggccaaaacagcttgtggccaaaacaacagtaataaaaacttcagggaccaaagaactctggaacatgggagatgtaaatacagaacaaaagcacaggttttcatttatgtttcttgttgtttatatatatatatatayatatatatatatatatatagagagagagagagagagagagagagagagactttgattcctccatgatttagtggactaatgtggctctctgtgtattatctgtgggctcattttgaatacacatgccaggacatcgtctagaatgggcaacttgagggaaataaatacatacaaaattgacatggtgtaaaaccaaacttcactttaatctttcacttttgctgctgatgaaataagattcagagaaatcaaaacacagtgaccagaacacagtgattctgatatcaggttcggtgtgtgttgcattagctgacagttg

SEQ ID NO: 422724 - DNA, 634 bp, Homo sapiens
agcaggaagtaggtcctagcctggaataggaccagattccagattcctggaatattagtcaggatgaagagaggacagagctgagcagaaggtatgtcaggtagcagtccagtgatatatatgtatatgtctccaaaccatggctaagtctgtcaatcaggaaatcatttaaatgaggccaaaacagcttgtggccaaaacaacagtaataaaaacttcagggaccaaagaactctggaacatgggagatgtaaatacagaacaaaagcacaggttttcatttatgtttcttgttgtttatatatatatatatacatatatatatatatatakagagagagagagagagagagagagagagagactttgattcctccatgatttagtggactaatgtggctctctgtgtattatctgtgggctcattttgaatacacatgccaggacatcgtctagaatgggcaacttgagggaaataaatacatacaaaattgacatggtgtaaaaccaaacttcactttaatctttcacttttgctgctgatgaaataagattcagagaaatcaaaacacagtgaccagaacacagtgattctgatatcaggttcggtgtgtgttgcattagctgacagttg

SEQ ID NO: 422725 - DNA, 594 bp, Homo sapiens
tacagggattacaattcaaratgagatatgggttgggacacagacccaaaccgtatcagtcatgctgttactgagcaatagactataaatagttttcttcccgggaaactcaaaactctttttgcgtacatatgacaagttgcaacttagttttttgccaaagaatttcattcctaatgattgaccaatgatgaatcattcatccactgattgagacatcaacaaatgtttccctttttaaaaattaaacctttaattttgagataattatagattcatgtacaaatggtctccagagaagcagagccaataagataaatatttggacttataaaaagagatgtattttataagagattggctcaggtggttataaaggctaagaagtcccatgatgtcactggaggcacaggaaagacagtggtgtagttctagtcaaaacctacaggcctgggagtcaatggtataaattctggtccaagtctaaagacccaagaaccaagagtaccaatgcctgtgggcaggagaagatgatgccctagctcatgcagagaacagatttccccttcctttccattttcttctatgaaaacc

SEQ ID NO: 422726 - DNA, 486 bp, Homo sapiens
aatttattttaaaagtagatgtagtgtaaatatgaccaagaaaaacattactacataggctacccttttccccaagcarttactaggtgtgtctactgaactatctaatagataaaggcaaatggcctcaaatatttaacttgtatagaaatacatacttctctgcaagcagagatacacatgtattaacataatgtaactcaaatgtacaatcaaaaatatatttactgtacaacttataaatgcaagtctataagtacatgggagtgatcaaataaagatgacccagttataaataaactacaacaacaaaaattttgaaaataacaaagcacccagcagaaagtctcagtgtacatggtgtcagaatctatggtaactataagttagctattgatagtttagggagggcatgtctacattttctctgcatcatattaagagaactcaaatcacataaaacttcagccttaattaaagtaactc

SEQ ID NO: 422727 - DNA, 351 bp, Homo sapiens
aaaccatcacattgagtagtttgatctcttttccctacaggaagacatataatcagctttctttgttctgatacaaccattcaaaaaagaaaaacaaaggaaggagggatgatttaatatgtggaaaagctgtactaccagcaaagatttggtagtacaactcttgccatcttccaatcacacattgttcagatgtgctttgtaaaagagtgttttgatctttaactagaatttcagagagtttttcaaagcaatatggctctttataatctttgtgtcaacrtcattatcttttttacttataggaagacctttcccccttcatgatgcataaaagaaaagcaaacattt

SEQ ID NO: 422728 - DNA, 649 bp, Homo sapiens
ttgtaatgttgacatttggtattaaggtaattagttctggtttcttaaagaaaaatctcagctgcttaatgcaacacaggttcatttcccacacacataaagattgatgggggttgggaagcctccttccatctggaagtgacatcatctggaatatgtggcctccaaggacaccatggcagtagaaaagaaagacacaagaagacactaggtcttaaaagcctcagcccagaagtggcacacactaattctgctcactgtctactctgctcacaagtctcaaaattaactgcaagtcaggctgggaaaagtagacaaaagcagggaatatttagtgagcaaaaatagtctctgcaacatgtttgttatgctaaatatacttaaaaccttattgtttartgtattaacttcaaacagcatcttttgatgccaaggtaaaaatgcactgaagatgtatacactaatgaatgaatcgtcacatcaaccatacatgtaaccaccatagatcaaaaattagtacattattggcaccctagggctccctttgtgcccacaatcaatcgctactcattctcccctttctggaggcacagatatcttgatgtcaaatactataatttagctttgcttgttttagaacttatgtaaa

SEQ ID NO: 422729 - DNA, 649 bp, Homo sapiens
ttgtaatgttgacatttggtattaaggtaattagttctggtttcttaaagaaaaatctcagctgcttaatgcaacacaggttcatttcccacacacataaagattgatgggggttgggaagcctccttccatctggaagtgacatcatctggaatatgtggcctccaaggacaccatggcagtagaaaagaaagacacaagaagacactaggtcttaaaagcctcagcccagaagtggcacacactaattctgctcactgtctactctgctcacaagtctcaaaattaactgcaagtcaggctgggaaaagtagacaaaagcagggaatatttagtgagcaaaaatagtctctgcaacatgtttgttatgctaaatatacttaaaaccttattgtttaatgtattaacttcaaacagcatcttttgatgccaaggtaaaaatgcactgaasatgtatacactaatgaatgaatcgtcacatcaaccatacatgtaaccaccatagatcaaaaattagtacattattggcaccctagggctccctttgtgcccacaatcaatcgctactcattctcccctttctggaggcacagatatcttgatgtcaaatactataatttagctttgcttgttttagaacttatgtaaa

SEQ ID NO: 422730 - DNA, 510 bp, Homo sapiens
aatttttattttctaattaaacatactgtcaacttatggatttatcattaatgattctttatacatttttcaagggtctgattaatatgatcaatattctagtgttaatagtcggagaatatcactttctgactaggtgctacttcttaatgatgtcgttctgaaagcaacattcgtcctttgtaagtttatgaatcaaggccaagaaagcaactcaatgaaagcaagtttcttaaaatgtaatgaaagtgacaaaaatccaaartttgattattgggtaagtagtttctcaggttttctgatgattatgcctctgtgatactaaaaagaatttttgcataatgaacaagaatctctctacatgagccacctgagaggcaggaaaaatggtctgtgtcaagtaactacacacaaaaatgaactaaacaacagccgtctgtacaaaaaaggacaccattttaagtatagttttagggaaagataaataaaattgtaattttacaccattct

SEQ ID NO: 422731 - DNA, 531 bp, Homo sapiens
aacttatagtttagctttgaaacaaagatgacaatagtcctttcaccaaacaatctccttactacctgtggastagactgtttaaagccacaagtttagaagttatggtaaccttactaaatgaaagatgtagctattttcattaaaccaatattaatgtcttatttattaaaaattacacgagcaaagatcattctgttttgggctgggtttatggttttgtaaattctatgccaaattttgacgccttatagtatttggcagagataagtatgaaattccttgattcagaaatgcaaacaaaatgtatgctggcgattctcaagacgtttctaatattactttatcaataattttaaagctagcttatttactaaaaattttacttaagttacataaacttgaaaaaacatttggctagtcttttttcttaataaagtatttgatttaaatccttttttaaagctaattacagctcttttttatatttttagtagtgaaacattttgtacacaacacaaaaatacatag

SEQ ID NO: 422732 - DNA, 521 bp, Homo sapiens
gcattgtccctgctgtctgccatccatgcaccattttaaaaatatatttttaaaatttagaagttttaactatacagaaaagttgcaacagtagtgcagagttcctagatgccttgtttctactttcctctgtgattagcatcttatattactgtagtgcatttgtcacagttagtaatatggatacattattattaactgaagtagcactttgttcagactcccttttttttttttttttgcctaatgtcctttttctcttccaggatgtcatctgggataccacattacatttagtcttcatgtcccmttacactccccttggctgtgacagctgctcagaccttctttgcttctgaccctttgcagttttgagtactggtcagctattttatagactatccctcaattgggatttgtctgatgtttttcttataactatactgggattataggtttgggaggggaaactacagagagaaagcacctctttcatatcaagggtacatattgtcatcatg

SEQ ID NO: 422733 - DNA, 465 bp, Homo sapiens
gctctggaactgggaatggaaagagttatttctctaaaggtgctgctgctgttttatgagcaggacatgcaccagatgggagagattccctctggtcttgtctagcctcactggcataaaacctctaccccagcagtgtgctgatgcaagagcmattagggccccagtgctctcaacgtgcttgtcctgggatggagcttctgctttagcagtgagggtgaatggggcaagagagctccagacattcttgctaaaatccaatttctgccacatggaccttagtgaaatgagaaattctggtcccgcctgaactagggagatgtcatagactgaaaattgggaaaaatagatgtcctgtttttttcactgtatccacccagagtagaactttcattattctgagctgcggttttgggtagcaagtgggcctttgttcaagcatcacagatttgctcttactgagat

SEQ ID NO: 422734 - DNA, 554 bp, Homo sapiens
aagaacacctcaggtgagcatgcgcaaaattttggtaagcccaaggtactgtgtgttggcaacttactgagaatgcagacagcccaccccaaggactttttggtgggagaagtaacacatgaccctgcaagcatgtcggtgtataaaaccccaaatcaaaaggtcaaactgcaaacttgatttctgaagtaacttgcttggccctcttccgagtgtactttacttttttcattcctgctctaaagctttttaataacctttcacttctrctctaaaatttgccttggcctctccttctgccttatgccactcagtcaaattcttttttctgaagaggcaataattgacattgctgcagaactgtatggattcaccaccagtaacacacttaacttcatattgcataatatttcacttatttatttatttcacttatttaatttattgtcaacctctctctccccccattagaatgtaagcttgagtagaccaaaaaaattgtctgtgagtacatagttttgttcctagcactttaaaaaatgcctggtacatag

SEQ ID NO: 422735 - DNA, 573 bp, Homo sapiens
caatataactgtcagtagaaatgagagcatagacaggctctggagccagatcacctgtgttgtaaaccaattttcatcattttagccttattatttttgttgtacctatttatttctgaagtcctactataagacttttgtgattataattaaatatgatgtttgcattgttgtgattaataattttacatgttaatttaggaaatatccttctttcaaaatcatgcacaactaattcaaatattaatttaaaaattattgtcaggtttttaattatttaagaaatatctgcattgctatgtacgatctatcccaaaagtgtcagtcatgtgtcatacatgtgaataaaccctggggacttactattaaggaagaaaacatatcactggaaagtaatgtgtcatatgagtagtaggttttacaytgtgtaattcccaaatctttgaagccatgacttacgtgactgacagaatctgacaactgagacttttagcaatcataaatgataccttatgagaaattttccatctcacagtgagatactttcctggcaggtgaccaagtgtaagttag

SEQ ID NO: 422736 - DNA, 564 bp, Homo sapiens
acacacacacacacacacatacacacacacaatatatatatatataaatcaaaccagaatagctataaagataagcatctctgctcatrgttcttatcttctcttagtgacagtgctcataggcatggatttaatctagagctctagcccatcacacacaatgcaagaagaggcaagaggtttgggccacccactagggaacctgtctgtctccaaggccatccacatatgcacatgtcttttgtaagcaccctggagccttgacctcaccacagatgactgggaatgaaatatgcactgacccaccttcctaggtgctccaggtcaagctcctttacctttattgactcccaggatctgggttattccatcacaattcccagatgaactttcttcaactctctttgaattatcaaccaagtagtttgccccataaaccagggataccccacctctccacacccactcctgtcagcagagagtatgctctcttctcttgataccaatgctcctcttccaagcagccttctcagatctttcccttaagacattcagctgcatatg

SEQ ID NO: 422737 - DNA, 564 bp, Homo sapiens
acacacacacacacacacatacacacacacaatatatatatatataaatcaaaccagaatagctataaagataagcatctctgctcatagttcttatcttctcttagtgacagtgctcataggcatggatttaatctagagctctagcccatcacacacaatgcaagaagaggcaagaggtttgggccacccactagggaacctgtctgtctccaaggccatccacatatgcacatgtctttygtaagcaccctggagccttgacctcaccacagatgactgggaatgaaatatgcactgacccaccttcctaggtgctccaggtcaagctcctttacctttattgactcccaggatctgggttattccatcacaattcccagatgaactttcttcaactctctttgaattatcaaccaagtagtttgccccataaaccagggataccccacctctccacacccactcctgtcagcagagagtatgctctcttctcttgataccaatgctcctcttccaagcagccttctcagatctttcccttaagacattcagctgcatatg

SEQ ID NO: 422738 - DNA, 591 bp, Homo sapiens
ttaagtgttctaagcacaatgacaaaagcatgcgaggtaatacatatattaataagcctgatttagctattctgcaagatatgcatatttcaaaaaattatgctgtgtacataatatatacagttcttgtcaattaaaaagtgtttttaaagaagttactgcaaaatccaaaaaaagaaagaaaatgccatatgaattgacatgacaattggccagatcccattttatcaggcatagaatcatttttattattctagctgaataggtcctattaatcatgataggtaaaatggcagagatctgctttttactagcatgcagctgttaccatttgccacaacttttrgacgttgcagttggtgggagggaacaagcaaacacttctgctaagtaatctctttctcctttttggatagagttaagacactgcatctacccaaaacaaaaaagttacaatggggtttggttagcaacattttcctttggctaggatcttgtggaataaaagtaacatttttttttaactagaacattctatcatggcctctctattgttaactttagactctgtagctgttcatttgtatcatc

SEQ ID NO: 422739 - DNA, 598 bp, Homo sapiens
ctcactcatctgcatgctccccttcccacaagggcttgagagctgtgggctgagtaaacgagccaaccctttcatgagtcccatgaaaggttcaagcgacctatcccatttcaatataaaatggtacagcaactgtggaaaacatggtggttcttgaaaagattaaaaataaaattaccatatgatgtggcaattccacgtctgggtatatacgcaaaagaattgaaagcaaggtttcacaggagtatttgtatacccatgttcatagtagcattattcaaaatatctaaaataatggaacaaccaaagtgaatactgtgagatgaattgataagcaaaatgtggtatgtacatacagtggagtattattcagccttaaaaaggaggaaattttgacatgtgttataacataaattaacctkgacaacattacactaaatgaaataagccagtcacaaaaagacaaatactgtataattgcacttacattaggtagttagagacagaaagtagaatagtgcttgccttgggctttaaaagaatatagggatgagtttggggagattgaaaaaaacaaaactgccattaattgtgatga

SEQ ID NO: 422740 - DNA, 600 bp, Homo sapiens
aaaacttgagatgaagagtaaaaaaaaaagagcggggaggagatttggttacatcatgccatggattcttggcctatccaagagaagcaaaggttaaaactgaaagtcagggagaatgtgactgtataactaaaagaagaaagtggaaaacgttctactaaaacaaatgatactagcccccacaaattataagatcatagaaactgctgattaatttaatcaataattatgaaaaaccagggattttcaagcctccacacaacatactgacaagaatattaaaaaaatatattaaccacagaatgcttgagagtaaaaccacatgctacaaatattttacactataaagaatatttattcattcattgaacaaatatttaatgtgtgcctattacatgccagacacagttctaggtgctggagattcaactgtaagcaatgcaggacagtgcttgaagtcaattatcatctgagtatttaatggaattgtgaccttactttggactcatgggctctctttgttcaggggyccctttgctgcaagtcctttcagctttagaccaagacctatttatttaattcagcagttgataatgaagc

SEQ ID NO: 422741 - DNA, 635 bp, Homo sapiens
aaatgctgaataagacagcttagattcctttttctgaagcgtaagatctatccctcccaaatgttctgttgatgacagattgctatcatcgagtgcctcataattttgtattctttcatcacttctaaggtgaagctctatgtggtaactctcagtttagcgacattaracatgccttccttcttctgtggcttttctggtgtctaagacggttcaaccacctactaaagtttcttctgcatatgatacaagtataaggcagttcacctgtgtgggttctctggtgtttaataaggtggaagttctgaatgaatctttttccacattcatgacatttaaaggacttctctcccatatgaattatttggtatgtgtgtagatttgtgtcatgactaaagcatttcccgcaccatgagcatctatatggttttactctttgatgtgtcatgtagtgcgtattaagatctgaactccatctaaaccttgtgtcacattggtgacgcttataggtcttctgtttagtgtgaattctctggtacttaataagatcagagctaactgaagcttttcccacattcctgacatttaaaaggtttctctcctgtgtggtgtttcccatgaagacacataagttt

SEQ ID NO: 422742 - DNA, 619 bp, Homo sapiens
tatttaacaattaattttaataccaaaatgcaataaaacacatttagctatcttcttgcttgtcctggatattaataaaaatctgaggcttatgctgaggcaggaaaacattcgttaattttatgtcattaaaaaaagaaaactgtactcacttttgttctaatcttaaattttgtctttctttctgtacagtttctacctatttttactgtatctttccagttagttttaattttttcgttttattttattttattttttccttttatatttctcaaaatttcattctgagagccttttaccaagaaggytctcagaagaatactttgataagttctcttaaagctttgctattttatttttgtcttttgcattcctttttctctaccttaaagctatctgcatatacttgttttctctttcatttcttttattcttccaactgcaaaaaagatcatttattattaaagccagtgagttataattattttttgttgtagcttgcttttaatctgagctgaaaaatccatgttttttttcatttgttatattctagtcttacattttaactcccttcttttcatttatttattctgttctattttcctatcttagtttt

SEQ ID NO: 422743 - DNA, 544 bp, Homo sapiens
ttcctcatttcaaactctggctccatcacttgctagctatgtgttttgggacaagttactaaacttctctagttcctcagtttctcactataaagtgaggataataatacctacctcattatgagcatggaatgagttagtatcatgactagttcctggcacatggtaagtgccttaagagtgtctaccattattagcaaaatgtcttcagtaatgcttggcagcacctggccacaaattcacgttttygtcctgtgatgattataagaaggtatgcctcctctactctcgcactggcccaggccatttttagagttttatacccattacatcccagcaccaaatatgtaccttcttcagagtaagcatcaatccacatttgtggatcaatgactgcttcggacacatttcctttaggttctgtttctatcaaaaatataatcatgttttcttttatggttctttaaaactggctatcaacactatacgttatattaagtaaaattattccattgaagggattctttgctttatgactactttt

SEQ ID NO: 422744 - DNA, 544 bp, Homo sapiens
ttcctcatttcaaactctggctccatcacttgctagctatgtgttttgggacaagttactaaacttctctagttcctcagtttctcactataaagtgaggataataatacctacctcattatgagcatggaatgagttagtatcatgactagttcctggcacatggtaagtgccttaagagtgtctaccattattagcaaaatgtcttcagtaatgcttggcagcacctggccacaaattcacgtttttgtcctgtgatgattataagaakgtatgcctcctctactctcgcactggcccaggccatttttagagttttatacccattacatcccagcaccaaatatgtaccttcttcagagtaagcatcaatccacatttgtggatcaatgactgcttcggacacatttcctttaggttctgtttctatcaaaaatataatcatgttttcttttatggttctttaaaactggctatcaacactatacgttatattaagtaaaattattccattgaagggattctttgctttatgactactttt

SEQ ID NO: 422745 - DNA, 544 bp, Homo sapiens
ttcctcatttcaaactctggctccatcacttgctagctatgtgttttgggacaagttactaaacttctctagttcctcagtttctcactataaagtgaggataataatacctacctcattatgagcatggaatgagttagtatcatgactagttcctggcacatggtaagtgccttaagagtgtctaccattattagcaaaatgtcttcagtaatgcttggcagcacctggccacaaattcacgtttttgtcctgtgatgattataagaaggtatgcctcctctactctcgcactggcccaggccatttttagagttttatacccattacatcccagcaccaaatatgtaccttcttcagagtaagcatcaatccacatttgtggatcaatgactgcttcggacacatttcmtttaggttctgtttctatcaaaaatataatcatgttttcttttatggttctttaaaactggctatcaacactatacgttatattaagtaaaattattccattgaagggattctttgctttatgactactttt

SEQ ID NO: 422746 - DNA, 517 bp, Homo sapiens
caatacagacacatcaggggaggcaggatgcgtattagtgtaytgaagactttgagatgttttgctcttaaggaaaaatgaggcctccttgatttaatctagtgctttctaatccatttgagtatagaacaaaccattcttttttttcctgtaatatctatctctcaacattctgtggaatctgtattctttcaataacactgtagaaaacagtgatgttgcttaactaatactttggttgggattctagcatcaactttcaggctttctttgttcttgggctagaagaactcgtagggtcattgcaaaacttatagaacatgaactgggttgcaaacgctctcaattctggctagatcatcttgatcgactcacttaacttctgtgaggtcaattaatggagttacagaaaaaccaaatatgactctatatttgagagtattttagaggggtaatagtcaattaaaactagtattttttttttctttttaaaaaaatataagggggaaagtgaact

SEQ ID NO: 422747 - DNA, 548 bp, Homo sapiens
accttggcaatacatattcattgaaatgggattttaaaaactcaaaaacaaaaacagaaatgcatgcttagctgagattggttttgcctttcaattttgcatcacaaggcctgatgcaagtggctctctctgcttactttcagtaaagaagagactctgcggatggctcttaggaatgcccttgtttttgttcccatcagctacttaactaaatgtgtgtttccacttcccaggcaatgagtgggtggatgtctcaaggcaaactctacccattgctttaaaaaaaaaaaaaaaaaaaaaaaaaaaaagaaagcatccgtggctcttccaattgagagcatcccaggagcaaattctgttttatacctttctttctgttgcagttttacaattattatgctgttaacatgcattattcaaataattttwtttggtactaatccttgaactactctctgagctggctattattttccctgttttaagatgagaaaactcaaattctgatcagagaactcattcaagggtgctgtagaaagtggaggtag

SEQ ID NO: 422748 - DNA, 603 bp, Homo sapiens
ttcctggggctgttttggaggcatctggcctaagagattttggaaatttctggtgatcctaaaggctccaccatcttctggtgttttgtaaatagtattttcattttcctttaaaataaatggtttaattattaaaaaaaatagatgccaggccaatgactgtgcccacttaacatggtgctcttggtgattgtgctgtcacttaagcattattcaagtggcggcctccatggaaactgcccgattgtaattaatggcaaagcacacgtgggcagtcatgctaaacaggaartcatcctgcctctcagttcccttgtgacttttcctcagatacaggaagggaaggccttagaatctggcccattaactgactcagtgggcaagaaatgactaaaccaagaaactcagactatggagaaaggttaaaatgctgaaatgtagcccaacttccttttttgtcagtcttctcaagaaatgcatttttctcctagttggtcacaggaagtaggatttttgaagctagcaagggaggaaagatagagaaagccgttttctatctaagaggtgcaaaacttacttctgcgcaaggtagaatgtaacctc

SEQ ID NO: 422749 - DNA, 451 bp, Homo sapiens
catactaacatgacttcccactgcatctgtgcaccctgcactctgccctgcaaatgtaatgatgctcacatrcctcatgtttattcctgtcacccttcctaaaacaccacgaagacctgtcctcagagagccagccagagaactcttgctcttatgctgtctcccttgtgcttgagcataagtcttaataaagccttgtctgggaaactttctgagcctcatatcaatttttattgcatacaagcctaagaaacagtggttgattaacagtagtgcaggcctggaactacagtgactctagacactgaggtgggaggatcacttgagcccaggaatttaaagctaccatgaattataatcccaccactgcactccagcctgggtgacataatgagaccctgtttcttacaaaaaaaaaaaaaagaagaagaaaaaaactgtgatagactcc

SEQ ID NO: 422750 - DNA, 451 bp, Homo sapiens
catactaacatgacttcccactgcatctgtgcaccctgcactctgccctgcaaatgtaatgatgctcacatacctcatgtttattcctgtcacccttcctaaaacaccacgaagacctgtcctcagagagccagccagagaactcttgctcttatgctgtctcccttgtgcttgagcataagtcttaataaagccttgtctgggaaactttctgagcctcatatcaatttttattgcatacaagcctaagaaacagtggttgattaacagtagtgcaggcctggaactmcagtgactctagacactgaggtgggaggatcacttgagcccaggaatttaaagctaccatgaattataatcccaccactgcactccagcctgggtgacataatgagaccctgtttcttacaaaaaaaaaaaaaagaagaagaaaaaaactgtgatagactcc

SEQ ID NO: 422751 - DNA, 451 bp, Homo sapiens
catactaacatgacttcccactgcatctgtgcaccctgcactctgccctgcaaatgtaatgatgctcacatacctcatgtttattcctgtcacccttcctaaaacaccacgaagacctgtcctcagagagccagccagagaactcttgctcttatgctgtctcccttgtgcttgagcataagtcttaataaagccttgtctgggaaactttctgagcctcatatcaatttttattgcatacaagcctaagaaacagtggttgattaacagtagtgcaggcctggaactacagtgactctagacactgaggtgggaggatcacttgagcccaggaatttraagctaccatgaattataatcccaccactgcactccagcctgggtgacataatgagaccctgtttcttacaaaaaaaaaaaaaagaagaagaaaaaaactgtgatagactcc

SEQ ID NO: 422752 - DNA, 451 bp, Homo sapiens
catactaacatgacttcccactgcatctgtgcaccctgcactctgccctgcaaatgtaatgatgctcacatacctcatgtttattcctgtcacccttcctaaaacaccacgaagacctgtcctcagagagccagccagagaactcttgctcttatgctgtctcccttgtgcttgagcataagtcttaataaagccttgtctgggaaactttctgagcctcatatcaatttttattgcatacaagcctaagaaacagtggttgattaacagtagtgcaggcctggaactacagtgactctagacactgaggtgggaggatcacttgagcccaggaatttaaagctaccrtgaattataatcccaccactgcactccagcctgggtgacataatgagaccctgtttcttacaaaaaaaaaaaaaagaagaagaaaaaaactgtgatagactcc

SEQ ID NO: 422753 - DNA, 592 bp, Homo sapiens
ttaatccagtaaatatcaacttttaaggacctttgtttttttcccccattttattttaattgtatcggtcccttagcaaaacccactatcattatagatgacaactgggatcatagaattctagagttcagtgggaacttggagattttccttccttccatgatattgctgtatattggctttccctccacccctacatagttcttagtcttctgggcaggctcttctttccctatccrtccttagatattgataattcagtccttcatgttctcactcttcccaggtgatcttactcactcccatggcttcagctgctatccttgtgctgatgaatcctcatgttaccaagcacaaggggctcactgcatgatacactagaagccaaaattatggtaccagatttgtgagaaaagaaaagtttttaccacaggtcaaccaataaggagataggagtccagcctcaaatctgtcttcttgtgctggtttaaagcagtatgtttagtagaaaaggtctaggggtggattctaggattcatgagtgatttttggaaggaagggggacgtttggaaagtcctggggcatgtgcag

SEQ ID NO: 422754 - DNA, 607 bp, Homo sapiens
ggacttagctttgcgtcgtgtcattgaggagcatcgcatgtttgcttgaaaagtcttatggaattatgtttgttgttaatgctgattcataattggcagatggggtcagtttcaggcctctctttgctcagagaaaattttccactgctactggaaacaaataaataaatcatagaacattcttctctcctcccccattcccctattgttttaaactaatggcatacttggctactgtaaggactaaagtgtccccataacactgcaatttcatcttggtttcaggcaccctgaaacactttttatgagggcctttggtataaggaatctctaggggaaaacgtacagaaatggttgcattccaagaacagcctcatggtaccagggatgggatttggtctgtgagccacattgcttctccttttatgtgaagatcttgcctttgcacttccttctgcaggcctgggcygccaggtgctatatcagccaggaaaacaaagcaaactgtagggtctgtccatccgtaggtttgcctcagtccccaattcgcagatagccttgtcatgaattagaatttcttggcaacagcaccacccagggaaatttg

SEQ ID NO: 422755 - DNA, 386 bp, Homo sapiens
gttcctttaacagacacatctttgtgtagatttaggggcttcaaacattatcattcagtctacctgtttgcagtttggtattttaaagtgggcaaacattataatgcagttattttttactacatctggccttagtagggggaaaaggagggcactattctttgttctccatgaacttcccacccccactccttaccctgaggagaatgggatgktggggtcccatccatttaaaaggcagagcagaatattccagatgacagccttgccctgaaatgatttatgtatgggtgtgtcagagaccctaagcatccaaatgtggggtgcttctttctggcagcccattctaaacataaatgccagtgggggctaatttgcctctctac

SEQ ID NO: 422756 - DNA, 573 bp, Homo sapiens
attgctcctggggttatctttgcctgtagcttctttcagtggatggagttaggaaatatatgtatgtatactcacacatggatatacacatttatttctctatgtatgtatgtgtgtgtatattaaaatccatgaggaaatactaatacctcagttcccatcaaacatcatagggatttttttttttgacacagaatcttgctctgtcacccaggctggagtgcagtggtgcaatmttggctcactgcaacctccacctcctgggttcaagtgattcttctgcctcagcctcccgagtagctgggattacaggtgcgcaccacccacacctggctaattttttgtatttttagtagagatggggtttcatcatattggccaggctggtttcaaactcctgacctcaattgatccatctgcctcaacctcccaaagtgttaggattacaggcatgagccactgcacccggcctgtcatggacatttcttatgagagttctcataatcatttacaaacaatgttggaagtaaatgttctcattggcttggaaataatctaatattagaatcctcc

SEQ ID NO: 422757 - DNA, 573 bp, Homo sapiens
attgctcctggggttatctttgcctgtagcttctttcagtggatggagttaggaaatatatgtatgtatactcacacatggatatacacatttatttctctatgtatgtatgtgtgtgtatattaaaatccatgaggaaatactaatacctcagttcccatcaaacatcatagggatttttttttttgacacagaatcttgctctgtcacccaggctggagtgcagtggtgcaatcttggctcactgcaacctccacctcctgggttcaagtgattcttctgcctcagcctcccgagtagctgggattacaggtgcgcaccacccacacctggctaattttttgtatttttagtagagatggggtttcatcatattggccaggctggtttcaaactcctgacctcaattgatccatctgcctcaacctcccaaagtgttaggattacaggcatgagccactgcacccggcctgtcatggacatttyttatgagagttctcataatcatttacaaacaatgttggaagtaaatgttctcattggcttggaaataatctaatattagaatcctcc

SEQ ID NO: 422758 - DNA, 631 bp, Homo sapiens
  misc_feature (1)...(631): n = A,T,C or G
agatccggatttctaaacagagaggccaatttagcttcacggggtagccctgagagtatgcacctgtgttggaagtaaaagctgtctccttgccctggagaatgccctctccctctgccacttcctcttttctcctctggcctccagaaaccaccaggaagagaagcaattaggatgagtgaacaaaacgctattttcaactgtcattttttattggtgaaaagaactctggcctgggaatcagrttcagcgcctgcctttcccacaccaccccttccctttccagcaaactactgaatctgagtagagaattcacttccttccctgaaaaaaatggatgaaccacactctcaaagactctttctggctcaaacttcttgctgataatccttcagtggcctgttgtcactctcagttccttaccacagcaaaccagactctacatgatctgaccttactcttttctactcctctgcttctccccttcagacaggacacttctcgcataaatgcccccagttcatccctctctcagagccctagtaactccgtccgcatcccagagcgcagactccccagtaagctgtannnnnnnnnnnnnnnnnnnnnnnnnnnnnnnnnnnnnnnnnnn

SEQ ID NO: 422759 - DNA, 647 bp, Homo sapiens
  misc_feature (1)...(647): n = A,T,C or G
nnnnnnnnnnnnnnnnnnnnnnnngaatatacactccagtggcagtaacccacggacctctaatagatttcaccgatgggaaatagtaacagttcccgtggaggcattaccttcactgccaactgtgatctatggatgacagcctcccagaaaacacattgacacaataggctgtaatggctcagatggggcctttatgtgatatcaggccagtgatccgcagacttttgtctcgccgggaggtttctcaattgccttcaccaaggctttccctcctgctttctggcctgtccgggtactttcctgagctcagggatgtttgcctgtgctctcaggctatagaagcttgcctcacagcatctccattacacaaatgagscactaaaaagccaatgagaaaatgaagaatacctacagataaaatattttattcaatctgcaatgatgttggtgcagatgcatttgtttatgaagtgtaatccagctcccacagcgagatttggactttattccttatcaagctctgttgaccagtttgaaagctcctttgtccacaataaagaggctctgccacccatgaaccagtcaatcagtcaataagtatctggtgaatatactcataattgtacaatggattgttgtatttg

SEQ ID NO: 422760 - DNA, 580 bp, Homo sapiens
caccatcctaactccctatcacaccttctatcttcttgaacaaagcacatagataatgactatctcttctgtcctgccatgtgaattgtcttcataatgtcccctttagggttgggtaggaaaagagagataggaaaagagagaaatcaagcaaaagacaacaaaagtgaagaacagatttaagagcgtgccttctgccaattcacaaagccaaggccagagytgatattctgccagggtgccccagtccagcataccaaccagcatccatccggactggtcagtgcaaaagccatgtaagatgtgacatatttttaaaatatcatctcccataatgtccttactggatctctgaaatttggggatattgactattggttttgagaagaataatgtcaaatgcagctctaaggtcaaaggaaggcctatgaattacatttattgctgagagaaaatttacacttggaaaaaagcagttctttcaggtatacattttacttttttttttccaaatcttaagagtggggcaaagcaagcacaaggtcttgtttaaagttttaaatacatattataattgtat

SEQ ID NO: 422761 - DNA, 580 bp, Homo sapiens
caccatcctaactccctatcacaccttctatcttcttgaacaaagcacatagataatgactatctcttctgtcctgccatgtgaattgtcttcataatgtcccctttagggttgggtaggaaaagagagataggaaaagagagaaatcaagcaaaagacaacaaaagtgaagaacagatttaagagcgtgccttctgccaattcacaaagccaaggccagagctgatattctgccagggtgccccagtccagcataccaaccagcatccatccggactggtcagtgcaaaagccatgtaagatgtgacatatttttaaaatatcatctcccataatgtccttactggatctctgaaatttggggatattgactattggttttgagaagaataatgtcaaatgcagctctaaggtcaaaggaaggcctatgaattacatttattgctgagagaaaatttacactkggaaaaaagcagttctttcaggtatacattttacttttttttttccaaatcttaagagtggggcaaagcaagcacaaggtcttgtttaaagttttaaatacatattataattgtat

SEQ ID NO: 422762 - DNA, 456 bp, Homo sapiens
ttattttgctgttctataatttttatgtcaaatatttctggaaattatattatcacagaatttatgaatagaactttaaaattcagttaatccattctttttatgttttaggaaagaaagaatggggcccagaaaggctaagcaatgtgcctcaggtcacaaagctcaccagaggcacagctagagctaggacaatgcttcctgactcctcatccaccatcatttctgcctgtacaccatgttgcctcacacctggcaataagaaaactcatctttgtcctcactgtaatggaataatgtgggkttttttcttcattatgcagctttcctcttgattttcctcttagttctcctcttgattctctcttgattcactgtcttgaaaagtgctctgaatttttttaccccttaagacttttgcaagaagatgcagcagaagtatggatgaggaacaat

SEQ ID NO: 422763 - DNA, 372 bp, Homo sapiens
aaaaaagacaccttagtttaactgcaaaaaaaaaaaaaaaaaaaagccaatttcgagaaggaaataatatataaaggttcattcgggctgagagagagatgatttytcagagagccaaatataaattgaacgtcaggtttatatagatagacactgtaccttcagttgactcatattaaaacaaaaagcagcattaataacaatagccaacatctacaatttactgaactcttatgtgttaggcaccatgctaaaacacttcagaaatataatttcatatattccttacaataccccatggggtatatatatttatgacctctattccaaagatagggataacgagtctcagaaaaattaagtgacatggtt

SEQ ID NO: 422764 - DNA, 443 bp, Homo sapiens
accttcttttgatggtctacttgctgttgaagtgaataaataaagaagaatgaagagccaaaagaggaattcaaaaagaaagaaaatgattctgttgattctggggtaagattaatctgacttgagccttggttctggaaataagtaacattgtgtccctggacaacttgctcaatcccttgttatttatttgtctgtctgtctgtttagagacagggcttcactctgtcacccaggctggagtgcggcggcrccatcatggctcactgtagccttgagttcttgggctcaagcgatcctcccacctcagcctcccaagtcactgggactataggcacattccaccatgcctggctgattttcactttattttattttttgtagagatggagtcccattctgttagccaggctgtaagttttttaaatttgtgaaatggagac

SEQ ID NO: 422765 - DNA, 443 bp, Homo sapiens
accttcttttgatggtctacttgctgttgaagtgaataaataaagaagaatgaagagccaaaagaggaattcaaaaagaaagaaaatgattctgttgattctggggtaagattaatctgacttgagccttggttctggaaataagtaacattgtgtccctggacaacttgctcaatcccttgttatttatttgtctgtctgtctgtttagagacagggcttcactctgtcacccaggctggagtgcggcggcgccatcwtggctcactgtagccttgagttcttgggctcaagcgatcctcccacctcagcctcccaagtcactgggactataggcacattccaccatgcctggctgattttcactttattttattttttgtagagatggagtcccattctgttagccaggctgtaagttttttaaatttgtgaaatggagac

SEQ ID NO: 422766 - DNA, 567 bp, Homo sapiens
  misc_feature (1)...(567): n = A,T,C or G
gaagcagctagtgtgtgccgctgtcatggaaagaaatagaaggggtgagtaaatacagcactttgatgaaaacatccaggttcaaacattgagattcatcaagaaaacaacttgatacaggaaaaatgaagaaaartaaggcaggaggactgtccacttgagagtgacatggaaccaggggagcctcccctgcccagggaactggtgagtgagtgagcaaccccagggatccatgctccccccatggatctttgcaacccttaggtcgggagataccctcatgaacccactccaccaaggcctgcagtctgacatgcagaactatgtggagtcttggcagagcagtcactcaagtacatgcagagcccagggagctttacacaccagggattcccagcaaaagtggctgcaactcaagcaaagcaagaggttatactccccatacaaccccttgnaaaggggctgaatccagggagctgaggagctgtggtctgcaggctctgcttctacggcacctcatagggtaagacttgctgactgggaactncagccagccagtgttacaac

SEQ ID NO: 422767 - DNA, 643 bp, Homo sapiens
tctaagaaaaaaaggattaggattaaaaaacaacataacaaatgaaggatgcttttgatgggcatattagtagactggacatcactaaagaagtaatctctgagcttgagctatatcaatagaaacttgcaaaactgaaaagcaaagagaacaaagacaagtaaaatcaaaagataataatcaagaactgtgagagaactacaaaaggtgtaatttatgtgtaaytggaatactagatagaaagaagagagaaaggaacagaaaaacagtatgtaaaatagtagtgagtaagaatttttccaaatttatgtcagacatgaaaccatagatgtaggaagttcggagaacatcaagtgaaataaatgccaaaaaactacacctaggcacataattctcaagctacagtaaataaataaataaataaaataaaataaatgaagaaaaatatcctgaaagaagccagaagaaataaataaaacttttttctcttacacaggaacaaagataaagattacatcctccttctcagaaaccatgcaaacaagaatagacaacactgaaatatttaaagtgttgagtaaaaaaattaccaacctatagttctgcatattgtgaaattatccttcaaaagtgaaagggaaat

SEQ ID NO: 422768 - DNA, 577 bp, Homo sapiens
aaataacttcatttggagttcctctgcaatccaatcaaagtcttatttttcaaatcagcatagatttgttttaagccaagaaaatctctatcgatatttatcaaaacagaacagctaaaataacatattttatgagataatgtaaaaaatgcttggagtatgcggagaacattttgtgaatttgagaaggaatgttagctgttttgaactaaaataaattgagaactgaaataatcctgtttctaaattgtccactgtttgtcaagctacaatcttggtacaatgtttcttgtttaaaaaaatggctgcaaatggatctatttataaaaatttaactgaaacatatagtcatttatatattttattctttcaaataatgtttaggaataatacttggattctttcaaataatgtttaggaataacacttggattctctatggccaagtattaaaatacaaaatggagaataattttttgcatttttrtattttataagtagtaaaaccaaaactgacaagttaaattttggtggcagccacataacaagtcattcctcgtgccagaaaatttagtgc

SEQ ID NO: 422769 - DNA, 587 bp, Homo sapiens
  misc_feature (1)...(587): n = A,T,C or G
acagagggtacatgtgcagatttgttacacaggtatattgcagaatactgaggtttgcagtacaactgatctcttcacccaggtaatcagcatagcacccaatagttagttgttcaatccttgccctcttctctccctcacctcccttgcagtccccagtctatttttgccatctttttatccatgagtactcaatgtttagctcccacttataagtgagaacatgagttattggttttcttatcctgcattaatcacttaggataattgtctccagaaacattcatgttgctgtaggagacttgattttgttctttttatggctgtgtagtattccatggtgtatacactgtgtagtaytggttttcttatcctgcattaatcacttaggataattgtctccagcaacattcatgttgctgtaggagacttgattttgttctttttatggctgtgtagtattccatggtgtatacactgtgtagtattggttttcttatcctgcattaatcatttaggataattgtctccagcaatatccatgttgctgtaagagacttgattttgttctttttatggctgngtag

SEQ ID NO: 422770 - DNA, 587 bp, Homo sapiens
  misc_feature (1)...(587): n = A,T,C or G
acagagggtacatgtgcagatttgttacacaggtatattgcagaatactgaggtttgcagtacaactgatctcttcacccaggtaatcagcatagcacccaatagttagttgttcaatccttgccctcttctctccctcacctcccttgcagtccccagtctatttttgccatctttttatccatgagtactcaatgtttagctcccacttataagtgagaacatgagttattggttttcttatcctgcattaatcacttaggataattgtctccagaaacattcatgttgctgtaggagacttgattttgttctttttatggctgtgtagtattccatggtgtatacactgtgtagtactggttttcttatcctgcattaatcayttaggataattgtctccagcaacattcatgttgctgtaggagacttgattttgttctttttatggctgtgtagtattccatggtgtatacactgtgtagtattggttttcttatcctgcattaatcatttaggataattgtctccagcaatatccatgttgctgtaagagacttgattttgttctttttatggctgngtag

SEQ ID NO: 422771 - DNA, 587 bp, Homo sapiens
  misc_feature (1)...(587): n = A,T,C or G
acagagggtacatgtgcagatttgttacacaggtatattgcagaatactgaggtttgcagtacaactgatctcttcacccaggtaatcagcatagcacccaatagttagttgttcaatccttgccctcttctctccctcacctcccttgcagtccccagtctatttttgccatctttttatccatgagtactcaatgtttagctcccacttataagtgagaacatgagttattggttttcttatcctgcattaatcacttaggataattgtctccagaaacattcatgttgctgtaggagacttgattttgttctttttatggctgtgtagtattccatggtgtatacactgtgtagtactggttttcttatcctgcattaatcacttaggataattgtctccagcaacatycatgttgctgtaggagacttgattttgttctttttatggctgtgtagtattccatggtgtatacactgtgtagtattggttttcttatcctgcattaatcatttaggataattgtctccagcaatatccatgttgctgtaagagacttgattttgttctttttatggctgngtag

SEQ ID NO: 422772 - DNA, 491 bp, Homo sapiens
caatatacaaacgaatatgtatcaggtagtaataactgctattcaaagagataaagcaggattatgagtacaaagtaagtgggctgctattttgtacaaatgtgggaaaatataagctcyctgttcaagagcaaagactgcctcaatcaagatgcttgcatagaaaaaaaataagtggcccatttttataatgctcactctttctaaggttttgtgcagagcaatttcacctgcctgctttagctcctctcttgctttgctatgtatcttttattttgtggtttgtctggtttcctttcgacttccttaaggtgttaagagttcttcaggattgtgttacttgcaactttttctcccattggctgattttctgctgaaaataaagagctctaaaacagtttcacttctatgctttttagcccacaaacatgttttttcttcaaagtttttttcagtttatatacactttttccatttaagaacatttactc

SEQ ID NO: 422773 - DNA, 585 bp, Homo sapiens
  misc_feature (1)...(585): n = A,T,C or G
tagtgtagcagcatgattaccacaagcatggggaagaaataataatattttcaatgacatttgaagcataactacaagtattgcatagataggaagggttgaaaaacaagactgacctgactaaaatacaggagtttaaaatcttgattttactggtttatctctggtcatccattatcttctatgtatgtacaatcttgagaatttaacttctttaaaacttaatttcctcccctataaaatgggagtaacatctataaagagttgtctagctaaccatgatagagactagcaagaagtcaaaatagctgctctatatatatatcnatcgtaatatataatatatattcaatatgacatatactatatattcaacatatattctctatattcaatatatatttncagatatagtcaaggggggtgttatataatatataattatgtattctcatatattgctgaatatatatattcaccagcaatcaaataaaaaaaggtgtacagccagtgttttagacttcaaagaayggcatttgatattgattaaacaaagaaatcctcagagaacaaagaaggattctt

SEQ ID NO: 422774 - DNA, 539 bp, Homo sapiens
aacaacttcaaccttaaaaacgtgtcttttagccacatctaacgcatttacagaaacagaagagctcttcagtgccatgctaaattataccatgggacaggaagaaattatgtttcctgtcaacagcctgaactctaatgatttttttggaactctatatttaattaaagattttgttatcatacctgtataatctgtaaagttacaacttttkccttctaaactggagtatttcaagtaaagatgaacattccctttttccttgcttcaaattagttgaaggtattgaatgcctcttctgatgccttttctgtatcacttgtgctgggtctttagactttgtaagcacatgaaccttgtttaagtaatggagacaactcaggagattaacattctgttttgcttttaagtagatatcttacctttcccatactgtcttggaaactaaagaagggagaatggacatttgcttttaaaaaagaaacttgttcaaattaagatcagttacatttttacaactgtttcacaatcactgggct

SEQ ID NO: 422775 - DNA, 593 bp, Homo sapiens
ttttcttgcctttaaaaaatttagtactttaggatgcttgaattcatatttatgtagagtgctacgatatgtcgtctcttaaagatgaacccagaatttttgacattaaagcaaatgcctatataatgctacaggttctgctaaaggggaattaaggcttctaagtatatgtgatattgcattagaaaaatattagctattttaacaatgacaaattggagaatgaagattcattgagttgcctatggatttatgtaaamatagattacatattgcttagagatggcaatatggtatttactaaccaccaagttataaaatgtgatgacatggctgtaaaaatatgtttttagatatggccagttttcctatttaaaaatttataaaatgataaaatttagagggtggtagaaaaatttaaaaattattttatattttatcagaaaatgttagtagtcctggatccagtgtcttcaatgtagtattttgatgatcatttttaaatgtatttttgtgttaaaatacacatttaaggatgatttatcactaattgcaagttatggattaccttatacaggaagggtaagatatgt

SEQ ID NO: 422776 - DNA, 553 bp, Homo sapiens
  misc_feature (1)...(553): n = A,T,C or G
gctctggtctcctcctctgtttataagggcactaatctcatcgtgtgctccatgcttaggacctcatttaaccctaattacctcccaaagccccacctctaataccatcatattgggtattagggctccacaaatattcagtttgtatcaacagtattgtgatagcaatctgggaaaggctgtaggtttgtcagggatgacttgngtggaggaagcagcactttaaattgaatcttgaaggaccagaaaaatccaagcataagaaggggaagagaaagagtgtcctaagcagatgaaatattctttgcagaggccatgcctcagaaaagagagtgaggtgtttgaggttcttgcaaagaggttagtgttgctggagtgtaataatctaggagtagagtatcgtgagatgaagttagagaggtgagcaggtagaactctgcctccagttttataggtaagaaaatggataagctatttgcctagggttatctcaggtagtaaatggcaaagccaygaagctagcccaagcctatatgctcaatgattatttgtc

SEQ ID NO: 422777 - DNA, 552 bp, Homo sapiens
ttttcataaggagtgtgcaacctagatccctcacatgcattgttcacaatggggttcatgctctggtctgtggcctgggggttggggacctctgctgtaggggaatcctwctttgcctcttcctagttcctggtaaccccagatgttccctggctgtatatgcatcactccactcctccttgttccaacctaatgtcttctcatggttttctgcttatgtgtctctgtgtcttttcatgatcatcttcttgtaaggataccaatcatattggattaaaaccccaacctactccagtatggcttcatcttacctaattatatctacaactaccatatccccaaataaggtcacattctaaaaaaatgggggttaggacttgaatatatctttttgaggggacacaatttaacccataaatgtcacatagctagaaagtaggacagtaaggattaggattcatgtaatctgctgtctcaaatttaaggatatgaagaagatagcagacaggatgttacatcacagtacatgcaatatctaaattgaaagacatc

SEQ ID NO: 422778 - DNA, 552 bp, Homo sapiens
ttttcataaggagtgtgcaacctagatccctcacatgcattgttcacaatggggttcatgctctggtctgtggcctgggggttggggacctctgctgtaggggaatccttctttgcctcttcctagttcctggtaaccccagatgttccctggctgtatatgcatcactccactcctccttgttccaacctaatgtcttctcatggttttctgcttatgtgtctctgtgtcttttcatgatcatcttcttgtaaggataccaatcatattggattaaaaccccaacctactccagtatggcttcatcttacctaattatatctacaactaccatatccccaaataaggtcacattctaaaaaaatgggggttaggacttgaatatatctttttgaggggacrcaatttaacccataaatgtcacatagctagaaagtaggacagtaaggattaggattcatgtaatctgctgtctcaaatttaaggatatgaagaagatagcagacaggatgttacatcacagtacatgcaatatctaaattgaaagacatc

SEQ ID NO: 422779 - DNA, 529 bp, Homo sapiens
ttgagcttgttgctttagttttatatgtgaagactggaaaaattctgttttgttttgaaaaatattttgagctaaaaatgttgtattccacatttgttaggaatggaagtctttaaaatatgaaatatttccaattgaagaaaaatagtgaaaatgaactttatctgaataagattaatgaaaattacatgttgaaaaagtaaaatagttatgtgtactaacagtgactactaacccaacaatataaaattaagtamaaatattattaccatgttaaatacaaattaaaattaattataaaaaagttaagatctatgattaaagtattaaaataaaatgagactgtattcacaaatctaaaagcaaattggtgaatgacatattttttgaaataataaattctttggcatattttatattttttattataaatgaaaattatttatttgaaatatttaaaggaacaaaatatttgcagctctattttattgagaaaggaattacaaaacaaaaacaaggagcttttgta

SEQ ID NO: 422780 - DNA, 537 bp, Homo sapiens
accaatgacatgaggagaattagaatagaaataaatacaaggattctttcatgataactaaaaatatcagtgaaggtttgtacataaaatttagggattttatattattacctaatacaattctggctataacatcactaaaggattgtaaacgtctgctgggaaacctatgggaaaaaaatgcaagtggaactggtgtcatacaaacacattttctaatgggaagcttaactggtgaaatgtaagttggaaacattactmaatttaggtctatgaaaatgttttcccaaatacaatcttttcttgtttgataggaggttttactgtgatgtattatttctgacagcctcttttttttttttttaaaggaaacgagtagaattaagtgaattgattatcatatctaacctgtaagtacaaattactttcccttggaattacataattgataattgtacatcctcagatgtgtttgaatctgagatttactctaaactcagagaaaaaaaagtgaaattttgtttccattgtggcacc

SEQ ID NO: 422781 - DNA, 537 bp, Homo sapiens
accaatgacatgaggagaattagaatagaaataaatacaaggattctttcatgataactaaaaatatcagtgaaggtttgtacataaaatttagggattttatattattacctaatacaattctggctataacatcactaaaggattgtaaacgtctgctgggaaacctatgggaaaaaaatgcaagtggaactggtgtcatacaaacacattttctaatgggaagcttaactggtgaaatgtaagttggaaacattactcaatttaggtctatgaaaatgttttcccaaatacaatcttttcttgttkgataggaggttttactgtgatgtattatttctgacagcctcttttttttttttttaaaggaaacgagtagaattaagtgaattgattatcatatctaacctgtaagtacaaattactttcccttggaattacataattgataattgtacatcctcagatgtgtttgaatctgagatttactctaaactcagagaaaaaaaagtgaaattttgtttccattgtggcacc

SEQ ID NO: 422782 - DNA, 537 bp, Homo sapiens
accaatgacatgaggagaattagaatagaaataaatacaaggattctttcatgataactaaaaatatcagtgaaggtttgtacataaaatttagggattttatattattacctaatacaattctggctataacatcactaaaggattgtaaacgtctgctgggaaacctatgggaaaaaaatgcaagtggaactggtgtcatacaaacacattttctaatgggaagcttaactggtgaaatgtaagttggaaacattactcaatttaggtctatgaaaatgttttcccaaatacaatcttttcttgtttgataggaggttttactgtgatgtattatttctgacagcctcttttttttttttttaaagsaaacgagtagaattaagtgaattgattatcatatctaacctgtaagtacaaattactttcccttggaattacataattgataattgtacatcctcagatgtgtttgaatctgagatttactctaaactcagagaaaaaaaagtgaaattttgtttccattgtggcacc

SEQ ID NO: 422783 - DNA, 537 bp, Homo sapiens
accaatgacatgaggagaattagaatagaaataaatacaaggattctttcatgataactaaaaatatcagtgaaggtttgtacataaaatttagggattttatattattacctaatacaattctggctataacatcactaaaggattgtaaacgtctgctgggaaacctatgggaaaaaaatgcaagtggaactggtgtcatacaaacacattttctaatgggaagcttaactggtgaaatgtaagttggaaacattactcaatttaggtctatgaaaatgttttcccaaatacaatcttttcttgtttgataggaggttttactgtgatgtattatttctgacagcctcttttttttttttttaaaggaaacgagtagaattaagtgaattrattatcatatctaacctgtaagtacaaattactttcccttggaattacataattgataattgtacatcctcagatgtgtttgaatctgagatttactctaaactcagagaaaaaaaagtgaaattttgtttccattgtggcacc

SEQ ID NO: 422784 - DNA, 603 bp, Homo sapiens
acagcacaattagcaattgcaaaaatgtggaaccagcctaaatgcccgtgaatcaatgagtgaataaactgtggtatatatttatgtgtgtgtgtgtgtgtgtgtgtgtgtgtgtgtgtgtgtgtatgtatatgtatatatatatgcatatgtrtatatatatatatatgcataaatacatatatgtgatggaatactactcagccataaaaaggaatgaattaatggcattcataataacctggatggaattggagactattattctaagtgaagtatctcaggaatggaaaaccaaacattgcatgttctcactcttaagtgggagctaagctatgaagatgcaaaggcataagaatgatacagtggactttggggactcaagggaaagagtgggaaaggcatgaggggtaaaagactacaaattgagttcagtgtatactgctcgggtgatgtgtgcaccaaaatctcacaaatcaccactaaagaacttactcatgtaaccaaatacctcatgttctccaaaaacctatggaaataaaaaatttaaaaaattacagaaagggaatgtattatgagacaagccacgtttatagaccaaag

SEQ ID NO: 422785 - DNA, 512 bp, Homo sapiens
gtgtggcaccttttctcttcctctcagtcctgcttctgcctygcaagattcgtgcttccactttgccttctgccatgagtaaaatctccctttagcctccccagaagcagatgctgctatgcttcctgttcagcctgcagaactgcgagccaattaaacttctttgctttataaattaccccatctcaagtgtttctttatagcagcagtgtgagaacaagctaatacactagccttcttgaatacatcttagcaagctctcgagcagcgtaacgacatagattagagaaggccaaaactgacagattcccatcttgaccaaagtttaatcattcttctccagtccctcttctcaggcccagtttaacaaagacgcctgctaagccagttcactgagaatcacttcgccctggatatcttatcactttggcatgcctttagcaataatgcagtttagcaagaaccccgctccccgccaccccaccccccgccacccttaatatctaattagt

SEQ ID NO: 422786 - DNA, 512 bp, Homo sapiens
gtgtggcaccttttctcttcctctcagtcctgcttctgcctcgcaagattcgtgcttccactttgccttctgccatgagtaaaatctccctttagcctccccagaagcagatgctgctatgcttcctgttcagcctgcagaactgcgagccaattaaacttctttgctttataaattaccccatctcaagtgtttctttatagcagcagtgtgagaacaagctaatacactagccttcttgaatacatcttagcaagctctcgagcagcgtaacgacatagattagagaaggccaaaactgacagattcccatcttgaccaaagtttaatcattcttctccagtccctcttctcaggcccagtttaacaaagacgcctgctaagccagttcactgagaatcacttcgccctkgatatcttatcactttggcatgcctttagcaataatgcagtttagcaagaaccccgctccccgccaccccaccccccgccacccttaatatctaattagt

SEQ ID NO: 422787 - DNA, 602 bp, Homo sapiens
tttgcttgtgggagtaactgaccgcaggaggatcataatgctataggcaaaggctgaggcaccagtggattgaaagtcytagtgaggcaggagaacagctgcagtgggaattgttgccacactgaacagacaggagattgatcaaagagtggtgtgcttatttagtcatttaagaggaatatcatgttttgtcattatacatttcatgggtttggtaagcagcctctaaaattgctccatgtcacttgtacccctggtagaggtaactccttgaggaatcttctactctgttgtcctagttgaatttatctcacttcactatcaaatagactgtggcagaagtgatggatatcacttccaacattagattgcacaaagactgtggcttctgtcttgggaatcctctctctctctttcattgtaagggaagctgacttctatgttgggcgctgcctattaagaagtccacatagcacggagccagtgtcaccagtcacagccagcaaggaaggacctggggactgcccccagccacatgattaatcttagaagtgaatcttccctaagtaaggcttttaaatgatggcagccttatgagagtc

SEQ ID NO: 422788 - DNA, 498 bp, Homo sapiens
tatagcatttattcctggtgatcatgtgtccggctaagcattagaggacatttttactgatggcgaaagggtcaatggagattgcagtgaaccagccatctctgtccaataggcactttatttggtgacrataattataggaaaggtagcactagacagttttaattcattgaagttattttgggtttttcttgttaatttgtttgtttgcttatttgttttatccttcagagaaatgctagaaatttagtaattaaattaaatatttcattgaacacaaaagcataacattatggaaaagagtaactgttgtttggttttatttatatatgttagtgtttatactgactaatctcaccaatggagacagacaatttctaagatttattataggcattgtgtttggatctttctttcagaaaagtaaaaatcagcttaacccaaaaattattttaataataattggcatatccagcttcatccatgtccctacagcgg

SEQ ID NO: 422789 - DNA, 498 bp, Homo sapiens
tatagcatttattcctggtgatcatgtgtccggctaagcattagaggacatttttactgatggcgaaagggtcaatggagattgcagtgaaccagccatctctgtccaataggcactttatttggtgacgataattataggaaaggtagcactagacagttttaattcattgaagttattttgggtttttcttgttamtttgtttgtttgcttatttgttttatccttcagagaaatgctagaaatttagtaattaaattaaatatttcattgaacacaaaagcataacattatggaaaagagtaactgttgtttggttttatttatatatgttagtgtttatactgactaatctcaccaatggagacagacaatttctaagatttattataggcattgtgtttggatctttctttcagaaaagtaaaaatcagcttaacccaaaaattattttaataataattggcatatccagcttcatccatgtccctacagcgg

SEQ ID NO: 422790 - DNA, 498 bp, Homo sapiens
tatagcatttattcctggtgatcatgtgtccggctaagcattagaggacatttttactgatggcgaaagggtcaatggagattgcagtgaaccagccatctctgtccaataggcactttatttggtgacgataattataggaaaggtagcactagacagttttaattcattgaagttattttgggtttttcttgttaatttgtttgtttgcttatttgttttatccttcagagaaatgctagaaatttagtaattaaattaaatatttcattgaacacaaaagcataacattatggaaaagagtaactgttgtttrgttttatttatatatgttagtgtttatactgactaatctcaccaatggagacagacaatttctaagatttattataggcattgtgtttggatctttctttcagaaaagtaaaaatcagcttaacccaaaaattattttaataataattggcatatccagcttcatccatgtccctacagcgg

SEQ ID NO: 422791 - DNA, 557 bp, Homo sapiens
tagcattaggagatgtgcctaatgtaaatgacgagttaatggctgcagcacaccaacatggcacatgtatacatatgtaacaaacctgcacattgtgcacatgtaccctagaacttaaagtataataaaaataaataaataataattggcatatccagaaccctttgctgtcttctgctacatttgcacaaattcacagctatttgaataccagtcattgtcaatcctggtcmtctttgaaaatactgttccttagttttgctctctgcctaatttacttggattgaggggaaacccaggaatcagttgatttgagtacgtagccaatgttgtaaagaactaattgctttaacttctaatagaaaaatatcactattttttttaaaaagttacataattcatgtgtaggaacataatccttttagcctagaagtaaaaaatgatatagtcttgccctatagcactgatcatggccatatataatttataataaccaaaataatgacaatattttggtacagcatgctctattaatttgaatgctcacgagttaacac

SEQ ID NO: 422792 - DNA, 557 bp, Homo sapiens
tagcattaggagatgtgcctaatgtaaatgacgagttaatggctgcagcacaccaacatggcacatgtatacatatgtaacaaacctgcacattgtgcacatgtaccctagaacttaaagtataataaaaataaataaataataattggcatatccagaaccctttgctgtcttctgctacatttgcacaaattcacagctatttgaataccagtcattgtcaatcctggtcckctttgaaaatactgttccttagttttgctctctgcctaatttacttggattgaggggaaacccaggaatcagttgatttgagtacgtagccaatgttgtaaagaactaattgctttaacttctaatagaaaaatatcactattttttttaaaaagttacataattcatgtgtaggaacataatccttttagcctagaagtaaaaaatgatatagtcttgccctatagcactgatcatggccatatataatttataataaccaaaataatgacaatattttggtacagcatgctctattaatttgaatgctcacgagttaacac

SEQ ID NO: 422793 - DNA, 431 bp, Homo sapiens
caatgttgtaaagaactaattgctttaacttctaatagaaaaatatcactattttttttaaaaagttacataattcatgtgtaggaacataatccttttagcctagaagtaaaaaatgatatagtcttgccctatagcactgatcatggccatatataatttataataaccaaaataatgacaatattttggtacagcatgctctattaatttgaatgctcacgagttaacacataattcaatgtgatatgtattaggttatagaaaaccatgaggtaaaaatcataggctgcattgaactttctacttccccaactttgcctcattatagggagggatgcagccctagagttcaagaattccataaagaccaacckgaaattctggtgcctggcatcttgtcacaccttcttccaatacacaaacatcaa

SEQ ID NO: 422794 - DNA, 504 bp, Homo sapiens
taaatttaagtataaatatttgaaaactctttaattttttaatattgtgtcccatttcttaaaaargagagaagctatattaacttttgaattcagtacacagttaacagttctttcatttaatatgtgataatataaatttaacagtgaaactttcaaatactcatattaacttaccctgatagattttatagctttaatataaaacttctcataaatgtaaaatttgacaaagcacaatattctccaggaagttagaaaagtaatataattttctgtctctcagaatgtgttttctaacctctaaatataaattgatggactaatcttttaaaattcagaatcaaatataattgctttggtttgatcattgagaattctttttccattccatcattttatagtttttgcctaaataaaatacttaaggaagttattgttatgttgtatttgaaagatgcctgatggagaaacattcatagttcttttctatccttatgaaag

SEQ ID NO: 422795 - DNA, 504 bp, Homo sapiens
taaatttaagtataaatatttgaaaactctttaattttttaatattgtgtcccatttcttaaaaaggagagaagctatattaacttttgaattcagtacacagttaacagttctttcatttaatatgtgataatataaatttaacagtgaaactttcaaatactcatattaacttaccctgatagattttatagctttaatataaaacttctcataaatgtaaaatttgacaaagcacaatattctccaggaagtyagaaaagtaatataattttctgtctctcagaatgtgttttctaacctctaaatataaattgatggactaatcttttaaaattcagaatcaaatataattgctttggtttgatcattgagaattctttttccattccatcattttatagtttttgcctaaataaaatacttaaggaagttattgttatgttgtatttgaaagatgcctgatggagaaacattcatagttcttttctatccttatgaaag

SEQ ID NO: 422796 - DNA, 504 bp, Homo sapiens
taaatttaagtataaatatttgaaaactctttaattttttaatattgtgtcccatttcttaaaaaggagagaagctatattaacttttgaattcagtacacagttaacagttctttcatttaatatgtgataatataaatttaacagtgaaactttcaaatactcatattaacttaccctgatagattttatagctttaatataaaacttctcataaatgtaaaatttgacaaagcacaatattctccaggaagttagaaaagtaatataattttctgtctctcagaatgtgttttctaacctctaaatataaattgatggactaatcttttaaaattcagaatcaaatataattgctttggtttratcattgagaattctttttccattccatcattttatagtttttgcctaaataaaatacttaaggaagttattgttatgttgtatttgaaagatgcctgatggagaaacattcatagttcttttctatccttatgaaag

SEQ ID NO: 422797 - DNA, 504 bp, Homo sapiens
taaatttaagtataaatatttgaaaactctttaattttttaatattgtgtcccatttcttaaaaaggagagaagctatattaacttttgaattcagtacacagttaacagttctttcatttaatatgtgataatataaatttaacagtgaaactttcaaatactcatattaacttaccctgatagattttatagctttaatataaaacttctcataaatgtaaaatttgacaaagcacaatattctccaggaagttagaaaagtaatataattttctgtctctcagaatgtgttttctaacctctaaatataaattgatggactaatcttttaaaattcagaatcaaatataattgctttggtttgatcattgagaattctttttccattccatcattttatagtttttgcctaaataaaatacttaaggaagttattgttatgttgtatttgaaagatgcctgatggagaaacattcatagytcttttctatccttatgaaag

SEQ ID NO: 422798 - DNA, 229 bp, Homo sapiens
atctaggcttctgtagacaatgtggaaacatttttaaaatgatgacgccctccttttccttcgtagctaaattagtacacaaaattctaawtatttccttagttttaataataataaagcaatataagattcaccctctgtattcaattctttgttaccaattctgctataattagaatttttgaaattcttagttataacctttatttttgataattgcatttaaaat

SEQ ID NO: 422799 - DNA, 600 bp, Homo sapiens
attccattttgtatatgtactatattttcttyattcattcatctcttgatggatacttaggttgattccaaattttggctattgtgagtagtgctgaaataaacatggagtgcagatatctctctgatatactatgtcctttcttttggttatacacccaggagtgggattgctggatcatatgatagctcaatttttgctttttgagaaacctccagactgttctccttaagggtcatactaatgtacattcccactgacagtgtgcaagggttcctttttctgtatatcctcgccaacttttgttattgcctgaatttgggataaaagccattttaactggggcctcttaactttttccccacacatttcttaattccttgatgaaaaatgctaaaagataagacactttcatacttcctagatacagttattcattcactcttttatttttttaagtttcttatttaatagatatgtattaaatatttaccttgtctcagccaatgtaatgtgtgacaggcatacaaagatgaatatagcagaaagtttatgcctcttaagaagcataatgaagtcatttaaacaaataatagctac

SEQ ID NO: 422800 - DNA, 587 bp, Homo sapiens
attccattttgtatatgtactatattttcttcattcattcatctcttgatggatacttaggttgattccaaattttggctattgtgagtagtgctgaaataaacatggagtgcagatatctctctgatatactatgtcctttcttttggttatacacccaggagtgggattgctggatcatatgatagctcaatttttgctttttgagaaacctccagactgttctccttaagggtcatactaatgtacattcccactgacagtgtgcaagggttcctttttctgtatatcctcgccaacttttgttattgcctgaatttgggataaaagccattttaactggggcctcttaactttttccccacacatttcttaattccttgatgaaaaatgctaaaagataagwcactttcatacttcctagatacagttattcattcactcttttatttttttaagtttcttatttaatagatatgtattaaatatttaccttgtctcagccaatgtaatgtgtgacaggcatacaaagatgaatatagcagaaagtttatgcctcttaagaagcataatgaagtcatttaaac

SEQ ID NO: 422801 - DNA, 510 bp, Homo sapiens
gatggtgagggcatgtgagaagttttcatatatgatggaaatgtgcaggggatatacaattgtcaatatgcatcawactgtctaatttaatatatgttttattgtatatgataaattgattttctaaaaatcatatacactaactcaaacttcttatagctgaacacattttatattaggtgtttatcttatatttacagatgatgtctagtaagcctcagagatgtccagtgggatctgggatttgaacccatgtctatttcaatttgtcctctcattccctttttacactcagcttttcttttaacatgcccacattttccctacgactacaaaatgaaaataaacagaacctttatttttaagctcttatcctactttgctttctgtgcaaatgttttaaaataatagttgacatttattccttctacttccatacctcatccatctcttgcattctaatgtccatcgcccgcttactgaaatagagaaaaaagtcacgatcatcca

SEQ ID NO: 422802 - DNA, 510 bp, Homo sapiens
gatggtgagggcatgtgagaagttttcatatatgatggaaatgtgcaggggatatacaattgtcaatatgcatcaaactgtctaatttaatatatgttttattgtatatgataaattgattttctaaaaatcatatacactaactcaaacttcttatagctgaacacattttatattaggtgtttatcttatatttacagatgatgtctagtaagcctcagagatgtccagtgggatctgggatttgaacccatgtctatttcaatttgtcctctcattccctttttacaytcagcttttcttttaacatgcccacattttccctacgactacaaaatgaaaataaacagaacctttatttttaagctcttatcctactttgctttctgtgcaaatgttttaaaataatagttgacatttattccttctacttccatacctcatccatctcttgcattctaatgtccatcgcccgcttactgaaatagagaaaaaagtcacgatcatcca

SEQ ID NO: 422803 - DNA, 464 bp, Homo sapiens
tacaaaatttagaaaagatatatcctgtacataatgacagaacctccatcagtggttgcctgtgatcagggattgagatggtgagggcatgtgagaagttttcatatatgatggaaatgtgcaggggatatacaattgtcaatatgcatcaaactgtctaatttaatatatgttttattgtatatgataaattgattttctaaaaatcatatacactaactcaaacttcttatagctgaacacattttatattaggtgtttatcttatatttacagatgatgtctagtaagcctcagagatgtccagtgggatctgggatttgaacccatgtctatttcaatttgtcctctcattccctttttacactcagcttttcttttaacatgcycacattttccctacgactacaaaatgaaaataaacagaacctttatttttaagctcttatcctactttgctttct

SEQ ID NO: 422804 - DNA, 510 bp, Homo sapiens
gatggtgagggcatgtgagaagttttcatatatgatggaaatgtgcaggggatatacaattgtcaatatgcatcaaactgtctaatttaatatatgttttattgtatatgataaattgattttctaaaaatcatatacactaactcaaacttcttatagctgaacacattttatattaggtgtttatcttatatttacagatgatgtctagtaagcctcagagatgtccagtgggatctgggatttgaacccatgtctatttcaatttgtcctctcattccctttttacactcagcttttcttttaacatgcccacattttccctaygactacaaaatgaaaataaacagaacctttatttttaagctcttatcctactttgctttctgtgcaaatgttttaaaataatagttgacatttattccttctacttccatacctcatccatctcttgcattctaatgtccatcgcccgcttactgaaatagagaaaaaagtcacgatcatcca

SEQ ID NO: 422805 - DNA, 510 bp, Homo sapiens
gatggtgagggcatgtgagaagttttcatatatgatggaaatgtgcaggggatatacaattgtcaatatgcatcaaactgtctaatttaatatatgttttattgtatatgataaattgattttctaaaaatcatatacactaactcaaacttcttatagctgaacacattttatattaggtgtttatcttatatttacagatgatgtctagtaagcctcagagatgtccagtgggatctgggatttgaacccatgtctatttcaatttgtcctctcattccctttttacactcagcttttcttttaacatgcccacattttccctacgactamaaaatgaaaataaacagaacctttatttttaagctcttatcctactttgctttctgtgcaaatgttttaaaataatagttgacatttattccttctacttccatacctcatccatctcttgcattctaatgtccatcgcccgcttactgaaatagagaaaaaagtcacgatcatcca

SEQ ID NO: 422806 - DNA, 626 bp, Homo sapiens
atggtatctcaatttcctaccataaactcatcatatctcaaatttaaatttctcatctttcttcatgcaaaacaccttgaacctcaatttaaacttcatcatattcttcaatttcttctccctttgttttattacacagcttattttggcaaaatcctagggtattttaatgtgtttttcatgtgcatcacctctccatatatttacaattgttctggcaaaagtttatattgataattrgtcttagtgattataattatgccctacttttgctttctgtaattcatcctacacactgttgctaagtaataataccactaaatcacagctcagaatatatattttattgcctgctggttttctatatctatgagaacatttatttcgaatgaaacaaaaacgattaaacacgtaaagctggagcactgaaaagcaccaggcatgctaagggccagggatagacagatgaaagagcatgcccgctatctttctcttaacattcaaagacccgttaatttccatttcaacatgcactttttgtcaattttgttttccacagatcactttcaagcatcctttgaaataaacccactaagatcatttttcccagagcttgcccgttttgt

SEQ ID NO: 422807 - DNA, 582 bp, Homo sapiens
ccctcgcaacaattccatgtggttggttcagctatgtctacttcacagatgaagatatggaaactcagaggtgttacataacttgctwccatcacacaagtcacaaaatcaagccagtctgtcacctaagaaaccctaacccttctcactttaatacactacctttattatcctacatttaatttattttttatacaactttgctcatgacaatctttgttcctttagttggaagtttttattcctcaatttcccaaggggaagattttacaggttaaacatttttgtcacttgtcacttagcaacttaacattctagtcatttatgcacaagttactatctctacaaaacgtgaacaatttgaagatgaaaaattatgtattatatatcttaaatccatcccactgtagttctttacagagagacagtactcagtaaatatttataagaatcatgacatgcaaatgtgcatattctctcttattagaatataatttagaaaatgtacttgacaaatgaaaagtagcatcagattattcttgttcaaaatattcctccttggtaaacactaatacctggact

SEQ ID NO: 422808 - DNA, 646 bp, Homo sapiens
atgtatcttgagagatcgtgtgtcaaaataattgaaggacattttttgtcatttgtgtgaaatagaagaagtgttttaagtgtagaaaatgatacctgtgtgtgatagaaataagtttatatcctatgagcaggtaacaaaaaagaaaaaaaaaactagckggactttttctcttaggattatattttctttggatgacaatgataaaagttctctttactatgtaaatttgccagtctaagaatagagtgtattatcttactgagtttcatcttgcaccctcagcatctattattcctattaactccaagttcaacctccaccttgcccttttcttcttctaattggcaatgggcaaatcatttctggtcaagatcaggagctcatctgtggctctaaccttgaacatcaatccaactcaagagcgaatcccattaacatcagactaataaatgcaaagatccagtgaagaacaataatgaactttggctcacacatcagtctttggcacctcagaaactaagtgtaatgaacagtaggtcacaacctatagctttcataaaatgtcccagttgagatagcatattacacatttaaaacagtaatggtgccaggtcattctgtcagacatttgtcaagtaaggat

SEQ ID NO: 422809 - DNA, 646 bp, Homo sapiens
atgtatcttgagagatcgtgtgtcaaaataattgaaggacattttttgtcatttgtgtgaaatagaagaagtgttttaagtgtagaaaatgatacctgtgtgtgatagaaataagtttatatcctatgagcaggtaacaaaaaagaaaaaaaaaactagctggactttttctcttaggattatattttctttggatgacaatgataaaagttctctttactatgtaaatttgccagtctaagaatagagtgtattatcttactgagtttcatcttgcaccctcagcatctattattcctattaactccaagttcaacctccaccttgcccttttcttcttctaattggcaatgggcaaatcatttctggtcaagatcaggagctcatctgtggctctaaccttgaacatcaatccaactcaagagygaatcccattaacatcagactaataaatgcaaagatccagtgaagaacaataatgaactttggctcacacatcagtctttggcacctcagaaactaagtgtaatgaacagtaggtcacaacctatagctttcataaaatgtcccagttgagatagcatattacacatttaaaacagtaatggtgccaggtcattctgtcagacatttgtcaagtaaggat

SEQ ID NO: 422810 - DNA, 554 bp, Homo sapiens
gattataaaggagaaagttaatgatctctaattgtgttgtaatktaaatgcagtatcaccgtaatgaagagaacagatttgcatgttaacaaaagaaatattagaggagtgagtgtaggatgtttgggataattaattccatcctccactcctacatacatatgcatatacaaactcaattcaattttaaagagaacccgaagaaccaaaaatagactgaacacacttgatgttgtatgggagcttaaattactatttttgttgttctctgtgactatctcatttagtttctattgtgtttgcaatttcttccaaggtgatttttaatggattgagtaatgcataaaaatttgcagaagtatgcagaaagtttgtatgcagggccatgtagagcttttatcctacagtaaatcctagtagtttgctggtgctgtgtgattttttttgtttgtttagggtttgtgtgtgtgtgtgtgtgtgtgtgtgtgtgtgtgtgtgtgtgtgtgaagcttatttattccatttcaagaaaaagaaaaatagacaaattagaa

SEQ ID NO: 422811 - DNA, 554 bp, Homo sapiens
gattataaaggagaaagttaatgatctctaattgtgttgtaatgtaaatgcagtatcaccgtaatgaagagaacagatttgcatgttaacaaaakaaatattagaggagtgagtgtaggatgtttgggataattaattccatcctccactcctacatacatatgcatatacaaactcaattcaattttaaagagaacccgaagaaccaaaaatagactgaacacacttgatgttgtatgggagcttaaattactatttttgttgttctctgtgactatctcatttagtttctattgtgtttgcaatttcttccaaggtgatttttaatggattgagtaatgcataaaaatttgcagaagtatgcagaaagtttgtatgcagggccatgtagagcttttatcctacagtaaatcctagtagtttgctggtgctgtgtgattttttttgtttgtttagggtttgtgtgtgtgtgtgtgtgtgtgtgtgtgtgtgtgtgtgtgtgtgtgaagcttatttattccatttcaagaaaaagaaaaatagacaaattagaa

SEQ ID NO: 422812 - DNA, 554 bp, Homo sapiens
gattataaaggagaaagttaatgatctctaattgtgttgtaatgtaaatgcagtatcaccgtaatgaagagaacagatttgcatgttaacaaaagaaatattagaggagtgagtgtaggatgtttgggataattaattccatcctccactcctacatacatatgcatatacaaactcaattcaattttaaagagaacccgaagaaccaaaaatagactgaacacmcttgatgttgtatgggagcttaaattactatttttgttgttctctgtgactatctcatttagtttctattgtgtttgcaatttcttccaaggtgatttttaatggattgagtaatgcataaaaatttgcagaagtatgcagaaagtttgtatgcagggccatgtagagcttttatcctacagtaaatcctagtagtttgctggtgctgtgtgattttttttgtttgtttagggtttgtgtgtgtgtgtgtgtgtgtgtgtgtgtgtgtgtgtgtgtgtgtgaagcttatttattccatttcaagaaaaagaaaaatagacaaattagaa

SEQ ID NO: 422813 - DNA, 570 bp, Homo sapiens
agtttgctggtgctgtgtgattttttttgtttgtttagggtttgtgtgtgtgtgtgtgtgtgtgtgtgtgtgtgtgtgtgtgtgtgtgaagcttatttattccatttcaagaaaaagaaaaatagacaaattagaataccaaaaataatttgcagccagtatcaaccaatttatattcaagctgaaaaattaaaatagctttcagagaatggtagaagcatattatttaaaaaacaaactatgaagamatggacagaagcatgtagacatagataacagaaatttaaagtaaaaagtagaaaatgaaattattcccttttatacctgaaagcaaatgatttccatgattctaagcctctgtaaaaagcagcaacaatttcatcattttcctattcactcttcatattatctaaatcaggattctgcaaaattattttccttgaattacttttaaaacataccagaaatgaattcactactctaattatcacagcaattcagggaattattaaaaatcaaatcaaatcaaatgaaacttcgtaagttgtttacaaaaaaacttcaggttca

SEQ ID NO: 422814 - DNA, 578 bp, Homo sapiens
gactgaagggcacagtataggtcagtgcatttatgcataacagcaggacttattaatcatcctcagctcctgcaggctaagaaatcctgcttaaaatttatttgcatgcttagaactagaacagagcttcgaaactagaataagggtcacttactctratgtctctggaagctcatgaggtcagccctgaacgctaagttgcacttcttgaaacagttttaatgcccacggctatctcccaattcattctgagtttgagaagggaaaaaaatgaaatgatatttagtagactcctataacagtttgggtaacaccagctgttttaacaaacaatcctcaaagttaaagtggctgaaagtttaaaatgtgtttctcattaataacattcaaataaaggcatttcttgtctgggtggcttttaccagggagtaattcaggaaactggcctccagtattgtagctccaacttcctagagggcttcagagttctcctttttcaaatgacacatgttgaaagaactggaagaaacatttatatgtaccaccctctaaaagtggtacacattaaccgggacaca

SEQ ID NO: 422815 - DNA, 578 bp, Homo sapiens
gactgaagggcacagtataggtcagtgcatttatgcataacagcaggacttattaatcatcctcagctcctgcaggctaagaaatcctgcttaaaatttatttgcatgcttagaactagaacagagcttcgaaactagaataagggtcacttactctgatgtctctggaagctcatgaggtcagccctgaacgctaagttgcacttcttgaaacagttttaaygcccacggctatctcccaattcattctgagtttgagaagggaaaaaaatgaaatgatatttagtagactcctataacagtttgggtaacaccagctgttttaacaaacaatcctcaaagttaaagtggctgaaagtttaaaatgtgtttctcattaataacattcaaataaaggcatttcttgtctgggtggcttttaccagggagtaattcaggaaactggcctccagtattgtagctccaacttcctagagggcttcagagttctcctttttcaaatgacacatgttgaaagaactggaagaaacatttatatgtaccaccctctaaaagtggtacacattaaccgggacaca

SEQ ID NO: 422816 - DNA, 578 bp, Homo sapiens
gactgaagggcacagtataggtcagtgcatttatgcataacagcaggacttattaatcatcctcagctcctgcaggctaagaaatcctgcttaaaatttatttgcatgcttagaactagaacagagcttcgaaactagaataagggtcacttactctgatgtctctggaagctcatgaggtcagccctgaacgctaagttgcacttcttgaaacagttttaatgcccacggctatctcccaattcattctgagtttgagaagggaaaaaaatgaaatgayatttagtagactcctataacagtttgggtaacaccagctgttttaacaaacaatcctcaaagttaaagtggctgaaagtttaaaatgtgtttctcattaataacattcaaataaaggcatttcttgtctgggtggcttttaccagggagtaattcaggaaactggcctccagtattgtagctccaacttcctagagggcttcagagttctcctttttcaaatgacacatgttgaaagaactggaagaaacatttatatgtaccaccctctaaaagtggtacacattaaccgggacaca

SEQ ID NO: 422817 - DNA, 578 bp, Homo sapiens
gactgaagggcacagtataggtcagtgcatttatgcataacagcaggacttattaatcatcctcagctcctgcaggctaagaaatcctgcttaaaatttatttgcatgcttagaactagaacagagcttcgaaactagaataagggtcacttactctgatgtctctggaagctcatgaggtcagccctgaacgctaagttgcacttcttgaaacagttttaatgcccacggctatctcccaattcattctgagtttgagaagggaaaaaaatgaaatgatatttagtagactcctataacagtttgggtaacaccagctgttttaacaaacaatcctcaaagttaaagtggctgaaagtttaaaatgtgtttctcattaataacattcaaataaaggcatttcttgtctgggtggcttttaccagggagtaattcaggaaactggcctccagtattrtagctccaacttcctagagggcttcagagttctcctttttcaaatgacacatgttgaaagaactggaagaaacatttatatgtaccaccctctaaaagtggtacacattaaccgggacaca

SEQ ID NO: 422818 - DNA, 459 bp, Homo sapiens
ggattcatgtttttctgatakgtgaatgcaaagtcactagccattgccatttgccagggattcagagagacagaagtgtggaaattaacatttagatgtatgagaaatatatgcaagaaactgagactgagcaggcaatttgtagattgtatacagtgtagcctaaacatgtttgcttcagtgaatttgtcatttcttgcatggggtaagtctaaaattatttattgtttaatttttttcattagaaataaaccctcttggaagtaattaaaatgcatatttcacaaaaaattagtgcgatgatgatgacaatcatgtaacttgcaaaacttgagtgttgttttatcacaaaccttatgaaaacagatgcatccttgccttaaaaaggagaaggaaaaaggaaatgctctgggcacagcatgaagcccagaaaaagaatatttccaacagccccatgga

SEQ ID NO: 422819 - DNA, 459 bp, Homo sapiens
ggattcatgtttttctgataggtgaatgcaaagtcactagcyattgccatttgccagggattcagagagacagaagtgtggaaattaacatttagatgtatgagaaatatatgcaagaaactgagactgagcaggcaatttgtagattgtatacagtgtagcctaaacatgtttgcttcagtgaatttgtcatttcttgcatggggtaagtctaaaattatttattgtttaatttttttcattagaaataaaccctcttggaagtaattaaaatgcatatttcacaaaaaattagtgcgatgatgatgacaatcatgtaacttgcaaaacttgagtgttgttttatcacaaaccttatgaaaacagatgcatccttgccttaaaaaggagaaggaaaaaggaaatgctctgggcacagcatgaagcccagaaaaagaatatttccaacagccccatgga

SEQ ID NO: 422820 - DNA, 459 bp, Homo sapiens
ggattcatgtttttctgataggtgaatgcaaagtcactagccattgccatttgccagggattcagagagacagaagtgtggaaattaacatttagatgtatgagaaatatatgcaagaaactgagactgagcaggcaatttgtagattgtatacagtgtagcctaaacatgtttgcttcagtgaatttgtcatttcttgcatggggtaagtctaaaattatttattgtttaatttttttcattagaaataaaccctcttggaagtaattaaaatgcatatttcayaaaaaattagtgcgatgatgatgacaatcatgtaacttgcaaaacttgagtgttgttttatcacaaaccttatgaaaacagatgcatccttgccttaaaaaggagaaggaaaaaggaaatgctctgggcacagcatgaagcccagaaaaagaatatttccaacagccccatgga

SEQ ID NO: 422821 - DNA, 594 bp, Homo sapiens
aagtagccgtggggaaatatttcttgaaacaataaaaatgattgayttaggtttcaaagtttttaactcacaataaagaattttttctcctttctcttgcactgtttttcataatgatggtataaaacatattaaggtgttatcacaaacaattacttcatgagattatatttgagtttggggatttcaaagtcattttattaaaattagctgtattgttacacattttgtctggaaagtctaagtaatgtcattaaaagcccagtttaattgctttgaaaaagcttatgcttgacatgatattcagtctcttagatttcacaattcattctccatgtattactactatgactgacttgtttgtctctttttgagttccttctagaattcaaaagcattaagatttaagtgtggctgactgccacggttactacttgagaccgtcattactagactgaatgaagagacgaacatagaaatggtaacaaaaaacaaaagaaactgttttaaggaaaggctagcatggggaagaagagagctccctgcttctagtggtcctcattccatctttgcattcagattcaactggttcat

SEQ ID NO: 422822 - DNA, 594 bp, Homo sapiens
aagtagccgtggggaaatatttcttgaaacaataaaaatgattgacttaggtttcaaagtttttaactcacaataaagaattttttctcctttctcttgcactgtttttcataatgatggtataaaacatattaaggygttatcacaaacaattacttcatgagattatatttgagtttggggatttcaaagtcattttattaaaattagctgtattgttacacattttgtctggaaagtctaagtaatgtcattaaaagcccagtttaattgctttgaaaaagcttatgcttgacatgatattcagtctcttagatttcacaattcattctccatgtattactactatgactgacttgtttgtctctttttgagttccttctagaattcaaaagcattaagatttaagtgtggctgactgccacggttactacttgagaccgtcattactagactgaatgaagagacgaacatagaaatggtaacaaaaaacaaaagaaactgttttaaggaaaggctagcatggggaagaagagagctccctgcttctagtggtcctcattccatctttgcattcagattcaactggttcat

SEQ ID NO: 422823 - DNA, 594 bp, Homo sapiens
aagtagccgtggggaaatatttcttgaaacaataaaaatgattgacttaggtttcaaagtttttaactcacaataaagaattttttctcctttctcttgcactgtttttcataatgatggtataaaacatattaaggtgttatcacaaacaattacttcatgagattatatttgagtttggggatttcaaagtcattttattaaaattagctgtattgttacacattttgtctggaaagtctaagtaatgtcattaaaagcccartttaattgctttgaaaaagcttatgcttgacatgatattcagtctcttagatttcacaattcattctccatgtattactactatgactgacttgtttgtctctttttgagttccttctagaattcaaaagcattaagatttaagtgtggctgactgccacggttactacttgagaccgtcattactagactgaatgaagagacgaacatagaaatggtaacaaaaaacaaaagaaactgttttaaggaaaggctagcatggggaagaagagagctccctgcttctagtggtcctcattccatctttgcattcagattcaactggttcat

SEQ ID NO: 422824 - DNA, 594 bp, Homo sapiens
aagtagccgtggggaaatatttcttgaaacaataaaaatgattgacttaggtttcaaagtttttaactcacaataaagaattttttctcctttctcttgcactgtttttcataatgatggtataaaacatattaaggtgttatcacaaacaattacttcatgagattatatttgagtttggggatttcaaagtcattttattaaaattagctgtattgttacacattttgtctggaaagtctaagtaatgtcattaaaagcccagtttaattgctttgaaaaagcttatgcttgacatgatattcagtctcttagatttcacaattcattctccrtgtattactactatgactgacttgtttgtctctttttgagttccttctagaattcaaaagcattaagatttaagtgtggctgactgccacggttactacttgagaccgtcattactagactgaatgaagagacgaacatagaaatggtaacaaaaaacaaaagaaactgttttaaggaaaggctagcatggggaagaagagagctccctgcttctagtggtcctcattccatctttgcattcagattcaactggttcat

SEQ ID NO: 422825 - DNA, 532 bp, Homo sapiens
gagagagagagagagaaagagagagagagactcatgacctaattatttcccaaaggccctgtttccaaatatcatctcagtggaattagggttttaacatacaaattttgggggcgacgcaagtatttttagtccataccaagttagatgcaactttaccaaaattattgtgggtaatttgacaaggtaagagaggtcagtgaaacgcaaattatatgataacttcttggtgctcaggcagtatacctgccaggttgtctcctggctagaggaatgaaacaagtagtattcaacragactttggtagtgagtaaaacatggcatataagttgttttttgtgggaatgacatagtctaaatattattttgatgacatacctgtgtattgacctctcttgcatcaaaatgacataaacatggagaaataattctgaaagtcagcaggaacttgcaactcacttgtgggaggggaccacttaggggaactatgatattagactgtggcaatgtcgacctccacacaggaggaaag

SEQ ID NO: 422826 - DNA, 532 bp, Homo sapiens
gagagagagagagagaaagagagagagagactcatgacctaattatttcccaaaggccctgtttccaaatatcatctcagtggaattagggttttaacatacaaattttgggggcgacgcaagtatttttagtccataccaagttagatgcaactttaccaaaattattgtgggtaatttgacaaggtaagagaggtcagtgaaacgcaaattatatgataacttcttggtgctcaggcagtatacctgccaggttgtctcctggctagaggaatgaaacaagtagtattcaacaagactttggtagtgagtaaaacatggcatataagttgttttttgtgggaatgacatagtctaaatattattttgatgacatacctgtgtattgacctctcttgcatcaaaatgacataaacatggagaaataattctgaaagtcagcaggaacttgcaactcacttstgggaggggaccacttaggggaactatgatattagactgtggcaatgtcgacctccacacaggaggaaag

SEQ ID NO: 422827 - DNA, 544 bp, Homo sapiens
tgcttatgaaattttcaggaaatatactgaatgctttaatgtactctgtaacattgcaacatataatttcccctcttccctcactttttgatgtagctatcattgctttgagtttttatttactggttattttaaagagcttaatggtctcatttacttaaaagtggaataatattggactactattttctttttttaacctctctaggtcattctacagtcattaccttccakcctatttgtttctgcagaatctacgtatgtaatacctataaattttcttttcatatttgttcactcatccacatcattaataaagttattaagtgaagacgaacccagcagtagcactcccttaccaccttgaaatattgtgctgatgtagaggttgtatctgatttaattcttcaaggattattaatgtatgtggaactagcttttcagccatggaaatctttagtacgtatttaagaaaaagtgatttaatgctcagtagggaaatgttgtccaaaacagtgcctgaaaaaagcaggtatgtgtccac

SEQ ID NO: 422828 - DNA, 544 bp, Homo sapiens
tgcttatgaaattttcaggaaatatactgaatgctttaatgtactctgtaacattgcaacatataatttcccctcttccctcactttttgatgtagctatcattgctttgagtttttatttactggttattttaaagagcttaatggtctcatttacttaaaagtggaataatattggactactattttctttttttaacctctctaggtcattctacagtcattaccttccatcctatttgtttctgcagaatctacrtatgtaatacctataaattttcttttcatatttgttcactcatccacatcattaataaagttattaagtgaagacgaacccagcagtagcactcccttaccaccttgaaatattgtgctgatgtagaggttgtatctgatttaattcttcaaggattattaatgtatgtggaactagcttttcagccatggaaatctttagtacgtatttaagaaaaagtgatttaatgctcagtagggaaatgttgtccaaaacagtgcctgaaaaaagcaggtatgtgtccac

SEQ ID NO: 422829 - DNA, 484 bp, Homo sapiens
tttattgactcaaatactttatgccttctatttcacattttttacaggtttataagtctagatacctatgtcaattagtgaattttctaccaagagttcatgttttgttgcttaaaggcagataatttttttatttaaataatattaaaaagaggaaaatatttcaaaatrccaagattgggaggtgtctgggagatttatatgtattgcttttattaactgtctagcactggatttataaaccagcttatttttttaatttaaaagctctctgccttgcaatttaattcacatgatctgcattaaccatgccatattcaaaatttcattgataaattctatccagtagtcaatatcgaattgtaaactgatgtaatgtgctttaaaatatgaagatttaatctttaaaatatgaatatttgattgaataattactaccactaaaatcatgtttacttattagaattatcatataggaattgtt

SEQ ID NO: 422830 - DNA, 527 bp, Homo sapiens
atcacatattaaatgaaagaactgttaactgtgtactgaattcaaaagttaatatagcttctctcctttttaagaaatgggacacaatattaaaaaattaaagagttttcaaatatttatacttaaatttatatctaaggaattatatatagaatgcatacctttcaagtagatactattgttgctgttaagattattgtcaacaaaatttaaayacacagactattaaataaagaaattaaaacaacaaaaaataacctctaggccaggtgtcctggttaacctgtaatcccagcacttcagaagcttgaggcaagaggattgcttgagaccaatagtttgagaccagcctgagcagcaaactgagactctatgtgtatcaaaaaatgttttaaaagtagccgggtactgaggcaggcacttgtaatcccagctacttgggaggctgaggtgggaggtatgcttgggcccaggattttgaggctgcagtgagctgtgattgcaccacagccctccagcctgggaga

SEQ ID NO: 422831 - DNA, 504 bp, Homo sapiens
aaataaagaaattaaaacaacaaaaaataacctctaggccaggtgtcctggttaacctgtaatcccagcacttyagaagcttgaggcaagaggattgcttgagaccaatagtttgagaccagcctgagcagcaaactgagactctatgtgtatcaaaaaatgttttaaaagtagccgggtactgaggcaggcacttgtaatcccagctacttgggaggctgaggtgggaggtatgcttgggcccaggattttgaggctgcagtgagctgtgattgcaccacagccctccagcctgggagagagaggagaccttgtttctaaaaactaactaaataaacaataatgtaaaaaatctctctttaggtgtatgcttctctttgccagtgtttaagggttaaaaaaatcaatatgagagattaactaaagtaccaatttagagttaaatgagtgcatttgccacttgagtgccgattgcctcgcatgacagacaatattaagtgctga

SEQ ID NO: 422832 - DNA, 527 bp, Homo sapiens
atcacatattaaatgaaagaactgttaactgtgtactgaattcaaaagttaatatagcttctctcctttttaagaaatgggacacaatattaaaaaattaaagagttttcaaatatttatacttaaatttatatctaaggaattatatatagaatgcatacctttcaagtagatactattgttgctgttaagattattgtcaacaaaatttaaatacacagactattaaataaagaaattaaaacaacaaaaaataacctctaggccaggtgtcctggttaacctgtaatcccagcacttcagaagcttgaggcaagaggattgctkgagaccaatagtttgagaccagcctgagcagcaaactgagactctatgtgtatcaaaaaatgttttaaaagtagccgggtactgaggcaggcacttgtaatcccagctacttgggaggctgaggtgggaggtatgcttgggcccaggattttgaggctgcagtgagctgtgattgcaccacagccctccagcctgggaga

SEQ ID NO: 422833 - DNA, 439 bp, Homo sapiens
ctacactccttgatgtttgtgtattggaagaaggtgtgacaagatgccaggcaccagaatttcaggttggtctttatggaattcttgaactctagggctgcatccctccctataatgaggcaaagttggggaagtagaaagttcaatgcagcctatgatttttacctcatggttttctataacctaatacatatcacattaaattatgtgttaactggtgagcattcaaattaatagagcatgctgtaccaaaatattgtcattattttggttattrtaaattatatatggccatgatcagtgctatagggcaagactatatcattttttacttctaggctaaaaggattatgttcctacacatgaattatgtaactttttaaaaaaaatagtgatatttttctattagaagttaaagcaattagttctttacaacatt

SEQ ID NO: 422834 - DNA, 528 bp, Homo sapiens
gtatataattattctgaattatttcagaaaactattatggtctcatcactggattaaaaaatgtaataatattctcagtttaaagaaaatgcacaggttttaaatcctctgtgataagggcccatgaacttggagctgctgattttttttttttttaatttgcagggtttttacataacaaattatcagaaaccaaagcacccagatatcagactatgaatagaaaacatctttcctgaacaagtacaggctttattacttaattgtatttacactgatgagtgcacacaaagaaaaatcaatttgtgggagtttatttcattggtattgaaattgtatcttccttgaaaaacttggcacacagtgcctagtttgtctcccagttcattatattattattttactatattctgtgctgttatgtagttttatatgggctcactagttgagtgttcaaaattgcttttctaaactatagaatattaacttccagtatttaccaaaaaaargtatttatttaaaaaatca

SEQ ID NO: 422835 - DNA, 365 bp, Homo sapiens
gccacattttcttattgtccatggttgcttttgcagaacatgggagaactgagtacttcctacagagacaatatggctcacaaaataaaaatatttactatctggccctttgcttaaaaaaaaattactgagttttgacctatcccctttcacatcttcatttttctctctctctctctctctttctcyctctcggttgcttttggttttgtcctttttagaagcacattgcaacctcttctctagatgaacccaactatctgatttctgcatatttctcagtccatgactgctgctgaagaatgtcatgcaagaaaacaaactgataatattttaagacgatgatcaccattggaaaccgggtt

SEQ ID NO: 422836 - DNA, 365 bp, Homo sapiens
gccacattttcttattgtccatggttgcttttgcagaacatgggagaactgagtacttcctacagagacaatatggctcacaaaataaaaatatttactatctggccctttgcttaaaaaaaaattactgagttttgacctatcccctttcacatcttcatttttctctctctctctctctctttctctctctcggttgcttttggttttgtcctttttagaagcacattgcaacctcttctctagatgaacycaactatctgatttctgcatatttctcagtccatgactgctgctgaagaatgtcatgcaagaaaacaaactgataatattttaagacgatgatcaccattggaaaccgggtt

SEQ ID NO: 422837 - DNA, 365 bp, Homo sapiens
gccacattttcttattgtccatggttgcttttgcagaacatgggagaactgagtacttcctacagagacaatatggctcacaaaataaaaatatttactatctggccctttgcttaaaaaaaaattactgagttttgacctatcccctttcacatcttcatttttctctctctctctctctctttctctctctcggttgcttttggttttgtcctttttagaagcacattgcaacctcttctctagatgaacccaactatctgatttctgcatatttctcagtccatgactgctgctgaagaatgycatgcaagaaaacaaactgataatattttaagacgatgatcaccattggaaaccgggtt

SEQ ID NO: 422838 - DNA, 365 bp, Homo sapiens
gccacattttcttattgtccatggttgcttttgcagaacatgggagaactgagtacttcctacagagacaatatggctcacaaaataaaaatatttactatctggccctttgcttaaaaaaaaattactgagttttgacctatcccctttcacatcttcatttttctctctctctctctctctttctctctctcggttgcttttggttttgtcctttttagaagcacattgcaacctcttctctagatgaacccaactatctgatttctgcatatttctcagtccatgactgctgctgaagaatgtcatgcaagaaaacaaactgataatattttaagacratgatcaccattggaaaccgggtt

SEQ ID NO: 422839 - DNA, 593 bp, Homo sapiens
tgattgtcattttagatctataactctttttctgagctttgggtctatataagccaaatttctgctcaacggagcaaccatatccccactttaattggacaagtctctccagaaaataaatctcctatttcctgttgtgttaaatgaagaataattactaaggtattcagtaatgataaagaatctgggaatttaactgttcttgatatgaaatttcaaattacacacttttttttkgggggaagccaaacccacctccagcattttattcccacacatgataagcttgtccaaggtgtgtgtggtttggatgactttatattttgttagctttcctcttccctctacatatggacactatgttttgtcaaaaggaaatgtgtacactggatgcttgttaaaaatagcaaggaagactattcaggactatagcaatgggggaataatatagctatagtagagagagattgaactaaaatttctcccagcatggagctggaaatttataagcaaagagctgagggagtgagtcagtggatagaaactaattagatattaagggtggcggggggtggggtggcggggagcggggt

SEQ ID NO: 422840 - DNA, 593 bp, Homo sapiens
tgattgtcattttagatctataactctttttctgagctttgggtctatataagccaaatttctgctcaacggagcaaccatatccccactttaattggacaagtctctccagaaaataaatctcctatttcctgttgtgttaaatgaagaataattactaaggtattcagtaatgataaagaatctgggaatttaactgttcttgatatgaaatttcaaattacacacttttttttggggggaagccaaacccacctccagcattttattcccacacatgataagcttgtccaaggtgtgtgtggtttggatgactttatattttgttagctttcctcttccctctacatatggacactatgttttgtcaaaaggaaaygtgtacactggatgcttgttaaaaatagcaaggaagactattcaggactatagcaatgggggaataatatagctatagtagagagagattgaactaaaatttctcccagcatggagctggaaatttataagcaaagagctgagggagtgagtcagtggatagaaactaattagatattaagggtggcggggggtggggtggcggggagcggggt

SEQ ID NO: 422841 - DNA, 559 bp, Homo sapiens
aggaaaacatcctgagggaccagtaagcagggagatcctttttctagtttgcctgtagagttaggaagacagttgatttttcagtcttttacaggatgcttaaacaaagctgtgtaattacataaggtgratctttatcttgcctaagaagataaagtgggaatcttcactccgccagggcaaatttccaaggagctcatttattccatgtctttcaaactttcatgagatacatttctctttcacattgttgctgatttccaaacagctgtcagctagttttttcctccccctttcctattcttcactattttgatagcaaagctcatagaattagaggacttagaagatgctttgtaaacattgccacaaaggaactgctgaaatgattcacaggaagactggtcagttgggagaaagatcctaaagatgttacactggttttcaacaacatgcttagagaattcttgaagcagataggtgtcaacccagtgaaaacaacattttgatttatttttttttttaagtttatggtgattgtgtcggtttctaaaataag

SEQ ID NO: 422842 - DNA, 559 bp, Homo sapiens
aggaaaacatcctgagggaccagtaagcagggagatcctttttctagtttgcctgtagagttaggaagacagttgatttttcagtcttttacaggatgcttaaacaaagctgtgtaattacataaggtggatctttatcttgcctaagaagataaagtgggaatcttcactccgccagggcaaatttccaaggagctcatttattccatgtctttcaaactttcatgwgatacatttctctttcacattgttgctgatttccaaacagctgtcagctagttttttcctccccctttcctattcttcactattttgatagcaaagctcatagaattagaggacttagaagatgctttgtaaacattgccacaaaggaactgctgaaatgattcacaggaagactggtcagttgggagaaagatcctaaagatgttacactggttttcaacaacatgcttagagaattcttgaagcagataggtgtcaacccagtgaaaacaacattttgatttatttttttttttaagtttatggtgattgtgtcggtttctaaaataag

SEQ ID NO: 422843 - DNA, 559 bp, Homo sapiens
aggaaaacatcctgagggaccagtaagcagggagatcctttttctagtttgcctgtagagttaggaagacagttgatttttcagtcttttacaggatgcttaaacaaagctgtgtaattacataaggtggatctttatcttgcctaagaagataaagtgggaatcttcactccgccagggcaaatttccaaggagctcatttattccatgtctttcaaactttcatgagatasatttctctttcacattgttgctgatttccaaacagctgtcagctagttttttcctccccctttcctattcttcactattttgatagcaaagctcatagaattagaggacttagaagatgctttgtaaacattgccacaaaggaactgctgaaatgattcacaggaagactggtcagttgggagaaagatcctaaagatgttacactggttttcaacaacatgcttagagaattcttgaagcagataggtgtcaacccagtgaaaacaacattttgatttatttttttttttaagtttatggtgattgtgtcggtttctaaaataag

SEQ ID NO: 422844 - DNA, 559 bp, Homo sapiens
aggaaaacatcctgagggaccagtaagcagggagatcctttttctagtttgcctgtagagttaggaagacagttgatttttcagtcttttacaggatgcttaaacaaagctgtgtaattacataaggtggatctttatcttgcctaagaagataaagtgggaatcttcactccgccagggcaaatttccaaggagctcatttattccatgtctttcaaactttcatgagatacatttctctttcacattgttgctgatttccaaayagctgtcagctagttttttcctccccctttcctattcttcactattttgatagcaaagctcatagaattagaggacttagaagatgctttgtaaacattgccacaaaggaactgctgaaatgattcacaggaagactggtcagttgggagaaagatcctaaagatgttacactggttttcaacaacatgcttagagaattcttgaagcagataggtgtcaacccagtgaaaacaacattttgatttatttttttttttaagtttatggtgattgtgtcggtttctaaaataag

SEQ ID NO: 422845 - DNA, 213 bp, Homo sapiens
tgatttgcatgtttctaatcttattattatcaaattaataaacagctttcagatattctgcttctccctgttactagatcaggataatgtcatttatgtacaggcatctcctgcttactcagttcagcattgatcaataaatattttagacttcyattcaaaacacttccatttttcttttgcccatattctttttattcagtgctgcctgtt

SEQ ID NO: 422846 - DNA, 575 bp, Homo sapiens
ggtacccggtgggagatgtgaacaaagaactcaactcagcaaggtctagggacatcagctagggctacatgtcggcaggggctacctgacatgcctgcatctgcaaaccaactgtcactttttaccactctcacgcctactccctcacctccatcccagaagcacgcatttcccatgtcagttacctttcctggagttcaaaacaaccttttacaaacagggaatcagagacaggatcattcgtgatcactaagccggtgaggacagacgttctattgtgaaatggacaggtttgatgcgctttccctcctttcataccctcctctattatctctttgacatcatatcaacttgaaacacactttgtaacaggaaattcacacgtgcacccccaatagagctgaaacccccactaactagcttgtacatgatgtcyctctctagcttctaccccaggtgacccctctgcccttattggagcgatcctgtgatagccactccaggacatggaacactgaatgggacaatgtgttgacattctggtgtccccttcactgtgacgttgccactggctg

SEQ ID NO: 422847 - DNA, 575 bp, Homo sapiens
ggtacccggtgggagatgtgaacaaagaactcaactcagcaaggtctagggacatcagctagggctacatgtcggcaggggctacctgacatgcctgcatctgcaaaccaactgtcactttttaccactctcacgcctactccctcacctccatcccagaagcacgcatttcccatgtcagttacctttcctggagttcaaaacaaccttttacaaacagggaatcagagacaggatcattcgtgatcactaagccggtgaggacagacgttctattgtgaaatggacaggtttgatgcgctttccctcctttcataccctcctctattatctctttgacatcatatcaacttgaaacacactttgtaacaggaaattcacacgtgcacccccaatagagctgaaacccccactaactagcttgtacatgatgtccctctctagcttctaccccaggtgacccctctgcccttattggagcgwtcctgtgatagccactccaggacatggaacactgaatgggacaatgtgttgacattctggtgtccccttcactgtgacgttgccactggctg

SEQ ID NO: 422848 - DNA, 578 bp, Homo sapiens
attgtcatcccataaatcagctgctcatgtcctcagtgctccctgttctctttgtcttttcttgatcccttttccctttggattctgagtggtccccacttctattccctttaccttccactgagaaaaggcaggtttctgttcccacagtggaccctgtatggtgagcagtcctttctctgaggatctggacaatggccaaagcctccctgatcttcctcgccaacaccatcagaagactctgggctacacttgggctacttctctgcctgaccctgctgttctttccctggrcacctgagccctatctaccagccctcctgggtcacctcacctggggcgatccttctgtgtaagcagcatatgaagcccttccagcaatgcttttaaggtctccaaatgaagcgtcttcatcagtgatcccagagggaggcaggtgaagggccaggcctgcaccatcaccgtcagagtctggaagtgtctcctgcggaaggcctccatgaagagtgggagatagagcaccctgggcagctcctccatggcagagatggacaaggcctggtctctcagcaggctct

SEQ ID NO: 422849 - DNA, 578 bp, Homo sapiens
attgtcatcccataaatcagctgctcatgtcctcagtgctccctgttctctttgtcttttcttgatcccttttccctttggattctgagtggtccccacttctattccctttaccttccactgagaaaaggcaggtttctgttcccacagtggaccctgtatggtgagcagtcctttctctgaggatctggacaatggccaaagcctccctgatcttcctcgccaacaccatcagaagactctgggctacacttgggctacttctctgcctgaccctgctgttctttccctgggcacctgagccctatctaccagccctcctgggtcacctcacctggggcgatccttctgtgtaagcagcatatgaagcccttccagcaatgcttttaaggtctccaaatgaagcgtcttcatcagtgatcccagagggaggcaggtgaagggccaggcctgcaccatcaccgtcasagtctggaagtgtctcctgcggaaggcctccatgaagagtgggagatagagcaccctgggcagctcctccatggcagagatggacaaggcctggtctctcagcaggctct

SEQ ID NO: 422850 - DNA, 573 bp, Homo sapiens
tccagcctgggtgacagagttggactcagactcaaacaaaaacaaattgataaattaattaattaaaatgttagccaggtgtggtcatgcatgactgtaatcctagctactctggaggcagaggaaggagaatcacttgaagcccagaggcagagtttccagggagcccagctcagggccctgcactccagtctgggtgacacactcagagtacatcscagaaaaaaaacaaaataattcactggaactgtaaaagtggtgtgatggtattccacagcatttggaaggtatgtatagaaatgctaactgtacctgggcgcggtggctcactcctgtaatcccagcactttgggagtctgaggggggcagatctcctgaggtcaggagtttgaggccagcatggccaacatggcaaaaccctgtgtctactaaaaatacaaaaattagctgggcatggtggtgagtgcctgtaatccaagctactcaggaggctgaagcaggagaatcgcatgtaactaggaggcagaaatttcagtgaaccaaaccacaccatggcactccagcctgggcaac

SEQ ID NO: 422851 - DNA, 583 bp, Homo sapiens
ttttaatatattttttaaaaacctgcttcgataagaattttaaaatgacaaaaaccaagcacaaatcacaatttgatggatgaagacaaaactacatttagaggaaaaatgaaagcctaaatctgttcatctcacgaaacagacagaaaaatattgtgtgccactttgggatgtgtgtcaccgtccctgactggctggctgctgatcagatgggcatgaccctaagcaggtggtgacttaccagcrctggactcactttgcagagttctgggacctctcagggaaccaagcagtagctccaggaatgagtgctgtgggtctcttctgggtaccctcaggagcttttatggacctttctaaccccacccttcccttctcaatcaccagcttccaatcagaaagtgatacctgattagatcttgcagtcacacccagttaatcctgattgagttttcagctttcttctgactaatcgattgaattagatacacatttatggaagtaaaagaataaataatagggtgaaagtctaaaactcattcgttcatttattccccaaatactgatgaagtttggctaatac

SEQ ID NO: 422852 - DNA, 583 bp, Homo sapiens
ttttaatatattttttaaaaacctgcttcgataagaattttaaaatgacaaaaaccaagcacaaatcacaatttgatggatgaagacaaaactacatttagaggaaaaatgaaagcctaaatctgttcatctcacgaaacagacagaaaaatattgtgtgccactttgggatgtgtgtcaccgtccctgactggctggctgctgatcagatgggcatgaccctaagcaggtggtgacttaccagcactggactcactttgcagagttctgggacctctcagggaaccaagcagtagctccaggaatgagtgctgtgggtctcttctgggtaccctcaggagcttttatrgacctttctaaccccacccttcccttctcaatcaccagcttccaatcagaaagtgatacctgattagatcttgcagtcacacccagttaatcctgattgagttttcagctttcttctgactaatcgattgaattagatacacatttatggaagtaaaagaataaataatagggtgaaagtctaaaactcattcgttcatttattccccaaatactgatgaagtttggctaatac

SEQ ID NO: 422853 - DNA, 465 bp, Homo sapiens
tgtatatcgaatggtcacctgtgttttatgctatctaacatagcagatcatatgcacattcaggtagaagaaaggaaccactgagagtgtgatctatctcaagactaagtcaaggcttcacygaaggaaatcaggacaaagtgaccaagtgaggtggggactgagcggaatgagactaggtgttctaatgggaacctgcaaaggaaacaagacaatgtaaaacatggcggttatcttgtgggcatctagatgtcaggactcaaagtcttttgtcaagattgagtttatttattgattgtttgtttgattttcagactgggcctacatctgtcactcaggctggagtgcagtggcacgatttcagctcactgcagcctcaaccttctggttcaagtgattctctcatttctgcctcccaagtagctgggaattacgggtgcactccaacaagccctactaattttt

SEQ ID NO: 422854 - DNA, 536 bp, Homo sapiens
tgttccaaatttccaacacttggatactgtctgggtatactgtatccaatatgtttctgaaatttagaatgctcattgaataattcaccaccttagtacagcacaggtgtactgaacctcttctgtgctgsacccacccagagaagaagctcagatcttcatccatgaatttttccttgaggcaaacatccatgaacaccttcaagggctgcttctctcctgtccttggacagtcctccactgtctgcctcttactcatggcctctggggagcaggacaggggcctggctccagaccatatggtccaaaaattctcatcaacatcccgcaattccagcacttgaagtttccgcctcctgtgagtaacataggggaaaagctcagaacgtagacaaggacccacccctgacctgggctttcactccacatcaaggacttcagctgcttttttcctcagcgcccctccttctgtctcttctccatccctttcccccttggattctgcctggtacccacttctagtgcctttaccttcc

SEQ ID NO: 422855 - DNA, 571 bp, Homo sapiens
tcccacacactgccactcctcctgagccagctgtcccttccctggatgcctggacccttcccaccaggccacctgagtcacctcaactggggcaaaccttctgggacactagtgtatcaagtcccttcagcacagcttgcaaggtctccagatgagttgtcttcatcagggatcccagagggagagtgaagggaggaccaggcctgcaccatcagcttcagggcctcacaacatctcatgctgaaggcctccatgaacrtcagaggggagacctccctgggcagctagtccagggtgaagatagtcaagaactgcttcctcatcaggctctgccctgccagctccaggagtctggatggggtctggaggctcattctgacaaatctacaaggaaaaactctacagcacaatccagcaaaaaggcaagttcctccgaccaatcccctgcaacccccaattctcccagggcccaagtcatttctctagcatgtgtgaaagagccctcagtttactccagttcctttctgcaataagtggccacagagacatagttctacccttctggtaccat

SEQ ID NO: 422856 - DNA, 568 bp, Homo sapiens
ccatccttacacgtcaattaccgcgaggaatgctcagtcgccaaaatcagctctatgttcctcaggctgaaacacctccagctgcttaaaatgaatatggtcaccttccacagagggcacctgggacagctgrtcaggtgagaaaggatcgtgccctttctctgcagaccacagcgcagccttttttttttgttacagtaaacactagaagacgtgtactgtgtgccagccagtggcgacggcacagtgcagggaacaccagaatgtcaacacattgtcccgttcagtgctccatgtcctggagtggctatcacaggatcacttcaataaaggcagaggggtcacctagggtagaggctagagagggacatcatgtacaaggtacttagtgggcgttttgtctctactgcatgtgcacgtgtgaatttcttgttacaaagtgtgtttcaagttgatatgatgtaaaagaggtaacaaaggagggtatgaaaggagggacagtgcatcaaacttgtgcatttcacagtagaagctctgtcctcaccagcttagtgatcatgaatgatcc

SEQ ID NO: 422857 - DNA, 568 bp, Homo sapiens
ccatccttacacgtcaattaccgcgaggaatgctcagtcgccaaaatcagctctatgttcctcaggctgaaacacctccagctgcttaaaatgaatatggtcaccttccacagagggcacctgggacagctgatcaggtgagaaaggatcgtgccctttctctgcagaccacagcgcagccttttttttttgttacagtaaacactagaagacgtgtactgtgtgccagccagtggcgacggcacagtgcagggracaccagaatgtcaacacattgtcccgttcagtgctccatgtcctggagtggctatcacaggatcacttcaataaaggcagaggggtcacctagggtagaggctagagagggacatcatgtacaaggtacttagtgggcgttttgtctctactgcatgtgcacgtgtgaatttcttgttacaaagtgtgtttcaagttgatatgatgtaaaagaggtaacaaaggagggtatgaaaggagggacagtgcatcaaacttgtgcatttcacagtagaagctctgtcctcaccagcttagtgatcatgaatgatcc

SEQ ID NO: 422858 - DNA, 524 bp, Homo sapiens
tggctgtctttactggctacaaccagtttaattcaagaagggctgctggtcatcaggggaacaagcaaggtttggtgctgcccagagtctccagctaatacacaatatggacatacccttccagggcagcgagaagagagtggstccttgtgcagtgcagctgacatccaccaactaaggcttctggaagcatgtggagactcacagggagtgggcagggtctcagcatctggctagcagtgaaagaccctgagaagaaggtgctttccgtgtggattggctcactgttcttgcccagtaatgttccaggcctttggtgtccacctggtgtgtattaacccactgaacagccacagaaactaacaaggatttaacagacatctaaagaagtgaagaactggaggaggccaagccaagcgtggtggtccacgcctatactccctgcattttgggaggccaaggcaggagaatcacaagctcaggagttccagatcagcctggggaagacagcgaggccttgtttc

SEQ ID NO: 422859 - DNA, 524 bp, Homo sapiens
tggctgtctttactggctacaaccagtttaattcaagaagggctgctggtcatcaggggaacaagcaaggtttggtgctgcccagagtctccagctaatacacaatatggacatacccttccagggcagcgagaagagagtgggtccttgtgcagtgmagctgacatccaccaactaaggcttctggaagcatgtggagactcacagggagtgggcagggtctcagcatctggctagcagtgaaagaccctgagaagaaggtgctttccgtgtggattggctcactgttcttgcccagtaatgttccaggcctttggtgtccacctggtgtgtattaacccactgaacagccacagaaactaacaaggatttaacagacatctaaagaagtgaagaactggaggaggccaagccaagcgtggtggtccacgcctatactccctgcattttgggaggccaaggcaggagaatcacaagctcaggagttccagatcagcctggggaagacagcgaggccttgtttc

SEQ ID NO: 422860 - DNA, 524 bp, Homo sapiens
tggctgtctttactggctacaaccagtttaattcaagaagggctgctggtcatcaggggaacaagcaaggtttggtgctgcccagagtctccagctaatacacaatatggacatacccttccagggcagcgagaagagagtgggtccttgtgcagtgcagctgacatccaccaactaaggcttctggaagcatgtggagactcacagggagtgggcagggtctcagcatctggctagcrgtgaaagaccctgagaagaaggtgctttccgtgtggattggctcactgttcttgcccagtaatgttccaggcctttggtgtccacctggtgtgtattaacccactgaacagccacagaaactaacaaggatttaacagacatctaaagaagtgaagaactggaggaggccaagccaagcgtggtggtccacgcctatactccctgcattttgggaggccaaggcaggagaatcacaagctcaggagttccagatcagcctggggaagacagcgaggccttgtttc

SEQ ID NO: 422861 - DNA, 584 bp, Homo sapiens
attttgtttttgttttttggacagggtctctctcttttgcccaggctggagtacagcagtggtgtgagcatggctcactgcagcctcaatcttctgggctaaagtgattctcccacaccagtcacccaaatagctgggactacagatgcatgccaccatgcccggctaattaaaaaaaaaaaaagtagaggccgagcaccagtggctcacggctctaatcccagcagtttgggaggccaaggcaggtggatcacttgaggtcaggtgttggagaccaacctggccagcayggtgaaacacccgctctactaaaaatgcaaaaattagccaggcatggtggcagatggctgacaccagcttctgaggatggagactgaggcatgagaattgcttgaacctggaaggtaaaggttgcagtgagttgagatcgtgccactgcactccagtctgggcaacacagtgagactccatccccgtcctcacaaaaaaaataacgttgtgtagaggagggtttctgccatgttgcccaggttggtctcaaacccctgggctgaaatgatcctcccactttggcctcccaaagt

SEQ ID NO: 422862 - DNA, 604 bp, Homo sapiens
tcttggaaaagctgtctaccaggtgatgatgtgtgcttctagggaaggcttttcctcagatatccttaagtttaagtcatctggtacagtcccatccaatgctgttcatgggcagattkcccttggtgtcatttctaaaggatgcaatctccaaatgctagggcatgaaggtctaagcatcactgaaagcctccttcacctagtggaaatagtctttcaaatactgcatcaaggtcttgcagtattgattcatattgttactgaacgatgggctcactcttctaagtgcatagaacccaatactatgacaccatgcttgagaaaagtaaaaaagattcaaccaggcatggtggctcacgcctataatcccagcactttaggaggctgaggcaggcagatcccaaggtcagaggtttgagaccaacctggccaacatggagaaaccccctttctgctaaaaatacaaaagttagctcagtgtggtgacatgtgcctgtaatcccagctactcaggaggctgaggcatgagaaccacttgaacccaggatgcagaagtagcagtgagccaaggtagcaccattgtactccagcctgggcaacagag

SEQ ID NO: 422863 - DNA, 487 bp, Homo sapiens
tcatttttctgtctaatgtcgtaaacagatcaaatccttccctgcctcacactcaagactatgaagttcacatattaataaaaaaaaatcagtgtttgtggagttcatgaatgaatgatttttttattttttgacagaatctccctctgtcacccagactggagtgcagtggcacaattctggctcactgcaamcattgcctcctgggttcaagcaattctcctgcctcagcctcctgagtcgctgtgtttcaggcacctgccatcatgccgggctaatttttgtatttttgtatttttgtggagacggggttttacctttttgacctgactggtcttgaacccctgacatcaggtgatctactcaccttgtccttccaaagtgctggaattacaggtatgagccaccttgcccacccttgaatgaatgtattcttgacttctaccctatccctaacactgtcgatttcttgcttcatgaagtgaat

SEQ ID NO: 422864 - DNA, 487 bp, Homo sapiens
tcatttttctgtctaatgtcgtaaacagatcaaatccttccctgcctcacactcaagactatgaagttcacatattaataaaaaaaaatcagtgtttgtggagttcatgaatgaatgatttttttattttttgacagaatctccctctgtcacccagactggagtgcagtggcacaattctggctcactgcaaacattgcctcctgggttcaagcaattctcctgcctcagcctcctgagtcgctgtgtttcaggcacctgccatcatgccgggctaatttttgtatttttgtatttttgtggagacggggtttyacctttttgacctgactggtcttgaacccctgacatcaggtgatctactcaccttgtccttccaaagtgctggaattacaggtatgagccaccttgcccacccttgaatgaatgtattcttgacttctaccctatccctaacactgtcgatttcttgcttcatgaagtgaat

SEQ ID NO: 422865 - DNA, 431 bp, Homo sapiens
agctagcatcggatacgtggaggggcgtgggtgggagttgtgattagaaaggtcaataaaagcttctaaagacccacagggagagacccaaagtcttcaagcctggagttcctgcttggttcttcctgaggwctgagcaccttctaaactacatccagatctggtaagtcactaatttctgtaaggacactcccatctgacctagagtcagtcagtctgggatggtgacagtgcagcctacgatggcagagagctatatcctgtccttttttatatatatatatgaacaatttgaagctttgaatgttttcctctaaatgcagttctgtctttatttcaaaaaagttgattgtgctttggttgatgccattttaaaattcttgaagggagcagtgactcatgcctttaaccccaacactttgggaggccaa

SEQ ID NO: 422866 - DNA, 431 bp, Homo sapiens
agctagcatcggatacgtggaggggcgtgggtgggagttgtgattagaaaggtcaataaaagcttctaaagacccacagggagagacccaaagtcttcaagcctggagttcctgcttggttcttcctgaggtctgagcaccttctaaactacatccagatctggtaagtcactaatttctgtaaggacactcccatctgacctasagtcagtcagtctgggatggtgacagtgcagcctacgatggcagagagctatatcctgtccttttttatatatatatatgaacaatttgaagctttgaatgttttcctctaaatgcagttctgtctttatttcaaaaaagttgattgtgctttggttgatgccattttaaaattcttgaagggagcagtgactcatgcctttaaccccaacactttgggaggccaa

SEQ ID NO: 422867 - DNA, 431 bp, Homo sapiens
agctagcatcggatacgtggaggggcgtgggtgggagttgtgattagaaaggtcaataaaagcttctaaagacccacagggagagacccaaagtcttcaagcctggagttcctgcttggttcttcctgaggtctgagcaccttctaaactacatccagatctggtaagtcactaatttctgtaaggacactcccatctgacctagagtcagtcagtctgggatggtgacagtgcagcctacgatggcasagagctatatcctgtccttttttatatatatatatgaacaatttgaagctttgaatgttttcctctaaatgcagttctgtctttatttcaaaaaagttgattgtgctttggttgatgccattttaaaattcttgaagggagcagtgactcatgcctttaaccccaacactttgggaggccaa

SEQ ID NO: 422868 - DNA, 476 bp, Homo sapiens
aagctgatcaagcaggggcaggacttgggggaaatgttgccatggattcgatgggactttgggracctgtatcctgtagagtcgaaaatgggaatctgaatgtctagagtggaattcaggcttgagaatacatgagggagttactcttgcatggatggttgtaaagaaacaatcagaaataaaggaaaactgagcagaatctgtctggtgccctctattattaagtaacctgttttccagtttaagcctcaggaatcttcagttattgatggaaaaaacaaaaggcactgactgagttgtccaatcaataagatgcagcccaggaaaatcaaggcatttaaatgaaatttggttattgtaatcactttcctcccattcttttattggagacagagtttcactcttgttgcccaggctggagtttagagtgcaatggtgccatctcagctgactgcaacctccacctggggtttaaa

SEQ ID NO: 422869 - DNA, 476 bp, Homo sapiens
aagctgatcaagcaggggcaggacttgggggaaatgttgccatggattcgatgggactttggggacctgtatcctgtagagtcgaaaatgggaatctgaatgtctagagtggaattcaggcttgagaatacatgagggagttactcttgcatggatggttgtaaagaaacaatcagaaataaaggaaaactgagcagaatctgtctggtgccctctattattaagtaacctgttttccagtttaagcctcaggaatcttcagttattgatggaaaaaacaaaaggcactgactgagttgtccaatcaataagatgcagcccargaaaatcaaggcatttaaatgaaatttggttattgtaatcactttcctcccattcttttattggagacagagtttcactcttgttgcccaggctggagtttagagtgcaatggtgccatctcagctgactgcaacctccacctggggtttaaa

SEQ ID NO: 422870 - DNA, 601 bp, Homo sapiens
ttctttgggcagtgtggtcattttcacaatattgtgtctgtcaatccgtgagcatgggctgtttttctacttttttgttgtctatgatttttttcagcagtgtcttgtagttcatctcatagagatcctttacctaatggttaagtgtattcctaggttgtttttgttattgtcactgtttttgttgttgttttgcaactattgtgaagggatggarttcttgaattgattctcagcttgcttgttgttggtatcaaacagtggtacttatttgtacatattgattttgtacctgagatttaagtgaattcacttatcgcatctatgagtcttggtggaatctttccagttttctaagcacatatgatcacatcattggcaaacacaggtagtttcacttccttctttccaatttaattatactttattccttttgcttaccagattgctctgacaaaaattttcagtcctatgttgattacaagtggataaagtgaggatttttgtctgcttgtagttcctagcaggaatactttcaacgtttcttcattcaatatgatgttgcatgtggatttgtcatttttggcttctattattttga

SEQ ID NO: 422871 - DNA, 616 bp, Homo sapiens
ggtgtgagccaccgtgcccggcctctcacgtgcctttttaagttgatgggaaaatgacacccaggataatttatggccatagtgagaattattggaaatctttaagactgtttttcttacaaaaccacaatggtaggattaaacagtctgaatgggatgctagcatgtagagccttctaaactctctttctctccttttttggggaatttgggatctgcctactgattacaattaattgcacttttttaactgtttgattaagatttttttttttcaacagtctgactctgctgcccaggctggagtacagcactggtgtgagcatggctcactgcagcatcaatcttctggattcaagggattctcccacctcagccacccaagtarctgggactacagatgcatgccaccatgtgtagggaaaagaaagagagatcagactgttactgtgtctatgtagaaaaggaagacataagaaactccattttgacctgtgccctgaagaattgctttgccctgagatgctattaatctgtaactttgccccaaccttgagctcacaaaaacatgtgttgtatggaatcaaggtttaagggatctagggcagtgcaggat

SEQ ID NO: 422872 - DNA, 523 bp, Homo sapiens
cgggcttcaggccctccttgatcagaaggtggagcttcaccagtgaccctcaccttcctgtccaggattctgtctgcctcccaccaccaaccatggagcccaggtcacttgtaccaaggagcatccaaagaccagygctgatcagtccgcaacacccctcagcctccctcctacactcatcaaggcccaaagtccagagggttcaagacagcagtgggatggtgcatcagcactgacccgagtgtgcacagacccacctgggctgcgacagcatctgggcttgaccacaaccacactccaaaattagagcaggtgccatgagagatgaggcagtgagagcggacacccccaagctgcaggagaaggggggatctcctggaccctcgagagtactgggggacctcatttggtaactgtgacctggacaacttcagttgcgtctttggagctactgccctgccaactcaggaggaccaggactccctcttgtcccaggctcccatcagctctgaagtgtacgcag

SEQ ID NO: 422873 - DNA, 587 bp, Homo sapiens
gggcatgccttccctagcagcaaagatggagctccagttcctcagacagtgatsagccacaggaagggcagggggtggggccaatgaagatcctcttgggctgcctgacttccctcagtgtacacatcagctcagcccgaagtggggtgaagatctcccaattgacacgaaccaaggaattcaaactctcctcaggggcaggatacgtctccaggcttaacttgctcagcccactggtgtggcgcagcaggtccttcagggcacccatagacatacaatttctgccaaagtagaaggtggtgagctgggagcagcggctcaggccaggcaggatggcactgagttgggagtagtggatctgacagccctccaagatgagggtttcgagagaggcagcaattttctctagcagagctccgaggggttcaagactgatgcggaacagcagcacgtagctgagattcagatgctttaggtaaccgaggcttgggtactgggagagacacttcatgtcttcttccaataggtagccataagttaattccaagttctccaaggggttctggaggcacctgtggagatcaaga

SEQ ID NO: 422874 - DNA, 515 bp, Homo sapiens
gtgtccaagtgcctggaagagaactttggatttctctaccccactgggcatgccttccctagcagcaaagatggagctccagttcctcagacagtgatcagccacaggaagggcagggggtgggrccaatgaagatcctcttgggctgcctgacttccctcagtgtacacatcagctcagcccgaagtggggtgaagatctcccaattgacacgaaccaaggaattcaaactctcctcaggggcaggatacgtctccaggcttaacttgctcagcccactggtgtggcgcagcaggtccttcagggcacccatagacatacaatttctgccaaagtagaaggtggtgagctgggagcagcggctcaggccaggcaggatggcactgagttgggagtagtggatctgacagccctccaagatgagggtttcgagagaggcagcaattttctctagcagagctccgaggggttcaagactgatgcggaacagcagcacgtagctgagattcagatgc

SEQ ID NO: 422875 - DNA, 587 bp, Homo sapiens
gggcatgccttccctagcagcaaagatggagctccagttcctcagacagtgatcagccacaggaagggcagggggtggggccaatgaagatcctcttgggctgcctgacttccctcagtgtacacatcagctcagcccgaagtggggtgaagatctcccaattgacacgaaccaaggaattcaaactctcctcaggggcaggatacgtctccaggcttaacttgctcagcccactggtgtggcgcagcaggtccttcagggcacccatagacatrcaatttctgccaaagtagaaggtggtgagctgggagcagcggctcaggccaggcaggatggcactgagttgggagtagtggatctgacagccctccaagatgagggtttcgagagaggcagcaattttctctagcagagctccgaggggttcaagactgatgcggaacagcagcacgtagctgagattcagatgctttaggtaaccgaggcttgggtactgggagagacacttcatgtcttcttccaataggtagccataagttaattccaagttctccaaggggttctggaggcacctgtggagatcaaga

SEQ ID NO: 422876 - DNA, 587 bp, Homo sapiens
gggcatgccttccctagcagcaaagatggagctccagttcctcagacagtgatcagccacaggaagggcagggggtggggccaatgaagatcctcttgggctgcctgacttccctcagtgtacacatcagctcagcccgaagtggggtgaagatctcccaattgacacgaaccaaggaattcaaactctcctcaggggcaggatacgtctccaggcttaacttgctcagcccactggtgtggcgcagcaggtccttcagggcacccatagacatacaatttctgccaaagtagaaggtggtgagctgggagcagcggctcaggccaggcaggatggcactgagttgggagtagtggatctgacagccctccaagatgagggtttygagagaggcagcaattttctctagcagagctccgaggggttcaagactgatgcggaacagcagcacgtagctgagattcagatgctttaggtaaccgaggcttgggtactgggagagacacttcatgtcttcttccaataggtagccataagttaattccaagttctccaaggggttctggaggcacctgtggagatcaaga

SEQ ID NO: 422877 - DNA, 587 bp, Homo sapiens
gggcatgccttccctagcagcaaagatggagctccagttcctcagacagtgatcagccacaggaagggcagggggtggggccaatgaagatcctcttgggctgcctgacttccctcagtgtacacatcagctcagcccgaagtggggtgaagatctcccaattgacacgaaccaaggaattcaaactctcctcaggggcaggatacgtctccaggcttaacttgctcagcccactggtgtggcgcagcaggtccttcagggcacccatagacatacaatttctgccaaagtagaaggtggtgagctgggagcagcggctcaggccaggcaggatggcactgagttgggagtagtggatctgacagccctccaagatgagggtttcgagagaggcagcaattttctcyagcagagctccgaggggttcaagactgatgcggaacagcagcacgtagctgagattcagatgctttaggtaaccgaggcttgggtactgggagagacacttcatgtcttcttccaataggtagccataagttaattccaagttctccaaggggttctggaggcacctgtggagatcaaga

SEQ ID NO: 422878 - DNA, 575 bp, Homo sapiens
ggtacccggtgggagatgtgaacaaagaactcaactcagcaaggtctagggacatcagctagggctacatgtcggcaggggctmcctgacatgcctgcatctgcaaaccaactgtcactttttaccactctcacgcctactccctcacctccatcccagaagcacgcatttcccatgtcagttacctttcctggagttcaaaacaaccttttacaaacagggaatcagagacaggatcattcgtgatcactaagccggtgaggacagacgttctattgtgaaatggacaggtttgatgcgctttccctcctttcataccctcctctattatctctttgacatcatatcaacttgaaacacactttgtaacaggaaattcacacgtgcacccccaatagagctgaaacccccactaactagcttgtacatgatgtccctctctagcttctaccccaggtgacccctctgcccttattggagcgatcctgtgatagccactccaggacatggaacactgaatgggacaatgtgttgacattctggtgtccccttcactgtgacgttgccactggctg

SEQ ID NO: 422879 - DNA, 409 bp, Homo sapiens
agaataacattaattagaaaataaaaaacaytgtaagtagagaaagaggccctagaagaaaagaaaaagtcttacatttagtaccttttactgcactttttcctgcttttggaacaaggaatcctgcattttcattttgcacaggcccccacaaattatgtgaccttggttataatgatgcatcagacaagatcctttgagactgaaaaagttcactatctttcagaatgcctaacatatagaaagatcagatagtgagatagatattgtttgttcattatgttaaagcagctactgtgcaagtacttgggaagcgtaaatacttggtccatcacttccttagaatctgcttaccaataatgattggctttatgtcgtttatcgttacaggaataggaagttttttttt

SEQ ID NO: 422880 - DNA, 618 bp, Homo sapiens
ggctctgcctatgttcttctgatctgcctcctccttttcattccacttacggttactgtcctaccccagacaattacctagcctcttccccttgtctcttctcactccaatctatctgacaatactgatagattaatcttccacacacacagctctgataatatagctttgctattcaacgcacatacatgaatccggccttcaaagctctccttgcttcaggcaatctggctagctccttctttcctgtgctgggaacatgccttgtggattctgattgtgtgattttgctctyacttttgactttctctggactgtccttccctctttatggaaagactcataacttttatacaagacagctcaaacaacaataaaaatatgtgggttggttgtcataggaatatgtaagttgatgagaatctggagagcggaaacaaacaagaagtgccaaatccaggaatcattttaaaataaaaatttatttggtcactatctgttatggaggttctatgaaacatactacactgttatggaggttctatgaaacatgctacactgaggtagcacttagtccactgtcattactaaaagattttctgggggagtcaacatgag

SEQ ID NO: 422881 - DNA, 618 bp, Homo sapiens
ggctctgcctatgttcttctgatctgcctcctccttttcattccacttacggttactgtcctaccccagacaattacctagcctcttccccttgtctcttctcactccaatctatctgacaatactgatagattaatcttccacacacacagctctgataatatagctttgctattcaacgcacatacatgaatccggccttcaaagctctccttgcttcaggcaatctggctagctccttctttcctgtgctgggaacatgccttgtggattctgattgtgtgattttgctctcacttttgactttctctggactgtccttccctctttatggaaagactcatawcttttatacaagacagctcaaacaacaataaaaatatgtgggttggttgtcataggaatatgtaagttgatgagaatctggagagcggaaacaaacaagaagtgccaaatccaggaatcattttaaaataaaaatttatttggtcactatctgttatggaggttctatgaaacatactacactgttatggaggttctatgaaacatgctacactgaggtagcacttagtccactgtcattactaaaagattttctgggggagtcaacatgag

SEQ ID NO: 422882 - DNA, 515 bp, Homo sapiens
tggactttcccagcagcacacgccggggctccctgcgagcggcgggtgccagggctagctcggcagccgtcgcagtcgccactcggctcaaggggacagaggccggcagcacccaaggccgctgccgcgcaaccgggacgcgatccccgcgggctctgcccccaggcgaaaggtccctgcgcggcgcgcacacgtggatgcggctgaggtcgccgcgccttctcgcaccctccttcagccgccttaggtcgccccggccgaggcgcggtgaccggacagaycctcgcgaaggagttctaaggcgaagtccatggaggcaaagcaaatccattcgcctttccttagattgtttgattttctcctactggtttgttgttgagcctgcgggcgctggtccccgcgcggcgctgggaagttgcaaagagcgtgggtggagaccctgcagcagcacccgcgggctgggctgggcggggagcagcgccggggcttggttgggctctggggacgagagggcg

SEQ ID NO: 422883 - DNA, 480 bp, Homo sapiens
gacataatgaaaaagtagttgtggccatcaccacaaagtaaggttaaacacaggggcatcagtcttgtagggtacaattgataaagatcactaaaatttttatcttctttatcaataagttgttagctggtagacaatagcaataaaatgcttttcacaccactactagatctttatttaactccagacttcaactttccactgagttttcgatatgtcacctagaagataacactggaggaaaaaactactacttttatctaacagagagraagatagactcttaacagtggcctggaataatataatggcttggtaaggacttaagagaaaatagtaagtgaaagatcccaaaagaactctcaggaatagttggggacacaggtcttccataaaacagctcttggtgccactgtttaaaatactggaataccatcctgaaaagataattgttatggaccattagtacttatgttaata

SEQ ID NO: 422884 - DNA, 480 bp, Homo sapiens
gacataatgaaaaagtagttgtggccatcaccacaaagtaaggttaaacacaggggcatcagtcttgtagggtacaattgataaagatcactaaaatttttatcttctttatcaataagttgttagctggtagacaatagcaataaaatgcttttcacaccactactagatctttatttaactccagacttcaactttccactgagttttcgatatgtcacctagaagataacactggaggaaaaaactactacttttatctaacagagaggaagatagactcttaacagtggcctggaataatataatggcttggtaaggacttaagagaaaatagtargtgaaagatcccaaaagaactctcaggaatagttggggacacaggtcttccataaaacagctcttggtgccactgtttaaaatactggaataccatcctgaaaagataattgttatggaccattagtacttatgttaata

SEQ ID NO: 422885 - DNA, 578 bp, Homo sapiens
ttgtgaacatctgagcaggcattttcctttgttatggcagcagacaaaaacctccttttttaaaaaatagcaatatgtcaggtttttagaagcaatgctactcggcttcattttgctgtgactcattccatgtgttttctttggggactctttggcctgagggttggtggcatttttgcatcctggaggcgggcacaatacagtagtgttaccaccattgcagcacaagggtggcatgcccctgtgccacmtgctgtcctagccctggctgtaagcagttgcctgccctaagtcctcctcttcattcccttgctgtaactcaccatccttcactggaagcagaggttcagccatcagttcacttttttcaaagaggcttggtcccctggctttcatgctctgggccagccctagctcaggaatcactagttctaaaaacatcctttggtgcttctgcaaaaacagttgggtgtagtgcagcccccaagtccccagaagtttggtggagatggtgggtggaggtcacctccagatttcatgcccgtgctgtggatggaaagcgccatgtgttcagagca

SEQ ID NO: 422886 - DNA, 614 bp, Homo sapiens
tatgtgacaccattgggctgaagtggacttagtaaagtcatattaacattctgagagagatgatatacctaaatgagatcaaacstcacatttagctaagagacttgactttctttttaaatagcgtgccaaaaaaagatatcctcccatgttggtattaattctttgtacgatattttccaggatgtcccaatcaattaattataaaaatatttattaataaaccactaatggaatttttaaattttccagccaggattcttattttcagccttttaaaaagtactcttattgacctatttatccagtacacaggcattaagaaattattggccacaggtgaacacaccttattcttttatatgccaacaaatttcttgctgaagatgcttttgaaaattaaaaaatgatttcttctgggaactcatgcactatttcagacaaggtttgtttctcttaaatgagtgttctatttcttcaattagtaacttatatggcattcagaaaatctgaattttctgagctggtctctaaaatttcactttttgccttatgtacgttctctctctgtgactttctcaagcacatgaaaccaactgtaaaatattttcttg

SEQ ID NO: 422887 - DNA, 563 bp, Homo sapiens
agtttaacaaaatccttgtgtgcacacctgaaatttagccagtggctgcactgatggcaggtgttttgactttaayaaagtcacaacacactgcgttcctctcggacctcattgtcaaacgggctacacaaaactgacctcacaggtggttgtgagaaatggaagaatgcatgtagtagtggtcacttgtatcattatagtcattgccaggtgctttcaaagtttctatttcctgatgcagagatatgagctggcccctttaccactggattgctgtatgccttggcccattctccctgctctcttcgcatcaggctttctatctgtaatatgggtgtttgactaatgcgcagtatcctttgaaacagactctgatttcccttcatattccctgcttcactttccaagaggaagagggaaggggccctctcaccctgactctggcctttaggatgtcacaaggtactctggactgtttgtaaaccacccccaacctatacatatgctaaagcttaatagatggaattaggaggtggggcctgtgggaggtgattaggtcataa

SEQ ID NO: 422888 - DNA, 602 bp, Homo sapiens
tccatccctacagtttttcattttctggaatgtaatataaacagaacctttggggatggcttttcactagcaaaatgcatttaaaatccatccatgttatagtgtgaatcaatagctcacttccttttattgccaaatgattttcattgtatggataccacagtgtgttcatccattcatctgcttaaagatatcttagtgacttcactttggggtagttatgaataaagctgctatacatatttttgtatggacaaaagtttcaaatcagttggctaaatagctaggagcacagtttgccacattaaagctcagtaaattgttacaaagtaaacacactcatcagctagcacaagcaacagaacagccctcacccagtcgtacattccctcctccacaaaagtcacaattatcttcacttctgttgccacacgttaattttgcctgggttcaagctttgaatggatcatctggtatgttcttctttgtgtctggcttctttcgctaagtatcctctgtgttggtgcatgtggtrgttattttcattgttctatatccttccattgcaaatatatattacagttttgtctttaggtttttgc

SEQ ID NO: 422889 - DNA, 618 bp, Homo sapiens
ttgttcctgcagcacttgttgaaagggctatcactcctctactaaactgctgttgcatttttctcaaaaattaattaagcatatttctgggtggggggtctctgttctgcaccagtaattaatgtgtctatccctccaccagcaccatactgagttgatcactgtagttatagagtaagctttaatacttggtacagtgatttcttccatttaattattctttttcaaaattgtttcagctaacctagggccactcccttttaatataaagtttacaataagtttgcatatgtatacaaaaaacaatgccaagatttagaattgtattaaacctgcaatttgggggaagctgacatctatgttgagacttcccatccctaaatatggcatgactctccatttatgtagatatttkatttctttcagcagaattttgtaatttgcactatattctcctgtatatgttttattagatttatacctacatattaatacttcatgtatttcgagcagttgtaaatggtattgcagtttttattttggtttccacttgtttattgttaccatagagagatgcaatttgtgtacgtgtgttattcttgtgtattgcagccttga

SEQ ID NO: 422890 - DNA, 618 bp, Homo sapiens
ttgttcctgcagcacttgttgaaagggctatcactcctctactaaactgctgttgcatttttctcaaaaattaattaagcatatttctgggtggggggtctctgttctgcaccagtaattaatgtgtctatccctccaccagcaccatactgagttgatcactgtagttatagagtaagctttaatacttggtacagtgatttcttccatttaattattctttttcaaaattgtttcagctaacctagggccactcccttttaatataaagtttacaataagtttgcatatgtatacaaaaaacaatgccaagatttagaattgtattaaacctgcaatttgggggaagctgacatctatgttgagacttcccatccctaaatatggcatgactctccatttatgtagatatttgatttctttcagcagaattttgtaatttgcactatattctcctgtatatgttttattagatttatacctacatattaatactycatgtatttcgagcagttgtaaatggtattgcagtttttattttggtttccacttgtttattgttaccatagagagatgcaatttgtgtacgtgtgttattcttgtgtattgcagccttga

SEQ ID NO: 422891 - DNA, 609 bp, Homo sapiens
tctttcaccattaagtgtgatgttaactgtagatttttgcaaatgctgtttatgaagttggaggaaattaccctctattccaagtttgctaaragtttatatcataaatgggttttgaattttgtcaaaaccttttcctatgtcaattgataagatcatatgatttttcttcttcagtttacaaggcagaatatgttgattggcttttcaaatattaaaacagtcttgcataacttgagtgaaattcctcttgattgtggtctactactctttttatgcattactaaatttgatttgctaacattgtcttgaggatttttccatctaagcttatgagccaaatcagcctgcagtgttctttcctctgtcccttcctccttcctccctcccttccttcctttgtgctgtctttgttttgttttgatatcaaaataatgatatcatagtcctttctcttctattttctggaagagattgtgtaaaactggtgttgattcttctttaaatatttggtaaatactccagtgaaaccatttgggtctggatacattgtgttcaggagctttttagttacaaatccaatttatataatggttataggactattca

SEQ ID NO: 422892 - DNA, 570 bp, Homo sapiens
tggaggaatgtgggctggctgggtggcacagagaattactgtttccattaaaaggaaatgtgttctggccgggagccgtgctcacgctgtaatcccagcaccttgagaggctcargcaggtggatcacttgaggtcaggagttcgagaccagcctggccaacctggtaaaaccccgtctctactaaaaatacaaaacttagctgggcgtggtggcaggcgcctgtaatcccagcactttggaaggcggaggcgggcggatcacttgaggctaggagttagagaccagcctgaccaacatgggaaaccccgtgtctactaaaaatacaaaaattagcctggcatggtggcacatgcctgtagtcccagctactcgggaggctgaggcaggagaatcgcttgaacccgggagtggtatgttgcagtgagcggagatccgccactgcactccagcctgggcaacagagcaaaaacctgcctaaaaaaaaaaaaagtatcacatggagacgtgtgtccgtttgggactgttttccagcctttccacactctctccctccccatctgtccctcca

SEQ ID NO: 422893 - DNA, 576 bp, Homo sapiens
caaaacacaccttttcttttttttgagacagagtctcactctgtcgctcaggatggagtgcaatagcacaatctcagctcgctgcaacctctgcctcctaagtttaggtgattttgttgcctcagcctccctagtagctgggtttacaggctcttgccactatgcctggctaattttttgtatttttagtagagacagggtttcgtcatgttgcccaggctggtcttgatctcctgaccttggtgatccacctgcttcagcctctcaaagtgctgggattacagcatgagccaccatgcctggccccaaaatgcacttttaacatggtctttgttactgcaygtttctaattttgttgctccctggtgagagaatgtgatttgtataacagcaattctgggaaaggggctgaagcttcctgctcctttagcacagctaattttcccaaacgctgtccatgagcttggaaagagcattgtactctgttgggatgggctcaaatctctctgtaaaaatgagtgttcttctgttgttattgttttggtttttgtttgttttgttttgttttttgtctca

SEQ ID NO: 422894 - DNA, 734 bp, Homo sapiens
acaattgtttgtattttgcttatgtcaaggccagtgtttatttagctgctagagaaaaaagaaaaaccttgtggcagttagaccatagttaatctttaagtttagagtgcttgacctaacccttgcctggcatggccttaggtcttgtttataattgatatctcattgccacaaaaagtctgttctgccagtcttatgatctctattttaacattaatgctggtcagtcgctgtgtctaaaccacaaacatgagggggtataatgagacatgtctgacctcccatcccatcatggccaggaactcaattgtaagatttttctggggtccccttggctaaggggagtgtccttcagttggtgggggcttaggatttcatttttagtttacaatttctgcaaagggaaaggctgctgataaaccttaaacttcctgcacttgtgtttcaaagcaataaatcagacctcttaagtactaatggagttgtatacaatttgtatggtggccagtttcccttctagcctgaaagccctgtgaagacagagttcttggcttttttattccttaacagttttcttactcccaaattagcatgtagcagcagstacacagatgagaatctctttctttgttccccacagtttctaccttgaacaattctccctgccaacatgcagcatcatcctgtagccttatagtttccccaacatctaatatatgttcttccagtaactg

SEQ ID NO: 422895 - DNA, 607 bp, Homo sapiens
tactattgcaatggtattagatttcaacatatgaagttgtgaagggcacaaacattcagaccataacacttaagtattttattctactggatactatcataaatgggattattttctgaatttccttttggatagttcattgttggagtwtttttttttacagaaaacctaattgttatgtgttgattttgtactctgcaacttcgccgaaaccatttgttagctcatagtttttttgtggattatttgctaaataatgttatctgcaaatagagtagttttacttctgcctttcaatttgaatgtcttttatttctttttcttgcctatttgctctggctagaacttttaatacagtgttgaattgcagtggtgaaagcactatgctttgcctgttcatgatcttagaggggatgtttcagtctttcactatggagtatgttacctgtgagttttttatatatgcactttattatgttgaagaactttgcttcctttcctctgttttctgacttttattatccttgaatggtattgggttttgtatttttttctgcctcattgatatgatcacgtgtttattcatttgttttattaatgtggtgtc

SEQ ID NO: 422896 - DNA, 352 bp, Homo sapiens
ctctgtaaccttccactggacatgctcacttccatgacatgaagacattccaagagctgcatggcctgcatgtgtcttattgtcactctgtactctcacctcccccaacacccaacctcctggttctaatttccagaccttctaaggcccctatacaggccctctggaagtagcccttcytctcttcctttgcttagtgaattccctcttccacatctccactgctgccccgtaatatagacaatctacctctaacgctgctctccagcacagtctccactgtactttggtggcattgcttcctgagtgaaaactgaattatgttacagggattcaggtgtgtattttcagt

SEQ ID NO: 422897 - DNA, 583 bp, Homo sapiens
cattctgccaaacagtcaactggggatttcaaaacttggacttgaagggattttcggtattctctaataaagatgcactctatgtctatatctttttgtattttcaagtgcaaaaagtaaacatttttgctcaaatattccaatttccaaagaattcatataacggtattggattgacccccaaataaatgtaagctgagaaattgggcaaggctgataatgttcatctcctctcatgttcatggaataggggatgtatctagtgagatttatagttgtatgggtcctgctgttggctttttttggactagtttgagacattcaagccctagaatcctttaaaaatcaataagatcgattgaggacmctcagaatgtctgctcttttcatcttttcaattacgccaatcactttcttcactgatgacaagcactcaaattgtatttctctctttaatgctaatatacgaatattagaaatgaaaaacagaaaacaaagtgtgtatataatgtgtctgatacttggttttaagtgaaaccagtaatgttccaactaaagatgtgctttcctagtgttacacagc

SEQ ID NO: 422898 - DNA, 447 bp, Homo sapiens
gaacgtggaattaagcaatccctgtggtgagtaataaggggagctcagaagcatcagggtaccaatgggaaaagtgtggggtctggttcattccaccttggaactttttcacactgatgwggaggaggaaggagagtataacgaagtaacagaagaggttacaaagcatgtttatttaccagctaaagctaaagcggcaaaggagggagaggttcatccctaccattctgcaccccctcattattattttgaagaaaatgaccctccagatctttcttttctggaggacactgggtaaaaagtagttgccccagtgactgagcagcgcctcaagtgaccgcttttagttctattcagggagaaattcagcaagctagacgagagggtgatttagaggcttggcagttccctgttagaatacactccctagttcaacagggaaatatt

SEQ ID NO: 422899 - DNA, 536 bp, Homo sapiens
tgcagccaggttgatactgatgctgaggaggacttcaactgtcatgagcaataccmgtcaaactctgccacccacctggggacagatcaagaagctgtcactgatgataaaagaaaacctgaggaaagtggaacaaccagtcacaatgagtaatttaatggtagctatgatagtgatgatcaccactgccatgagtattccttcagtaagggctgacacagggaacaatcatacttattgggcatatttatcaatcttggctggcaataatgcctggatataatcactctatgacacagttacacatgctttctgatctctggatttaccataataaatctgctcctataattgaggtataccgccctaaaaaacctatttgtaaacaaaattgaacctggccagaaaaaatgaatgtacttgtttaggaagattgcattgcagaacagacagaggtgctgcacaatgattcctatggaatcattattgattgatcccctaaggggatatttagcataaattgcacctctcagtct

SEQ ID NO: 422900 - DNA, 536 bp, Homo sapiens
tgcagccaggttgatactgatgctgaggaggacttcaactgtcatgagcaataccagtcaaacwctgccacccacctggggacagatcaagaagctgtcactgatgataaaagaaaacctgaggaaagtggaacaaccagtcacaatgagtaatttaatggtagctatgatagtgatgatcaccactgccatgagtattccttcagtaagggctgacacagggaacaatcatacttattgggcatatttatcaatcttggctggcaataatgcctggatataatcactctatgacacagttacacatgctttctgatctctggatttaccataataaatctgctcctataattgaggtataccgccctaaaaaacctatttgtaaacaaaattgaacctggccagaaaaaatgaatgtacttgtttaggaagattgcattgcagaacagacagaggtgctgcacaatgattcctatggaatcattattgattgatcccctaaggggatatttagcataaattgcacctctcagtct

SEQ ID NO: 422901 - DNA, 536 bp, Homo sapiens
tgcagccaggttgatactgatgctgaggaggacttcaactgtcatgagcaataccagtcaaactcwgccacccacctggggacagatcaagaagctgtcactgatgataaaagaaaacctgaggaaagtggaacaaccagtcacaatgagtaatttaatggtagctatgatagtgatgatcaccactgccatgagtattccttcagtaagggctgacacagggaacaatcatacttattgggcatatttatcaatcttggctggcaataatgcctggatataatcactctatgacacagttacacatgctttctgatctctggatttaccataataaatctgctcctataattgaggtataccgccctaaaaaacctatttgtaaacaaaattgaacctggccagaaaaaatgaatgtacttgtttaggaagattgcattgcagaacagacagaggtgctgcacaatgattcctatggaatcattattgattgatcccctaaggggatatttagcataaattgcacctctcagtct

SEQ ID NO: 422902 - DNA, 597 bp, Homo sapiens
ggcactgtggatctaggatacacagggtgggcatgggctgtaggaggtcttgaaattgtggcagggggtctgcacttgacctaaaagataaggcaccagcacttctgaaaccagacagaattggatggaagccattatttcaaggtgatggtctgtatttatgaggattaatcttttggataatctggaaggcctgggggactcactggaaagatatggtaatcatttcaataaatatttaagggctaaaccaagttgagrctagtaggaccagggagaaacagctccacactacatattgagatcatctaaagacaggaaattgatgtgttatatgaggttgattttgaagagtaaggaggcatatctggtccccagtgtcatctctggaaagaactgcacctgacccaacccaccctaattatctgttctctcctgattgtgaagtctatgaaacgaaacacacaggtcattttcagaaaacgaagacatggtgttagtagcaaaatctcactgtggtatgaaggaacatttatgaactgtcaggaaggagcccttcattgctctgttgtccagtcaagaatgggagacactaag

SEQ ID NO: 422903 - DNA, 597 bp, Homo sapiens
ggcactgtggatctaggatacacagggtgggcatgggctgtaggaggtcttgaaattgtggcagggggtctgcacttgacctaaaagataaggcaccagcacttctgaaaccagacagaattggatggaagccattatttcaaggtgatggtctgtatttatgaggattaatcttttggataatctggaaggcctgggggactcactggaaagatatggtaatcatttcaataaatatttaagggctaaaccaagttgagactagtaggaccagggagaaacagctccacactacatattgagatcatctaaagacaggaaattgatgtkttatatgaggttgattttgaagagtaaggaggcatatctggtccccagtgtcatctctggaaagaactgcacctgacccaacccaccctaattatctgttctctcctgattgtgaagtctatgaaacgaaacacacaggtcattttcagaaaacgaagacatggtgttagtagcaaaatctcactgtggtatgaaggaacatttatgaactgtcaggaaggagcccttcattgctctgttgtccagtcaagaatgggagacactaag

SEQ ID NO: 422904 - DNA, 593 bp, Homo sapiens
gccaccacacccagctaattttgtatttttagtagagatggggtttctccatattggtcaggctgctcttaaactcctgacctcaggtgatccactcgccacggcctcccaaagtactgggattataggcatgagccaccaggcctggcctgaggtttttattttctaagattccttgtaatattctacatatacagtcatgtcatgtgtaaatgtaaacagttttatttcttctctatgtgtatgccttctctttcattttcttgcctcattgtgcttgaaagaagttacagtactacaatgaataagagtggtgagagcaaacatccttgccttgttcccagttttacagagaaaacatttcatcttaccagcaaatatatctgctatagatattttgtgcatgttcatttatcaaactgaggaagatcctcttaatgtcttgtatrgagattttttatcatggatgcatactgcattttgtcaaatgctttctctatattaactgatgttatatcatttttcttctttagcctatggtgggttaattacattgattgatttctgaatgttgaaccaggcttgcttgtata

SEQ ID NO: 422905 - DNA, 565 bp, Homo sapiens
acactagtatgtttgcatgtatgtggacatagtgatgctattttttttctttttgagatagggtcttactctgtcatccaggttggaatgcagtggcatgatttcggctcactgcaacctccctctcccaggttcaagcgattcttctgcctcagcctccctagtagctgggactacaggcgtgcatcaccatgcccagctagtttttgtttttagtagagatggctttcaccatattggccaggctggtcttgaactcccggcctcaagctatctatctgccttggcctagtgatgctatttcttaaaggagatgcttcttggaaatttgtataaaactttagaygatttttaatgcatcacagaactcattcttgatggcttcttaaaaaatgttgataagtgccaccttatttatctgcttaaatttacatttggttaaataagaatttgtaatcccatagctcccaggcttgaatggaacatgagtgtgggcacatgcagattttttttaatggaatacctttcccatttccatttttcattttcttcgtcagtcagcctc

SEQ ID NO: 422906 - DNA, 524 bp, Homo sapiens
  misc_feature (1)...(524): n = A,T,C or G
gagggatggacagatggataaattcgtgccctcttntgaacccattttcttttccacaaaatgaagaaaatgtcttgcaatntgtctatgggtaagatanntnntccacacacacacgcacagcacangtncnnnngcncctnncacccanncccaaaggctcattttctttgctccctgttttatgagcttgaattccccagggcagctcacctgaaccctgcaccccaaccctagcaagagaaaccccagaatgtgcaaaccaaggncttgtctttcatgagccttcccaggacccccccgcacgcccnccccacgtncntctggttctcacccaacargccgaccatgccccagcctgtgttccagcagttgtcactgtcagtgaactccagggactatgacggcagggcgactgncgcgnagagtgtttgttgttctcacactggtggccagcttcagcanggcgatgtctgcccccaggaagaagacagagtagttgggtggacnnnnatctggctgac

SEQ ID NO: 422907 - DNA, 576 bp, Homo sapiens
ttttacaggacctaccccaagtgtttcttgctcttcaagaaacgttgcctttgggtagagaacctatgcaacggaagacgggacggatcctcagtttgccctgattgctcattcagagaggtccgttccctaggccactgggtgattgctggtgtgcgcttgtatggtgtctcagggtttgggatcttgcttcagaaacattctcggggcctggggcagatcaggtgcggccaggtaagcgtctcccgactgcaggtgcttgggtcttgcagaagggaatacctccccaagcctgggagagtttgcatttgggtgcaggagggcctttaaaggcttcttgtgccagcctgtcgtggcgaccacccgttgtggagatcagtgcggtggagttgtgggaggtgagtgctttgctcaccctcagccaggaagttgctctgaagtcggtgctgtcaaccagcagagcaaggcggtgatccgagaagctaaagctcagccggttgcgggcgcccagcaggargacagaaggcagactttcgggccgctcctggagtgcccggccctgtccccgtttctgca

SEQ ID NO: 422908 - DNA, 585 bp, Homo sapiens
ctttatggaaagattcaaagctatgctgtgtgctactattgtataacgttttataattctctctgccttgtgaatagtaagcagcagattttagctctcagatggagattgtagagtaacaaacaagttaatgggtaatgagaaaagtggagaactttgcacggaaagatatgtacactgatattccaagcaaagaaattatttttgctgttttcaacttgcggtttttatycatttactcaacagattaagctatttctaactctaaggttggtaccaaaggggaccagtatttatcattagaagaattaccattcattacacaatggaatataagcataatgcataatggactttcacagtgtgattgggtagaatccaacgagacggctaattcactcaattctgtttcacttactctggtgctcttctctcttatgccagattcatttgttgtcataaggccagttatagaagcacagtgggaggcggggtggaggtgaggacagaagcattatcagaagcttccatggaggcacagtttttaaaattacccactgaaaatccatagatagcctcattgta

SEQ ID NO: 422909 - DNA, 585 bp, Homo sapiens
ctttatggaaagattcaaagctatgctgtgtgctactattgtataacgttttataattctctctgccttgtgaatagtaagcagcagattttagctctcagatggagattgtagagtaacaaacaagttaatgggtaatgagaaaagtggagaactttgcacggaaagatatgtacactgatattccaagcaaagaaattatttttgctgttttcaacttgcggtttttattcatttactcaacagattaagctatttctaactctaaggttggtaccaaaggggaccagtatttatcattagaagaattaccattcattacacaatggaatataagcataatgcataatggactttcacagtgtgattgggtagaatccaacgagacggctaattcacwcaattctgtttcacttactctggtgctcttctctcttatgccagattcatttgttgtcataaggccagttatagaagcacagtgggaggcggggtggaggtgaggacagaagcattatcagaagcttccatggaggcacagtttttaaaattacccactgaaaatccatagatagcctcattgta

SEQ ID NO: 422910 - DNA, 585 bp, Homo sapiens
gaattcacaatgtatgttgacccgaatttaaaaacaagaaatagaattatggaggaaaatcgaattgttataacccctagaaacaaaaacagcatccagcacaattgtgagtgcacagtgcataccacaagagatgtgagctaaatgtggtataatatgagagtatagtgggcctsaagaagaaagtaaaaagtggagagatacagcatttcatattatttttattgattcagagggtacatgtgtaggtctgttacatagatatattgtgtgatggtgaggtttgggcttctagcatacctgtaaccataatagtgaagattgtactcaataggcaatttttcaatcttcatcctcttctcactctccccgcttttagagtccccagtgtctattatttccctatgtatgtccatgtgtaaccattgtttggctcccacttacaagtgagaacacagcatttaatattatcggagggagaaaagatcccatactacacatttgtctcaaataataaatacatctgtggtttttcaaagaataagccctaatttccaaggcagacttcctagtccatagctatac

SEQ ID NO: 422911 - DNA, 416 bp, Homo sapiens
caaacccaggtagtctgattccatatgcatttgctgtactgaaagtacttaacccagtctgggcacaaagtgagtgctttctatgatcatcattgcttttattattactggatttaagaaaactatattgaatgcctacccactggagaaytgaggaatgaacaaaacacacaaggtcactgttctcatggatcatagaggacaggggaggagacagatactcttcaaagaattacaccttgatagtagaaatagatcacttgaaggagaagaaaatttctgaatggtcctattttagactaccaggtccttaagacttgttactggatgatcagagtatacgcgtccattactcctattatctactcaccttaaactctgctgcttggttaaagttttggaacctttatcgagtc

SEQ ID NO: 422912 - DNA, 416 bp, Homo sapiens
caaacccaggtagtctgattccatatgcatttgctgtactgaaagtacttaacccagtctgggcacaaagtgagtgctttctatgatcatcattgcttttattattactggatttaagaaaactatattgaatgcctacccactggagaattgaggaatgaacaaaacacacaaggtcactgttctcatggatcatagaggacagggraggagacagatactcttcaaagaattacaccttgatagtagaaatagatcacttgaaggagaagaaaatttctgaatggtcctattttagactaccaggtccttaagacttgttactggatgatcagagtatacgcgtccattactcctattatctactcaccttaaactctgctgcttggttaaagttttggaacctttatcgagtc

SEQ ID NO: 422913 - DNA, 511 bp, Homo sapiens
gggaacttagaccatcacataagtgtcaaacactgagctttctcaactgcaagacacagaaaacaatatccacttcatgggtctattgtaagcattggccatgatatatttatagtgtctggcacagagtaggtgccaaaatttggtagttattaatagacaattcacttaactctgagcttagttttattatgtataacaggaaggcaataattcctatgagagaatagatatgaaaaggatttctgagctttaaaattctctgaagagtcaatattgttatcaataattgggaagtcaatatatatagatacagagcattagctaatacataggttacataaaagtgtatgatttctatctctgaaaatatggtaaaccrgggctgcaggggagaggggaaggggcaggttgcagtgttaaaaatagtggtcagacaagcacatgtatgttaactgcagcactattcacaatagcaaagaaatggaatcaatctaggtgcccatcaatg

SEQ ID NO: 422914 - DNA, 580 bp, Homo sapiens
gaaaaactacctatcaggtactatgctgattgcctggttgacaaaattatctgtacacaaaacccctgtgacgtacaatttacccacgtaacaaacatgcacatgtaccccctgaacctaaaatacaagttggaaagaaaaaagaatagtagtcagaataggtctcattaagaaggcaagacttgagcacagacttgtgggaggtgagaaaatatctgtgggaggggcctcctgaaagagggaaaggttaaagccaagaccctacaatgggagcgggcctgagtgttgaggagtggctccaggccagtgtggctagagcagcacaaagtgtaaggaagagtggtgggcaaaaactcaaaaaggaaacagcagtcaggagatgcacrgccctagtgcgcaatgtaagggctttgacttttactctcagtgaaaactatgacagggttttaagcagaggaataacatgacctgacttatgttttagaagaattactttgagaataaaatttccagtggcaagtagagaagcaggctaacctaagcaaaacccactacagggatccaggtggcagatagtggc

SEQ ID NO: 422915 - DNA, 505 bp, Homo sapiens
ttccccttggcagcagcagcagagcccttctgtgtctctggggagcattcagccatccagtctgtgaagatttcyctcattgctctccagagcttccgttacatcgtgctcttctcacttccttctcagctgtgctcccactcctcagccttgtttgttctgttttcctccgccatttttcaccacacaccatatggccttcccttgcctgccttaagcttggaacttcacagccttctccaggcttccccagggcaacctgggccctctgggcctgctgaccaccccctttaactagcagccctgccctgatgcctactttgaaacccagcactgttcctaaggagacgcaggacacagagccttttagtaaattcacttcaggggctggttctgccagttaactatgagcctagagtgttttgaacaggtggtgatcttccaaacacaatgtgatcgtgtgtttaatcttagaatcatgagaggctagtagggcagatacaga

SEQ ID NO: 422916 - DNA, 565 bp, Homo sapiens
aacaagggtctcttccaccaccactgtgccagcttagctatctcaagtttgtgaagtttggcaccacctcctacttctcctcccaccaggaataattcaggggattccccacagcctctccttcaggatgtggaaaccaccccactttgagttgacaggtgtcctgaaactttgctggrtgattaaacaggaagagattgttgaacagggactgaggaaaatctcgtcatcagattcagtcttcctggtaaggacttgggtgaggcactaaggggatggagcacagttttctccagggtccataagagcatcatgcggctcagaccctggacccagacccacggaggttctggcacaggtagagatgagctgtggtctcactcggggctcctgagaactagagcaatgcctcttgcagttggccacacttaggtccccaccactgcctcctccagcatttcattccttggatgccttctgagatccactcctgggtgtccagggccctgtcttcatttgttcctttccatccctgttgtctgaacttgttttagactatagttgc

SEQ ID NO: 422917 - DNA, 565 bp, Homo sapiens
aacaagggtctcttccaccaccactgtgccagcttagctatctcaagtttgtgaagtttggcaccacctcctacttctcctcccaccaggaataattcaggggattccccacagcctctccttcaggatgtggaaaccaccccactttgagttgacaggtgtcctgaaactttgctgggtgattaaacaggaagagattgttgaacagggactgaggaaaatctcgtcatcagattcagtcttcctggtaaggmcttgggtgaggcactaaggggatggagcacagttttctccagggtccataagagcatcatgcggctcagaccctggacccagacccacggaggttctggcacaggtagagatgagctgtggtctcactcggggctcctgagaactagagcaatgcctcttgcagttggccacacttaggtccccaccactgcctcctccagcatttcattccttggatgccttctgagatccactcctgggtgtccagggccctgtcttcatttgttcctttccatccctgttgtctgaacttgttttagactatagttgc

SEQ ID NO: 422918 - DNA, 582 bp, Homo sapiens
ctatcacagtgttaggcatggaatacatactcaataaagatgtacttattttgaccgtgtgtcactttggttatatcactgaggaagytgggtgggaaactgagtcaaatctgaaggtttcacaattacttcaatcagaacttccttttgaaacattggttcatcaagttctcttttgaagggcaatttattatattaatagtgctaatcctgatattgtaaatcacatacttgacatagcatcgtttacagtcaggcacacttctttcaaaagcctggtgacatcataggaaatcaaatattcctcccttatcactctgcatgcaagcattctttcctgcactctagaaatgaaattacatagtttttagtaaatggaagcagggtaggggagctgccattgcgaggttgacttcccaccgcatttggaataaaatccaaagtccaaatcctttccacagcccctgccaacctctccaacctctccaatctcattttcttttctttctttctttttctttttatttatttacttattttttttgttacagggtctcactctgtcacccaggctggagtgca

SEQ ID NO: 422919 - DNA, 569 bp, Homo sapiens
tttcacaattacttcaatcagaacttccttttgaaacattggttcatcaagttctcttttgaagggcaatttattatattaatagtgytaatcctgatattgtaaatcacatacttgacatagcatcgtttacagtcaggcacacttctttcaaaagcctggtgacatcataggaaatcaaatattcctcccttatcactctgcatgcaagcattctttcctgcactctagaaatgaaattacatagtttttagtaaatggaagcagggtaggggagctgccattgcgaggttgacttcccaccgcatttggaataaaatccaaagtccaaatcctttccacagcccctgccaacctctccaacctctccaatctcattttcttttctttctttctttttctttttatttatttacttattttttttgttacagggtctcactctgtcacccaggctggagtgcagcagcaagatcataactcactgcaacctcaacttcccaagctaaagcagtcctcccacctcatctcagcctcccaagtagctgagactacaggcatgtgctacc

SEQ ID NO: 422920 - DNA, 587 bp, Homo sapiens
ctaaccttccccaacgtggggagcctggagtttcaccactacgcagcagtaatgaggcacatctctcattctccaataggaaggtgtgagaggaggcctcatagagtctaagaactttcactcctagccagcagtaataaagacgcccccaccactgaagtccccatcccaccagcagtaataagsagttttttgaacccttaccacctgtcaacaaaggccaagtggtaagtctggacttctacctcaacctgaaagttataaggtggcaggcccctcttaccctgctggaatggtgtcagaggagaccagctaaaagagtagatttacagaacatttagagcctaataacataaatgtaaaatgtacaggtttcaataaaaagtcagtcatcatcccaagaaccaggaagctgctctcaaactgaatgaaataagtcctacgataggtgccaacactgagataacagagatattaaatttatctaacagagattttaaagcagcccatgatgaaaatgcttcagcaagcagttataaacctgcttgaaacaaatagaaaaattgcctcagcaaataaatgtaaaa

SEQ ID NO: 422921 - DNA, 587 bp, Homo sapiens
ctaaccttccccaacgtggggagcctggagtttcaccactacgcagcagtaatgaggcacatctctcattctccaataggaaggtgtgagaggaggcctcatagagtctaagaactttcactcctagccagcagtaataaagacgcccccaccactgaagtccccatcccaccagcagtaataagcagttttttgaacccttaccacctgtcaacaaaggccaagtggtaagyctggacttctacctcaacctgaaagttataaggtggcaggcccctcttaccctgctggaatggtgtcagaggagaccagctaaaagagtagatttacagaacatttagagcctaataacataaatgtaaaatgtacaggtttcaataaaaagtcagtcatcatcccaagaaccaggaagctgctctcaaactgaatgaaataagtcctacgataggtgccaacactgagataacagagatattaaatttatctaacagagattttaaagcagcccatgatgaaaatgcttcagcaagcagttataaacctgcttgaaacaaatagaaaaattgcctcagcaaataaatgtaaaa

SEQ ID NO: 422922 - DNA, 405 bp, Homo sapiens
aactccaactacttggggggctaaggtggaaggatcacttgagcccaggagttggagaccagccgcctgggcaacatagtgagacactgtctcaataataataataataataataataataatgagatcttgagcaagtcatsactgtgactaataagtgtgtgataatggctaagcttaatgtttaaacaaatattgttttaaaggggtgaaagtggaaatatagcatgtatttcagatacaccacaggtatggcataagtataggcataagtctaccactttgggttttttgtttggttggttggttggttggtcggttggttggtttgtgggggttggtttgcttatttgtttttgtttttgacacagggtcactctccgtggcccagctggagtatagtgg

SEQ ID NO: 422923 - DNA, 405 bp, Homo sapiens
aactccaactacttggggggctaaggtggaaggatcacttgagcccaggagttggagaccagccgcctgggcaacatagtgagacactgtctcaataataataataataataataataataatgagatcttgagcaagtcatgactgtgactartaagtgtgtgataatggctaagcttaatgtttaaacaaatattgttttaaaggggtgaaagtggaaatatagcatgtatttcagatacaccacaggtatggcataagtataggcataagtctaccactttgggttttttgtttggttggttggttggttggtcggttggttggtttgtgggggttggtttgcttatttgtttttgtttttgacacagggtcactctccgtggcccagctggagtatagtgg

SEQ ID NO: 422924 - DNA, 552 bp, Homo sapiens
aacagcgaaggctatactagaattcaggtctcttgattctcagaacagttcatgttccatcatgccaggacccactgcacacttagattctgtactttgccaccatcacatttatataaaacttaaaacgcaagtctataaagaggccaatgtctatcaacaataaatcaacctgtaaatcttacytatttttcaatttctccccagcaatttacttcttcattcaaatagtctttctaaggaacagtggtggtttttttttctttttttttttttttggttaaagatattctgcaatttaacttaaaggccaaggaggaaccaacaccttctttatcttgtaggtttaacaagcattcccagaggaaagtcattgttattactaacaaacacaacatcagctttttgagacagaagatatttatatatctatccaatatcagataagattttaatatagttcacttcctaggcaggttttagaattaaaatgtcactctaaaaaccacctaaaatttctttatcaaaaagtcttgcaataatgttttagat

SEQ ID NO: 422925 - DNA, 552 bp, Homo sapiens
aacagcgaaggctatactagaattcaggtctcttgattctcagaacagttcatgttccatcatgccaggacccactgcacacttagattctgtactttgccaccatcacatttatataaaacttaaaacgcaagtctataaagaggccaatgtctatcaacaataaatcaacctgtaaatcttacttatttttcaatttctccccagcaatttacttcttcattcaaatagtctttctaaggaacagtggtggtttttttttctttttttttttttttggttaaagatattctgcaatttaacttaaaggccaaggaggaaccaacrccttctttatcttgtaggtttaacaagcattcccagaggaaagtcattgttattactaacaaacacaacatcagctttttgagacagaagatatttatatatctatccaatatcagataagattttaatatagttcacttcctaggcaggttttagaattaaaatgtcactctaaaaaccacctaaaatttctttatcaaaaagtcttgcaataatgttttagat

SEQ ID NO: 422926 - DNA, 550 bp, Homo sapiens
agattgaacctaaaggaagaagagagatgttatttctctcacagtctattatactggaatgcagacagagagctgctgctgcaacatggccaaaggaccctgcctgggtgctatttgcaggacaccaaaagcccctaataaactaaacggacctaaaattccccattactagtttcacattaaataaggcactgatccccaaggagtccctagtgcctgtgcacacaacagaacacggaattttgagggaatgagcacaggacatgggagttctgatggcagggatctcactggctgaaaatgcagaaagaggttgaaagctgccaaagacaagttaacgcactgcatggctttgtctggcctgggcttggggctctcatggaggttacagagtgttcaagacagctcagaactgccgtgtgggggaaattctcagccarcctcatcttatgaccatccttgtagtcaggactgcacaatccttctcattctgtgcttgttctgagcctaccacccatcaaaattctgtttatttcaacctttactaaga

SEQ ID NO: 422927 - DNA, 559 bp, Homo sapiens
tcaaatggaaacagctgattataattaagctagctacttagctcttgccatgcctcaggcactgtgcttaacactttcccatatcgctccttttatccttgcaataatgtatcacttcaattttatgactgagggaacagccctggagagaacaagtgacttgcccaaggtcacccagctagcatgcatgttctgaagctgggaaggtgaatgtaggtctttaccagcttgttctgtgtgatgaartggttagatgagtggtacaattccagatggtctagagtggcggggcaagtggagtctgagatgagctactgagataaatctggttcctatagggctgagatcatgttttccagcagcaatcccaggactgggtggaaacctggaggttttcaggaaggctggaggaggctggcttaggatgagctgctgcattggctgtgcagacgtgaccctcaggacttcatctgaacctgtgaagagtttccatgcagggaaggggggatgagtagagctagggacctaaaatttgagaggggaagatattccccagtgg

SEQ ID NO: 422928 - DNA, 559 bp, Homo sapiens
tcaaatggaaacagctgattataattaagctagctacttagctcttgccatgcctcaggcactgtgcttaacactttcccatatcgctccttttatccttgcaataatgtatcacttcaattttatgactgagggaacagccctggagagaacaagtgacttgcccaaggtcacccagctagcatgcatgttctgaagctgggaaggtgaatgtaggtctttaccagcttgttctgtgtgatgaagtggttagatgagtggtacaattccagatggtctagagtggcrgggcaagtggagtctgagatgagctactgagataaatctggttcctatagggctgagatcatgttttccagcagcaatcccaggactgggtggaaacctggaggttttcaggaaggctggaggaggctggcttaggatgagctgctgcattggctgtgcagacgtgaccctcaggacttcatctgaacctgtgaagagtttccatgcagggaaggggggatgagtagagctagggacctaaaatttgagaggggaagatattccccagtgg

SEQ ID NO: 422929 - DNA, 601 bp, Homo sapiens
attaattttctaatttctaaccgtctttatttgtcagaggttttacagatgcctttggttctcctgcccaacatgaaataaaaacttgactccctgttctctctagacaagttgcggggtgtggggcaggggaacaagccaggagactgttctagagtggaccctctctacactgctggcaaggagcctccagcatcctgggctctcctacccacctcaaagagggataccacagccaaaacatgagatagtgccaacaggacgctccccttgtcacctcagcacttggagtgatggctactttttgaggaagataaaaagcagtaatccagaacaattcctaaaggctgagctatcacacaagccagaatatctaggcagaggaaaaagacggccctccagagccccagatgaagaaaatgacttgcccaaggatattgtttagttagttgcggaacagtcatctgggctcaagtctgccagactccaatgctactgtaccygccatgtccagatgttggattcctctccagtttcaacccctaaacaattactacccctcaagggaaattggaatgtcaagatttctactgccagtgaa

SEQ ID NO: 422930 - DNA, 662 bp, Homo sapiens
atgacacatcgggctttgctgtgtgtgtatgtgtatatatatacatatatatatatwttttaatagaggatcctttcagacttgctgcttaactagaccattttgctttaaaatgtaatcaatattttcctagagttgtcttgtgtctaataaagctgtatttgtgctttgaacatgaatttatatcaaactgacctatttataatggccgtgcttcctgttcaatcgtgtttctgtcaatgctattacaatcatcaaatgcatgtgttatgacagaacaaacaagaatgtgcttttatagaaaatacccttggaactgagtttagtgagaattacatttccaagacacattcctgatttatgaaagatgctcagggccccattaatgacggaaaaaatagtttaaagtcagcttcaaactgtgttacttaatcctttgaggacaagacagattgtcccaggtgtccacatgtaaatgccattcatgtgaattaaccaggaaagtgccagaccaaggacccagagatggtgaatttagtctgtattaatcagcttctcaaaagtcaacactgacaaagagcatttaggaaacatactaagaaggtggctattttacaagaccttacccttcctgtggctatctggactagacagaggctgga

SEQ ID NO: 422931 - DNA, 662 bp, Homo sapiens
atgacacatcgggctttgctgtgtgtgtatgtgtatatatatacatatatatatattttttaatagaggatcctttcagacttgctgcttaactagaccattttgctttaaaatgtaatcaatattttcctagagttgtcttgtgtctaataaagctgtatttgtgctttgaacatgaatttatatcaaactgacctatttataatggccgtgcttcctgttcaatcgtgtttctgtcaatgctattayaatcatcaaatgcatgtgttatgacagaacaaacaagaatgtgcttttatagaaaatacccttggaactgagtttagtgagaattacatttccaagacacattcctgatttatgaaagatgctcagggccccattaatgacggaaaaaatagtttaaagtcagcttcaaactgtgttacttaatcctttgaggacaagacagattgtcccaggtgtccacatgtaaatgccattcatgtgaattaaccaggaaagtgccagaccaaggacccagagatggtgaatttagtctgtattaatcagcttctcaaaagtcaacactgacaaagagcatttaggaaacatactaagaaggtggctattttacaagaccttacccttcctgtggctatctggactagacagaggctgga

SEQ ID NO: 422932 - DNA, 662 bp, Homo sapiens
atgacacatcgggctttgctgtgtgtgtatgtgtatatatatacatatatatatattttttaatagaggatcctttcagacttgctgcttaactagaccattttgctttaaaatgtaatcaatattttcctagagttgtcttgtgtctaataaagctgtatttgtgctttgaacatgaatttatatcaaactgacctatttataatggccgtgcttcctgttcaatcgtgtttctgtcaatgctattacaatcatcaaatgcatgtgttatgacagaacaaacaagaatgtgcttttatagaaaatacccttggaactgagtttagtgagaattacatttccaagacacattcctgatttatgaaagatgctcagggccccattaatgasggaaaaaatagtttaaagtcagcttcaaactgtgttacttaatcctttgaggacaagacagattgtcccaggtgtccacatgtaaatgccattcatgtgaattaaccaggaaagtgccagaccaaggacccagagatggtgaatttagtctgtattaatcagcttctcaaaagtcaacactgacaaagagcatttaggaaacatactaagaaggtggctattttacaagaccttacccttcctgtggctatctggactagacagaggctgga

SEQ ID NO: 422933 - DNA, 451 bp, Homo sapiens
tgcgccattgcactccagcctgagaaacaagagcaaaactctgtctcaaaaaaaaaaaaaaaaacggaagaagaagaagaagaagagctgtggccaccacagtcaagtgcctcctctgctgagatggaaggctgcctcagtctttcccagggtgggcgccagacccagcttgaccccatcataagctgcaacaggaagtgcataacgctccggggattagattgcaaaggctacaggtcttcccactgtttctgagcccagattaaattctcarccagggctgagggagctgttatccccagtgcagcccaaagaggccagagaacacaacttagaagtgcagagataaacttctaacattgaaagacaggagaggaggagtcaacagatgaattccattttcttctgcaggccagaaaccaactttctccttcccaagatgcagcagcat

SEQ ID NO: 422934 - DNA, 459 bp, Homo sapiens
cagtatcgtctttttcctaacctaaataggtttcccctcctacaccatcccgttctaggaacagtcaggtggtaatgggctctgactgcctatccatatctaccttgggtgggtctaaggcaagcttgtccaaccagtggcctgctggccacatgccacccaggatggctttgaatgcagctcaacacaaattagtaacgttcytaaaacatgagttgtttttttttttgcaattcttttttttatttttttatctcatcgactattgtgttaatttatttttatttatttgtttatttatttatttatttatttttgagatggagtctgtctctgtcgcccaggctggagtgcagtggtaccatcttagctcactgcaatctccgcctcctgggttcaagcgattcccctacctcagccttccgagtagctgggactacaggcacccaccaccacgcc

SEQ ID NO: 422935 - DNA, 365 bp, Homo sapiens
aatgtgtgcacagagccaatgtttgcagctaaatctcttaataggctcctaaggatgctggttaccttggcattttatagctcaattatactgcgaactggcaggcatctccattctcaaaagtggacaggaaraggaggaaggggtaggagggaggaagagaaagaagctacttcccagcagccactgaaaggaaggcatgggcccggggaggttagaatttgactttgcaaactggcccccacagtcccaaagggctctctgagctggatcattctttagctcagcagtgctcttcacttgttaaacttcatgagccttttgaaaatctaatgaaatctcacacacacacacacacacacaca

SEQ ID NO: 422936 - DNA, 573 bp, Homo sapiens
gggctaccttcctgagcgcccaggcctccctgctgttcacccgcttggactggctgtgtccacagctgtcaaccctctgtggcagtggattatattcaatttagcacttgattaagccctgatatttgcttttccttaaattgctttaacttttccaactgatttcaatcccctttccccgagtctgctctggtacccccctgcttgactgcaggccacactttttggccctctcctatgtacccaccctgagttgctcaggcacagaggatccaggttaaacacatggatgttggctccaaggatatctctcccctgcctcagctctgtaccagatgctgccttggccccaggatgagggaagccatgggrgaagctggtggagtgtctccgatgcttcctctgaggcaggttggggcaggccgggctgtgacaacaactgtgtccgcaactggtgggtttttggtctcactgacttcaagaatgaagccgcggacccttgcggtgaatgttacagctcttaaggtggcgcgtctggagtttgttccttctgatgttcagatgtgttcggag

SEQ ID NO: 422937 - DNA, 573 bp, Homo sapiens
gggctaccttcctgagcgcccaggcctccctgctgttcacccgcttggactggctgtgtccacagctgtcaaccctctgtggcagtggattatattcaatttagcacttgattaagccctgatatttgcttttccttaaattgctttaacttttccaactgatttcaatcccctttccccgagtctgctctggtacccccctgcttgactgcaggccacactttttggccctctcctatgtacccaccctgagttgctcaggcacagaggatccaggttaaacacatggatgttggctccaaggatatctctcccctgcctcagctctgtaccagatgctgccttggccccaggatgagggaagccatgggagaagctggtggagtgtctccratgcttcctctgaggcaggttggggcaggccgggctgtgacaacaactgtgtccgcaactggtgggtttttggtctcactgacttcaagaatgaagccgcggacccttgcggtgaatgttacagctcttaaggtggcgcgtctggagtttgttccttctgatgttcagatgtgttcggag

SEQ ID NO: 422938 - DNA, 573 bp, Homo sapiens
gggctaccttcctgagcgcccaggcctccctgctgttcacccgcttggactggctgtgtccacagctgtcaaccctctgtggcagtggattatattcaatttagcacttgattaagccctgatatttgcttttccttaaattgctttaacttttccaactgatttcaatcccctttccccgagtctgctctggtacccccctgcttgactgcaggccacactttttggccctctcctatgtacccaccctgagttgctcaggcacagaggatccaggttaaacacatggatgttggctccaaggatatctctcccctgcctcagctctgtaccagatgctgccttggccccaggatgagggaagccatgggagaagctggtggagtgtctccgatgcttcctctgaggcaggttggggcaggccgggctgtgacaacaactgtgtccgcaactggtgggttyttggtctcactgacttcaagaatgaagccgcggacccttgcggtgaatgttacagctcttaaggtggcgcgtctggagtttgttccttctgatgttcagatgtgttcggag

SEQ ID NO: 422939 - DNA, 545 bp, Homo sapiens
tcccaccatgtcatctcacctcccccatctgtttccacttcccactgcagggccttccactggggagaccaagggacccagcccctgtggtggccaaaaagcaggtgacctctaatcatttccccaagagactgtctctccatcacttcccctacccctgagagaggtctggacttggaggcagaaacctgggcttcagayccttccttccacatttaatgaatgtgtgaccttgggcaaggcattcaacctctctgagtctgttttcttatctgcaaaatggagcagtggtgcgctgtacccaccctgaggggtggcagcagctccctggcttccatttcctgagacctggaccttctctgcaggaggcacccacctgcccatccaggagagatgcaattacatctgtgatttgtcacacaggaaccactccatctggagaaacagcaaacaagagcatgtagctcctggtgcaagccgttacaaataccaccctccaggacccctccctctcccagggtcctgggagtccccagaagcccagg

SEQ ID NO: 422940 - DNA, 492 bp, Homo sapiens
aggaccaacaggaagaattacattttttattggctcagtagatataaatacatattatatttaaaaagcatatatatatatatatatatatatatatatatgtttttcttttggtttcacctggttgaatagtgtccccccaaaatgcatattcacctggaatctcagaatgtggcmttatttggaaatagggttattgcagatataattagttaacatgaggccatactgaagtggagtgggccctgaatctaatatgactgttgtccttataagaagaggagaagagacacagtgacagacacacacagggaagaaggccatgtggagaaaaggacagagattgcagttacacagctgcaagccaaagaagaccaaggattgccagcaaccaccagaggccaggaagaggcaaggaagggttctcccttagaggcttcagggagaacgtgtccctgccagcatcatccagtttgtagtattttgttatgg

SEQ ID NO: 422941 - DNA, 603 bp, Homo sapiens
aggcgggcaaattacctgaggttaggagttcgagaccagcctggctaacatggagaaacctcgtctctactaaaaatacaaaaattagtctgggsgcagtggctcatgcctgtaatcccagcactttgagaggccgaggcaggtggatcacgaggtcaagagatggagaccatcctggccaacatggtgaaaccccgtctctactaaaaaataccaaaaataaaaattagctgggtttggtggagtgcgcctgtagtcacagctacttgggaggctgaggcagaagaaccatttgaacccgggaggcggaggttgcagtgagctgagatggtgccactgcactccagcctggcgacagaacaagactccatctcaaaaatacatacatacatacatacatacatacgtacatacaaattagccgggcgtggtggcatatacctgtaatcccagctacttgggaggctgaggcaggagaactgcttgagttcaggagatggaggttgcagtgaaccgagatggcaccactgcactgcagtctggccaacagagtgagactctgtctcaaaaaaaaaattaagattaaatgaacttacacaaaaa

SEQ ID NO: 422942 - DNA, 586 bp, Homo sapiens
agctctcagccccaaatccatcagtccttgggcgaggtggcttttcttgctgagggcaattcatggagaacaacttagctgagagccatcagctgccaatattccaagaagctggaaacatcaatgccccagtccagagggagtgatttgggcagtgtgccatgcatccagtacagttgactttattttcaggcagcatctatccatgtgccacccaagatggcgacctgcagttaggcttacatggtggtcctgggcccctgcaacctttcctgatagtaatagtgaaagtcccagcaagggttttgattggtttgatttgagtcatgtgaccatccctaaatcaatcataatgccagggcaataggcttctctgattgttcaagtctgkattgtatgtctactcctggaagcagtggtgatttttgaaaaagattactgaaaagaggatttcagttcaaaactgacagttgcctatacagcctacgttatgggttaaatagccagaatgccacctgacaaattcatctcttgaagtcccacccccactcccatagaatgtgatcttatttggaaacagggtctt

SEQ ID NO: 422943 - DNA, 644 bp, Homo sapiens
ctgggttatgataagggattgtggagaccaaggttttgtcatgcagatgaagccttcaggtagcaggcttcagagagaatagattgtaaacgtttctcatcagactttaagagtctgttctatcagcatttccaaacgggaggagggaatgcagagacatgtccagctcccacttcccatcattgcctgaatgagtttttcaggttaactttgaatgaccttggctgagaggagggttccattcagatggttgsgggggccttagaattttatttttgttttacaacactcaccttttcccggttgttcaatcaagcataaatctaggtactgctgtgacaggattttgcaggtgcaattaagtttccaagtcagttgaccttaagatagagagatgatctcattggcctcccctaatcacatgagcccttttgaagaagaagatttctccacccattgacagacaggatattcgagtttggaagcagtagagaccccctcctgatgaccttgaaggatccgatagcctgctatggagagggccatgtggcagggaacagaaggcagcccccaggagcaggaagcagcctctgctcaaaggccagcaagaaaacgggaacctcggcctatgaccgtgaggacct

SEQ ID NO: 422944 - DNA, 588 bp, Homo sapiens
aggaggggggaatgggaagttattttacaatgagtaccgtgtttttatttgttctgttgaaaaatgttttggaaataaatagcaggaaaggttgcacaacatagtcgatgtaattaatgcttctgaactgtccacttaaaaatggataaaacagcatatcttatgttgtacatatttgactacacaaaaacaaagtttaaaagtacaaaaaactctgttattaagagtcagtttcccaaagggatggagatgctggtaacagaagggaaagaaatctcatcaaataaaaaaaagcaatgtcctcttcaggaggkggctcagctagtttagctttaccttagcaccatgatggttcattttattcagaaatagaaacatggggcgttggggagaagaggagatgtgtacctgcctcacctgcctccctgcccagaatgccgactccgactcttgctttccactaaggctggggattaaatgaaaattgagaatctggaaacccccagagatgatgtttgtcgttggagctgattttatctcgtcttagtagcgtgacctcctcttcaaactcaggatgcaattatggtc

SEQ ID NO: 422945 - DNA, 625 bp, Homo sapiens
acttatagcccagaaagaattcaggatttagttaaaattgtggaaaataataaaaaactttaaagcagtgaacaagactagaatttgatgacagatgtactacagcttttctgaaacataatttttctttccagtttactaagaacaaattataatagaacaaatctattggtaaaataagttttagccttattaaacttggcttgagtatttgcataaagttagcaagaataattattttgcatatagactcttctactttttaaatttggttttgctgaaactttattccatagagaatctcagatttgaatttaaygccttaaggccagttatgggtttgtgccattaaatacctgtaagagttgggtaaattcttttcctcttgaggtcccaagataacttggggctcctgggcctgttagaaagtgacattctttagttatcacaggttaggaaccctgcacagggactgtgtagataaggtatgaggccagctttcccaaggaacttttattggctttataagttaactttgattccgcccccccaaaaaagcatgccattccagttaaagcttggtaaaataaccagtgtctccaattgtgtcctgttacaaaagaaa

SEQ ID NO: 422946 - DNA, 625 bp, Homo sapiens
acttatagcccagaaagaattcaggatttagttaaaattgtggaaaataataaaaaactttaaagcagtgaacaagactagaatttgatgacagatgtactacagcttttctgaaacataatttttctttccagtttactaagaacaaattataatagaacaaatctattggtaaaataagttttagccttattaaacttggcttgagtatttgcataaagttagcaagaataattattttgcatatagactcttctactttttaaatttggttttgctgaaactttattccatagagaatctcagatttgaatttaatgccttaagsccagttatgggtttgtgccattaaatacctgtaagagttgggtaaattcttttcctcttgaggtcccaagataacttggggctcctgggcctgttagaaagtgacattctttagttatcacaggttaggaaccctgcacagggactgtgtagataaggtatgaggccagctttcccaaggaacttttattggctttataagttaactttgattccgcccccccaaaaaagcatgccattccagttaaagcttggtaaaataaccagtgtctccaattgtgtcctgttacaaaagaaa

SEQ ID NO: 422947 - DNA, 625 bp, Homo sapiens
acttatagcccagaaagaattcaggatttagttaaaattgtggaaaataataaaaaactttaaagcagtgaacaagactagaatttgatgacagatgtactacagcttttctgaaacataatttttctttccagtttactaagaacaaattataatagaacaaatctattggtaaaataagttttagccttattaaacttggcttgagtatttgcataaagttagcaagaataattattttgcatatagactcttctactttttaaatttggttttgctgaaactttattccatagagaatctcagatttgaatttaatgccttaaggccagttatgggtttgtgccattaaatacctgtaagagttgggtaaattcttttcctcttgaggtcccaagataacttggggctcctgggcctgttagaaagtgacattctttagttatcacaggttaggaaccctgcacagggactgtgtagataaggtatgaggccagctttcccaaggaacttttattggctttataagttaactttgattccgccccccmaaaaaagcatgccattccagttaaagcttggtaaaataaccagtgtctccaattgtgtcctgttacaaaagaaa

SEQ ID NO: 422948 - DNA, 621 bp, Homo sapiens
ggtaactgcctgtggggtcgatcccatgctcatcgctgatgacctcccaaaactgaaatgaaaaaagaaccacaccatggctctgcatcctgmatgtcactaaggatggccttgtcctcctcccatgtccttggaacaggggcttttgtggtcagacagttagtaagtgctagacagagagcaaagagctgcaccccctatttcctgcagcagccgctgctgaggggcttgaaaatccgcagagcatcggccatattatggggatagactgaaaggctgggaggggccctggaggaggaggggacacagcagatgcccttctagggagagggtggggagagtagagaagtggagaaggggtacagggaggctgtgtcaccccaggcagggctgaatgccattgcatccgggatgattgatgggtcgtggcaggaccaaggacagggggacccactctgtggctgcctccagggatcaagctctcttggcacagatcccaggcactcctgcaacagtgcaggtttaagccaccgatctacatgctggcactgaccaccggagggactgggcgaagggcagcaggagcctgggagggcacctgggcggcagtggaaggagctg

SEQ ID NO: 422949 - DNA, 617 bp, Homo sapiens
ccagctccttccactgccgcccaggtgccctcccaggctcctgctgcccttcgcccagtccctccggtggtcagtgccagcatgtagatcggtggcttaaacctgcactgttgcaggagtgcctgggatctgtgccaagagagcttgatccctggaggcagccacagagtgggtccccctgtccttggtcctgccacgacccatcaatcatcccggatgcaatggcattcagccctgcctggggtgacacagcctccctgtaccccttctccacttctctactctccccaccctctccctagaagggcatctgctgtgtcccctcctcctccagggcccctcccagcctttcagtctatccccataatatggccgatgctctgcggattttcaagcccctcagcagcggctgctgcaggaaataggrggtgcagctctttgctctctgtctagcacttactaactgtctgaccacaaaagcccctgttccaaggacatgggaggaggacaaggccatccttagtgacattcaggatgcagagccatggtgtggttcttttttcatttcagttttgggaggtcatcagcgatgagcatgggatcgaccccacaggcag

SEQ ID NO: 422950 - DNA, 460 bp, Homo sapiens
ctatatatgtgtgtgcgtatgcatactgtgtgtataraaaaccccctacatgctatatatgtgtgtgtgtatgcatgctgtgtgtgtgtatagaaaacccctacatgctaagcatgttttcagtgcaggcagtgaatttacttgttttattcagcttcccactttcataaaacattgcatctaaatgttgctataagtatggctgttgcagaaaatatctgcaaatagctcttagtgtcatctgtatttcattctccagaaaatttccaaggcagaccttctctgtgactctgatactctgatagactctcgggaagaatgttttctttctgtccctcccccaccccccgagacagggtctcactttcacctaggctggagtagggtggcataatctgtagcctcgaactcctgggctcaagggatcctcccacctcaagctcctgggtagctgggacta

SEQ ID NO: 422951 - DNA, 569 bp, Homo sapiens
catatgattggacctatacaacagattataagggaaccttacttggagaatctcttaagttaaaggtaaatcttacttttttctttcatgagtcattgattgtcttggacagtctgagcattagaactttctagtaacgggttattttttgcaactatttttatcgtccttgttttctgttgtggcattcctcagaacctaatgtgagggggttttgcttgttgacttatcagtagaaaataaaagacggcattagtggaaaaatttatttttaaaagtgtagttggtggcaacggcagacggccttgttgttatcattatcactatcaagaaacattaaaatgtgtttcgggccttggtaatgtattacatgatttagacagaacctgctagcttgtagctyacaagtttatagatgaacaaatatatgagcaaaaagaacttctggttagacaaagtaggtttatgccctgtctgccctgagtatgaacctgaaatgactttaggaagttacttaatttgagtctcagttttatcaataaattgggtaaacagaaatatctacctca

SEQ ID NO: 422952 - DNA, 569 bp, Homo sapiens
catatgattggacctatacaacagattataagggaaccttacttggagaatctcttaagttaaaggtaaatcttacttttttctttcatgagtcattgattgtcttggacagtctgagcattagaactttctagtaacgggttattttttgcaactatttttatcgtccttgttttctgttgtggcattcctcagaacctaatgtgagggggttttgcttgttgacttatcagtagaaaataaaagacggcattagtggaaaaatttatttttaaaagtgtagttggtggcaacggcagacggccttgttgttatcattatcactatcaagaaacattaaaatgtgtttcgggccttggtaatgtattacatgatttagacagaacctgctagcttgtagctcacaagtttatagatgaacaaatatatgagcaaaaagaacttctggttagacaaagtaggtttatgccctgtctgccctgagtatgaacctgaaatgactttaggaagttacttaatttgagtctcagttttatcaataaattggrtaaacagaaatatctacctca

SEQ ID NO: 422953 - DNA, 502 bp, Homo sapiens
taaactttctaagcccgtgttttcttgtctttaaaatagggataacaaataattcctatctcaaagggttattgtgaggattaaatgagaaaaagcaggcgagggtcatgtgactgactagaaaagttcattattagtcagtgttgtctgactgctttagcaaaaagtccccaaatctcaaaggcttaacagargagattttttttcttgttcacataaggtctgctccagtgtttttggttgccattcttccacatggtagttcagggtccaggcttcttccatcttggggcacccaactcctctaattcctcagccattgaattggaaaagagaatgcaggaaggttttatgggctgggcttggaaatggcctatgtcacctcaccttcattcagtcttctggtcattcctagctgcaaaggagactggggaatttaacccacctctatgcctggaaggaagaagtaacagatttggtgagcatttggccagtccaccag

SEQ ID NO: 422954 - DNA, 490 bp, Homo sapiens
gatctatcattttacactgtgaagctcaatatttgcttgcttagccaccatcaatctgatataaaaagtgtaagagttgcaagtttttctctcatgacctgaatcaaaaagtaatttagaaagaggtcactgtgtcattcaacaaatctttttaaaagccaaacatattttgaccttttatttggatttgctacttgttaattgtttcagcagccttaacttagatcctctttgcagaacatagcttctgtcatctgtacaaagctgtatatgtgaaaattgaaggcaaggagaaggtaattccagctggcattccagtckggatctgctgtcataaattacttagcagagggcatggttcgttactttttatggtcatgttctatatttgtatgtgctggggggtggatcacatgacaaaaccatcatttgatattagtgtttatgtgcaccaaccagtgagggctcgattgaagcttcactgtgcagt

SEQ ID NO: 422955 - DNA, 548 bp, Homo sapiens
aaatctattggcacagaataaaagcactaatgtttattagagttgtgcaaatagctgttgtacttagttctgtcaacattgcttttttttttaatgatgacaattcttcacataattgccaagctaaagcaaaagaaaactttctcaatctttatgatgctttcatcagataaccaatataaagtatcttccagaagactctgtctcctcagactttagagtttgttctagggaagttagagataaacaaagatggccttaataaatctctctaaygttataaatatacagtttctggttctttttccccttggggcagtgggccaggtatcatcaacaatacagatattctggcctttctcaaaaatgtcattacattaagaacattatgacttagcaaattgttggagaaaattaggaagctttttttagtagttctgccatcattaaaaatcagctgccttctggggaaactgatgccacacctttgatcaggtgttgtatttggactgaaaacaatcccccaaagaaggagatgtttgctttct

SEQ ID NO: 422956 - DNA, 506 bp, Homo sapiens
attttttttttgtccaaagtcttctattccatcagttagtcatctttcaaggtatgctttgtctagaaatttaatttgcaagccatcatctccctcattcaaattatgaataaccaattagacagggaaaagcatagaactctaaaacataccaccagaaacctcctaccaggctgacatcaggtgttattcttcattaggggrccatttaaatagtcttatatccaactgacattaattcattttcatttttgaactatcacgaacagtattcccctgatgtcagcctagtacagctatcaaagaagtacaggttagctttatatgatctatttttgacacttagcaagcactgcagagtgttcagtgactcattccttttataagttttgtaagtgctcacaaacagaagtgaggcttagaatattaaacaatcagaaaagccagaacatcaaccaattggagtgggttcagatccagtcaaagcaaatgtgcgtacccaatct

SEQ ID NO: 422957 - DNA, 594 bp, Homo sapiens
tattttctctattttgtagggggtggtttctctgtcagtgattttcattctaatctttattatttmcttcttacgcttgctctgggtttagttttctcttatttttctagttttttaagttggaatcttaagttatagatttgtgaactttcttctttcctgatactagctttgctgcagatttgatgatatttcttaatgaattcaatttaaaactaccaggtaaaacagtgcttatatgtaaagtttataccatggtaagatcattttgacagctaatgtttaaattacaaataatatcaaaatgctttgcatatcttctgtgctggcaaaagctaaaataagaaggaagatctgcattaatatgctaattttcagcagatgtattttctgatcttaaactctgagataagactctgataggattctaaaaatgcctttcaagcaatgaatatggtctgtgtttgttatttgataccaatatttggcagtacctgtctgtgtaaaaagccattttcaaacatgaaatacagaaagtctcattacagatcagcataaacataagaacatttgcagttgactgatgttagggaa

SEQ ID NO: 422958 - DNA, 594 bp, Homo sapiens
tattttctctattttgtagggggtggtttctctgtcagtgattttcattctaatctttattatttccttcttacgcttgctctgggtttagttttctcttatttttctagttttttaagttggaatcttaagttatagatttgtgaactttcttctttcctgatactagctttgctgcagatttgatgatatttcttaatgaattcaatttaaaactaccaggtaaaacagtrcttatatgtaaagtttataccatggtaagatcattttgacagctaatgtttaaattacaaataatatcaaaatgctttgcatatcttctgtgctggcaaaagctaaaataagaaggaagatctgcattaatatgctaattttcagcagatgtattttctgatcttaaactctgagataagactctgataggattctaaaaatgcctttcaagcaatgaatatggtctgtgtttgttatttgataccaatatttggcagtacctgtctgtgtaaaaagccattttcaaacatgaaatacagaaagtctcattacagatcagcataaacataagaacatttgcagttgactgatgttagggaa

SEQ ID NO: 422959 - DNA, 594 bp, Homo sapiens
tattttctctattttgtagggggtggtttctctgtcagtgattttcattctaatctttattatttccttcttacgcttgctctgggtttagttttctcttatttttctagttttttaagttggaatcttaagttatagatttgtgaactttcttctttcctgatactagctttgctgcagatttgatgatatttcttaatgaattcaatttaaaactaccaggtaaaacagtgcttatatgtaaagtttataccatggtaaratcattttgacagctaatgtttaaattacaaataatatcaaaatgctttgcatatcttctgtgctggcaaaagctaaaataagaaggaagatctgcattaatatgctaattttcagcagatgtattttctgatcttaaactctgagataagactctgataggattctaaaaatgcctttcaagcaatgaatatggtctgtgtttgttatttgataccaatatttggcagtacctgtctgtgtaaaaagccattttcaaacatgaaatacagaaagtctcattacagatcagcataaacataagaacatttgcagttgactgatgttagggaa

SEQ ID NO: 422960 - DNA, 366 bp, Homo sapiens
gtgtttgcaatacaaatcctttcccttttagaaaacccttttaaaaaaatattttaaatagtgaggtacttggaatgctgatacttgactttcaattgctttagttaaaacaaattcatatacaggtaaagtagcatgatttrtaactttgggcccacctgttgagagttggggtttattacaaggttccagaattatgctcttttcttccagccctgtctctgtctagcactgtgcccataatagctagtaagtgttttctaaatacataagtgaaaacaagtatttaaatggatgaatcaaattattaaggaagaatggaatcaatggacagatgaatttactgtggcggacagcttgaatcaa

SEQ ID NO: 422961 - DNA, 595 bp, Homo sapiens
tttattgccaaattattctcccacatatatgttgtactgattcatactctcacagtgtcttaaatgctttaggctatttggtgataattatgaactaggaaaataagagttttagggaaatggtgcatgatttgaatgcacattaatattcatgacattgattgtttaaaaatactttgccgtctgctgaacaagcaggaaaataaaaacaacccacagaaatcatcctttttgcaaaagaaaaccatttatcagttctaccttttttttttttttaagactgggtcttgctctgtcacccaggctggagwgcagtggcacgatctcggctcactgcaagctccgcctcccaggttcacgccattctcctgcctcagcctcccgagtagctgggactacaggcgcccaccaccacagccggcaaatttttggtatttttagtagagacggggtttcaccattttagccaggatggtctctatctcctgacctcatgatccgcctgtctcggcccccaaagtgctggaaatacaggcgtgagccaccacgcccggctccaattctgcctttgatctatttgatgtaccaagaaatt

SEQ ID NO: 422962 - DNA, 595 bp, Homo sapiens
tttattgccaaattattctcccacatatatgttgtactgattcatactctcacagtgtcttaaatgctttaggctatttggtgataattatgaactaggaaaataagagttttagggaaatggtgcatgatttgaatgcacattaatattcatgacattgattgtttaaaaatactttgccgtctgctgaacaagcaggaaaataaaaacaacccacagaaatcatcctttttgcaaaagaaaaccatttatcagttctaccttttttttttttttaagactgggtcttgctctgtcacccaggctggagtgcagtggcacgatctcggctcactgcaagctccgcctcccaggttcacgccattctcctgcctcagcctcccgagtagctgggactacaggcgcccaccaccacagccggcaaatttttggtatttttagtagagacggkgtttcaccattttagccaggatggtctctatctcctgacctcatgatccgcctgtctcggcccccaaagtgctggaaatacaggcgtgagccaccacgcccggctccaattctgcctttgatctatttgatgtaccaagaaatt

SEQ ID NO: 422963 - DNA, 337 bp, Homo sapiens
gaacttgtgggctctggattaaggtgttaggttttttaaagggaaggcaagggttaaagaaagacatacagagagagagggcagctctacagcaacacaggtatattgcaaaaacctgtggaggtagggggatcagcttaatgycagagcccaccgctgcttacaggctggggtaattataagcatgtgggggaggggtctgggcagtatggcttgctgcccaggaagatgttgattacgtgttcccatgctgaggcggttttggcccttgttctggcggaatgtggtgttccttgcactttctcccagcagaatatgataagaggcaggctgtttc

SEQ ID NO: 422964 - DNA, 529 bp, Homo sapiens
ccctccgaggccagtccatccggcagacgggcaggaggtgatgcatggatggctcctctcactagcagaagcctgctcccagcgggagctcagtgaagggcccaacccggcagctcctccacaccacctaggaggggcccttgaagtccatgttgagaccaggctcgggtggtctcaggtcgagaccttggcctggggtggggacccaggccagagagactcccagggactctgaacccgaattcttgctggccctttggtggtcagcagrgggcgcgcattcctaggcccccacctgcccagcttggggtgatttgttataggccatgaaggggctggatagagggagggcagaagaggggcctcggaactaccatcctggaattccagggtgttgtccctcttgatgcagagctctgtactagtctcagggtgcagacacaaatgtcacccatcccaaggtacaggccaggaagcagacagcctctctcagaggtgtgcatgggtgggtgggagaagcaggagaaaa

SEQ ID NO: 422965 - DNA, 613 bp, Homo sapiens
atgcaaagtaaagctcggcgcaggtggagactctctgagcagaatgagatgagcagcagatcaagatgggaaaggatgtgcagagagcagcacatgagagaaaccatgctgccctgagatggagccgcctctgctcctgacagtttcccaagttctagctaaggcctggctctggtgcccatctctacactttcatgagattctccacattgtttcaacaaatgcccccaaaaggaaatttggtggattgtggttttgcttgagtggccacttttcccggcctctctttctaataaaaagccctgcctccctggttttctrgtcaagaagtaccagacctggtacagagacctgtaactgagacctgaccaatggcggagccctgtgtccctggacacaaggatgagcatgtgaccccagctgagacactcttcactcttatttagggcttctgggagatttggctctttttctctgaggttgttaatttggggcaatgtgagctgggaacccatttggcaggtgaaagaacatggaagaagcacatctggaaggacaatggtgccacagagagagaagcagaaggagggagggagagaggatgcaactgagt

SEQ ID NO: 422966 - DNA, 613 bp, Homo sapiens
atgcaaagtaaagctcggcgcaggtggagactctctgagcagaatgagatgagcagcagatcaagatgggaaaggatgtgcagagagcagcacatgagagaaaccatgctgccctgagatggagccgcctctgctcctgacagtttcccaagttctagctaaggcctggctctggtgcccatctctacactttcatgagattctccacattgtttcaacaaatgcccccaaaaggaaatttggtggattgtggttttgcttgagtggccacttttcccggcctctctttctaataaaaagccctgcctccctggttttctggtcaagaagtaccagacctggtacagagacctgtaactgagacctgaccaatggcggagcmctgtgtccctggacacaaggatgagcatgtgaccccagctgagacactcttcactcttatttagggcttctgggagatttggctctttttctctgaggttgttaatttggggcaatgtgagctgggaacccatttggcaggtgaaagaacatggaagaagcacatctggaaggacaatggtgccacagagagagaagcagaaggagggagggagagaggatgcaactgagt

SEQ ID NO: 422967 - DNA, 628 bp, Homo sapiens
tgcacatataccattgcatgtgtgtgagtgcttggtgcagatctgagcatttgttggaggatggctgtttgtttaggtgcttgtacttgatcgtgtatattatgttcatacacacagacctatgtcctcacatgtacaaatgcatctatgggascatgcgtttgaatttggagtttgtaatggactgttcctgaggttacatttgctttcctgtgcgtgcatacaaatgggcatatgactgagaatgagagcatggggttgtatgttcatgcacagaagtacatttgagggtatgcacacatatgtgctatgtatttgagtgggagtttctggggacacacatatgttagtgaatgggtatgaatatatgcctgaatgggaaaatatgtttgcttattgaagagtaccagtggacacacatgtacatgcatgtaagagaacttatctatggcaggcatgtgcatgctctgaatacaaacatgagtgcacacatgagagcttgcctcccatgcacgcatagcatgctggcatgtgtccacatttgcagacctgcagggatatgctctgtgtgtatcgctgtgaacatgtctgcattgtgcccacaggtgcgaacatgtctgtgggtaca

SEQ ID NO: 422968 - DNA, 532 bp, Homo sapiens
acctatgacttcatgtccgtgtgtccctctggacatataatctgcctgtgacctccttcttggcagggtcagtatctgctaaggcaaccagtgcatgtggaagggacaggcttggagtcgggggaacctgtgccgcctttgctctgtcccatactagctgggagaccttgaaccagccactttattcccctgagtttcagtttcccctttctacaatggagctggcaaccaacctcagaaatgctgttgggcttctgtatgtgagagctgggcacacggggctgagagaggtggctgcacatctccccacgggtctccaagttaccatgcccatttgtagcatgagctataggaaccatgggttaaaggtcccacataggatgatttgggggttcccaaatatccctccacttgggcttaccatgctaaccccacatccctgccactggccactctcaatggactttagaaggcatrttcaagttgagcaagttatcaagctccttaacctggccttcaagttcttttcaca

SEQ ID NO: 422969 - DNA, 537 bp, Homo sapiens
aggtagatcttcgccagcaaaaccatgatgtccccacctctccaagttgggacgtctttaagatcatggtccctgtcttatttatctctgggctaccagcattgtgggatatggtacakgtaaattctaatatattaatatttgctgaatgaatgaatgaagcctggaaaaattgagactgcaggaggcttgaattccaggcgtggctgtgtccctgacccagtgtttggtcttgggtaagaccctgccttctctgatgtcagtttccacacctggaaaatgaacagagcatagtgattatgagcagtgctgggtagttctgattccagctctgctgttttatgtctgtataatccaagccaggtcatttgacctccctgtgcctcaattttctcacctgcaaaatcggtctaatattgacccaattatgcctagcgttccattattggaacgctaagcatgtgagagttatttatatcctactgctcaaggacttcgccaaggtctgattgcaaaaattcaaaaaattgcaacctc

SEQ ID NO: 422970 - DNA, 537 bp, Homo sapiens
aggtagatcttcgccagcaaaaccatgatgtccccacctctccaagttgggacgtctttaagatcatggtccctgtcttatttatctctgggctaccagcattgtgggatatggtacatgtaaattctaatatattaatatttgctgaatgaatgaatgaagcctggaaaaattgagactgcaggaggcttgaattccaggcgtggctgtgtccctgacccagtgtttggtcttgggtaagaccctgccttctctgatgtcagtttccacacctggaaaatgaacagagcatagtgattatgagcagtgctgggtagttctgattcyagctctgctgttttatgtctgtataatccaagccaggtcatttgacctccctgtgcctcaattttctcacctgcaaaatcggtctaatattgacccaattatgcctagcgttccattattggaacgctaagcatgtgagagttatttatatcctactgctcaaggacttcgccaaggtctgattgcaaaaattcaaaaaattgcaacctc

SEQ ID NO: 422971 - DNA, 574 bp, Homo sapiens
ctgccctggtcttgctctgggaccttgaccctctccccttctgaggaaggagtacagtggctttgggggatgatgaaggccagacagccagaccctcagcacctattgatgttgctggctgggtgggtgtgtgtctgagtgcagccccgggctcacrttaggtggggcgggggtggaagccagacatagactgctctggaaatgagatttgcctcgttatctgtgcttgctcagaccgagggccttgggcattagccagcccatccaaggagttaagaagcaggaggaggggcagagagccgaaatccaggctccagtggatagagcccctgctggaatgtgtgtgtatgtgtgtccctcggtggtttggatttgtggggttttgtctacaaaagtgtgtgtgttttcctggttagtgtggatgtcctttaaaagaatgtgtgtatagcactttgcctcctgctcatggtggttgctgtttctctttagtgtgtgtgtgtgtgttgctggaattaacacaagtatgtctgtttctggactgcacctgtgtgtgcacacccacaggctcctgttg

SEQ ID NO: 422972 - DNA, 582 bp, Homo sapiens
atcattttcccatctggaccttagttcttgactcacccaagtgtgctgaggctgaacaagggctcttacgcttaactcwtcaaggcatagggcagggaaggggatacagaagtgaatgaggtgggccttctcccttcggtctccaagaactcacagtatagtcctcaggatctgcacataggaaccactcaatacatgcatattagtcagcttttcctgagataacactgcaaaacaaacaattccaaaaatccaacaccttccaacaagtggctatttttcttgaccatgggtttatgtctgtgggtcaataggggtggccctgtttcatcctaagagttgggtcatggtctcctcctgtttctcatgctggagccagtggttacccagtgcaagttcctctcatggcagaagcacaagaggccaagacaaattggcagggatctgtaaagcctctgcttgcatcatgtccactagaatgttccagtggccaacacaagtcatgtggacaaattcaacatccataagacagagacatatactctgcctacctttgtgggcagtgttgaaaagtaacatggc

SEQ ID NO: 422973 - DNA, 582 bp, Homo sapiens
atcattttcccatctggaccttagttcttgactcacccaagtgtgctgaggctgaacaagggctcttacgcttaactcatcaaggcatagggcagggaaggggatacagaagtgaatgaggtgggccttctcccttcggtctccaagaactcacagtatagtcctcaggatctgcacataggaaccactcaatacatgcatattagtcagcttttcctgagataacactgcaaaacaaacaattccaaaaatccaacaccttccaacaagtggctatttttcttgaccatgggtttatgtctgtgggtcaataggggtggccctgtttcatcctaagagttgggtcatggtctcctcctgtttctcatgctggagccagtggttacccagtgcaagttcctctcatggcagaagcacaagaggccaagacaaattggcagggatctgtaaagcctctgcttgcatcatgtccactagaatgttccagtggccaacacaagtcatgtggacaaattcaacatccataagacagagacatatactctgcctacytttgtgggcagtgttgaaaagtaacatggc

SEQ ID NO: 422974 - DNA, 541 bp, Homo sapiens
catggttgtgttccaataatactttatttacaaaataggctataagccaattcgccaacccctatattacatgctctaatgcctagattcctggaatgtctaaaatagaggccaagagtggtcaactcatatgtccaaggtcacacagctgagcagggttgatggcctcacgcaccaaccagccaagccttatggtgacccaaggatttcaactgccaactcctagaacttctrcctccaaatttgcagctcccggagtggcaggagaatgtgagcaggatgctggaagagccagaggaaagcctgggctcagggaggactgggaggtctggatgttggaagaccagctgcctatctgggaggcggaagatggatgggtcatctttcccttctttcaaagcattttgccgactcagtgctggctgttcagaattgggtctttgacatccaggttaccttcttctcttagtgcataaaaaaataagtgttggacagaagagagggagaacaaaaaataataataataataaaactaaaatat

SEQ ID NO: 422975 - DNA, 541 bp, Homo sapiens
catggttgtgttccaataatactttatttacaaaataggctataagccaattcgccaacccctatattacatgctctaatgcctagattcctggaatgtctaaaatagaggccaagagtggtcaactcatatgtccaaggtcacacagctgagcagggttgatggcctcacgcaccaaccagccaagccttatggtgacccaaggatttcaactgccaactcctagaacttctgcctccaaakttgcagctcccggagtggcaggagaatgtgagcaggatgctggaagagccagaggaaagcctgggctcagggaggactgggaggtctggatgttggaagaccagctgcctatctgggaggcggaagatggatgggtcatctttcccttctttcaaagcattttgccgactcagtgctggctgttcagaattgggtctttgacatccaggttaccttcttctcttagtgcataaaaaaataagtgttggacagaagagagggagaacaaaaaataataataataataaaactaaaatat

SEQ ID NO: 422976 - DNA, 590 bp, Homo sapiens
catccctaaaaagatgagtgataccacatttcattgatgagggaatacattcattcaacaaatatctattgagtgcctctttcacaccagctaccgggctaggtagctgaatgyttgtctgaatgtttgtggtctgaatgtttgtgttcctgcaaaactcatgtgttgaaacctaattagcaatgtgaggatattacaggtggggcctttgggaggtgattacatcaagagggcagagccctcaagaatgggattagtgctcttataaaagaggccctggaaaattgccttgccccttctgtcgtttgaggacacaggaagaaggtgccatctatgaatcagaaagcaggccctcaccagacaccaaatctgatactgccttgatcttggccttctcagcctccagaactgtgggaaatgaattcctgttgtgtataaggtaccggtttatggtattctgttataacagcctaaatggactaagagactaggttataagcaaacagcagtgaacaacctagatgaggttcatctgtttcaaggaatttcaatctactaggaccagaatcttcgaaggaccagaactgagg

SEQ ID NO: 422977 - DNA, 560 bp, Homo sapiens
tttttcaccatctcaaaagaggaaaagagttaggaccttgcagtgacttcagcagtagcccctaaaaagacatgtccacatcctaatgcttggagcctaaaatatcaccttgtatggcaaaagagtgaccattaccttatgtggcaaatagtgtgattaagttaagaatcttggggagttgattctgaactatccaggcaggctgtaagtgctagcacacatgtccttacaagagaaagacagagggagatcagacagctggtcacaagaggaggaggcaatgtgaccacaaaggtagagattgaagggatgtggccacaagccaaggaatgccaacggccacctgcagctagaggaagcaaggaatgcattttcccctagagtctmtgagaactggagagacttgcactaggaactcaaaattaggattaatttattattttcttgatgtcaaatctcattttaaaatgtacaaccatgtgaaccatagcttattaaaagaattctggccaggtgtggtggctcatgcctgtaatcccagcactttggaaagccaagat

SEQ ID NO: 422978 - DNA, 550 bp, Homo sapiens
tgattgtgccactgtactgtggcctgggcaacagagtaagaccttgtctcgaaaaaaaaaaaagaattctaacaagccaatttaagtaacaaaccagtgcaatttgtatatagccactgagccatactatcataatattcttgcatctgaatagttgtctcacctgggctgagtcactgatgggaaagtacaaccaagtcagctgaccacagaaacaatcaaaccataattccaggtacaaacctctttggggttcataaatccagtcaccaaaattcttgtaagtttcccactttggagccatgcctgctcrtctgtcaatttcattggtccagttaatcagactcatcttatcctctgtcccaaaggaccctcccctgtgtcttgcaatacattccagaagagaagagtatttctcaggccttcagaaaccaagagaagaaaactcattttatgatctgaaaggagatgaaaagcatattttagcagggcattgcaaatgcgttccgtgctcatcacagaagcatctacaatacctacattatttaga

SEQ ID NO: 422979 - DNA, 631 bp, Homo sapiens
ttcctgtgatagtgaatgggtttcatgagctttgatggttttaaaaatggaagtttccctgcacaagctctctctctttgcctgctgccatccatgtaatatgtgacttgctcctccttgccctctgccatgatcgtgaggcctccccagccacgtggaactggaagtccatgagaccctttttcttgtttaaattacccagtctagggtatgtctttatcagcagagcgaaaacggacatatacaatttgttcttgggaaaggaacatcagactctccctccctaattagaattcaagctccaagagggaggggtttttctttactgtgtgtctccagtgcctaggtcagttcctgactccatatatgttgaaatatattttaataaatgagggcagcgaccttatctgtcactttaacccagaacttagcagagtgcctggtgcatagtaggactcaataaatatttgtagaataaatgaatgaacaaatgayatctctcaatccttccccatacctgcctcctctactgtctttgggaccttctcctccccatctcattccaacatccctgttttcgggctttcttggatggattggggggccccattgcactccctcagtgcctgtt

SEQ ID NO: 422980 - DNA, 604 bp, Homo sapiens
tggtgcacagtcggccctgcttaaatatgcactgagtgagtgacgcctcctgggtccacctctgcagccttctgaagtgaatatttggcatctctaaagaacccagatcccaggcaaagtcacccctratttggctgttgcagactccacctcctgctgcttctgggctgactctgaagcctgttgctactgtctgcagccaagttggcttttccaacagcagcagcaatggagaggggctcagactactgataaaagctccctttacaccaggtgcttttccaatgcttctacagcgccttttgatgttgcagtcacgaatcctgatggcagagtgacgatagtggtccctatttcgtccgatgtctcacttgataggacgaccaagagtccacaaatcgttcctgagtatacctctaacaacagattttttcctaaacggttccacctggtttgatcaggaagaagaaacaacagatacgtgtattttcatttcttccttcagtggaggagtcacagttgttttggaagctgtccaagtgccagagaccccggacacagattcctgagcatccttcccatccttcccatccttgaaggcaaa

SEQ ID NO: 422981 - DNA, 604 bp, Homo sapiens
tggtgcacagtcggccctgcttaaatatgcactgagtgagtgacgcctcctgggtccacctctgcagccttctgaagtgaatatttggcatctctaaagaacccagatcccaggcaaagtcacccctaatttggctgttgcagactccacctcctgctgcttctgggctgactctgaagcctgttgctactgtctgcagccaagttggcttttccaacagcagcagcaatggagaggggctcagactactgataaaagctccctttacaccaggtgcttttccaatgcttctacagcgccttttgatgttgcagtcaygaatcctgatggcagagtgacgatagtggtccctatttcgtccgatgtctcacttgataggacgaccaagagtccacaaatcgttcctgagtatacctctaacaacagattttttcctaaacggttccacctggtttgatcaggaagaagaaacaacagatacgtgtattttcatttcttccttcagtggaggagtcacagttgttttggaagctgtccaagtgccagagaccccggacacagattcctgagcatccttcccatccttcccatccttgaaggcaaa

SEQ ID NO: 422982 - DNA, 604 bp, Homo sapiens
tggtgcacagtcggccctgcttaaatatgcactgagtgagtgacgcctcctgggtccacctctgcagccttctgaagtgaatatttggcatctctaaagaacccagatcccaggcaaagtcacccctaatttggctgttgcagactccacctcctgctgcttctgggctgactctgaagcctgttgctactgtctgcagccaagttggcttttccaacagcagcagcaatggagaggggctcagactactgataaaagctccctttacaccaggtgcttttccaatgcttctacagcgccttttgatgttgcagtcacgaatcctgatggcagagtgacgatartggtccctatttcgtccgatgtctcacttgataggacgaccaagagtccacaaatcgttcctgagtatacctctaacaacagattttttcctaaacggttccacctggtttgatcaggaagaagaaacaacagatacgtgtattttcatttcttccttcagtggaggagtcacagttgttttggaagctgtccaagtgccagagaccccggacacagattcctgagcatccttcccatccttcccatccttgaaggcaaa

SEQ ID NO: 422983 - DNA, 525 bp, Homo sapiens
tgcacaggcaaagtgaaagatcgtttctagagctgtgagataagatcatagtaaaaaagaactactaagtttttaaaggttatttcaaatgatggatttccatcttacaattgaatgcaagtaggttgcaaggttgatggaaagtagaaaagtttcctgacttgcgtgaacagaaaagaaacatcaatttgaaaggaaaccatttatttatttacttcctctacagttttcctgactgctacatttcataagaagggattgtttatgagggtcaaggagctggaggcctggggaggagctggtgtttctgttcaagtttgagggtcctggagctggagcccaggggaggagccrgtgctgccactgatgtcttagggtcgtggagctgaagatcccagaggagccggtgctgctattctagcttgagtttcgtggagctggagacccagggagaagatggtgctgctgttctaatttaaggatcgtgaaacagaagacccagaaaggagctggtgctgccgctgc

SEQ ID NO: 422984 - DNA, 598 bp, Homo sapiens
tacaattaaaaataaactttcaaattggaacaattcaatatcctctacctgaagactggttcaatagtgcagtgattaaaaaacgtggctctatggctgggcatggtggctcacacctgtaatcccagaactttgggaggccaagatgggaggatcacttgagcccaggagttcaagatcagcctgggcaacttagggagaccctcgtctctacaaaaaatacaaaaattgaacaatgagaacacttggacacagggcgggggacrtcacacacccagggcctgttgtggggttgggggagggataacattaagagaaacacctaatgtaaatgaccagttaatgggtgcagcacaccaacatggtacatgtatacctatgtaacaaacctgcatgttgtgcacatgtaccctagaacttaaagtataataataaaaaaaaaaattagctgggtgtggtggcactctcctgtagtcccagctacttgggaagctgaggtgggaggattgctcgagctcaggaggttgaggctcaagaggttgaggctgcagtgagctgtgatcacgctactgcactcaagcttgggtgaccaagtgag

SEQ ID NO: 422985 - DNA, 598 bp, Homo sapiens
tacaattaaaaataaactttcaaattggaacaattcaatatcctctacctgaagactggttcaatagtgcagtgattaaaaaacgtggctctatggctgggcatggtggctcacacctgtaatcccagaactttgggaggccaagatgggaggatcacttgagcccaggagttcaagatcagcctgggcaacttagggagaccctcgtctctacaaaaaatacaaaaattgaacaatgagaacacttggacacagggcgggggacatcacacacccagggcctgttgtggggttgggggagggataacattaagagaaacacctaatgtaaatgaccagttaatgggtgcagcacaccaacatggtacatgtatacctatgtaacaaacctgcatgttgtgcacatgtaccctagaacttaaagtataataataaaaaaaaaaattagctgggtgtggtggcactctcctgtagtcccagctacttgggaagctgaggtgggaggattgctcgagctcaggaggttgaggctcaagaggttgaggctgyagtgagctgtgatcacgctactgcactcaagcttgggtgaccaagtgag

SEQ ID NO: 422986 - DNA, 562 bp, Homo sapiens
ggcctcagcatccatctccttctctccctgtgtttcagccaggggggctagctgggactaagctgccccagctccatcgatggggcctgaccaagttaaattaatcagtgtaatctccccgcattcactgctacagtgattcatgaagggctggacacttggcatatgatggctcagtcagagtaaaacccataaaccttgtcttgaggttgggaaaagagaattccctcttgcmctggtccatacaggatgtagatatgaggcctgggatttcttaccagagtccacctgtggatacagccaacacacaagggaacacagacctgtgtataatgcagaggaacagactggggccccaaccaaaccatgcctggatttaccgtaaacaattcaccctgttcatgttttaagatcgtttaagttggagtttctgttgcttttgccaaaggattttagtggataaccaccattcacagtgaactccaaatggcaatggacatcagcctatggttttgatattccgtcaaatctaatgtgtatttggctcagagctagaaacgtg

SEQ ID NO: 422987 - DNA, 616 bp, Homo sapiens
ggtccaaatgcatcttcttaaagttcataaacatttgcaatccactggccattctgctgctgaagatgaaggaaatgcagataatttttacctaacttctggcatctatctatctaattttctttgatgaaatcatcactctatggtgaatgttacaattttttttttcagactcttaggaaagttgactaacatcatgatatccattgatagctttctggaagcagccaatgagttgtttcaagtttgctcaaaggaataaatgtcatttcaaagtccccagagtggcccacatccctgtccatatgacgttatcttccctggttccctctcaattcaagccccttccatccccactacaagcaacatcccacaatggacagtttaggagtgtcaccaagaaaggcaaaaggctgtgtgtgtgagggggtcggggagcaggacgcctgatgcttctcttcataatcacatttttttaacagttccttctgggcttttaatgaacataggaagtgctctgaaaacatcacccaacaaattcwttttgggtgacttgtgtcctgattcattctgcagaggcctggtacatgcagaggtaaaaatgacctatacggcc

SEQ ID NO: 422988 - DNA, 518 bp, Homo sapiens
gaaagcccttcttgttttctcagctgggaggctggtagcctggagcaagttctcagccttgctcatccactgcctggaaacaagttcggtgctgctgggggagtgcacagtgggagtgagactggccttttgggttgcgtaggagctgggtgaggcctgtaactgctggctttcccccacttccctgacaacctgcctgacacagcagagggagccataatcctcctgggagcataactccattgacataggaatcacacctccatcccccayagtagtggcagcaagccccacccaaggagagtctgagctcagacatacctagccttgcccttacctgatggtcctttcctacccgccctggtagcagaagagaaagggcatattcttttaggagttctagggccctgcccactgcttgatcctccctctactaccacagctgatgctgtcttgaaaacgccacttcctgggaggaggccaaccagcacaaaactagtgcattaaaccaccaaagc

SEQ ID NO: 422989 - DNA, 565 bp, Homo sapiens
gggtaaaattaacattgtgaaaataatcatattgccaaaagcaatctataaattcaatgcaattcccatcaaaataccaccatcattcttcacagaactagaaaaaacattcctaaaattcacatggaactgaaaagagtctacctagccaaagcaagactaagcaaaaagaacaaatctggaggcatcacattacctgatttcaaactatattataaagccacagtcaccaaaacagcatggtactggtataaaaataggcacatagaccagtggaacakaacagagaaccaagaaataaatccaaatacttacagccaactgatcttcaacaaagcaaacaaaaacataaagtggggaaaggacaccctattcaacaaatggtgctgggataattggcaagccacatgtaggagaatgaaactggatcctcatctctcaccttgtacaaaagtcaactccagatggatcaaggacttaaatctaagacctaaaactatacaaattctagaagataacattggaaaaacccttctagacattggcttaggcaaaggtttcatga

SEQ ID NO: 422990 - DNA, 585 bp, Homo sapiens
tgaccctcaacgatgtttccattacttggttccacactccttcgtaggcacattctttctggtttctagtggccagcagagctcatgagttggatgcatgacatttactcagaagtctacagaatgtcctttggaagaagtatgttctcctgtttatgatggagacttagcaaggcgaagctgggcttgcaatatgccttttccagcttcctgtgcctgtgtctgcctcctactcctggtactgacataggcaccaccacttccttttacttgattatttcatttgccttgaaagccaagagcaaccagggtccaggaggaaggaaaaaaaatggaagagtagggaacccatcagttcttggacctacttgtactattctctgcaatggccttcaccccacggtgagcctcacaaaaagcatttcataggggctccaagtttatttstcactgtagcaagatagtggctttggaaatgtcttttgtgcgtatttgagtcctctttacagagaagcagagagtggagtaaaaaagttgctcctccagtctcttaagtactttctaagtacatggagagaactggag

SEQ ID NO: 422991 - DNA, 498 bp, Homo sapiens
ggcctgcatctgcccaggcctggggaatctagggaagcagaggaggactctgggattggccgtggctaggggatgagaggacaaaggtctccaggggttgggggagcagcagacctccacctgccatgcagccccactcaccctcgcagtcagaatgaaagggcatcatctgctgggactcagacctggctttctacagaagtggtggtccaactcccccatccccatcccaacacccctgacctgccagcaagaggaaataacaccttggtggtcaggtgttttcctcccaggagartgtgtatttttaaagcgccaagaaaaagaaccaaaagaaatggacttcactggtggaatttctagacaccatgaatgctttactaagtgctggcaactgagtgcttgcagttttagcctaaaaggtatggtttggataaactaagaaaccaattacgtcatgtacaaacctcaatgttcatttcagcattgtttgttata

SEQ ID NO: 422992 - DNA, 498 bp, Homo sapiens
ggcctgcatctgcccaggcctggggaatctagggaagcagaggaggactctgggattggccgtggctaggggatgagaggacaaaggtctccaggggttgggggagcagcagacctccacctgccatgcagccccactcaccctcgcagtcagaatgaaagggcatcatctgctgggactcagacctggctttctacagaagtggtggtccaactcccccatccccatcccaacacccctgacctgccagcaagaggaaataacaccttggtggtcaggtgttttcctcccaggagagtgtgtatttttaaagcsccaagaaaaagaaccaaaagaaatggacttcactggtggaatttctagacaccatgaatgctttactaagtgctggcaactgagtgcttgcagttttagcctaaaaggtatggtttggataaactaagaaaccaattacgtcatgtacaaacctcaatgttcatttcagcattgtttgttata

SEQ ID NO: 422993 - DNA, 587 bp, Homo sapiens
taagtgattttcccagagtcacatagcttgttagaatgcagacctcctgatacctaatatacagctctttctgttatttaatttatcttcaacctacttgcttattgtatttctccatctctacattttcttccttccaaacagygcaaatacaatccttgaattagggtagcagactgttatggaatgattttcctgggtgtgtaaggaataatctgtttcaacttgctgaatgaattgtatgggaaaaacaaatatgggtttagttcatttaattctcaatggattctccttagagaagagcaagatgctaaggaatgatatttacctccagccttatattattctgcagagttgtcaccatttatttatatgtctatttctcttttcagaccttaagcaaactgaagagactttgccatatttatctctttattctgacccccaagcagtgcttggtgtttagcagatttttaaaaaatgaacaccaaatgagcatttggttccacatacatctgcattataagttcatatctgctaaatggatttgtctgtaaaatcattatctgctggtgctcaaaaacagt

SEQ ID NO: 422994 - DNA, 572 bp, Homo sapiens
tcagttaagttgttttaaaaattatttatatacatcatttgcttatttttcaatcatagagcttctacttyccttaatttgtaatagtaatttatatatcaaggacaatagtatcttctgtctgtaacatgtgctgcgtttcctcacttttttgtggctgtcttgctattgtaatgctggagttttaaaacgtttatgtagaccaaaatttatatattttttgtagaatctatttacagttgtatatgtaaggatttctcaaatccaaccgtctacaagcattggcctatatttgtattagctcttttttcattatttacatttatatctttagtttattggaaattaattttgatggaaggtgtggtttgtagcttcattttcctcaataattagccatttatcacagcactcttcaatgaaccctttcccctactgaccatatactatataccaaattctcagatggctgtaggttgatctcagcatattctcttcaagggagctgtttactcttcttgcaccagcctcaccattttaattattgtagttctgtagtatttgggagggca

SEQ ID NO: 422995 - DNA, 581 bp, Homo sapiens
gaatccctctctgctttcagtccagagaggaacagttcccttctcagcacccttctgccttcatgagaaggaagactggggagctgggagccggcaataggaggtgccttctcaggtgcctctgattttgaaccataatcttaaaactcccttcagaaccagaattctggcagatttgcatggcccagacccttcactggccygggatgctcaagatcccagagagattctgggccatctccttccctaggtcacttcatccactccacctaccaccctctccagaagctcaattaaccagaacctgtttgcctcaaggcacaaagtggtactgccccagtaaataggaagaagcacagcccggggcctgccccaagcctctatgggaagtgcacctgccccccttcaccccatctcttctcagggcctccactccttggggcacaccctagcactgctggcttctagtggggctccccaaaggcaggggctgggctccatgcccccatgacacagtgccacttttattgcagagaatgtgttcttctctctgagcccctgacctcctgcaacatgtaaaa

SEQ ID NO: 422996 - DNA, 569 bp, Homo sapiens
tgaggaaggaactcaagggctgctgacgtttaataggcaggcagaaaaccctacataagagacagagaaggacctttcagagaggtgagaagaaaatgagggcagtacagtatcctagaaagcaagggggatgggagtatgtgaggatttttattatactctactctctgtgggttagaagttccaccactgaagcatctcaggaacggggacctcatcaatgarggaaaacagcaagcatgagctttgggcacagatccagagtagaagcccagctcctctccctactacctgtgtctctgagacaagtgacacaatctttctgaatgttttcttagctgtaaaataaggataataatagtaccaacctcacagagtaattctgaggatggcatgggaggacagagtctattaaggccctagcagtgtgctgggcttacctaggtactcaaaaccaattcctttagtctttttctttcctcagcagctccaattggttttgcttcagctccaattaattaatagttcagtaaccattgggtgtgtgactgttatgtgccagaccctgg

SEQ ID NO: 422997 - DNA, 648 bp, Homo sapiens
ccactgacctttttaagtggctttgtccatctctgggatttgtctgcatgtatgcatgtgacggtatttaggttaggcctttgggctgtttgcagcatttgaggacagatcaggggttgctgatcccttgaagtaattctctgctcacccaccctcgccaccacacacgttcatgacccaaggcctctgggtctgtgttccttgctgttgccccttcccttgtgtgagttttttcactgccaaggccaagaggctgcactgccagaaacagtttccagctcacactcgacatagtggttgcatttgttttctctgttttatgagctgggatggagtgggtggtgggcagcctgctggcagacttttgcaggctttacatgtttatacttgctgtggggggaaggcaaagagttggctggactttcagaaarctggagctgaggcatttaatagaaccagattcctatagccctttttgctattatatattttctctgtcaacagacactaaactagtaataatagttaacatttatggagaagttaccatgttccaaatatgatggtaagtattttacatgcatgcttctagctgttttgtgaggtggtcctattatttataaccattttgctgatggaacaactgag

SEQ ID NO: 422998 - DNA, 561 bp, Homo sapiens
ctcatgcatagatgggagcaggcagggtgggcctgaggtccatgagtgctggtggtgtgtcctggtaacaggggtgagtcacggcaggagatagggtgaggtgaggttctgggagtccttgagggccagagatagtgaggctttactggcctgtggccctccccttcatacagattggtaygctcagtggaccagttaagtggttcaaacccaggaatattggaaatgacagaaccagaacatcagaataccttcccaaaggaaagacctttaagatcacttctgattacagaaaatccctaacttatgatggtgcaacttacaatttttcagctttacagtggtgtgaaagcgatatgcatttagtagaaactacttcgagtacccacacaacaattctgtttcactttcatacagtattcagtaagttacactgatgttcaacattattataaaacaggttttgggttatataatcttgcctaactgtaggctaatgtaggtgttctgagcatgtttaaggtaggctattcagtaggtgaggtgtattcaatgcgtttt

SEQ ID NO: 422999 - DNA, 561 bp, Homo sapiens
ctcatgcatagatgggagcaggcagggtgggcctgaggtccatgagtgctggtggtgtgtcctggtaacaggggtgagtcacggcaggagatagggtgaggtgaggttctgggagtccttgagggccagagatagtgaggctttactggcctgtggccctccccttcatacagattggtatgctcagtggaccagttaagtggttcaaacccaggaatattggaaatgacagaaccagaasatcagaataccttcccaaaggaaagacctttaagatcacttctgattacagaaaatccctaacttatgatggtgcaacttacaatttttcagctttacagtggtgtgaaagcgatatgcatttagtagaaactacttcgagtacccacacaacaattctgtttcactttcatacagtattcagtaagttacactgatgttcaacattattataaaacaggttttgggttatataatcttgcctaactgtaggctaatgtaggtgttctgagcatgtttaaggtaggctattcagtaggtgaggtgtattcaatgcgtttt

SEQ ID NO: 423000 - DNA, 586 bp, Homo sapiens
tttctcctagaattttatagttttgaattgtacatttaggtctatgatttagttagagtaaatttttttgaaaggtgtacaatgtgtgtttatttacttatttttttttttttgtttaacttttattgtaagttcaaaggtacagatgcaggttggttatataggtaaattgtttgtccaggtgtttggtgtacagaaggtttcattccccgggtaataagcctagtacctgataggtaatttttcaatcctctccatcctctcatcctccaccctcaagtagggcccagtgtctgttgttcctttctttgtgtycatgtatactcaatgttcagctcccacctacaagtgagaacatttggaatttggttttctgtttctgtgttagttcacttaagataatggcctccagcttcattcatgctgccgcaaaatacatgatttcattcttttttatggttgtgtagtatttcatggtggatatgtaccacattttctttatccagttcactgttgatgagcatgtaggttaattccatgactttgctattgtgaatagtgctgtgatgagcatatgcatacatgt

SEQ ID NO: 423001 - DNA, 495 bp, Homo sapiens
gaaataaatatacttacttctaatgtatgtattagtttgaaattttatatgaatatagttatttattcaatggatttacaataatttcatattcaaataacaagaatttaaagaaggttctagaaatatgactacttttaaaattataactacatctagactcttttaaaaattatttttatacaaatatgaaatgatttttaatgaactggagttaggtgttttcggtttgaataacccagatacatccttcaaattcctgctccctttgtgatgatctgatccgatcatattatttgtttttaggatcagtactgaaagctgctgctggatcaatactagttccaaagaaggttacagtgactggatcatgtatctcatagtatgcttgcttatattcacatttctgccaaaacctggaagagaagccaaagaaatagaaaackagagtttatttttctgaataaactggcttctggcacaacataagcacta

SEQ ID NO: 423002 - DNA, 585 bp, Homo sapiens
cagtaatatgtgtcatctaattttttctttgttagtcttgttagagttcatcacttttcttgaatatttcaaagaatctgcttctgtttttgttgttttatctagttttcctgttttcaatttcattaatttcttctctaatttttattgtttactttcttctgcttgtttggtttttttattttttctttagttgcctataatagaatctaggttattgattttatatctttccctttttagtgtatagatttagtgttgtaaatttctcactaaacactgctttactgtacacacaaatttctgataagttgtattttcatttttcatttaatttaaaatatttwaaggttagaatagacactcttcaaaacattaaaattgcaatgcagaaacaaacattttgtatagagatacttttggatttctgtgagtacccaagggtttacagtctccattttgggctgtcctagagtaaccagtaatgatactttctcatgctacctactacaatctgttttgctgacaagttgaaagttggacaaatatgttcagaaggacataccactgtgatttcagtaagac

SEQ ID NO: 423003 - DNA, 585 bp, Homo sapiens
cagtaatatgtgtcatctaattttttctttgttagtcttgttagagttcatcacttttcttgaatatttcaaagaatctgcttctgtttttgttgttttatctagttttcctgttttcaatttcattaatttcttctctaatttttattgtttactttcttctgcttgtttggtttttttattttttctttagttgcctataatagaatctaggttattgattttatatctttccctttttagtgtatagatttagtgttgtaaatttctcactaaacactgctttactgtacacacaaatttctgataagttgtattttcatttttcatttaatttaaaatatttaaaggttagaatagacactyttcaaaacattaaaattgcaatgcagaaacaaacattttgtatagagatacttttggatttctgtgagtacccaagggtttacagtctccattttgggctgtcctagagtaaccagtaatgatactttctcatgctacctactacaatctgttttgctgacaagttgaaagttggacaaatatgttcagaaggacataccactgtgatttcagtaagac

SEQ ID NO: 423004 - DNA, 579 bp, Homo sapiens
ggcaccttggctcttggcccaccttctgtcttggccctctgctacactttccaacttacaagcagagtgcacgtgtcaagcctaaatggggttatataattgccctctgctaaaccttctggtatgggctgaattgtgcatccctgaaaaatttatatattgaatccgtagcccccagtaccttagaatatgactatgtttagagataggctctttaaagagctaacttagttaaaataaggtcactgggatgggtggctcctaatccaatattactagtatccttataagaagagattatgacacagctgcatacagaaggaagaccatgtgaagacacagggaaaaagacagccatctrcaggccgaggagagagccctcagaagaaaccaaccttgctggcatcgcaatcttgggcttctaacttccagaattgtgataaaataaattccagaattgtgagaaaacattcttgctgacatcatgatcttgggcttctaaattccagaattgtgagaaaatgaattggttcagccactcagtctgtggtacttcgtcaaggcagccctagcaaaact

SEQ ID NO: 423005 - DNA, 584 bp, Homo sapiens
gtgttttaaggaagacaatgcctcaagtgctaacccccttgaaatttttttttttttttttggagtgatgaaagctttttcttgagtatattggttaatagccaagaaagatggggaaccttgaacagaaagaccatacagaaattttctgatgctttgacattttacgttttctttaaaatcaaatggctctagtaacacagcaaaaaggggaatatgacattttgacattcatcaggtatctgtggtacttttaagttatatcgattaaactttcctatcccaacaatttttttatctgcttatggaagctatcagtctttataatgtattgcaaatgcgtratgaagactgaagataaagaaaagctgacccttgaacttctgagtgtatttatgtaatttcctaaattttgagtaatcttggcaaaagagatgtcctgagttcttttttacatttatttaaggcaatggtatctataaactattattgctcaaatgtctaggattcttttaaatgtaaaaaggagtggttcttcttaggaaaggatgattttaactatctttgaaaatttcataaatcaa

SEQ ID NO: 423006 - DNA, 642 bp, Homo sapiens
agaaattttctgatgctttgacattttacgttttctttaaaatcaaatggctctagtaacacagcaaaaaggggaatatgacattttgacattcatcaggtatctgtggtacttttaagttatatcgattaaactttcctatcccaacaatttttttatctgcttatggaagctatcagtctttataatgtattgcaaatgcgtgatgaagactgaagataaagaaaagctgacccttgaacttctgagtgtatttatgtaatttcctaaattttgagtaatcttggcaaaagagatgtcctgagttcttttttacatttatttaaggcaatggtatctataaactattattgctcaaatgtctaggattcttttaaatgtaaaaaggagtggttcttcttaggaaaggatgattttaactatctttgaaaatttcataaatcaagagcagatttgtaaaataaagtgttaacaagtggttacaggtttagttttccaaagataaacttttgtccttcttattytgtgtcccagaaccttccctattctctccattgtcaatgctggtttttctaagaggaaaaagctgactattcgtttagaatctctgtgcaagatttcttgttagattgatccattata

SEQ ID NO: 423007 - DNA, 642 bp, Homo sapiens
cttgtggcagttctttcaatatgtagtagggttagtagacagactttaggattttgagaattaattggattgtaaggggcccaatggcttaatctggttatgcaggtggtttcttgtgtgagaaccctcagccaaataggtgaatgtgagctaaacacagctacttgctccattcagtgagtcatgccctggcacagagtcacatccasagaaatgggcaatttttcttaggttttacaaagctgttgatgagttaacagaaacctgatggcaggtactgttttccataatatgaactgtgaagagaaggagggtaatatcagagaggtataaggtttaatttttaaaaggtcagctaaacttgaatatatttaaaggctacaggctaagacatagtatatggagagtttaaagagacaagtgaaaataaaataatcaacagagagccatgaggacacagaggagaatgggatcttgaaagttacaaaaattagacagtagaaatttctcttttactgacttggagaggagaagataagcatgggaaaagatgcaaataagcttatgggtgaagggagataaaaatgaactaaaaataggcagaaataaaacaagaaaaggatgtacaaatggccaacaaac

SEQ ID NO: 423008 - DNA, 582 bp, Homo sapiens
cagctactcgggaggctgaggcaggagaatttcttgaacccaggaggcagaggttacagtaagccgagatcgcgccactgcactccagcctgggcaacagagtgagactccatgttaaacaaaaacaaaaaacaaacaaacaaacagaaagaaaaaatgtaagaaaagagaaactacaatacacatayggtagagtgatgaacaggtccacagctgtctaaaagaaattccagaagataataaaggaagtggcttataaacaacaacaacatgtaaagaaaacaggaaagttttctagaattgaaggaagatattcaaatgaaaaggttcacaccagctgtcaagtggtttgaataaaaaatagtgatttgatagatcaagaataaaaaggaaatgttcaaaggtacaagagaggagacagagtttgcctatggtggcaggttgtattatttacttacaaatcttcttgcttaccattgccagggtgagtggtatatacttccctggatccttgatttgggggttggctgtgtgattagttttggtcaagggcaaaatgacaatgtgcgagctccaaatctg

SEQ ID NO: 423009 - DNA, 562 bp, Homo sapiens
actacttaacaaggtcctggtttctcttgcaacacagtagctaaacttgcctgcttttatgtgcatttttgtagggatcaacttggtagacagtatgagcagagaaacgacaccttgatcttggtttgcaagcccttctcccatcagtcctagattaggccctgttcagccatgcaggggtgttggtttatgcgtgctgcagcagtgggcataatgaatgtaatttactcagtggacaaaggtgtgtaccaagtgaatttaaataattggtgtggattggccagtagctaagaagtgggctttcaaagagtattgaagactgaaaggtttttgtttttgttttttttaaagaaaaaaaaaccattgattgtagaaaatgaaaagctagggtttgccctcttcatgtctactctccttccaaatagttatatccaaaactgtttctccctctcccctaccttatcccccctattaaaatagaaacagggattgattaacgtccygctcctgaatacatgtaaaacttgtacaaaaatatcttctatgaaaatgatttgtaatc

SEQ ID NO: 423010 - DNA, 549 bp, Homo sapiens
caatttcatcgaaaattactcttgatgaaaaagtaaaatgtattacttttgctagatttttactgttgatcacccatctctttaatattgtgtgtcctaaaatgagaaatatgcataaaacacttgctgcatactgaagtaggatggtcaatggtaatctggaggaaaagaatttgtgtgattgtttgagttgcaagcttaactgaccactttttttgttggaaaactatttttactttaaagaacaactaacagacaaattatagtgttcatacttatttggcagacattttcttgaaagtgaataaagtgagcatgccacttcaagaaaaacaactgacaaaattttttccaatgataaaatttcagctttcaagtgaaaacttgaattttggaaaacttgtatctatcattgtagcttgaagatacataaaagacttcagtgatcttaatagatgtgaaytttaaaatcttatataatgtaatgtatccacatttagaagtggcataacagtttatttgtctattcttacattgctataaagaaat

SEQ ID NO: 423011 - DNA, 549 bp, Homo sapiens
caatttcatcgaaaattactcttgatgaaaaagtaaaatgtattacttttgctagatttttactgttgatcacccatctctttaatattgtgtgtcctaaaatgagaaatatgcataaaacacttgctgcatactgaagtaggatggtcaatggtaatctggaggaaaagaatttgtgtgattgtttgagttgcaagcttaactgaccactttttttgttggaaaactatttttactttaaagaacaactaacagacaaattatagtgttcatacttatttggcagacattttcttgaaagtgaataaagtgagcatgccacttcaagaaaaacaactgacaaaattttttccaatgataaaatttcagctttcaagtgaaaacttgaattttggaaaacttgtatctatcattgtagcttgaagatacataaaagacttcagtgatcttaatagatgtgaattttaaaatcttatrtaatgtaatgtatccacatttagaagtggcataacagtttatttgtctattcttacattgctataaagaaat

SEQ ID NO: 423012 - DNA, 316 bp, Homo sapiens
caagatgagatttggaaggaggaatatccgaactgtatcactcagtgaaacaatattttccacgtaaacaatagttgatggtacaaaatcattcatgagtaaaggagtccttcaatgtgcaatatagaccaatagatttgaaaccaacgcrgtacaaaaaaatgcactgatacagttatttaccttccattggagctaactacccttggttgagcttttgtagatatcaaatattaatatctacagttacccgaaaaggctattgaatttcttctctcctatccatctacatgtttatgtgaggctggattttctt

SEQ ID NO: 423013 - DNA, 533 bp, Homo sapiens
tttaagaaggcttattttgcttttgctttctgtttttcacttttcaggaatttgctcctgtctgcagaaattatgaaattattttttgagagggatcccttacctttaacttgtgcttaaagctgtcagctagaggagatagctaatatggtttggctgtgtccccaacaaaatctcatcttgaattcccacatattgtgggagagacctaatgaaaggtaattgagtcatgggggcaggtctttcccakgctgttctcatgataataagtctcatgagatctaatggttgttataagggcaagttttactgcacaagctctctttgcctgctgccatccatgtaagacgtgacttgctcctccttgccttctgctatgattttgaggcctccccagccatgtggaactgtgagtccaataaacttctttcatttgtaaattgcccagtcttgggtatgtctcatcagcagcatgaaaacagactaatagaatacccacattaattccttgtcccttttgataagctgcaaat

SEQ ID NO: 423014 - DNA, 576 bp, Homo sapiens
ttcttcctcacagcctttagaaggaaccaaccctgttgacaccttgatttcagaattcttgcttccagagctgtgagacaatatattcmttttgcctaagccacccattttgtgatattttattacagcagccctaccaaactaatacagatgggccaagtcttggtagtagggagaataaaaatatgagttgcttcaggaactactaattgttgtgaattctaggctcatagaaacatgcaatggcaaaatacttggaagtgagaatatgggaggagatagcagtggtttccagagaaccatgctcaggagttggagtccatcaagtagataacgggaaataaatcaggaatcttaattaacagagtgatatggccatatttttgtttacaaaaagatcatcccagcagcaatgtgaatgctgttttgaggaaaaaaagagtaggaaaaggaggtattataaacaggagttctccttggcaatgcttaccagagtttagtaatgcatgggcaatttaaaagtatttgtaggggagtttgcagatggtacctgtcttagtttgttttgtgttgcta

SEQ ID NO: 423015 - DNA, 592 bp, Homo sapiens
atttattatatatataaaatatatttatatatttatctttattatataagtataccttgttttattcacgttgtcttattgcacttcacagatatattatttttattttaagatcaaggttacaagtgcaggtttgttacataggtaaacttgtgtcatgggggtttgttgtatagattatttcatcacccaggtattaagcctggtacccattagttatttttcctgatcttcttcttcttcccaccccctcaacctccagtaggccctaatrtctgttgtttcccattatgtgtccatgaattctcatcatttagctcccacttataagtgagaacaagtggtatttggttttatgtcctggtgttagtttgctaaagataatgacttctaactccatccatgtccctgcaaaggacatgatctcattcttttttgtggctgcatagtattcaatggtgtatatgtaccacattttcttgattcagtctatcattgatagacatttaggttgattccatgtctttgctattgtgactagtgctgcaacaaacatgcacatgcatgtgtctttataatagaatgatttata

SEQ ID NO: 423016 - DNA, 486 bp, Homo sapiens
gttgtctatttactctgttgataatttcttttgctctttagtttaattatatctcatttgttaaattttgcttttgtcraaattgcttttggcatcttcatcatgaaatccttgcccatgcctatgccctgaatggcattgcctaggctgtcttccagggtttttgtatttttaatgaattgtaggtatgcaacaaccctgcattgagcaagtctattgacaccattttttctaatagcatgttctcaccctgggtctctgtgtcacattttggtaatcttgcaatatttcaaaatttctccattttattatatctgttatggtgatctgtgatcagtgatcttttatattactattgtaattgttttggggcaccacaagtcatgcccatataagacagtgaatttagtaattttgcttgtgttctgtctgcttcaatgaccgggtgttccaccttctctctccttctgcccaggcatccctgtt

SEQ ID NO: 423017 - DNA, 486 bp, Homo sapiens
taaagcagactcaggcaccttatatggacatacagaatgcacctaattatgtacttgcgggcccagcttgtgcatttagattgtgtaatgcctaaatttggtttgcagcttttctttgctggggttgagtgattcaaagagaagagatgaaactgtacagcctaaggaagaagttgtttctcacaggcctcagggtttgaaaaatgtatagactcctgattgcaaaatccctgcccccaaacaggtgggggattatcttttctcccagcttcaaatattccagttatagaacttgcacttctattttttggtttccttttatccagatggaaacttttatttgacaggatttaatctatataaacaaatgcaaaayattaagcttcaacaaaaatgactaaaaatatgtttcactctttatattctccacgactttggggcttgtctgccagttggccattgtcgcttcataggatgacgttgctg

SEQ ID NO: 423018 - DNA, 486 bp, Homo sapiens
taaagcagactcaggcaccttatatggacatacagaatgcacctaattatgtacttgcgggcccagcttgtgcatttagattgtgtaatgcctaaatttggtttgcagcttttctttgctggggttgagtgattcaaagagaagagatgaaactgtacagcctaaggaagaagttgtttctcacaggcctcagggtttgaaaaatgtatagactcctgattgcaaaatccctgcccccaaacaggtgggggattatcttttctcccagcttcaaatattccagttatagaacttgcacttctattttttggtttccttttatccagatggaaacttttatttgacaggatttaatctatataaacaaatgcaaaatattaagcttcaacaaaaatgactaaaaatrtgtttcactctttatattctccacgactttggggcttgtctgccagttggccattgtcgcttcataggatgacgttgctg

SEQ ID NO: 423019 - DNA, 573 bp, Homo sapiens
gtaataaaattgaagctgtttttccactgccaactatctgcttgagttggggcctcctgaatcttataaatgatttgttcctcttgtgacatttattgttagagacatactctcttttcacctttgctgaaaagtgctgtgttggcaggcagtgtttcgggagtgcagactgtactttcctttccagctcacaacagacagaggaaaggaacgtgtcttcctgcagcccatgcggccctcctggtaggcgctctccacagcttcaaggctggccacctgggccggcrgcccggttcaatagctggatatcctgttctgcttttctgctgttgagctgtccaggatgatcgcctgggaagtgaattgtgactttccagggttttaagcttgccaagattagttaggaaaacacagtttggggttatacaaattccacatcttctggcactcttgttgcctgaaatttgagagaaggaaaaagtatttgtgggagttgtgaacctaagtgtgttcaaaagctaggggtttttgttgaaaatatttaaattctcagaatatatttttatatgcaag

SEQ ID NO: 423020 - DNA, 570 bp, Homo sapiens
ggctgggactggaaccggatcctaatcagcttaaagctagagactataattgacttgtccattaatggatcattggcagttagcccagcatcagacacatagtaagtactcactaaatgatttttgaattgtgaatacatgatttgcaagtttggtcacgcaaacatttgttctaattaagccactaaaataagtggtcagctgggcgacagagcgagactccatcccaaaaaaaaaaaaagtggtcagtttaaggaaaaacaacctgttaatccatttaactaaaatggatgacttattaaacacaaccagttattagccatcttgaaacttggcaatgcaagttaacaattggttaaaaagtcaaaaaataaaatttactgaatgcttctttatcacacttgtaaaaacatttctctrtgttgactaaactaattcttactttaaaaaattgcacaggcagaaacaaaactacaaataaacatttttgtctaagtgtactgcaacagaaggcatgcaattatttgggctcaaaattaatattaaaggattaaacacataagtgtacat

SEQ ID NO: 423021 - DNA, 580 bp, Homo sapiens
aagttaacaattggttaaaaagtcaaaaaataaaatttactgaatgcttctttatcacacttgtaaaaacatttctctgtgttgactaaactaattcttactttaaaaaattgcacaggcagaaacaaaactacaaataarcatttttgtctaagtgtactgcaacagaaggcatgcaattatttgggctcaaaattaatattaaaggattaaacacataagtgtacatattacttggaatttataattaaagtaaagcaaataggctcataagagaatgctttaatattgttaacactacttattcagagttatgtagaatgctaaaggcctaatttgtttcaccaaacaattcatagatccagagagatgtcaacattaccaaagatgtaggagtgatctcttcctatgccagagttaaaatactatcttcactgataataataataaatttaatcatcaatgtatgtagaatacattttaaaaagcaaaaatcttaactgcataatcgtagctacataaaaattatactttcccaggaatgatttcagaggttttgtttttaaaatcctttaatcat

SEQ ID NO: 423022 - DNA, 654 bp, Homo sapiens
tcttaggcaaattgaccattcttgcacagtgcaaaaaattaaaaatccagatatgtggttctttttgttcctttgcacattttcaattggyaataaaatatattgcacttggggtaaaaaaatttttggcttcttgaaatttttaaatctatcttaaacttatgcaattaaatggttctccttgagttgttgttcactagaacttagaaaacttcggatgtagttatttgttttcttgcctgagaaaacagtttttaaaaaggatgaacaattcaaaacaattgcagattaaatacttttcaggcttggaactctgacttcataacaagtgataacgtaagttattagtttctgtaaattgcgtcacttactatattcctacagcaggtcctccattgaaaagaataatgaaaaggatagctcacttctgtggctacctaatctgttctgcaatgtcaaatccatctcacagaagttcaatctcaagagaagttctacccaaaaattgaatagcatggtagttgctcaagtatctatacatgtgtgtatttgtgtgcatttattacatgtagacagagcttctcttttatactgggctgaaacctcccagaaaatctgtaactcttaacaggaagaaaaataggaaacaaaaga

SEQ ID NO: 423023 - DNA, 516 bp, Homo sapiens
atttacgatacagtcagataagaactttcaagtagctacagaaaatagcagttaacaaatgaattaaccaatatcattagaaaccaaaggattaaaaaaaattaacctatgaaatgaacaatttttatatcaacattggtagcaatttgatgttatgttatatactgctaattatttccatacatattgtgacatatttaagacaaaagactaacacccttaatatttaaagagctttttcaaaccagtaagaaaataattaaatgagtaaaagacacaatttacaaaagaagtagraaaaaaggcaatacaaacgccactgatgatatgaaaaaacattcaatatcactgtaatgagagaggcatattaagattaagtaatatttaccacttatcaaatggtaaagatttttaaaaataaaacctagtgttgacaatagtatattatgtgtgtgtgcatatatatatatgtagatctgttcataaactaaaaaaaaaaaatatatatatatatat

SEQ ID NO: 423024 - DNA, 543 bp, Homo sapiens
taaacaagtgaatacattcttttaatttaaaatttttttgagagcctgttctctayaaagcacatactaggctctgcggcaatgcagaaataaataaaacctagtccctgttctttggagatcacagagcagtgaggcaggccaacatacaaataacataactacaacagagataaagcacagggatatgggaaagtagagagcactgggattaattttgagtccactttcctctcatccagtccccagcctgaaagatatgaactgtggtggcccacacagctggactgtaaaccatgtgacaagagtcatttcttaccccttattcatgtttgtaaactccacagtagttggttctttgccttgcatagagtatgtgctcaataaagacctactttctgaaaggttcacagagttcagccaaacacaggacaagttctagaaggcaagacgttaacctcaagattcaaactagctctgagaattaagaaccagccagacccttccactgagcctagacccaattaattacctctgctctaa

SEQ ID NO: 423025 - DNA, 543 bp, Homo sapiens
taaacaagtgaatacattcttttaatttaaaatttttttgagagcctgttctctataaagcacatactaggctctgcggcaatgcagaaataaataaaacctagtccctgttctttggagatcacagagcagtgaggcaggccaacatacaaataacataactacaacagagataaagcacagggatatgggaaagtagagagcactgggattaattttgagtccactttcctctcatccagtccccagcctgaaagatatgaactgtggtggcccacacagckggactgtaaaccatgtgacaagagtcatttcttaccccttattcatgtttgtaaactccacagtagttggttctttgccttgcatagagtatgtgctcaataaagacctactttctgaaaggttcacagagttcagccaaacacaggacaagttctagaaggcaagacgttaacctcaagattcaaactagctctgagaattaagaaccagccagacccttccactgagcctagacccaattaattacctctgctctaa

SEQ ID NO: 423026 - DNA, 543 bp, Homo sapiens
taaacaagtgaatacattcttttaatttaaaatttttttgagagcctgttctctataaagcacatactaggctctgcggcaatgcagaaataaataaaacctagtccctgttctttggagatcacagagcagtgaggcaggccaacatacaaataacataactacaacagagataaagcacagggatatgggaaagtagagagcactgggattaattttgagtccactttcctctcatccagtccccagcctgaaagatatgaactgtggtggcccacacagctggactgtaaaccatgtgacaagagtcatttcttaccccttattcatgtttgtaaactccacagtagttggttctttgccttgcatagagtatgtgctcaataaagacctactttctgaaaggttcacagagttcagccmaacacaggacaagttctagaaggcaagacgttaacctcaagattcaaactagctctgagaattaagaaccagccagacccttccactgagcctagacccaattaattacctctgctctaa

SEQ ID NO: 423027 - DNA, 543 bp, Homo sapiens
taaacaagtgaatacattcttttaatttaaaatttttttgagagcctgttctctataaagcacatactaggctctgcggcaatgcagaaataaataaaacctagtccctgttctttggagatcacagagcagtgaggcaggccaacatacaaataacataactacaacagagataaagcacagggatatgggaaagtagagagcactgggattaattttgagtccactttcctctcatccagtccccagcctgaaagatatgaactgtggtggcccacacagctggactgtaaaccatgtgacaagagtcatttcttaccccttattcatgtttgtaaactccacagtagttggttctttgccttgcatagagtatgtgctcaataaagacctactttctgaaaggttcacagagttcagccaaacacaggacaagttctagaaggcaagacgttaacctcaagattcaaastagctctgagaattaagaaccagccagacccttccactgagcctagacccaattaattacctctgctctaa

SEQ ID NO: 423028 - DNA, 540 bp, Homo sapiens
tcttattttgaattgtaatccccatgtgtcaagggagagaccaggtggaggtaattgaatcatgggggcggtttctcccatgctgttctcctgataatgagcgagttcacgagatctgatggttttatgtgtttggyagttcctcctgcattaattttccttcatgctgccttatgaagaaggtaccttgcttcccctttgccttctgccatgattgttaaatttcctgaggccttcccagccatgctaaactgtgagtcagttaacctgtttcctttataaattacccagtcttgggcagttctttacagcactgtgaagacagactaatacagtgggcttgttgacatagttttgcccttttatgaatgtgattatctcaattttattatgttaaggaaggacacagtggcccacacctgtaatcccaacactttgggagtccaaggcagaaggatggcttgagcccaggagttcaagaccaggctgggccacaaagtgagaccctgtctctacaaaaaattaaaaaactaactgggc

SEQ ID NO: 423029 - DNA, 540 bp, Homo sapiens
tcttattttgaattgtaatccccatgtgtcaagggagagaccaggtggaggtaattgaatcatgggggcggtttctcccatgctgttctcctgataatgagcgagttcacgagatctgatggttttatgtgtttggtagttcctcctgcattaattttccttcatgctgccttatgaagaaggtaccttgcttcccctttgccttctgccatgattgttaartttcctgaggccttcccagccatgctaaactgtgagtcagttaacctgtttcctttataaattacccagtcttgggcagttctttacagcactgtgaagacagactaatacagtgggcttgttgacatagttttgcccttttatgaatgtgattatctcaattttattatgttaaggaaggacacagtggcccacacctgtaatcccaacactttgggagtccaaggcagaaggatggcttgagcccaggagttcaagaccaggctgggccacaaagtgagaccctgtctctacaaaaaattaaaaaactaactgggc

SEQ ID NO: 423030 - DNA, 540 bp, Homo sapiens
tcttattttgaattgtaatccccatgtgtcaagggagagaccaggtggaggtaattgaatcatgggggcggtttctcccatgctgttctcctgataatgagcgagttcacgagatctgatggttttatgtgtttggtagttcctcctgcattaattttccttcatgctgccttatgaagaaggtaccttgcttcccctttgccttctgccatgattgttaaatttcctgaggccttcccagccatgctaaactgtgagtcagttaacctgtttcctttataaattacccagtcttgggcagttctttacagcactgtgaagacagactaatacagtgggcttgttgacatagttttgcccttttatgaatgtgattatctcaattttattatgttaaggaaggacacagtggcccacacctgtaatcccaacactttgggagtccaaggcagaaggatggcttgagcccaggagttcaagaccagsctgggccacaaagtgagaccctgtctctacaaaaaattaaaaaactaactgggc

SEQ ID NO: 423031 - DNA, 528 bp, Homo sapiens
tcctgagactctctcacggctcttaagatacctccctgaagtccctccaaagaattcaatgtgcccctagtctaaatcagtttcctccatcataaatactcatagatgacgcaacaataaarcgttaataacgataatggcaattttgtgtgtcaaacattgtattaagcattttacctgctttattgtttgtaatgcttcaacagcttatgagaaggtattattatttctacttcacagtgcagaaaatgaaacctgagtaagttgtcttagatcacacagctgctaagcagtggcacagggatttaagcccaggtccatctgatcaactccgatggcacataattgacctctgcattgtcccgcctgcccacaggtcactgcctcagtgatccagtcccatccgttgtttagataactgaataagttatcctcgaatcatttattgtaagcctagtctctcaagtttactgtgagtcaagggctaggtcatatacctcttttgtgctcttctatatcgtggcatcc

SEQ ID NO: 423032 - DNA, 528 bp, Homo sapiens
tcctgagactctctcacggctcttaagatacctccctgaagtccctccaaagaattcaatgtgcccctagtctaaatcagtttcctccatcataaatactcatagatgacgcaacaataaagcgttaataacgataatggcaattttgtgtgtcaaacattgtattaagcattttacctgctttattgtttgtaatgcttcaacagcttatgagwaggtattattatttctacttcacagtgcagaaaatgaaacctgagtaagttgtcttagatcacacagctgctaagcagtggcacagggatttaagcccaggtccatctgatcaactccgatggcacataattgacctctgcattgtcccgcctgcccacaggtcactgcctcagtgatccagtcccatccgttgtttagataactgaataagttatcctcgaatcatttattgtaagcctagtctctcaagtttactgtgagtcaagggctaggtcatatacctcttttgtgctcttctatatcgtggcatcc

SEQ ID NO: 423033 - DNA, 528 bp, Homo sapiens
tcctgagactctctcacggctcttaagatacctccctgaagtccctccaaagaattcaatgtgcccctagtctaaatcagtttcctccatcataaatactcatagatgacgcaacaataaagcgttaataacgataatggcaattttgtgtgtcaaacattgtattaagcattttacctgctttattgtttgtaatgcttcaacagcttatgagaaggtattattatttctacttyacagtgcagaaaatgaaacctgagtaagttgtcttagatcacacagctgctaagcagtggcacagggatttaagcccaggtccatctgatcaactccgatggcacataattgacctctgcattgtcccgcctgcccacaggtcactgcctcagtgatccagtcccatccgttgtttagataactgaataagttatcctcgaatcatttattgtaagcctagtctctcaagtttactgtgagtcaagggctaggtcatatacctcttttgtgctcttctatatcgtggcatcc

SEQ ID NO: 423034 - DNA, 460 bp, Homo sapiens
gtttgcagcatttgacatcattggcaatttcagtgagctcttaactgtctcccagcttttagcctctcttttagtccattcagtactctgaagcccacaggattgtccaaaatacaagtataaacccatcacttcatacttaaaactcaccaatggctccccattctctacagttaaagcccaaactggacagactggcatggaaaatcgttggcattccgaccacatttacctctccccctgctgctgcccaggattgcatagcctttgttccaggcacatcaagctaccagccagtccccagacatgctgtgggctcatgtcctcttcaccttcatatgtgcacttccctttgcctataatgcccttgctgcctcccctcccctatcccatcctcccctggatccatagtgatayagttgacccatagtgatatatggtttggatgtgtgtcccctcc

SEQ ID NO: 423035 - DNA, 555 bp, Homo sapiens
cccttgtctctactgtcctgtagtcagtgccccctcaaagttggatgcatctgagtggagatgcttttctgtcacctaaagtcacacatttacctttgatccagaccctccccagaagcagtgcttttgaaatctcttctcctcttctttttgtttgacaaaatataaatgatagtttatttctagaacgatgccaaattcaataaagcaatgatggagttgtgtttcgttttctggtcaagttgacaccataaagtgggttttcctgaatatttccctgttccactggtgttcttggcattgtgaataaacagagctggtgataacatccatcatagaattaagcacattgagtgggtgataaagtcaacaagaagctgaaacaagaattaccacggataagctgccaagagttggctgtagattctaagtggacactgtggctcattcatcttcrcccttcagctttccaccccaacatcatccctgcctcagcactcatgacaagagtaggaaagtaggagagaaggaaagcacagggatcaagtacagggg

SEQ ID NO: 423036 - DNA, 619 bp, Homo sapiens
caacattctgttttcttgtcctaacctatctcaagctaaggaaattctagggtctattgttcaaagacttgaaatgttttccttggattattcccactcttatatttttcttgcctctttccaaaagtgcgttaaaaatgtccaggttttttaactcattaagatgctcatcaagcatcttaatgagttagtcacgattacaactgcatcttttaaattacccaamctgttgaaaggctgccatgaaaggagcttctacaaacaaaatctgggctgtatttctcattatcttatgttgcaaaaagtgaatgaggagttacttccaaaacagtaattagcataaaggctgctgaagcagaggagagataggtgcgctactgtctcaatggaaaatgtcactgttttttctgcaaggaatatgtacattactactaaaggagaagctctttgctaacaaatgtgaaagggtttcacacagttcatggcacataataagtgctcataatttgtttgcttcatcggaattctctctgtagtctacttctcagtcaaataactgtgactacctccatttcctcacaatccagtctccttatgttccttctgttacaggaattgc

SEQ ID NO: 423037 - DNA, 619 bp, Homo sapiens
caacattctgttttcttgtcctaacctatctcaagctaaggaaattctagggtctattgttcaaagacttgaaatgttttccttggattattcccactcttatatttttcttgcctctttccaaaagtgcgttaaaaatgtccaggttttttaactcattaagatgctcatcaagcatcttaatgagttagtcacgattacaactgcatcttttaaattacccaaactgttgaaaggctgccatgaaaggagcttctacaaacaaaatctgggctgtrtttctcattatcttatgttgcaaaaagtgaatgaggagttacttccaaaacagtaattagcataaaggctgctgaagcagaggagagataggtgcgctactgtctcaatggaaaatgtcactgttttttctgcaaggaatatgtacattactactaaaggagaagctctttgctaacaaatgtgaaagggtttcacacagttcatggcacataataagtgctcataatttgtttgcttcatcggaattctctctgtagtctacttctcagtcaaataactgtgactacctccatttcctcacaatccagtctccttatgttccttctgttacaggaattgc

SEQ ID NO: 423038 - DNA, 495 bp, Homo sapiens
agcacaagttcactctctcttctggagctgggacatccatctcctcctgcccttggatatcagtagtgtttctggttttggggcctttggacttggactgggacttacaggattggctctcctggttctcaggccttctggcttggactggagttataatacaccastaactttcctgggcttccaatttgcagacagctgatcatgggacttcacaggttccataattgcatgagccaatctctcgtaataaatctatttctgtgtatctatatataatatatgctatcagttctgtttctctggagagccctaatacacgcagatatattgtgatatcggtttatgcattgtatgtatatctgcactttgtacatttaaaaaattaagttgttttttatcccccaagatcaattctcactcccattgagaatgtgcaacctatcagaccacagcagactgattcaggacacagcagaagcagatcacagaaat

SEQ ID NO: 423039 - DNA, 495 bp, Homo sapiens
agcacaagttcactctctcttctggagctgggacatccatctcctcctgcccttggatatcagtagtgtttctggttttggggcctttggacttggactgggacttacaggattggctctcctggttctcaggccttctggcttggactggagttataatacaccagtaactttcctgggcttccaatttgcagacagctgatcatgggacttcacaggttccataattgcatgagccaatctctcgtaataaatctatttctgtgtatctatatataatatatgctatcagttctgtttctctggagagccctaatacacgcagatatattgtgatatcrgtttatgcattgtatgtatatctgcactttgtacatttaaaaaattaagttgttttttatcccccaagatcaattctcactcccattgagaatgtgcaacctatcagaccacagcagactgattcaggacacagcagaagcagatcacagaaat

SEQ ID NO: 423040 - DNA, 588 bp, Homo sapiens
cattctcattatgcttcctaaaaccattaggatctcttcgtggtcacatccaacagcctttctctttctcaggcctgcagctcactgcatgtggtgctgcctctcacattctcctctttaattagaggtcagccactctaactccagccttcatcacactctgcctctagggtcttctgaatgctgtctttgagggtcttctcagtctcttccttcctctttatcttttatcaaaggcactcttttaatcttttggttcctttctgttgcccctccattctcatctgtttatatgttcgctttaaggtcataaacattattgagtgcttgctatatgcctagtactgatataaacaagatatggcttttgtgcattcttgtgatggaacagatacatatataaaaccaagcaaaacacaatgtgaaatatgtaatacagatctgtacaaaatgtcttagcaactcaaaagaggaagtgatgaattctgtcttgagacaaataaaaggcattgcagaaggaaaaagttttgatttgtgytttgagaatgaattagggatttatgaaaagaaaagttggaggaagggcat

SEQ ID NO: 423041 - DNA, 618 bp, Homo sapiens
agatatccacatcccaaacttgtaaatgttaccgtacatgtcaatgaggactttgcagatatgactacgtttaaggaagatgggaagattagattattcagacgaacctgatgtaatcacaggggtccttatagaaaaaggaggcaggagtgtcagagaaagagatgtgacaatgagggaccatcagccaaaaccaaaaacaaacaaacaaaaacaaaaactgtggttagaagctggaagaggcaaagaacagtgtctctcctccagctccaggaggtatgaaggtctgccaatgctttaattttagcctcatgaaatagcctcatttcagacttctgacctcaaaaagagtaagtttgtgatartttgttacagcagcaacaggaaatgaatacagatggaaaagcagccagggtgctgggagtgagagcatttcaggcagaaggaatagcataagcaaaggcacagaggcatgaaataacatggcaaacccttggggcaggggttaccagttgtttagtgttggtctggtttaagaaccaccaagtaaggagcagaagaatgcactggcatgcaaagcaagtgccagatgacacaaggcctggtaaggagcagccc

SEQ ID NO: 423042 - DNA, 618 bp, Homo sapiens
agatatccacatcccaaacttgtaaatgttaccgtacatgtcaatgaggactttgcagatatgactacgtttaaggaagatgggaagattagattattcagacgaacctgatgtaatcacaggggtccttatagaaaaaggaggcaggagtgtcagagaaagagatgtgacaatgagggaccatcagccaaaaccaaaaacaaacaaacaaaaacaaaaactgtggttagaagctggaagaggcaaagaacagtgtctctcctccagctccaggaggtatgaaggtctgccaatgctttaattttagcctcatgaaatagcctcatttcagacttctgacctcaaaaagagtaagtttgtgataatttgttacagcagcaacaggaaatgaatacagatggaaaagcagccagggtgytgggagtgagagcatttcaggcagaaggaatagcataagcaaaggcacagaggcatgaaataacatggcaaacccttggggcaggggttaccagttgtttagtgttggtctggtttaagaaccaccaagtaaggagcagaagaatgcactggcatgcaaagcaagtgccagatgacacaaggcctggtaaggagcagccc

SEQ ID NO: 423043 - DNA, 618 bp, Homo sapiens
agatatccacatcccaaacttgtaaatgttaccgtacatgtcaatgaggactttgcagatatgactacgtttaaggaagatgggaagattagattattcagacgaacctgatgtaatcacaggggtccttatagaaaaaggaggcaggagtgtcagagaaagagatgtgacaatgagggaccatcagccaaaaccaaaaacaaacaaacaaaaacaaaaactgtggttagaagctggaagaggcaaagaacagtgtctctcctccagctccaggaggtatgaaggtctgccaatgctttaattttagcctcatgaaatagcctcatttcagacttctgacctcaaaaagagtaagtttgtgataatttgttacagcagcaacaggaaatgaatacagatggaaaagcagccagggtgctgggagtgagagcatttcaggcagaaggaatagcataagcaaaggcacagaggcatgaaatarcatggcaaacccttggggcaggggttaccagttgtttagtgttggtctggtttaagaaccaccaagtaaggagcagaagaatgcactggcatgcaaagcaagtgccagatgacacaaggcctggtaaggagcagccc

SEQ ID NO: 423044 - DNA, 307 bp, Homo sapiens
aactccatggacattgttcagggacagatgacttaatcacagatgacaagagatactgaatcgaagctaggaggcctgagagatactgcctgtgcacctcctgcactcaggtgactatgagattgtcacacttgcctggggttgagtaacttgatactggggactggcagacaaagtcatgacattagctgagaaggacaaamaaactccctgatatctgtttagaaacccatcacagttttttattcaaatgaatttgtgtttatagagcctgtcttcagagtttatctttctcagcctagagaga

SEQ ID NO: 423045 - DNA, 536 bp, Homo sapiens
gaagtatgagacgtgggtcttcccttggctgtgtttaattcactcttctatggaataccaatgattctcactaagacttttgcctttttataaccacaatgtatgtcttatggagaagattgtacactttgctctatttagaaagaataaatatgagcaatagttttaggttttatgccctggacttcatatttttctgatttctgttttgagattaaattctcatgtaaatagaaaaatacttattatttctcatcaggccaagtttgttatcagcttgagtttttgaagatgaagcacaaacttttgattttatctttgtcctcatcagcgccactcattgtctctcagtatgrcctggacttgcccctgcatttaccctcatcctgctgagccatctccatgcactgcgcaattccatcagtgattcggggtcctcccaaggctccctgaaatgtgcacagggatcaggacgtcagacacattccagacacaaaggcaacccacactgtagagtgagcagctgtgttcccact

SEQ ID NO: 423046 - DNA, 536 bp, Homo sapiens
gaagtatgagacgtgggtcttcccttggctgtgtttaattcactcttctatggaataccaatgattctcactaagacttttgcctttttataaccacaatgtatgtcttatggagaagattgtacactttgctctatttagaaagaataaatatgagcaatagttttaggttttatgccctggacttcatatttttctgatttctgttttgagattaaattctcatgtaaatagaaaaatacttattatttctcatcaggccaagtttgttatcagcttgagtttttgaagatgaagcacaaacttttgattttatctttgtcctcatcagcgccactcattgtctctcagtatggcctggacttgcccctgcatttaccctcatcctgctgagccatctccatgcactgcscaattccatcagtgattcggggtcctcccaaggctccctgaaatgtgcacagggatcaggacgtcagacacattccagacacaaaggcaacccacactgtagagtgagcagctgtgttcccact

SEQ ID NO: 423047 - DNA, 611 bp, Homo sapiens
catttttaagcatatatttcagtgtcttttaccatattccaaaagttctgcaaccatcaccactacctaattccagaatattttcataatgccaaaaagcatgcctgtacctatgggcagtcactctccaattccccacttcttacagtctctgacaaccactartctactttctctatatatagatgtacttgttctgggcacttaattcaacaaatggtcctgggacaactaaatatccacatgtaaaagaatcaagttagactccctcctcgcacataaaaattaactcaaaatggatcagagacctaaaggtaggtggtaaaattataaatcacttagaaatagtaaatctttgtaatgtgggataagcaaagttttcacaaatatgactgaaagcacaagcaacaaaagaaaaaataaattgtattccatcaagttaaaaacatttgggctgaaaagtatatcatcaagaatgtgaaaagacagtacatagaatgacagaaaatatctgcaaatcatattatctgataagagacttgtatttaggatatattttttaaaaactattacagttcaatattaaaaagataaaccaattataaagtagg

SEQ ID NO: 423048 - DNA, 535 bp, Homo sapiens
ttacagtctctgacaaccactaatctactttctctatatatagatgtacttgttctgggcacttaattcaacaaatggtcctgggacaactaaatatccacatgtaaaagaatcaagttagactccctcctygcacataaaaattaactcaaaatggatcagagacctaaaggtaggtggtaaaattataaatcacttagaaatagtaaatctttgtaatgtgggataagcaaagttttcacaaatatgactgaaagcacaagcaacaaaagaaaaaataaattgtattccatcaagttaaaaacatttgggctgaaaagtatatcatcaagaatgtgaaaagacagtacatagaatgacagaaaatatctgcaaatcatattatctgataagagacttgtatttaggatatattttttaaaaactattacagttcaatattaaaaagataaaccaattataaagtaggtaaaggatctgaacagacattctccaaagaagatacataatgactaataagtatatgaaaagatgt

SEQ ID NO: 423049 - DNA, 535 bp, Homo sapiens
ttacagtctctgacaaccactaatctactttctctatatatagatgtacttgttctgggcacttaattcaacaaatggtcctgggacaactaaatatccacatgtaaaagaatcaagttagactccctcctcgcacataaaaattaactcaaaatggatcagagacctaaaggtaggtggtaaaattataaatcacttagaartagtaaatctttgtaatgtgggataagcaaagttttcacaaatatgactgaaagcacaagcaacaaaagaaaaaataaattgtattccatcaagttaaaaacatttgggctgaaaagtatatcatcaagaatgtgaaaagacagtacatagaatgacagaaaatatctgcaaatcatattatctgataagagacttgtatttaggatatattttttaaaaactattacagttcaatattaaaaagataaaccaattataaagtaggtaaaggatctgaacagacattctccaaagaagatacataatgactaataagtatatgaaaagatgt

SEQ ID NO: 423050 - DNA, 535 bp, Homo sapiens
ttacagtctctgacaaccactaatctactttctctatatatagatgtacttgttctgggcacttaattcaacaaatggtcctgggacaactaaatatccacatgtaaaagaatcaagttagactccctcctcgcacataaaaattaactcaaaatggatcagagacctaaaggtaggtggtaaaattataaatcacttagaaatagtaaatctttgtaatgtgggataagcaaagttttcacaaatatgactgaaagcacaagcaacaaaagaaaaaataaattgtattccatcaagttaaaaacatttgggctgaaaagtatatcatcaagaatgtgaaaagacagtacatagaatgacagaaaatatctgcaartcatattatctgataagagacttgtatttaggatatattttttaaaaactattacagttcaatattaaaaagataaaccaattataaagtaggtaaaggatctgaacagacattctccaaagaagatacataatgactaataagtatatgaaaagatgt

SEQ ID NO: 423051 - DNA, 625 bp, Homo sapiens
gacatcaggaacatctttcaggaacatcaggtaaaacagacttagggcccaagtcaaaggagctaaaataatacaccctggaaagtggtatgatcatttctgcatctgctccagagaaacctgccaaaatatgattagcataatacccaagagaacatcacattccccatgtgtgaaaatgcaagagggagttatttctaatagttcataagctcagcaacaacagagtagacacaaaagccayagaatgtgcttaggctttactttaatgatatagggatatcacatatcatcagcctgtggagtacagaggtagtttacaaaggataaaccttcattgtttggaaaggaaagatcagagagctctttatgaagtttaaacaaaatcagagaaataaagagatgtgggaaagaaagaaaaaaaagaaagtacattgaggacagtccaatctaactgtgaactcataagggacagccagtaaattcaaaacagcctactgttttttgattacttgtgctactctattaaaatagccacaaacacaaaactagtctacctctttctctccccattattggccctaacccaaaaatagtgggagtaaatgatttaataatttatttt

SEQ ID NO: 423052 - DNA, 434 bp, Homo sapiens
gggacatatgaacaatgagcatgaaatcttacaaactgtataaataacatttattcacagtgtcactgcatcatctattgttttgaattctctttaaatttccttctatatatttatccaaagctgaagtcatctggtttagattatgggaccctgaaaagcaagaactagtctatgtaactacttttaaacatctgcacaaygccatacacacacacacacacacacacacacacacacacacacacacacacacacacacatattgatatgtaacaagtactatttgattataattaggagtgtcttggttttcttataacatgaacatatatttttaacccaaacagcttaaagcatttaacgaaaagttttacacacctacaaagtgctttcaggaagcagatgtgcagtgcaatgtggcgcagtaagat

SEQ ID NO: 423053 - DNA, 583 bp, Homo sapiens
tctcatatatcatctatcagctcatcaaaaagtgctcactgattaacagaggatcccctcctcagtttcagaattctctagctttaagttaggggagggttaccccaaagtcagagagggtacatgggagagggttgtgaaggccagtagcccagagaaaatcaagggcagctgggtgcatttaggtggataagaaaacaatgaattactccatcaaaagcaaaagcacaagcacatagtaaagttgatcacccactgttaatgtcaattcagtttaaagcactttattaaccacacatacatattttccagtgtctaattctcatcgtgttcttttccattccagacttccctgtctctttcccagagctctgttcctcttctcactgtttctacaaaagggacaataaacaattttctagccactcatcatcataaaccctgacatgctaaattatcccctgctcagtttatggaccacagtgggcccataaaactcctccctcactagcaacccaccccmcacaaaattctcacttccctttttccttgcgcttcctaaaaaaagcaattgagccacacc

SEQ ID NO: 423054 - DNA, 387 bp, Homo sapiens
gtggtgaatagctatagtggtagtgaggtaactggccacagcctcttcacccctcccagagctgcataagataagcatggcrgagcaaggagcggctaaggctctgggcatcttcatgagtaggtgtagctacagaccaacaggcagtgaagaaagttcatagcactgaaaccaaagatggcatgcaggtgactgtgaggagtctgtatcaagaaggtcagaaggtctggtttggagttctggtgctgtgaccttggacaagttacttatcttcattgactatccattttctcacattgtaaatagttaataaggtcacctacatcatgagattattctaagaactgaacaaaatcaagtatgtaaaaaaccttataaatgttaaaa

SEQ ID NO: 423055 - DNA, 387 bp, Homo sapiens
gtggtgaatagctatagtggtagtgaggtaactggccacagcctcttcacccctcccagagctgcataagataagcatggcagagcaaggagcggctaaggctctgggcatcttcatgagtaggtgtagctacagaccaacaggcagtgaagaaagttcatagcactgaaaccaaagatggcatgcaggtgactgtgaggagtctgtatcaagaaggtcagaaggtctggtttggagttctggtgctgtgaccttggacaagttacttatcttcaytgactatccattttctcacattgtaaatagttaataaggtcacctacatcatgagattattctaagaactgaacaaaatcaagtatgtaaaaaaccttataaatgttaaaa

SEQ ID NO: 423056 - DNA, 536 bp, Homo sapiens
tagaataggaaaatcagagaagaccttcactgacaatacttgagttgagacctaaataaggtgagagtaatcatgcaggtatcttaggraaacacattcatgagaaagggaacagcaaatgcaaaggccataacacagagagcagccctagcgtgtttgagaaacagcaagaatatctggagcagcagaaaatagatgagagctgtaactgggatgtggatcaattggggcctttaagccactgtaaagaaagacttagggttttcctctaaatgggataatacttacatatgaggtacaacagacttactctcctaaagcccgtgtacagaaccatatatttgctttacgtgaaactagacctactgtattaataaagtttgatttctatttaaaatgttttagagggctggacatcagcttagttctttacttttaccttagaagatatacaagtctcttttaacccacactttcatgaggtcccatttccctttccaaattattgtttcacagctaaccttctatgactgtag

SEQ ID NO: 423057 - DNA, 536 bp, Homo sapiens
tagaataggaaaatcagagaagaccttcactgacaatacttgagttgagacctaaataaggtgagagtaatcatgcaggtatcttaggaaaacacattcatgagaaagggaacagcaaatgcaaaggccataacacagagagcagccctagcgtgtttgagaaacagcaagaatatctggagcagcagaaaatagatgagagctgtaactgggatgtggatcaattggggcctttaagccactgtaaagaaagacttagggttttcctctaaatgggataatacttacatatgaggtacaacagacttactctcctaaagcccrtgtacagaaccatatatttgctttacgtgaaactagacctactgtattaataaagtttgatttctatttaaaatgttttagagggctggacatcagcttagttctttacttttaccttagaagatatacaagtctcttttaacccacactttcatgaggtcccatttccctttccaaattattgtttcacagctaaccttctatgactgtag

SEQ ID NO: 423058 - DNA, 536 bp, Homo sapiens
tagaataggaaaatcagagaagaccttcactgacaatacttgagttgagacctaaataaggtgagagtaatcatgcaggtatcttaggaaaacacattcatgagaaagggaacagcaaatgcaaaggccataacacagagagcagccctagcgtgtttgagaaacagcaagaatatctggagcagcagaaaatagatgagagctgtaactgggatgtggatcaattggggcctttaagccactgtaaagaaagacttagggttttcctctaaatgggataatacttacatatgaggtacaacagacttactctcctaaagcccgtgtacagaaccatatatttgctttaygtgaaactagacctactgtattaataaagtttgatttctatttaaaatgttttagagggctggacatcagcttagttctttacttttaccttagaagatatacaagtctcttttaacccacactttcatgaggtcccatttccctttccaaattattgtttcacagctaaccttctatgactgtag

SEQ ID NO: 423059 - DNA, 630 bp, Homo sapiens
tcataggatttttaaataaggktaaagcacttagaacactatccagcacatagtaaacactatgcatttgttaagtgaaattactggctgactacttcaacaaaagaacagtcttcaatgtgggtggattccactgtgagaaagctctttcttaattcttcaaattctgcctcccttcctaggtatatacccgagataactgaaaacatatgcccagataataaaaatgttcatagcagcattattcataatagctaaaaagtagaaacaacccaaatgcctataagcggatgaacagataaataaaatgtggtatatccataaatgaaatatgtggccatgaaaaggaatgacattctgatacatgctacaacatggatgaaccttgaaaacatgctaagtgaaagaagccacacacaaaaggccacatattatataattccatttatatgaaatgtccagaatatgcaaatccgtagagatagaaagtagattagtgttgccaggagctgtaaagaaagggaaatagacagtgactactaagcagtagagaatttctttcagggtgataaaaatgtttcgaaattagataatggtggtggtctcataactctggaaatactgaagtct

SEQ ID NO: 423060 - DNA, 568 bp, Homo sapiens
ctactatgtgctatggaatacacactcagctaaaatattcagagccttatttcacatgaactactagtgtaccctatttttctcatcttatacttgtagcacatgttttttgaacccaataattggaactatcattcattccttttaaatccatcatattgagtctttactccaagtttccttgattgagacaacttttacattatactcatacaatcacagaatttcagcagtgatctcagaaaccaaatggtctgaacccctatagcactgaraaggacaccaaagctaactgatctacccaaagttggttatctgtgaatctagcaatttccccagttttacaaatatatccctatcttcacctagaccttgcaatgaaacagtacttaactgaaagtgtatgactaagtcttgccccaagactagcacttattcaatcagctctaacatcctaaatggaccagcatcctatccatacctctcctctccctaaggacagtctggaaattccttgctgaacctaagcatatgactaaaagaataatctttcctaagcataattttc

SEQ ID NO: 423061 - DNA, 568 bp, Homo sapiens
ctactatgtgctatggaatacacactcagctaaaatattcagagccttatttcacatgaactactagtgtaccctatttttctcatcttatacttgtagcacatgttttttgaacccaataattggaactatcattcattccttttaaatccatcatattgagtctttactccaagtttccttgattgagacaacttttacattatactcatacaatcacagaatttcagcagtgatctcagaaaccaaatggtctgaacccctatagcactgagaaggacaccaaagctaactgatctacccaaagttggttatctgtgaatctagcaatttccccagttttacaaatatatccctatcttcacctagaccttgcaatgaaacagtacttaactgaaagtgtatgactaagtcttgccccaagactagcacytattcaatcagctctaacatcctaaatggaccagcatcctatccatacctctcctctccctaaggacagtctggaaattccttgctgaacctaagcatatgactaaaagaataatctttcctaagcataattttc

SEQ ID NO: 423062 - DNA, 604 bp, Homo sapiens
tccctaaggacagtctggaaattccttgctgaacctaagcatatgactaaaagaataatctttcctaagcataattttcatgtcattcttctgctcagaaactagcaacagtattaataccaagcctttcaaatccaagttctttacaatctctgatctgcttgtctgtcccattccaatcatctaaccatcttactctttagtaatccataactcgaacactccrtattatttccacaatcttgtttactgtcccctatattgaaatctttttaatttccagtgagaaacatcatgcttcccttctggtatatctccaacttaggttcctttcttccacccttttttcaaaaatctgctgtaaacctgtcctatagtaagccttctacaaatcatcccacctgtctctgatccttccaacagcagatgtagtgccatgtcatgcactacattgtctccgctggtatggttcttctttatttaagccactgttatgtctttgctgtacctttctcaaactcccatctagatagtttttgtggggaagaccctgtcttgaacccttggtgtaggttccctgaatacctgagtacataaaccccac

SEQ ID NO: 423063 - DNA, 384 bp, Homo sapiens
tttaaaaaaactatacagaatgtggaacgaaggggaaaaaaaagtctcatgtgggttgcgtcggcactgcagctgctcctcattaaagctcctctttactccctctgggctagtttccagcagaaaattctttaaacagaactctgctttcaacccactttcttcttgcactgggcctcttggccccccaatccrcagtggcagcctgccctagctgagctctagaggggggagctgtcgttaaggtaaatgaggtaagggcaggggaaaaaactaacaaaacccagaaaccaaattaagcatcggtcagtaacaaaggtctgcagtttgaaaggctccaaatcagtctgttctttcctgtgaccataatgccagcttagtttc

SEQ ID NO: 423064 - DNA, 605 bp, Homo sapiens
aagtctaaacttctaggctggcattcaggaggcctaacccacctattggtctagactcactggtctccctcctttcagtacctcctggctgaggtctgatgggcttgtcaactttttaattctgtcactctgtgtaaaggtaactaactaggttatgctaattaccaactttgttttaaaaacatgcatgargacttctagttaacttcctggtaaagaggggaaaaaaagagaagaagctctgtcatactacttcttgccattcccactctactctcaacccccccttctctcaaataaaaagaaagaaaaaaaaggaaatactatagcttactcagcaagaaggaaaaacaaaaagaactttaaaaaaaagtatttgtgtatagattggtgtccagaactgggacgcttgtggtaaaacacactttctagtgtagtttttctagggccttactagttgtatgtgaaggaaacaaagacaagtatacaatctctcactctcacacacgtacacacacacatacacacttttatcacaaccaatacacaaagactaccaaatactgcagggcagctcatttttctactatgtaaattcagcttcc

SEQ ID NO: 423065 - DNA, 579 bp, Homo sapiens
tatgctaattaccaactttgttttaaaaacatgcatgaagacttctagttaacttcctggtaaagaggggaaaaaaagagaagaagctctgtcatactacttcttgccattcccactctactctcaacccccccttytctcaaataaaaagaaagaaaaaaaaggaaatactatagcttactcagcaagaaggaaaaacaaaaagaactttaaaaaaaagtatttgtgtatagattggtgtccagaactgggacgcttgtggtaaaacacactttctagtgtagtttttctagggccttactagttgtatgtgaaggaaacaaagacaagtatacaatctctcactctcacacacgtacacacacacatacacacttttatcacaaccaatacacaaagactaccaaatactgcagggcagctcatttttctactatgtaaattcagcttcctggacagaccatttctgcttttcttgtagaagtatttcagaaaatgttaatcttggttcccacattaggttgcatgcttccaaattaaaagtttcccacaggaaaagaacttcatgaggaattgtga

SEQ ID NO: 423066 - DNA, 527 bp, Homo sapiens
catactacttcttgccattcccactctactctcaacccccccttctctcaaataaaaagaaagaaaaaaaaggaaatactatagcttactcagcaagaaggaaaaacaaaaagaactttaaaaaaaagtatttgtgtatagattggtgtccagaactgggacgcttgtggtaaaacacactttctagtgtagtttttctagggccttactagttgtatgtgaaggaaacaaagacaagtatacaatctctcactctcacacacgtacacacacacatacacacttttatcacaacyaatacacaaagactaccaaatactgcagggcagctcatttttctactatgtaaattcagcttcctggacagaccatttctgcttttcttgtagaagtatttcagaaaatgttaatcttggttcccacattaggttgcatgcttccaaattaaaagtttcccacaggaaaagaacttcatgaggaattgtgaggctgggaattatctctgaaaccccacctcacttagttta

SEQ ID NO: 423067 - DNA, 652 bp, Homo sapiens
tgttgttgctataacagaaggtggtctttcctctgtgttccagaacacaatcaggatcttaccatacttcactgcactggactctgagaaaatatctacttgtgattaaaacatggcaaacacattctagacatatgagtttacaaaaaacacccttcgatgtaatggacaaaactgaatgagttagctcagttgttcccaaggtatgggctgtggagttattgcaagggattgcaatcctcataaatcactttctaaactactaaacagtatcttgtccatatttaaatatatgtatatgcttttatgactagtaaaacataaagatatattaaatgattcttgaattcttagattttgacagtatacattgtattcaaacaacacactgagaaattgtttcatctcaagctctctcctttatgcgctatactcttgctaaatgcctttcagctcctagaaaatgctatagtacactacttctcacttccagacctctgtacacgctgttcagtcagcccaaaatgcttttccccaccttctcatggctaagccctaaaatttcattgtmtgaacttaaatgttatttcctgtgaaaaacagccttgacaccccctctgttcttataaccctgagcctgtgttactcatta

SEQ ID NO: 423068 - DNA, 652 bp, Homo sapiens
tgttgttgctataacagaaggtggtctttcctctgtgttccagaacacaatcaggatcttaccatacttcactgcactggactctgagaaaatatctacttgtgattaaaacatggcaaacacattctagacatatgagtttacaaaaaacacccttcgatgtaatggacaaaactgaatgagttagctcagttgttcccaaggtatgggctgtggagttattgcaagggattgcaatcctcataaatcactttctaaactactaaacagtatcttgtccatatttaaatatatgtatatgcttttatgactagtaaaacataaagatatattaaatgattcttgaattcttagattttgacagtatacattgtattcaaacaacacactgagaaattgtttcatctcaagctctctcctttatgcgctatactcttgctaaatgcctttcagctcctagaaaatgctatagtacactacttctcacttccagacctctgtacacgctgttcagtcagcccaaaatgcttttccccaccttctcatggctaagccctaaaatttcattgtatsaacttaaatgttatttcctgtgaaaaacagccttgacaccccctctgttcttataaccctgagcctgtgttactcatta

SEQ ID NO: 423069 - DNA, 491 bp, Homo sapiens
taccttaatcagactctagtcaaacacaacaagatttagaaaaaacacactgttttttatcaaaaggcaggaaaatataactgtcttctttctastctggtaaaggatttctaaatataccttccaagggcaaaagggtgcctttgaaaaataagaagattccttaattctgtcaatagaataatgatccagttatataccaaagagcagatagaagacctggctatggagtcatgtgactctgcattagatctcatggggtctctgtctcagtctccacaaataaaaacatggccttgtctctataaaagatacaatgtacatagaagtgttttgcaaactattatatattatcttctcaacatgcaaatttatccctgtgaactgattctttccctcccactcacagtggccaaaataatttatattagaatgtgtccataggtggcttaatagcagttgtgacaaaagtgtaaactagaaaagatact

SEQ ID NO: 423070 - DNA, 620 bp, Homo sapiens
ataaatgattacatgattcaaattagatcacaaacacctatattattattagatccattcctccagcccaaatgggggtggtaagtatacgttgttagaccagtgtaactaacttcaacaactttttgttttgttctgttttgcaaatccacccaagaatgcattaacttcaacaattttttaaaaacaatttccacaatcctctccttgtgtctcaaccatgctcaggaattacaagtacaataatctcctcaacctcccctagcctttcctagctcagaaatccgacataggccacttcgcatgcctgatcagataagctttcccaatgctgaaaaccaactgcttctaacmttttaaacctgatttccatgaaaactcaggggtgaaagaaacaaataatccaaccaaatcagttccttcttattgaaagagttcttcatctttaatctgaaatcctaaataattttttctatgaatcaattgcttctgagatgagaggtacaagacactacaaactatgaccacacaaaagatttttaaaagcttttgattcacagtgagttaacctacaaacttgaagttactagacaatagtacttttagtctactctttaggt

SEQ ID NO: 423071 - DNA, 559 bp, Homo sapiens
gttctgtaatgatatgtgtagaaatgctacccacagttaatttcatagttcctaagccaagacaggttagtactgggtaattttaataattggctatgtgcattgttcagatgctgaggcattccaatcattttacatggtctcttacatcactttcagaatggtaccataagaacacaactgtacagtcaagaaaaagctatttgtaactaaaacggctggcatcaaacatttctgaacataaatctggctctgaattgctagttgcaatctctctcaattttttrtttaaaaaaatccacacattcattcctggtcttaatctactaaagaatttcttttgggatcaaaaagtaacaggaaagaatgctaaccaactttccttggattacaacaaacataattccattcttcttcccagttacaaaaagatttaaaagaactacaactcttcaaaatggaagtttgcaatttagatcattctcctattatgcaaatgttcattcagaattaaaatattgttttaaaaagtaaaatgtaagtcagtttagtgcacaaa

SEQ ID NO: 423072 - DNA, 581 bp, Homo sapiens
atggtgacactggatggcatgtgattatgtttgtcatatcataggaaatttggaaacaagagtgttagacctgatactgttctcaaagctgtacctcagaaaatcacaatatctttactaaacataacatccaatcacaaatgtgtggttaataaaaawtgggaaaatgatttaacacctatcaatgcaacttgcataatacaagcatacctttgtgatattgtggcttcagctccagctcacctcaataaagcaaacagtacaatgaagcaagtcagaaattttttggttccccagtgcatacaaaagttatgtttacagtatactctagtccattaagcatgcaacagcattatgtctaaagcataatgcatatacctgagtttaaaaatactttattgctaaaaaatactgacacagggacatatagtgagtatatgctattggaaaaaatggtgctgatacatttgctcgacatagggttgccacaaactttcaatttgtaaaaaataaaacaaaatctgtgaagcacaataaaagggaacacaaaataaaataaggtatgcctatagataaaatct

SEQ ID NO: 423073 - DNA, 581 bp, Homo sapiens
atggtgacactggatggcatgtgattatgtttgtcatatcataggaaatttggaaacaagagtgttagacctgatactgttctcaaagctgtacctcagaaaatcacaatatctttactaaacataacatccaatcacaaatgtgtggttaataaaaattgggaaaatgatttaacacctatcaatgcaayttgcataatacaagcatacctttgtgatattgtggcttcagctccagctcacctcaataaagcaaacagtacaatgaagcaagtcagaaattttttggttccccagtgcatacaaaagttatgtttacagtatactctagtccattaagcatgcaacagcattatgtctaaagcataatgcatatacctgagtttaaaaatactttattgctaaaaaatactgacacagggacatatagtgagtatatgctattggaaaaaatggtgctgatacatttgctcgacatagggttgccacaaactttcaatttgtaaaaaataaaacaaaatctgtgaagcacaataaaagggaacacaaaataaaataaggtatgcctatagataaaatct

SEQ ID NO: 423074 - DNA, 581 bp, Homo sapiens
atggtgacactggatggcatgtgattatgtttgtcatatcataggaaatttggaaacaagagtgttagacctgatactgttctcaaagctgtacctcagaaaatcacaatatctttactaaacataacatccaatcacaaatgtgtggttaataaaaattgggaaaatgatttaacacctatcaatgcaacttgcataatacaagcatacctttgtgatattgtggcttcagctccagmtcacctcaataaagcaaacagtacaatgaagcaagtcagaaattttttggttccccagtgcatacaaaagttatgtttacagtatactctagtccattaagcatgcaacagcattatgtctaaagcataatgcatatacctgagtttaaaaatactttattgctaaaaaatactgacacagggacatatagtgagtatatgctattggaaaaaatggtgctgatacatttgctcgacatagggttgccacaaactttcaatttgtaaaaaataaaacaaaatctgtgaagcacaataaaagggaacacaaaataaaataaggtatgcctatagataaaatct

SEQ ID NO: 423075 - DNA, 498 bp, Homo sapiens
tggttttctgctcctgtattaatttgcttacgataatggcctccagctgtatctatgtgcttgcaacattttcaatgatgctagtaagagacatgaaactccagagacaaaggaaagtttattacagcattagcagtagccaaagtatcagcattttttastcaattctatgaacctcagttctctcacggaccacgttataaacatgcattgggttgcttggggaggaagtctgaggttagagatccaaatatttttataatgggcagtgagcatgcttgctttttgctccaaatgaagacagtatctccatcttataaggcagtaagcaaactggcttcttgctccaaaggaagacattatccctgtcttccaagaatattttctacacaaacatatttgaaaagatagccaagaacaaaaacagccagtacctttaatcagcaggtggaggcaattgtcctaagcaaattaacacagaaacagaaaaccaaatac

SEQ ID NO: 423076 - DNA, 584 bp, Homo sapiens
caagagattctcctgcctcagcctctcaagtagctgggactacagggacatgccactacgcccagctaatttttgtttttttagtagagacggggttttgccatgttggccaggctggtctcgaactcctgatctcaaatgatctacccaccccgggcctcccaaagtgctgtattacatgcatgagccaccgcgtccaacccctcattcagtcttgagtaggaataaatctatcctagctctgagggatggaccctaattggcatatatcaatcaatttaaagttacctcctcctctgccgcagtaattggttcatgtatggataataatctagacccaaaccaattaacttgtagtatttgcttcagggatgagcccatcagtgacmaagtacaaactgttggccgattatggagagcagcgctttctcccctttcagggtaagccccagttgctgcaggcgatgatcttgcagaggaaggaagcctgctgaaaacaaaggtgaaccacaggtggtggaggggggtgggggcagtctgcaaattgtagacacacagagccctgcctgaagcccacagtcagt

SEQ ID NO: 423077 - DNA, 559 bp, Homo sapiens
cattaatggcaggggaaggaatagaagccacaaacccatttctactttattctctttctttaacaccaggttgcctctattcagctattttaaatgtgttagtcttgtccctggcagagttttgaagctatattagggcaggcaaggactacatcttaagtcgcttgtatcctgacaacatccagcaatgtcttagtaaatctatgttgaaaccataaaaatatttctaggtctttcctttacccactaggaaccgaaacttttctttttcttttttttcttttcttttttttttttgagagagagtctcactctgaagtccagtggtacgatcttggctcactgcaacccctgcctccggggttcaagagattctcaygtctcagcctcccaggtagttgggactacaggcgcacaccaccacactggactaatttttgtatttttagtagagacagggtttcaccatgttggccaggccagtctcaaattcctggcctcaggtgatctgcctgccttggcctcccaaattgctgggattacaggcatgagccacggc

SEQ ID NO: 423078 - DNA, 553 bp, Homo sapiens
gcctcatttattaatcaggtccttggctaatattgtgcatttcactcccagctggctagctggctaactcagttagttgtgatctttgggattgtttaatcttcctttcatgtttatctttggtttaagagaaagctagttattctttttggttgatgacagtgacctgtatttctgaggccatacatttcaagttcagcccagacttgatctactatcccattcccaaaactctgagaatgaactcttactctcctccccctttcctgagctcctggcctcctgttagctgtcctacccctgggtgccccctccatcacccagattggtctggcagacccctaagactttgagacgctgcacagtagttcagactctgtcactgtatgtctttggacaagtaagggccttcctacctctgggcctttgttttgtcaacaacaaaatgggaakatggattaaatgagtgctgagatttctctgctgtaacattctgttagtcaacaagtgccacattacagtaaccttaccttcagacagccaggtgttgctc

SEQ ID NO: 423079 - DNA, 559 bp, Homo sapiens
cacttactttctgccaggagtgggtgattgaacaccactgaccaggaagggctcctgggagccacattttttgcttggcatttttaattgtaaaaaccagtgttccacyaacactgcaattcaacgaatcaaaagtcaaatccatgcttaacaggaaaagataaaagcatcaacttaaaggaatgaaacaaatttgaaaagcaatggaaaaggaaactcatatggagtgaaatccattcaagacacgttttattgtttttcccatatgcatttgctgcccagctttgactattaaacattatttttttcttctactaaaactaaatagtaatttgacttctagattcttccagggtcgtgctctgaacagaagcaaaatggaaatatttcagtagctttttagacaactatttcaaaagcaaacacatggttgtctgcagagttgtaggttaaagctataaatttattttattaaacagagaggaattggtgaaactgaaagacactataaccctgacattttcatgaaataatattcttgtctgattttttttttagt

SEQ ID NO: 423080 - DNA, 559 bp, Homo sapiens
cacttactttctgccaggagtgggtgattgaacaccactgaccaggaagggctcctgggagccacattttttgcttggcatttttaattgtaaaaaccagtgttccaccaacactgcaattcaaygaatcaaaagtcaaatccatgcttaacaggaaaagataaaagcatcaacttaaaggaatgaaacaaatttgaaaagcaatggaaaaggaaactcatatggagtgaaatccattcaagacacgttttattgtttttcccatatgcatttgctgcccagctttgactattaaacattatttttttcttctactaaaactaaatagtaatttgacttctagattcttccagggtcgtgctctgaacagaagcaaaatggaaatatttcagtagctttttagacaactatttcaaaagcaaacacatggttgtctgcagagttgtaggttaaagctataaatttattttattaaacagagaggaattggtgaaactgaaagacactataaccctgacattttcatgaaataatattcttgtctgattttttttttagt

SEQ ID NO: 423081 - DNA, 583 bp, Homo sapiens
tttcaccaagcaataaaatgtccagtatcaaataaataagggtcatatgattcccagatgacatgaccagggtactcataaaattcagagaagctgagtcagatcatttcaagaggacaaatgcagcgctcccccaaattcagtaacttgtggaatgtagcaatcttgtattttctctgagccaagcagcctgatgctgtcaaactcatctttcatttcctctgccttaccgcagtgttagtggtttcgttattagaaggaaaaaaatgcataaatgtcttagttaagatgaaattgcatctattaaaataaagttgatcctaaatgattctttcactcaaagtattaatagactaaaggaaaatgttgcaaactatgaattagtggtatagtttatgaacggtagctgttgtgattcatgcatatrccttttggttaccttataatgaaaggttgttgggtacagccttcacatcaatgagaaaatcaacaaaatgttcttgaaaagacgactggcaaactttcttttatttttctgttctcattagtagaaagagggacaggtcactttcagaaggattaa

SEQ ID NO: 423082 - DNA, 541 bp, Homo sapiens
aggaaataaaaatgatttatggtttgtaagtagacacataaaaattttcaaggccgggtacggcagctcatgcctgtaatcccagcactttgggaggccaaggcgggtggatcaccagagattaggaggtcgaaaccagcctgaccaacatagtgaaaccctgtctctactaaaaatataaaaattagccgggcgtggttgtgggcacctgtaatcccagttacttgggaggctgaggcaagagaatcgcttaaacctgggagggggaggttgcagtgagccgagattgckccattgcactccagtctgggtgataaaagcaaaaccctgtttaaaaaaaaaaaaaaaaaaaattcaattaaccacttgacagtgttttactctcccagttctccaaatgtttatgtttaacctagggcacaattcaaagtgggtggtgttgtggaagctgagtgtttacatgtgctttcttatttctgggtaattataaggagtcaatgtgcacattttctttagagcaggacacataactgtgaagaca

SEQ ID NO: 423083 - DNA, 502 bp, Homo sapiens
actaacgatagctgaggagctaaaaaaaattgcaaaaaaactcartgttttaagaaagtctatgaatttgtgttgggccacattcaaagccatcctggaccacatgctgcccatgggccatgggttgaacaagtttgctctagacagaaggcgtggcatgaagatattctcagagccagaagatggggagaactagagaagatgaactgggcagtaggaggagatgaagaaagcaaaagatgactaagacagtcctctctgcccacaaattcataatattaataatggatcttttttactagaatttgatatcacaggtcacttgatttcttaattggggatttcttttatgagccatatcctccactttgctgttccctctctatttatttgaagagacaagtccaacacataaaagagaataaaggtctacaccatttagcctgatgttaagtgcaaaaggattgcagagtcagagatgaatatgggatggagtatggct

SEQ ID NO: 423084 - DNA, 502 bp, Homo sapiens
actaacgatagctgaggagctaaaaaaaattgcaaaaaaactcaatgttttaagaaagtctatgaatttgtgttgggccacattcaaagccatcctggaccacatgctgcccatgggccatgggttgaacaagtttgctctagacagaaggcgtggcatgaagatawtctcagagccagaagatggggagaactagagaagatgaactgggcagtaggaggagatgaagaaagcaaaagatgactaagacagtcctctctgcccacaaattcataatattaataatggatcttttttactagaatttgatatcacaggtcacttgatttcttaattggggatttcttttatgagccatatcctccactttgctgttccctctctatttatttgaagagacaagtccaacacataaaagagaataaaggtctacaccatttagcctgatgttaagtgcaaaaggattgcagagtcagagatgaatatgggatggagtatggct

SEQ ID NO: 423085 - DNA, 617 bp, Homo sapiens
aagtgggcatctttgtcgttttccagatcttagagaagagctttaaacttttcctcctttagcatgatttaactgtgggtttgtcatatatggcctttattgtgttgaggtctgttatttctatttgttgagagtttttattatgatgagatgttgaatttcatcaaatgctttttctgcatcaattgaaatgattatatggtttttgtccttgattctataatgtttattgatttaggtatgctgaaccatccttgagtccatgaaataaatctcacataatcatgataagtgatctttttaatgtgctgttgaattyagcttgctagtattttgttaacttttttttgcatccatgttcatcagggagattggcctgtagtttctttttttggttatgttcttctctggtgttagtatctgggtaatgctggctttataaaattaatttggaagaattacctccttttcaattttttggagtaatttgaaaagaattgatgttcatttaaaaaaaatgtttggtataatacagcagtgaagccacttggtccggggcttttctttgatgggagatgttttattattgatttaatcttgttatttattattgttct

SEQ ID NO: 423086 - DNA, 385 bp, Homo sapiens
aggtttccctggcggcggtgtctatcaatcccgtcccaagaaggagagcctgggcgtggaggttctgggcagctgaaggcagagatccatcccttccctggctacccacccccacctcagcaacgcctcccagaacgctccaaagctttctcaagtccccgctcccaggttagggccctgtagccagttccaaggtctttttcaggagcgcgcttcccaaataaagttgaragggggcggggggaatgagggagccccagatccacctcagagtggtccccagagggcttgggcccctttctccggattgttcagtgggaaggagggccggctggtgcctcaggcccgcgggactgtgacagccggcgacccctgcgacctccct

SEQ ID NO: 423087 - DNA, 566 bp, Homo sapiens
gcaagtctcgcttgggtgatgtaaccttgagagttctgctcatggctgcagggtcaaccaactttttggagcygaatggctttcctctctgttgaccctcggctcagcccggaagtgcaggaaaagcagaagctggttccaggcaaagcaacgctcccgactccgaagaggcaagggttgttagagagccctttcctagaaagcctgacacccgtgtctttagtccggtggccgcactagtcacttttaactggctgacaggtgcccagtgtttagcccctgaattctaaggaaaaataggacagaatagcaagcgaaaggggtccgatagtactcaccgcatagcgatatcctggacaagtccccaagatgtgtccggagtttgttcctgctggtgggttcctggtctcactgacttcaataatgaagctgcggacctttgtggtgttacagctcttaaagatggcacagacccaaagaatgagcggtagcaaggtttattgtgaagagcaaaaggacaaagcttccacagcgtggaaggggacctgagcgggttgctgctgctg

SEQ ID NO: 423088 - DNA, 590 bp, Homo sapiens
cttcgttgccctcactgtctcctcccagtagatggctaatgggactaaagcttctttttgcataggtagactgccctgtggacctgctaatggacacatataccccttggtttgaggtctaggagctgttagtaacccagcagatctaagacgtgcacttgtatgcagctgttgttggttacttgggtccttaatttccagggttataaatcttaagctgatctttaactactctacattttacctaatatttgtcaaaagggagtcatcactgaattaattactgagtgagttataatttatgcatgataatggatctttttctatttttaaggataaagatggttcacagagttatagatttatctgggaaacttggtatctaaaatggagattccattggattagagaaaatttcaattaccttgtagtgataactgcagtgtctggcttttatartcagaattaagcaagacagcaacacctagagtcagacatgttgtggtaaagtgtgtctcctggaaatatttactctgtagctagagctcctatggtttttcatgaacttccaatcttacacatgtaaaatg

SEQ ID NO: 423089 - DNA, 571 bp, Homo sapiens
cctcggttgccctccatggccactgcacctcacttgtaggctcatgtgggcccacccaatctccaaaaataggttattttctaagtaaattttatccttttttttttttttgagatggagtctcactcttgtcacccacactggaatgcaacgacrcaatctcggctcactgcaacctcagcctcctgggctcaagtgattctcctgccccagcctcccgaggagctgggattacaggtgcccaccaccacgcctggctaatttttgtatatttagtagagatggggtttcaccaggttggccaggctggtcttgaactcctgacctcaggtgatccacctgcctcagcctcccaaagtgttgggattacaggcatgagccaccacgcctggccagtaaatgttatcttaacattcatgacattgttttcttttatcaaatttcttcactgttaggggaaaaaaaggatataaaatttcagaagtgttcctgggctgacgacttgaaaagataggtctgtttattttgaagttattgacagaatttggttttgttgttgttgttgttcaga

SEQ ID NO: 423090 - DNA, 583 bp, Homo sapiens
agaaggaaataataggaaacaaaattttatattttttttccacaggaaatatgtttaaagaagactgtgagtacaagtcccayggttagtaaaatcatcagagctttctcagtcatcattataaatggtagaagttccctagatcagggtgctgtctgtggatacaaggttagctcaagggagagtagaccagaagtaaaaccagattgcttgtcggctgccagaaaatctgggcagagtgccaggcctggttcatcttctaaaaattcatctcccagtatgaaaatagagggctcaatccctgcaaggaacggtggtagcacgaacacttggacttccttcagcccaaagcactttattgatgcgaagaaaggtggggggagtggattgtggattggagtggactgttggcattgacctcatttaagagctgtaatattttctttagcggccttacttatgtttcaaattataatttcattagttaataattcttcttccaaataatatgggtcatatatacacatgaatatgtccttcatgataagaagctataggtttaatttctaatagtcatagaaat

SEQ ID NO: 423091 - DNA, 541 bp, Homo sapiens
tagtcttggaaatcactaaatgggaatatactgaatatagagtttgcagagaacattttcggtaaaaatctgtctctaattattatttattcaccaatctctttcaatgttgtgcttcaacctctagataagttggccgaaggcttcccccttcctctgctgaagcgtgttcagctctacgaccttgggctgcagatccataaggtcggtgggttcaggggggctctgaggatgtgtgagggaggaggtggtttgcatgctagctttggggccatgattcatgggtgacacccagcccagccctgcagctgggaaagtctggccaggggcaggacgggtgctcctgggccttgccatatgccacaaagccatccacatgtccttcagaagtggcacctctgctggtgcaggtggcatttgacacagccctatgccaccaccacatcccatccctaccatgaggggcytgagggaagctcaagaccagctcgttttgaaaatactgcgggccgggtgcagtggctcatgcctgtaatcccag

SEQ ID NO: 423092 - DNA, 632 bp, Homo sapiens
agtcgctgatatggtttggctgtgtacccacccaaatctcattttgaattgtagttcccataatccccaagtattgggggagagacccagtgggaagtaattgaatcatggggtggctacccccacgctgttcttgcaatagtgagtgagttctcatgagatttgatggttttttgtttgtctgtttgttttttttagatggagtcttgctttgtcacccagcctggagtccagtggcacaatcttggctcactgcaacctccgcctcccaggctcaagtgattctcctgccttggcctcccgagtagctgggattacaggcacctgccaccatgcccagctaactgtttgtatttttagtagagacagggtttcaccatgttggtcaggctggtcttgaactcctgacctcaagtgatccacccggctcagcctcccaaagtgctgggatkacaggcgtgagccactgcacccagctgagatctgatggttgtataaggggcttttccccttctgctcagcacttctccttactgctgccctgtgaaaaaggtaactttctcctcctccttctgctatgattctaagtttcctgaggtcttcccagccatgcagaactgtgagtcaattaa

SEQ ID NO: 423093 - DNA, 635 bp, Homo sapiens
tccatttaaaccacagctaactggtctgtaaaatgaaggttctaacacctacttttaaaagttattgaggggaaaacgagttaacggtctcaaggacgtggcacaatgactgrcactttgtaggcaacagtcaagtggctttggaggcttccaatgccaggagtcgggggcgggcagctaaagtcgccgagccctgtttcccgccatccaggggcactaagcctccccgcagagtagctgcgcggacagggggtctgacgaccgcacgtggccggctcagcactgccgcggccaagggcgcgactcacccgccagtgtctttcccgaggacacgcgaatcctggggggctcactccggcaaagaggacgagacactgcaccaaggacagggcctgacctctctggccgccttccccggggcctcagtttcccccgatggtgagagtggagccgaccatgcgccctgctgtggactcacccggcgccctggcgtcgagtggcggcggagacctgacagacagcgtgggaaaaatcaagatgtctgcagatttcgagagatggggtgcggtggcgtgcgatggcgaaggacggcgagggacggcgaaggactgaggccacacgacaaggaagctacg

SEQ ID NO: 423094 - DNA, 635 bp, Homo sapiens
tccatttaaaccacagctaactggtctgtaaaatgaaggttctaacacctacttttaaaagttattgaggggaaaacgagttaacggtctcaaggacgtggcacaatgactgacactttgtaggcaacagtcaagtggctttggaggcttccaatgccaggagtcgggggcgggcagctaaagtcgccgagccctgtttcccgccatccaggggcactaagcctccccgcagagtagctgcgcggacagggggtctgacgaccgcacgtggccsgctcagcactgccgcggccaagggcgcgactcacccgccagtgtctttcccgaggacacgcgaatcctggggggctcactccggcaaagaggacgagacactgcaccaaggacagggcctgacctctctggccgccttccccggggcctcagtttcccccgatggtgagagtggagccgaccatgcgccctgctgtggactcacccggcgccctggcgtcgagtggcggcggagacctgacagacagcgtgggaaaaatcaagatgtctgcagatttcgagagatggggtgcggtggcgtgcgatggcgaaggacggcgagggacggcgaaggactgaggccacacgacaaggaagctacg

SEQ ID NO: 423095 - DNA, 578 bp, Homo sapiens
ttcactttgggtcattttcaagcacagactagagtaagagtaaggcagtcaaagaaagaaggagagaaatggtatgagggttggaattatatttagagacagcaggaagatgatcactatctggttttcccaaatcttcacaaattggattacagtgtctggagctgtctttcagaagggcacagattacattgtgcagaattatctgcaagggataattcttctgttgatctgaactttcagctaacgccagtgtctgatggtaaagattttgatagtgacatttaaacacttagtatgctaacatgtataacccagctggtaactgaagtttccctattccttgagttgtagctaaaattgccctgatctgtgcaagtccaaagcccatccyaggactcagatgatttccacatctacaagtgtgtctttaattcactaggcatcaattttaacaaaaaatccaagccttttatcaactttcaattcccccccaaataaaagtccactcccagagaacactcatgattaatagaaccgactgaggtttcagtggtggggtacctatataaggaaag

SEQ ID NO: 423096 - DNA, 557 bp, Homo sapiens
agattctacactaatgttttcctgatgaaatttaatgcaataatgtgaactccaggaagaaatttgcagcatatgataggaaatgtaggtatgccaccccttacgaatgataggaaaactaaacagtatgtgttttggtaagccaaaagacacactccccacttccctgatttgttctacactgtcccagataaccatggcataataaagaaaagtcagtcccatgtaagattaaatggcgttctgggatagacttgttaccaagaagtaagtaccagcacgtaaaaatattaaggactacctctttagcaaaaacataaataagaaaaattggccaggtgcaacgtggctcacacctgtaatcccagcacttggggaggctgaggctggagaattgcttgagcccaggagtttgagaccatcctgagaccccatttcctcaaaaaatttttaaaaattagccgggcatagtggcayacacctgtagttccagctattcagggagctgaggcaagaggattgcttgagcctagagaaggtcaaggctgtagtgagtc

SEQ ID NO: 423097 - DNA, 482 bp, Homo sapiens
aactcatgctgaagtaagcataatcatcaatctgccttacccagactgggatctcttacatttgaatagcattaattccctgctttcacactgagaatctgggaatgtgcagaatctctttcttgttagatacatcgaaatcctttagattcaagatattgtctgtgagtctgrgaaatatattaaaggtcaaatgtcaaacaatgaggggttttagccttcagttaaggggatcctcttcaattagaggatttttctttcttcacaatattaataatatatgtctttcctttaccatttccacctccaatataattatttgagtctttctacctcacattaaactattgaaactattaagaatccaaccaacatggggaaataggatatgctgctgagaaagccccgtcagcaagctctagggaaagcacatgtctggagatgccctctccaccatcaatctcatgtgcagctcaagacgc

SEQ ID NO: 423098 - DNA, 482 bp, Homo sapiens
aactcatgctgaagtaagcataatcatcaatctgccttacccagactgggatctcttacatttgaatagcattaattccctgctttcacactgagaatctgggaatgtgcagaatctctttcttgttagatacatcgaaatcctttagattcaagatattgtctgtgagtctgggaaatatattaaaggtcaamtgtcaaacaatgaggggttttagccttcagttaaggggatcctcttcaattagaggatttttctttcttcacaatattaataatatatgtctttcctttaccatttccacctccaatataattatttgagtctttctacctcacattaaactattgaaactattaagaatccaaccaacatggggaaataggatatgctgctgagaaagccccgtcagcaagctctagggaaagcacatgtctggagatgccctctccaccatcaatctcatgtgcagctcaagacgc

SEQ ID NO: 423099 - DNA, 563 bp, Homo sapiens
tataaagtaaccggcctattttctcaagagcagatccagtctaccaagtgatgacataagaatgactcagagctttataaatctaattatcttgaaataatctctgatgtggctaacatattgtacactatcacctctttattttcatcatgagaatcaaaatgtgatattaagatcttaaaaagtgtttttagtgctctctacatatgctatctgacaaaatataacccctatctttatttttcttatctactaagtgaataaaaaggcataatgaggcagccttctaatgaaccaagttgagatgagaagatgataaaataaatgaaaaacaatcaagagtactggatagatgtcaggccaagaaatcaartgtcaaatttgaatcaagtgtcaaatcaagaaaaccaggtggacggcatgtgtagtaagaattaaaaattagaaaatccatgatagaaggttcagacataggtagaatcaaagaaggaactcaactgaagcagaggtaccagagagccctgaaattctttgatccctaaaaagtaggacagagcaaaaag

SEQ ID NO: 423100 - DNA, 580 bp, Homo sapiens
tatctgttcaaaaccacctggtagccacccatctcacacagtgtgaaagccaaagtactaacacaatttctcaaccacatctccatcatgttacctctccaacctcaatacttcctttcttagtctcattccagccacactggctgccagggagttctcagacatcacacacctacaccagacccttttccactcactgttctcttttcctggaatcctcctcccccagatatccagatgctaattctctcaacttcttcaggtttctgccaaaatattttcttctccatgaggccctcactcaaggcactccaatatcctgcttcatttttccccatagcatttatgaccacctggcatcctccacatatrcttatgtatttacagtatctgtcttctttacacagaatgtaagcgacattggagcattaattttttctgctttcaccaccacctaaaataaggcctgtaacttagcagatgtttaatagttactgaatattaatgaatgagtatatagagatggataagaaatatagtgaagaaagaactgatagtatttgcctttctggtttgatca

SEQ ID NO: 423101 - DNA, 510 bp, Homo sapiens
taaaataagtcaactatctcaacaaattttatcactttgttagttttctaaagataacaaaaaggttaacttttcatctgaatactctttcatcatagaagtattttttttaaccattactttgtaatatgactggtttgtatttagggtatgggatgaattattttatccatacatctttttttcactggtgacatgtattaatcttactgcaaagttttcagttcactacctatgttttatatccctcaagtgtacattttaaaatattcaatatggagctacagaaaaaaattatacaagaaccattkactgacctattttccccatatgaaactgtctactacatgactccagatatttgtttttaatatacttcctgtttatcaatcagtttgtcatattttctttgactttatatttttcagaattatatctattctggaataacctctagaagagaagctaagattcactattcacaataaaatgcactgcctattgtataat

SEQ ID NO: 423102 - DNA, 618 bp, Homo sapiens
atgataaccaaatcagtgagtacatttcaggaccaactgatgggttacaactcatggcttaaaaaacattcgattagaaaagagtagacactagaagtgccaaaggatctctttccccttgtttcctggtatgggcacaatagttgggatgccmcatgaaactcatagaatagtagggcaagttccttagttttaacatgactatatatattttttaaaacattcttttgaagtagctgtaaattgagagttttaattaaacataccacaacccccatatttaatgagttcataggttaaattaaagaagaagtatttttaaaactagcttcctaatggtatttaattttaagctttattccatctatctttactttaaaataaaagacccaagatgcctaatggcacctaccagttgtgtgaggatgctgcaaattagtcacagctagagcctgaaatttatcacagaaatctctggctgagaggctgattaacaattagagttgctaaaactaggactcccacagttttacattgggttcagttttactgtaaagaaatttcaccataatcaaagctctatttttaatcttcttattttggcccaatacttgtaat

SEQ ID NO: 423103 - DNA, 618 bp, Homo sapiens
atgataaccaaatcagtgagtacatttcaggaccaactgatgggttacaactcatggcttaaaaaacattcgattagaaaagagtagacactagaagtgccaaaggatctctttccccttgtttcctggtatgggcacaatagttgggatgcccmatgaaactcatagaatagtagggcaagttccttagttttaacatgactatatatattttttaaaacattcttttgaagtagctgtaaattgagagttttaattaaacataccacaacccccatatttaatgagttcataggttaaattaaagaagaagtatttttaaaactagcttcctaatggtatttaattttaagctttattccatctatctttactttaaaataaaagacccaagatgcctaatggcacctaccagttgtgtgaggatgctgcaaattagtcacagctagagcctgaaatttatcacagaaatctctggctgagaggctgattaacaattagagttgctaaaactaggactcccacagttttacattgggttcagttttactgtaaagaaatttcaccataatcaaagctctatttttaatcttcttattttggcccaatacttgtaat

SEQ ID NO: 423104 - DNA, 618 bp, Homo sapiens
atgataaccaaatcagtgagtacatttcaggaccaactgatgggttacaactcatggcttaaaaaacattcgattagaaaagagtagacactagaagtgccaaaggatctctttccccttgtttcctggtatgggcacaatagttgggatgccccatgaaactcatagaatagtagrgcaagttccttagttttaacatgactatatatattttttaaaacattcttttgaagtagctgtaaattgagagttttaattaaacataccacaacccccatatttaatgagttcataggttaaattaaagaagaagtatttttaaaactagcttcctaatggtatttaattttaagctttattccatctatctttactttaaaataaaagacccaagatgcctaatggcacctaccagttgtgtgaggatgctgcaaattagtcacagctagagcctgaaatttatcacagaaatctctggctgagaggctgattaacaattagagttgctaaaactaggactcccacagttttacattgggttcagttttactgtaaagaaatttcaccataatcaaagctctatttttaatcttcttattttggcccaatacttgtaat

SEQ ID NO: 423105 - DNA, 592 bp, Homo sapiens
actctgtgaggggaaaaccacctactgaagcctcagtgatggccgacgcccctccccccaccaagcttgagcatcccaggttgacttcagactgctgtgctggcagctagaatttcaagccagtggatcttagcttgctgggctccaygggggtaggatctgctgagctagaccacttggctccctggcttcatccccctttccaggggagtgaacggttctgtcttgttggcattccaggtgccactggggtatgaaaaaaaaaactcatgcagctagctcggtgtctgtccaaacggccgcccagttttgtgcttgaaacccagggccctggtggcgtaggcacccaagggaatctcctggtctgtgggttgagaagactgcgagaaaagcgtagtatctgggccagaatgcaccatccctcacagcacagtccctcacggcttcccttggctaggggaaggagttccccaatcccttgtgcttccctggtgaggcgacacctgaccctgcttcatctcgccctccatgggctgcaccactgtctaaccagtcccagtgagatgagccaggtacctcagttggaagtgca

SEQ ID NO: 423106 - DNA, 592 bp, Homo sapiens
actctgtgaggggaaaaccacctactgaagcctcagtgatggccgacgcccctccccccaccaagcttgagcatcccaggttgacttcagactgctgtgctggcagctagaatttcaagccagtggatcttagcttgctgggctccatgggggtaggatctgctgagctagaccacttggctccctggcttcatccccctttccaggggagtgaacggttctgtcttgttggcattccaggtgccactggggtatgaaaaaaaaaactcatgcagctagctcggtgtctgtccaaacggccgcccagttttgtgcttgaaacccagggccctggtggcgtaggcacccaagggaatctcctggtctgtgggttgagaagactgcgagaaaagcgtagtatctgggccagaatgcaccatccctcacagcacagtccctcacggcttcccttggctaggggarggagttccccaatcccttgtgcttccctggtgaggcgacacctgaccctgcttcatctcgccctccatgggctgcaccactgtctaaccagtcccagtgagatgagccaggtacctcagttggaagtgca

SEQ ID NO: 423107 - DNA, 364 bp, Homo sapiens
tctaccagtaacaactgccttatctaactggtactgggactctgttactgccctgataagggggcctctcccctcagagagcacatattgactatgaaactgatcgcttccaggaatatgtaggacsatctataggtgacgaaaatcattacaggcaactgggtttgggttcagcctgctctagcatttctctttgttttttaatgtgtttcattctgtttatgtgcaattttagttaatgctgtttggaatagtctttcagtctgtaaacccaatatgttgccatagaaacagttctccatctgaaatacatccaatcaattctaaaattatcattcagaaaatcttcataaattagaagtaa

SEQ ID NO: 423108 - DNA, 364 bp, Homo sapiens
tctaccagtaacaactgccttatctaactggtactgggactctgttactgccctgataagggggcctctcccctcagagagcacatattgactatgaaactgatcgcttccaggaatatgtaggacgatctayaggtgacgaaaatcattacaggcaactgggtttgggttcagcctgctctagcatttctctttgttttttaatgtgtttcattctgtttatgtgcaattttagttaatgctgtttggaatagtctttcagtctgtaaacccaatatgttgccatagaaacagttctccatctgaaatacatccaatcaattctaaaattatcattcagaaaatcttcataaattagaagtaa

SEQ ID NO: 423109 - DNA, 596 bp, Homo sapiens
tagaagtaatccaacagatacccagaatgtcagcattttcagcatttaggtaatgagctgcattttctccttttatttaattattttaaaatcaagaaatcaacagcaaagaatccaacttagatacacagatgctccctgactcgtgatacagttccattccaataaacccatcataagttgaaaatatgttaaattgaaaatacatttaatatatttaagctacagaacatcatagcttagcctggcctactgtaaatgcgctctgaacacttacattagcctaacgtggggcaaaatcatctaaaacaaagcctattttatgatgaagtgttgaatatctcatgtaatttattgagtactgtactgaaagtgaaaaaacagaatggttatatgatatataaagtacagtttctgctgaatgcatattgtttttgtaygatcataaagtcaaaaaaaattctaagtcaaaccattgtaagccaaggaccatgtgtacatggaaatagaaagatattcaagctaggaaaattcttcattgattattttattctggaaacaacattattatagaacaacatacgccatttagaaaa

SEQ ID NO: 423110 - DNA, 506 bp, Homo sapiens
atgaatatctagaatatacaaagaactctggatagtaccccaaaagaaaaatgggtgwcatattcagacaatttacaataactcaaggctgtataaggctgtaaggctattacacagctattagcctagagaatttagagagcttgagaatgccaatgctggcagaggtgtgggaataagattttcctgctgctcgtggaagcacaggttggagaatgatctggcattagctaatcaaattaagtgtctattcggggcataggtctcttagaaattctcacacaggtccattaaagggatatgtagaagcaggggtcaatccaggatttgtggggcttgaagtttatataatttggggaactctgttatgatattatggtataataaataatacatatttggtctctgctgctggttcctgacacctggctcctaaaacctttggaatctctaaagggataagtgtctttttgtaagcagatgagatgactggtggctgggagctc

SEQ ID NO: 423111 - DNA, 506 bp, Homo sapiens
atgaatatctagaatatacaaagaactctggatagtaccccaaaagaaaaatgggtgtcatattcagacaattyacaataactcaaggctgtataaggctgtaaggctattacacagctattagcctagagaatttagagagcttgagaatgccaatgctggcagaggtgtgggaataagattttcctgctgctcgtggaagcacaggttggagaatgatctggcattagctaatcaaattaagtgtctattcggggcataggtctcttagaaattctcacacaggtccattaaagggatatgtagaagcaggggtcaatccaggatttgtggggcttgaagtttatataatttggggaactctgttatgatattatggtataataaataatacatatttggtctctgctgctggttcctgacacctggctcctaaaacctttggaatctctaaagggataagtgtctttttgtaagcagatgagatgactggtggctgggagctc

SEQ ID NO: 423112 - DNA, 572 bp, Homo sapiens
gctttcctcagaaagatccaaagggaggggaaaaatcattttttttttaccacctattcgtccagggtaagatattgctggttctatttgggtaaatggatgagccacaagcctggttgcccaggacaatgatgctaaattggggggctgaagatctcgctgacttggatgatgtacaattaattttcaagtctgtttttggttaaattgttgcttatatgggatgtggcacagagacagggcaaaaatgggattgtgaatcttggcagggtaggataggtttgagaattaatttttcacttaggttaaattcctcccatcatccctgggccggtaaagcctgtgcctgtgtccttgtcagcgcatttagtcctcaggatctgtacgggttccacggagatcatgcaggacataaaacgctaattcaatttttgcttttctygcttaagaggcggaagttagagctaggtattttatggaaggatttcttgaaattctatgagagacgatctaaaaatctctaagactatccaaacccaggaaaagttggtcaatgtcatcaatttgatgac

SEQ ID NO: 423113 - DNA, 536 bp, Homo sapiens
ggtggctctgggcaggtaggtatgtcaccctggctcttactggggacagaaaacagctgctgtagttagcaagcctggagaaccctgtccagcccaaatgctggaaagcagggttcatttctgaaatgacaaagaacggttcattgaaggagtagctttcaaatagccaaaccagctaactctggagggagctagaactaggttttcacccagaagtagcagcggttyggcagaatggcggcattgaagatgcagggtcagagtgaggggattgtgcagaagctagctgcgagccagccaccagacagactcttgaggcaaaaggaagactctgaacctatgatttaactgcgaaaacagactctggttggaaacactgtctgacagagcccatgccacgtggaaaatattaaacatttcctctcttggcacctgtttctaacagactggagtgttgactattttgcaacgatacataaattcggtttgttagtgaactccatggagagtccacatgccctggccaacgtggctta

SEQ ID NO: 423114 - DNA, 539 bp, Homo sapiens
cttaggctttccttgtgtttgatgacccagaggttttgcagaaagtccctctgttgggattaatctgatgtttttctcatgatgagactggggttatgggtttkgggggaggaagaccctggaggttaagtgcccttctcatcatatcatgtcaagggtacttgctgtcaatgtgactttttggtgttgatattgagcttgatgacctggctgaggtggtatttgtcagggtcctccactgtaaagttcctcctcttttggcatgcccttttgaccaaaaatcaaaagtcatgttctccagtggtctttcttagcaataaagctgacattttggcctgtttgttctttgtgtcttatttctcaattgagtccatatttgagaagggaagaaataaatggatgttatgtattgaagccctaagacctcaatattatccccctggcaaaatacttcacatctttgtggttcactcaagcatcacttcctctttgaagccctccctgatctccccaggcagagtcattgtgttctcccaggt

SEQ ID NO: 423115 - DNA, 511 bp, Homo sapiens
ccagaagtgatattgtttttggtgtgtcaccttctgtcatatactttgggtctacggcttcatcctatatgggccactggccaatagggaaaggacttgtgtgcccccattttgattcatattcattycccccccaaatccatagctgacctgactgattcatattcagtctgcggactcttgtcatgtaaatcttcctgactgctgggaaacacagcagtataattgtgagcacctcactaatgtatgagtgagtgattagtaagaatggtgatttcatttttttccttaagtaaatgccatttctaatgtagtgaatattaaaatagatctgacttacaggtagcaaaaggatgtttccatataatgcaagaggcaaaagtaattttattttggatattacttgtatttgcatgatcagtagtgttagcctagtggacatggtaaaaatcagagatgggggtctggaagcctgctagccagacttaggaggagctgcttctcctttttc

SEQ ID NO: 423116 - DNA, 578 bp, Homo sapiens
catataactattccaatttattctgagaaaacatttgataaaattcaacgtcccttcataattaaaaaccctcaaaaactggatataaaaggagcatacctcaatacagtaaaagccatatatgatagaccaagagctagtattatactgaatgggaagaaactgaaaccttttcctctaaaatstggaacatgacaaggatgcccactgttattcaacataatactggaagccctagctagagcaatcagacaagaataaataaagggcatccaaattggaaaggatgaattcaaattatccttgtttgcagatgatatgatcttctatttggaaaaacctaaagattccaccaaaaactattagaactgataaacatattcagtaaagttgcagaatacaaaatcatcatacaaaaaccagtagcatttccatatgccaacagcaagcaatctgaaaaagaagtcaagaaagtaatctcatttacaatagctacaaataaaattaaatatctaaggaataacttaatcaaagaattgaatgctctctacaatgaaaactataaaacattggtgaaa

SEQ ID NO: 423117 - DNA, 453 bp, Homo sapiens
gagactccagctcaaacaaaacaaaacaaaacaaacaaaacagaattggaaatatcagtatgaattcatggtttaattatatacagatagataaatatagacgtctgtgtatacatgggttagcgtatatacatatattttctagctttgtctcccgagagggcctagaagaactgacacccagatcttgggatctaaatattattatctagtaaaaggaaccaggactcttagtaaaaggaaccaggagacatgacctatttcagggctgggcatcttgcagtgctggaaagtgaggaagtacttaacgtaatgtcaaaaggatacataagacagcccgaaagagctcccamggttaaaactggagcaatttgaaccacaaaataatgatattattggatctcctattaatattaataaatgattaaataaatagataaattggggagagag

SEQ ID NO: 423118 - DNA, 565 bp, Homo sapiens
tgcgagaaatacccacaggtgtggaggggctggcccccttcaacaaataacacctgacccttggcctaggtgttgaggacatactgggcatttgggaggctatgggaactggagaagggagcagctcagtgcgcttgagtactgycttgtgggaatgcacctgtactgtcagagacagagggatatctttaaaatcttaggtaagtatctgtttttttaatgttggcaaaaattttagaattttttttactgttgagagtttcaaataaaatgtgtctgcaacctgtattcagctgtggagagagatggagaggtagcatgtgctgtgagatgatgcttttcttgtttgcaaaacacagcgtcttgtataattgtcactctaactctgtgaggcagactgggcaggtcggccgtgcccatctgatagattaggaaaactgagacccagatgagtgaagcactttgcaggtgtcacacagcagtggcagagcatggatttaaactcagtgctgccagacaggggggctcatgcctgtaatcccagcaaggccaaggtgggaggatt

SEQ ID NO: 423119 - DNA, 565 bp, Homo sapiens
tgcgagaaatacccacaggtgtggaggggctggcccccttcaacaaataacacctgacccttggcctaggtgttgaggacatactgggcatttgggaggctatgggaactggagaagggagcagctcagtgcgcttgagtactgccttgtgggaatgcacctgtactgtcagagacagagggatatctttaaaatcttaggtaagtatctgtttttttaatgttggcaaaaattttagaattttttttactgttgagagtttcaaataaaatgtgtctgcaacctgtattcagctgtggagagagatggagaggtagcatgtgctgtgagatgatgcttttcttgtttgcaaaacacagcgtcttgtataattgtcactctaactctgtgaggcagactgggcaggtcggccgtgcccatctgatagattaggaaaactgagacccagatgartgaagcactttgcaggtgtcacacagcagtggcagagcatggatttaaactcagtgctgccagacaggggggctcatgcctgtaatcccagcaaggccaaggtgggaggatt

SEQ ID NO: 423120 - DNA, 580 bp, Homo sapiens
actgtacattttggagctactgtaaaaagatcagtacaaaaagcagggaccaagataaagcatcttgactcagtgagcttacaatctttgaaagctagggaggggagaagcacttagatcttatgctgcccccacgcaaccactatagcaggatgtcattcagcagaaagcactttcagattcatcaccacaggtgtgtggcagtggtgcttttttttttttttctaaatccaatgatcaaggaaacatttacttgtaaatctttccgcctcttttccacatcactaaactgcatgactgcacttctacccaaataaaacctgtcttccctaaaccacaggttaagacctaggatttatgattagggaatctgataacaaaacactgatttcttgaacaatccaccagcctttcaagtcattccatctcaraactatgcctgttttgctgttttctagcaatcggcctttggtctctgggtgtgctccatggaatcctctgagatgtgattttttccttcgtttttggttgttcattgtgaaagaacaaatgtgagtgaactctttccctatgtggtgtc

SEQ ID NO: 423121 - DNA, 413 bp, Homo sapiens
cccatcaacccagtgtgcgctgggccctgggggctccgcgtctcccccctgtagagggctaccccgggaaatctggatcgggttatggagagccatcgggctactgtgagaggctccagatcctaaamcctcaacctgcggagcacctgcctgcgactcccgcggctgccacccgccctcaaactaacgggccgggcaggcacaagagtctgcggggcgcgcagaggccgctctcaagccttcgagctcactccgtgctcaggccaccagcaggagcctctcaccacctttcagaagcaggagggatcttttttagatttaagtcctttaaaaataataataaagcaaaaatacaaaatttcacctccgttttcaagttgggcgaactaaagttgttccacaggtttccctca

SEQ ID NO: 423122 - DNA, 413 bp, Homo sapiens
cccatcaacccagtgtgcgctgggccctgggggctccgcgtctcccccctgtagagggctaccccgggaaatctggatcgggttatggagagccatcgggctactgtgagaggctccagatcctaaaacctcaacctgcggagcacctgcctgcgactcccgcggctgccacccgccctcaaactaacgggccgggcaggcacaagagtcygcggggcgcgcagaggccgctctcaagccttcgagctcactccgtgctcaggccaccagcaggagcctctcaccacctttcagaagcaggagggatcttttttagatttaagtcctttaaaaataataataaagcaaaaatacaaaatttcacctccgttttcaagttgggcgaactaaagttgttccacaggtttccctca

SEQ ID NO: 423123 - DNA, 490 bp, Homo sapiens
caggaggaaagggttttgcttcctggttaacttgtgctcacacagcagtttctgcagtgcaggacatatagatttcccagctcctggctcctgaagtgcatacatacccacatcttctccaaagcccagctgctgcaataaagctagcttttccagtgccaggctcctgaagcaccggtagccagaagtttcccccagcaccctcccctcctgggctgtttgtagcagtgtggctctggtgaggcaactccgtgtgaacagccttccccagcaccctagagagcagatctgcagcaagctctactagcacaacttctctgccacccagggagccaaggctgtgcagggtctggattcagccttggttgagaagaggggaggactcttacttkgttgctgtatttcagccctgagggtagtggatgctgttattcctgtattctttagagttatttttagttcttcctagccaattccttgtttctccaat

SEQ ID NO: 423124 - DNA, 569 bp, Homo sapiens
aaagcaccacttctttcaaatccttaagagatgtatttccaaaaaaacagttaactttcatgtttaataattgtttataaaaagtataatgtagttatgttctttcatcaattctataccatggtaataataatattataataactcaaaccagaagaattattttaacagttataaactcatggacttaggawgcttaactacttacttgcaatttcaatttatgtacttatttttctgctgaaaaaatagtgaagcatgactaattgagactctaaagcaaaaaaaaaatacaccattaaaatattattttgggctggacacagtggctcatgcctataatcccagtattttgggaggccatggcaggagaatcgcttgaggccaggagttcaagaccagcctgggcaacatagcgagacctctgtctctacaaaaagtcaaaaaaaaaaattagctgggcttggttggcatgttcctgtagtcccagctagtggggaggctgagataggagaatttcttgaggccaggacttaagaggttgcagcgagctatgaccacactactgc

SEQ ID NO: 423125 - DNA, 585 bp, Homo sapiens
atacatctgtacatctatccacctctatctactcagcaactcatcttcctaaagaaaatgaatttcaaggtacagtgcaaacaatatggctggaggcattttaaaaataggaacgtattatattcaatttacgttgtttgttttgcagcactgtaattcttcatttctctttaccttcggtaaagctcaccacacagagagtctttgtgaagatggtgtctttcaataatagaaatcaaggaaaacggctgggttctaagtgtaaatagatgcagagagactgaaataaaaaaatacataagacaatgggaagaacccaaatttattggagtcagggaattagaactagaggtgatcacaagactgtaaactttcaggaatttggagaagtcttggggagggcatcagattttgcacaaggtgtgaatagggatttaagcccatttatctagatcatttaaggaacaggcaaatamcagttgacaagtaaattaccacttcgtttctcagttaccatttactggaactagaggtgttctatcactagaggcaatatttgtggtgggaaaaaggcaggaaaggaag

SEQ ID NO: 423126 - DNA, 563 bp, Homo sapiens
acacccactgggatggctataatcagacagacaataacaaatgttagcaaggatgctgtgacacagaaactctcaaatattattggtgagaatggtaaatggtaccatttccaaactgctactttggaaaacagttggatctttttaaaagtttgaaatatatgccgggcatggttgctcacgcctgtaatcccagcacttygggaggcggaggtgggcagatcacaaggtcacgagatcgagaccatcctggctaagacgttgaaaccccatctctactaaaaaaaaaagtagaaaaaattagccggacgtggtggtgggcccctgtagtcccagctacttgggaggctgaggcaggagaatggcatgaaccctggaggcagagcttgcagtgagctgcgatcgcgccactgcactccagcctgggcgacagagcgagactcagtctcaaaaaaaaaaaaaagttttaaatataaatttaccatatgacccagaaattctactcttaggtttatccccaagagaaataaaaacatatatactacatatatatactatacaca

SEQ ID NO: 423127 - DNA, 563 bp, Homo sapiens
acacccactgggatggctataatcagacagacaataacaaatgttagcaaggatgctgtgacacagaaactctcaaatattattggtgagaatggtaaatggtaccatttccaaactgctactttggaaaacagttggatctttttaaaagtttgaaatatatgccgggcatggttgctcacgcctgtaatcccagcactttgggaggcggaggtgggcagatcacaaggtcacgagatcgagaccatcctggctaagacgttgaaaccccatctctactaaaaaaaaaagtagaaaaaattagccggacgtggtggtgggcccctgtagtcccagctacttgggaggctgaggcaggagaatggcaygaaccctggaggcagagcttgcagtgagctgcgatcgcgccactgcactccagcctgggcgacagagcgagactcagtctcaaaaaaaaaaaaaagttttaaatataaatttaccatatgacccagaaattctactcttaggtttatccccaagagaaataaaaacatatatactacatatatatactatacaca

SEQ ID NO: 423128 - DNA, 585 bp, Homo sapiens
ccaacgcctgcccttaaggcaaactattttacccgggtttagctgagctgggggaagtaaaatacccaactccagcctcctccagcattccacatggaggaagagaaatacataaccccagcccctactggccttcctatctaacttgatggcagtgtcgggaggaggagaagatgagaagcacttgtgaagttcacagcccagggagccaggctcactaaaagactgaaagccaataataaaattatggaacacttcctctgctcctgtgctttaccaccacatcagttagggtcctttatactcactgagaatcacagctaaaagatctgtaagcttcagaccctacttaaaaaggagtctctagggaaacccaaagacaacaggcgaggctaaaaggaggactctagaggacatttgatatggcttggatgcttgtcccctccaaatttcatgttgaaatataatcctcagtgttagaggtggggccttggtggraagtgtttgggtcatgggggcggatccctcatgaatggcttggtgctttcctcatgacaatgagtaagttctcactctgagttcatg

SEQ ID NO: 423129 - DNA, 606 bp, Homo sapiens
tactatgtttcagagtaattttgaaggagttttccctgaaggaaatgtactcccttgccccacaaacccaatctttttagggagcctgtattctcagttatccagcttctctcctgtgatgttcatatctctatttccatttccattggcctttctcttttttttctgacctagtttctttctcatgggggaaaatgacaaccaaaattcttttcaattacccaattacactttcwccttccattttgttcccttccttcttttaactgctaaccttctcaaatgagtgatctgttcaatatgttcacatttataccctcaccacaccatcaagactagttatgtcaacattaaagcacttctgaaaactcaaaagtcacttctcagtttctcatcttctttaagttcccaatgttttaaaacattttcataaagcaaacgatccttttatgaggtgaaaaagcacatgataatttatctgtttcctgtagttgttcagaagaaaaacaggtttccaggttggggtactgccaaggaagacggcctgaacctcttagagtggagttcgggtttggggtttgacccccttgaccctcaccagacaac

SEQ ID NO: 423130 - DNA, 606 bp, Homo sapiens
tactatgtttcagagtaattttgaaggagttttccctgaaggaaatgtactcccttgccccacaaacccaatctttttagggagcctgtattctcagttatccagcttctctcctgtgatgttcatatctctatttccatttccattggcctttctcttttttttctgacctagtttctttctcatgggggaaaatgacaaccaaaattcttttcaattacccaattacactttcaccttccattttgttcccttccttcttttaactgctaaccttctcaaatgagtgatctgttcaatatgttcacatttatamcctcaccacaccatcaagactagttatgtcaacattaaagcacttctgaaaactcaaaagtcacttctcagtttctcatcttctttaagttcccaatgttttaaaacattttcataaagcaaacgatccttttatgaggtgaaaaagcacatgataatttatctgtttcctgtagttgttcagaagaaaaacaggtttccaggttggggtactgccaaggaagacggcctgaacctcttagagtggagttcgggtttggggtttgacccccttgaccctcaccagacaac

SEQ ID NO: 423131 - DNA, 518 bp, Homo sapiens
caagtcttttgatcttgaacatctatatcatggccctgaatatttctccagctactctttctctttcacaggccaatttcttgggaagaataaggaacttataggactttccaagtcactataaccaagcttctattcctaccactctattgaagctgttttgccaacgrttaccttcaactggctaagtccaattaatcctgattctcgttttagcatcattaatatgcctctctgaaactctgctctcctggtttctgtgacaccactaagcaccctctcaacgttccttgttgactcttcctctcctcctcccattgactgtgtttaaggtaactgtataaaatcccagtggctataaccagtagcacaactggaatattcaggcagaatggtgcggatagaagctagaatacagtctggagatcaggagagtatgtggacatttagatctgggaactagaagcattgaatgtggatatttaggatttgatgtttgactcacttctcattgtttt

SEQ ID NO: 423132 - DNA, 545 bp, Homo sapiens
ggggtagttttcatgtttacagggtgttttgatattttcaattcagattttttttagtgcccattatatggattcctgtgagataaattattcctgacagagaaactgaacttatgagattagttgatccttatatccttatacaaagttctattatattgattaattatccttaacaaaaatcttgtgaccatggcttttatttcagttttctgctttacaacatctctcacaaagcttctgcagctttttaaaatctccacttgaatgtctaatagttgtctcaaacttaacataggcccaactgaactgttttttttttccttcccagtcttctggatctcaktaaatggcaccaccattcaaccagtttctaaggctccagaattcggtcatccttgactgcgcttctctcacaccccacgtgtaatccatcagcaaatcagttctgctttcaaaatgtattccagaaatctgaccacttctcatcatctccgcttgttaaactaattcaacccactgtcatctcttgtctgcacaacctc

SEQ ID NO: 423133 - DNA, 561 bp, Homo sapiens
tgtgttgttgttgttgttgttgttgtttttgagaggaatctagctttgttgcccaggcgctggagtgcagttgcctgatctctgctcactgtaaactctgcctcccggcctcaagtgattttcctgcttcagcctcccaagtagctgggaatacaggcatgcrctaccacgccaggctgatttttgtatttttagtagagatggggtttcaccatgttggccaggctggtctcaaactcctgacctcaagtgatccacctgctttggcctcccaaagtgcctgggattacaggcttgacccaccgtgcctggccccttcttacagatttgaaaggaaaggattagtagtctaacaagtgttagtgggttgggatgatagcagttgtgccttacctagtgcatataactgagcacatttgctatatgctctttatcacagctcctttgaataacctgtactggaatggtccagaggtttttcatttttaggttattgaactcaagcagcctgtaaatttgaaagtgaaatcttttcagttgacattacaggtattttaacaa

SEQ ID NO: 423134 - DNA, 561 bp, Homo sapiens
tgtgttgttgttgttgttgttgttgtttttgagaggaatctagctttgttgcccaggcgctggagtgcagttgcctgatctctgctcactgtaaactctgcctcccggcctcaagtgattttcctgcttcagcctcccaagtagctgggaatacaggcatgcgctaccacgccaggctgatttttgtatttttagtagagatggggtttcaccatgttggccaggctggtctcaaactcctgacctcaagtgatccacctgctttggcctcccaaagtgcctgggattacaggcttgacccaccgtgcctggccccttcttacagatttsaaaggaaaggattagtagtctaacaagtgttagtgggttgggatgatagcagttgtgccttacctagtgcatataactgagcacatttgctatatgctctttatcacagctcctttgaataacctgtactggaatggtccagaggtttttcatttttaggttattgaactcaagcagcctgtaaatttgaaagtgaaatcttttcagttgacattacaggtattttaacaa

SEQ ID NO: 423135 - DNA, 452 bp, Homo sapiens
tgaggttatttaacatgacactttttaaagctkatttcctgtagcaacacttctaatatttctcatatttaataactattggggccttaactgtgcaaaatgtgctatgctaagtgctatgaaaggatagatgacttgatccctacctagggccttgttgaagaacaaagatctataaaaaaagtcagaataattttgttcacatcacagtattcatcaaaaaatgctatggtattacaagtaagaagagtagagttcaggtcaaaagattaaggaaatattgtcaaggagttgacatctgaggtaaatcttggaagaggagttagatttaaacagtgggaatttaataagattgttttaaaaaaataaatacagattcatcaggaacttttggccactttaaattagtaaaatgcaatgggcttcacctgctatgtctcaggaattcaata

SEQ ID NO: 423136 - DNA, 452 bp, Homo sapiens
tgaggttatttaacatgacactttttaaagctgatttcctgtagcaacacttctaatatttctcatatttaataactattggggccttaactgtgcaaaatgtgctatgctaagtgctatgaaaggatagatgacttgatccctacctagkgccttgttgaagaacaaagatctataaaaaaagtcagaataattttgttcacatcacagtattcatcaaaaaatgctatggtattacaagtaagaagagtagagttcaggtcaaaagattaaggaaatattgtcaaggagttgacatctgaggtaaatcttggaagaggagttagatttaaacagtgggaatttaataagattgttttaaaaaaataaatacagattcatcaggaacttttggccactttaaattagtaaaatgcaatgggcttcacctgctatgtctcaggaattcaata

SEQ ID NO: 423137 - DNA, 605 bp, Homo sapiens
taccagtcacattaactatgatagttaaatctatacacatatagatacatatacatgtacatatgtatatatatatcatttttattagaaagtggtattttgttactcatgctgtcacaggaatgaaaatttactagatacaggaaaaaatacaaaaatcaaaatgtccaacaaaagggaactggttaaataaattacagaactatttctcaaacttgcctaattacaatcacttggtcacttgtacggacatgtaggcccctgggagattccaattcatatggtctaggatatgctattggaaagggtcatattttaaacaagcaattttttaaccctacaattttcacagtcaagatagtttggaaaccccaatttatggtctctatatacacaatggtaaaccattcagacatttatgtgaaaaagatgtccaaaacacattgctaagtgtggggaaaaagacaagttactaaccacatgtaacatwtgtttctcttcatgcaaaattatataactatccatatgtatacatatttgaccagagcactcatttaacaccctttacatatctttaacaaatttctccaccaaagaaaatatct

SEQ ID NO: 423138 - DNA, 611 bp, Homo sapiens
taaatgttagaattcagaaaaaagaaatggtttactcttatgatcatgtaataatgataactgaaattatatttcccctttcactgactgcccagaagttgagaattttaaatttaatgtttaaacacaataggtattatcccagggtgaagatgtatttattttacacacacacacacacacacatcttagtatcagaccttttcttttaaatcaagtagagtatcaatcaaaagaaaatattttctatgcacacatgtgtataaacagatttaaaagactaaggaagaaaaagctttagaggacgggatttacaaaaggatagcttctgcatctgcagaaacaccagagaaattatttagcacttggtatttagggattcttctgcacacataaattttcaggctttggaacacaagttcctgagctatgatttttagtttgaactccagtcattccaaatcatatgttcttttgttatgcgatactaacaaaaagtaakgagctatttcatgtaaggaatgtggaaatatttccacatcactccaaagtccctgaaagcagccagattctttaaaaagaagcaactacctcacaaactgtcagatact

SEQ ID NO: 423139 - DNA, 424 bp, Homo sapiens
gcttctttctttccaattttgatgccattcatttgtttctcttgcctgattgctctagctaggatttccagtactatgttgaataccagtagyaaaggtgggcatccttgtcatgtgccaggtcttagagaaaaggctttcagtttttttccccttcagtatgttactagctgtgagtctgttgtatatggcttgtattatgttgaggtatgttccttctaccctcagtttttaagggtttttatcataaatggatgttgaattttatcaaatgttttttcagcatcaatcaaaataatcatgttttttgttcttcattctgttaatataaagtgtcacattgattgatttgcatatgttgaaccattcttgcatacttaggataaatcccacttggtcatgatgaatgatctttttaatgtat

SEQ ID NO: 423140 - DNA, 617 bp, Homo sapiens
tgtttctcttgcctgattgctctagctaggatttccagtactatgttgaataccagtagcaaaggtgggcatccttgtcatgtgccaggtcttagagaaaaggctttcagtttttttccccttcagtatgttactagctgtgagtctgttgtatatggcttgtattatgttgaggtatgttccttctaccctcagtttttaagggtttttatcataaatggatgttgaattttatcaaatgttttttcagcatcaatcaaaataatcatgttttttgttcttcattctgttaatataaagtrtcacattgattgatttgcatatgttgaaccattcttgcatacttaggataaatcccacttggtcatgatgaatgatctttttaatgtattgctgaactcagtttgctagtattttgttgaggatttttgcatcaatattcatcaagatactgccatgtagtttttgggttttgaggtgtctttctttggttttggtatcaggataatactgtcctcgtagaatgagtttggaagtattccctcctactccattttttcagaatacttagaatatgattggttcttctttaaatgtttggtaaaattcagcagtga

SEQ ID NO: 423141 - DNA, 617 bp, Homo sapiens
tgtttctcttgcctgattgctctagctaggatttccagtactatgttgaataccagtagcaaaggtgggcatccttgtcatgtgccaggtcttagagaaaaggctttcagtttttttccccttcagtatgttactagctgtgagtctgttgtatatggcttgtattatgttgaggtatgttccttctaccctcagtttttaagggtttttatcataaatggatgttgaattttatcaaatgttttttcagcatcaatcaaaataatcatgttttttgttcttcattctgttaatataaagtgtcacattgattgatttgcatatgttgaaccattcttgcatacttaggataaatcccacttggtcatgatgaatgatctttttaatgtattgctgaactcagtttgctagtattttrttgaggatttttgcatcaatattcatcaagatactgccatgtagtttttgggttttgaggtgtctttctttggttttggtatcaggataatactgtcctcgtagaatgagtttggaagtattccctcctactccattttttcagaatacttagaatatgattggttcttctttaaatgtttggtaaaattcagcagtga

SEQ ID NO: 423142 - DNA, 581 bp, Homo sapiens
tctttttccatccctttattttctatctattggtgtctttataggtgaagtgtttcttgtgagtaacaaatcaatgagtcttgttttttcatccattcagcaagtctttgtctttcaattggagagtttcaacaatytacattcaatgttattaatgataagtaaggacttacttctgtcattttgttatttgttttctggttttgtggtcttcttttctttctttccttcctgtctcctttttagtgaacgtgattttctctggggatgtggttttgtttcttgatttttattttttgtgtattcattgtatgatttttggtttgagattactatgatgcttgcaaatactatcttgtaatctattattttaagctgataacttaaccctgtttgcataaacaagcaaaaagaaagctcacaaagactctgtcacttaactttgaccccctactttttcactttttgttgtttctatttatatgttattatactgtctatgtctgcaaacgttattgtgtttattatttttggctggctcataatttagtctttctacttaatagtagtttacacaacac

SEQ ID NO: 423143 - DNA, 600 bp, Homo sapiens
taccccaagcacatcagtcatggccctttccctgcatccctgctaataatctacttttaatctctatagattttcctattctggatatttcatataagtggtatcacaaaatatgtggtcttttgtgactagcatctttcatttagcataatgtttccaaagttaacttaccaaaatatgagagtttgaatttctctacatcctcaccaatattgttataatctgtattttttattatgaccgtcttagggggtgtgaagtgatatatcctccaactgtgtaactgttccttgtttatttttttccaagattgttctggctattctggatcccttgaatttccatatgttgaacscttatagcaaaacacattataatcaaattgtaaaaattcaaagacaaagaaaaaattttgaaagcagcaagagaaaagcaactccttatgtacaagtgatcctgcatcatattatgagtgaatttttcagcagaaatattacaggccagaagggaagggggtaatatattcaaagtgcttaaagaaagcaattgtcaaccaagaatattgtacttggcaaaactatctttcagaaattaaggaca

SEQ ID NO: 423144 - DNA, 600 bp, Homo sapiens
taccccaagcacatcagtcatggccctttccctgcatccctgctaataatctacttttaatctctatagattttcctattctggatatttcatataagtggtatcacaaaatatgtggtcttttgtgactagcatctttcatttagcataatgtttccaaagttaacttaccaaaatatgagagtttgaatttctctacatcctcaccaatattgttataatctgtattttttattatgaccgtcttagggggtgtgaagtgatatatcctccaactgtgtaactgttccttgtttatttttttccaagattgttctggctattctggatcccttgaatttccatatgttgaacccttatagcaaaacacattataatcaaattgtaaaaattcaargacaaagaaaaaattttgaaagcagcaagagaaaagcaactccttatgtacaagtgatcctgcatcatattatgagtgaatttttcagcagaaatattacaggccagaagggaagggggtaatatattcaaagtgcttaaagaaagcaattgtcaaccaagaatattgtacttggcaaaactatctttcagaaattaaggaca

SEQ ID NO: 423145 - DNA, 600 bp, Homo sapiens
taccccaagcacatcagtcatggccctttccctgcatccctgctaataatctacttttaatctctatagattttcctattctggatatttcatataagtggtatcacaaaatatgtggtcttttgtgactagcatctttcatttagcataatgtttccaaagttaacttaccaaaatatgagagtttgaatttctctacatcctcaccaatattgttataatctgtattttttattatgaccgtcttagggggtgtgaagtgatatatcctccaactgtgtaactgttccttgtttatttttttccaagattgttctggctattctggatcccttgaatttccatatgttgaacccttatagcaaaacacattataatcaaattgtaaaaattcaaagacaaagaaaraattttgaaagcagcaagagaaaagcaactccttatgtacaagtgatcctgcatcatattatgagtgaatttttcagcagaaatattacaggccagaagggaagggggtaatatattcaaagtgcttaaagaaagcaattgtcaaccaagaatattgtacttggcaaaactatctttcagaaattaaggaca

SEQ ID NO: 423146 - DNA, 537 bp, Homo sapiens
ttagacctcgtaggcaaccagtctcttcagtttctgctttccttcctatatcttttgtacaaatgagcagatacatggttattttcttatatccctttctttcttacatgaagagtagcatattacagatagtctcttatactttgtttattcactcaacagtatatcctggaaattattccaaatgcattcattagagatctcccttatttttgacaggttcataacaccctattgtgtgtatataccatggttaattcaaccattcaggagagaaatttttgactacgcttttttgaccaagaaatactcctgcaaatatttaaagacaatttttcaagtgacaactggggaaaaagagtgcatcttctaagcatctctgcagattagaaaagcaatgtattaattctyattacttggtaggtataattagaatcttcacactccactggtagtcttgtgaattgaaacatcattttgaaagcagcacagcaatatctaagggtctcctcctttgactcactaattcaactcatg

SEQ ID NO: 423147 - DNA, 589 bp, Homo sapiens
aggagaaaaataaaacctgtgtctgagtagattctctgggtgaagcaggttctctcctttaaatgtagcaactggagcatcagagaacataatctggcaggcttaaattagcacagcgaattacgtttaatggagragttgttgagcagatggggaagaaatctgatcaggtcctaggagaagctgaaaatggtgtgtgttgggagaattctagttgtggcaaactgaaccacacagggttatatgtttccttcccaaacaccataaagtgagagtaaaggaataaaaatagaaaaagtctacaagaatgaaacactattaaggaaaggaacattcagaaagcaaaatacactcttctagattgagaatttagcagcatattggccaggcctggtggctcatgcctataatcactgcactttagaaacctgaaacaggaggatcacttgagcccaggagttcaagaccagcctgggcaacatagtgagacctcgtctctactttaaaaaatcaaaaaattagccaggtattacggtttggctctgtgtccctatccaaatatcttaaattgtactctcataattcccac

SEQ ID NO: 423148 - DNA, 589 bp, Homo sapiens
aggagaaaaataaaacctgtgtctgagtagattctctgggtgaagcaggttctctcctttaaatgtagcaactggagcatcagagaacataatctggcaggcttaaattagcacagcgaattacgtttaatggagaagttgttgagcagatggggaagaaatctgatcaggtcctaggagaagctgaaaatggtgtgtgttgggagaattctagttgtggcaaactgaaccacacagggttatatgtttccttcccaaacaccataaagtgagagtaaaggaataaaaatagaaaaagtctacaagaatgaaacactattaaggaaaggaacattcagaaagcaaaatacactcttctagattgagaatttagcagcatattggccaggcctggtggctcatgcctataatcactgcactttagaaacctgaaacaggaggatcacttgagcccaggrgttcaagaccagcctgggcaacatagtgagacctcgtctctactttaaaaaatcaaaaaattagccaggtattacggtttggctctgtgtccctatccaaatatcttaaattgtactctcataattcccac

SEQ ID NO: 423149 - DNA, 606 bp, Homo sapiens
tcacaaacggtaaccggtactgacacaggtgaccagaatggtggggtatgtgatatacatggacttgctgcacccctgcagggagtgtgatcggcacacaggctccagctgtcacctccttcgtggtccacctcaattgcagagccagttggtctcargtaatgcctacaaagagcaatgtgatgcaatataatgactttctcaaggctgtcatcatctgatgactgagcaaagttggtgaggggtggtaagttaaaaggcctggccatttcagcctgtctgggagcaactgtgaagggcaacatttgttccagagttcctcattaggttggccaaggtttttcaggactacattacatgtcgactcctccatcaactcaatcatgcttcctttcaaaggtgttggtccataaacaatatcgtgtactctaaactccatctcagtgtctgcttccagaacatgcagcatgtggaaaatagtgccaagaatgatcagcattagcaggtaataagattggccttcggagatggatcacttactgccaggctggcagtgagaagcccctcaccagtgacaggtggaacacagacagctcctggcccaaa

SEQ ID NO: 423150 - DNA, 606 bp, Homo sapiens
tcacaaacggtaaccggtactgacacaggtgaccagaatggtggggtatgtgatatacatggacttgctgcacccctgcagggagtgtgatcggcacacaggctccagctgtcacctccttcgtggtccacctcaattgcagagccagttggtctcaggtaatgcctacaaagagcaatgtgatgcaatataatgactttctcaaggctgtcatcatctgatgactgagcaaagttggtgaggggtgrtaagttaaaaggcctggccatttcagcctgtctgggagcaactgtgaagggcaacatttgttccagagttcctcattaggttggccaaggtttttcaggactacattacatgtcgactcctccatcaactcaatcatgcttcctttcaaaggtgttggtccataaacaatatcgtgtactctaaactccatctcagtgtctgcttccagaacatgcagcatgtggaaaatagtgccaagaatgatcagcattagcaggtaataagattggccttcggagatggatcacttactgccaggctggcagtgagaagcccctcaccagtgacaggtggaacacagacagctcctggcccaaa

SEQ ID NO: 423151 - DNA, 606 bp, Homo sapiens
tcacaaacggtaaccggtactgacacaggtgaccagaatggtggggtatgtgatatacatggacttgctgcacccctgcagggagtgtgatcggcacacaggctccagctgtcacctccttcgtggtccacctcaattgcagagccagttggtctcaggtaatgcctacaaagagcaatgtgatgcaatataatgactttctcaaggctgtcatcatctgatgactgagcaaagttggtgaggggtggtaagttaaaaggcctggccatttcagcctgtctgggagcaactgtgaagggcaacatttgttccagagttcctyattaggttggccaaggtttttcaggactacattacatgtcgactcctccatcaactcaatcatgcttcctttcaaaggtgttggtccataaacaatatcgtgtactctaaactccatctcagtgtctgcttccagaacatgcagcatgtggaaaatagtgccaagaatgatcagcattagcaggtaataagattggccttcggagatggatcacttactgccaggctggcagtgagaagcccctcaccagtgacaggtggaacacagacagctcctggcccaaa

SEQ ID NO: 423152 - DNA, 620 bp, Homo sapiens
catactatttatcatttattttctcctactccactaaaatgcaagtttcatgttggcagggatattcaattgttttgtttattgatatattcctagcacctagaacagtatctggaaaagaggtactcagtaaatatttatcaaatgaattgaccaaaagaaggaaaactcaaaactttaatgacaactaactttaaagctacaataacttaaaattcagcagtaggattttgagggagggtaagtttcaaagattgacttacctaagactatctgcataaataaaaagaaattaatccagacaacaaattcaccaacttccatcaattggaaatccaattctattttctacagtttatgttctggagacactactggayactcttttactctcataactcataactcctccacttttgtttttaaatcatgagagaaaaagagttgactctgttatattgttttatctacctttccttgatcttagaaacgaatactaccataccagcttctactgaggtgccccctaaagttagtccaaataggtctttgcaatctccattcccgcagaatttagaactttgaatcacatgatttatttctaaaagtaaatccatgcc

SEQ ID NO: 423153 - DNA, 620 bp, Homo sapiens
catactatttatcatttattttctcctactccactaaaatgcaagtttcatgttggcagggatattcaattgttttgtttattgatatattcctagcacctagaacagtatctggaaaagaggtactcagtaaatatttatcaaatgaattgaccaaaagaaggaaaactcaaaactttaatgacaactaactttaaagctacaataacttaaaattcagcagtaggattttgagggagggtaagtttcaaagattgacttacctaagactatctgcataaataaaaagaaattaatccagacaacaaattcaccaacttccatcaattggaaatccaattctattttctacagtttatgttctggagacactactggacactcttttactctcataactcataactcctccacttttgtttttaaatcatgagagaaaaagagttgactctgttatattgttttatctacctttccttgatcttagaaacgaatactaccataccagcttctactgaggtgccccctaaagttagtccaaataggtctttgcaatctccattcccrcagaatttagaactttgaatcacatgatttatttctaaaagtaaatccatgcc

SEQ ID NO: 423154 - DNA, 501 bp, Homo sapiens
catatcacagtgctgcagagattttgtttatggccagttttggggccagtttatggccagatttggaggcctgttcccaacaaaccagaagctaggaatatatatcctgcaaataaaatgaagaatctctaaggcttcagggcctgcccacttgttcttctgcctggttcttcacatacactgtctcaaagstagtctaccttgagaggagcatgaatatgtgtgtgggtgtgtgtctgtgtattttaaccttaaaaacctaacttccagtatagacagatggcatactagctaaacccttacaagttcttctatgctataaaagagaaacagaattgagaaccacctccaactattaagtgttatatttgaatatagccttagctttagcagaataagtaggccaaacttaaaataagcttttctgccttttcaatgataaaggtcccttttctgtagccattgttgattgtgtacacttatacataagtattttgaact

SEQ ID NO: 423155 - DNA, 534 bp, Homo sapiens
acttttaaacctatccattgaatccttagtcttgggtattataattttcagttctagaattttaatttttttaacaaagtttcaattccctgccaaaattctcaaaccatgtctatttccatcatgtatttttatctcyttgaacataataagcattgctgtttttttaattataaaatctgcatctgataattccaacatctagaacccctgctgtatatgcttttatgtttgttcatgttgtccagtctcatgtgtttggtttttggtgttggttttggtttgttgtgtgtatgtgtgtgttttatttgtttttttgtgagttgtttttgtttgtgtgtgtgtgtgtgtgtgtgtgtgtgtgtgtgttctggacattgcaggtgcaaagttgtttgtagaaattatctgacaccaggatgacatcttcttccagagaggatttgcaagaccctgagggcactagcaacattggatcgccttaatccaatttcaggaattgagatgagtctaagcagagcggcagtcactgta

SEQ ID NO: 423156 - DNA, 549 bp, Homo sapiens
aagtatgaattacaaaattagaggaagaaaagacatgcagctgctggtacagattcgaatttcagttaagcatttgagtccagtatcatacaatttttgtcaaaaacaagatttctcagccactgagaaagaaaatgaaagaccatgagaagaggccaagaaaggcaatgagaggcccgagcaaggacactgaggaggctgcgcacggggaggttggagcggaacggccttgggctcccacctgcacagtaggatctcacccccggattgaccccggccctggccctcctccacactcttgacacaggaggaggcacgcctccagtgaattctgcctcacggtggctgctgccctcctaagtgcaaggctgggcttgagaatttcaggggagaaactcagtagtgagtgcttctcctcagctgcagcagctggtacttagtggctcttaatttccctgctttctgtgctacttcccaaaggcacacagaaagcggactggacatctgtgccagagrtgactagcttcaggagtgccgatggtggcaagg

SEQ ID NO: 423157 - DNA, 540 bp, Homo sapiens
tatctaacaaaaaaatcctgctgggattttgattggtattgtgttaaatctatagtccactttgggaaattgacatctttatgttgaatcttctgtccataaatatggtatacctttccatttgtttaggtcttcattatttattgcaacagcattttgtagttttcagcatacagatcctgcacatcacactcgtctcctccactagactaccagccccatgaggcagggaccatgtctgtattacataccactgcrtttactgagcttccagagggcctgcctggcatgcagttggtcctcactaaatatctctgagtgaataacagcacttttgcatttgtcatctaatttaatctacccacaatcaggttagagattacacttcttacttcatggaggagaaaactgaggcttggaaaggaggtatagtgaacatatctagaatgttcctcaagattctcgcctcctggtgtacatgccctataaaattccctcccttgagtgtggaaaaaggacctatgaatacgatgagatatc

SEQ ID NO: 423158 - DNA, 533 bp, Homo sapiens
ggtaattcaggcaaacactttatcagacaggctgcgcaagatagggggagactgggaccctacaacttgaggctgttgattctagagtcagatctctttgctatggctgtgcaaaccccaccttggattgcasggcagggttctcctgggtggcagatgcctcctgccgggccagattggctcgtggctctggggacctggtgaaaggcacagcccacttctgacttcctttgtagccctcttcacaatctgaagtcacgttgtggattcctgcctgtccttgtttattgcctgtctccacctcactagactgtaagctcccggaaggcaaggctgagtttctttccccaggtttccaacactgccccagccctgattggctgtttataaatatttgttgaacaaatttataaagttctggtacataaaagctccccctgtccctctctgttttgaggttggaagttgagagcttccaccaaattctcagatggacccgccccaaggggagagattcgaacaaacctcgacct

SEQ ID NO: 423159 - DNA, 530 bp, Homo sapiens
ttgaagctctcacatacatggtcaaataatcttcactaagggtaccaagactacacaatggagagagaataatttcttcaacccatggcatttagtaaattgaatatccacatgtagcagatccttaacttacaccatacaaaacaattaattcaaaatggattaaagacctaaacatgrgagtgaaaactgtaaaacccctagaagaaaatgtaggtagaaagttttatgatgttggatttggcagcgatttcttggatataacaccaaaagtacaggcgacaagagcaaatatagacaaatgagactatatctaacttaaaactaatgtgtttcaaagggaacagaattaaaagacaacctgtggaatgggagaaaatatttacaaacctctcttgtagggttactatctggaatacataaagaatgcctaccactcaacaataacaaaacaaataacctgattttttttttttttttaaaaagggctgaaatagacatttgtccaaagaagataaacaaatggtgag

SEQ ID NO: 423160 - DNA, 594 bp, Homo sapiens
tcctgcctgtccccaggctggaggtcagaaatggcaaagctgccaccattaactctgttgaggttctacttcagggctttttttcactgaggtggacacctggaaagcctccactacaggcccatagccaggcaagggaatggaagctgcccgagggctccagctgctcactgagttaacatgtgggaggtggaccacagcaactatgtggggaaaccctgtctgcacactgaatcccagcagaatctagcagagccaagagctgagtaacacagagccccaaggacatcatgtgagaccctggatccagcctcacctgaggatgtttcagagcagagttctctaaggcacaagctacaagtgagcatggctgtaacaggcccaagggggcaccagaactggggagaggggcttggtgcctcaaatattgactgctttgggaacggcaggagtgcttgagcggtggacaccggcagcagcagygaggcccctctagaagcctaagaagggcgctggagcagaaggggacacacagcaggggattggttatctattgctgcataacacccaccccaaaacttagctgcttaaaca

SEQ ID NO: 423161 - DNA, 609 bp, Homo sapiens
atataaaacaagtgggataaattgaaaatatacaacgagatgataaatctatacccaaacatatcagtaacttctgttgaaactaatcgagaaaagagagaatgtacaaataacccaggtcaggaattaaaaaatattaatcactgcagatctgcagacattctcctgaatgctccaagagcctgcattattaaccccatactaataattcaccaaacattggataattgttacgtgtcaggcactgtgctaggcactgaaaatattgagtaaatwcctgctcctggggagcttatgggctaatggaagtgacagttacaaacaaaatgttacatcattaacaagagctttaatagaagaacgtataccatgatgtggcaatacagaggaggggcctagggagctgtgtgaggcttcaggaagacatctcattttagctaacgtgtgaggactgagttggaatttgatagacagtgagggagtgtgtttaatgggatgctggaagggagactaactcaagggatggtctgtcttatccagggaatgccaaggagctgggtgtggcaagagcatggagtgtgcgtttggaggggcaggtggctgggggca

SEQ ID NO: 423162 - DNA, 609 bp, Homo sapiens
atataaaacaagtgggataaattgaaaatatacaacgagatgataaatctatacccaaacatatcagtaacttctgttgaaactaatcgagaaaagagagaatgtacaaataacccaggtcaggaattaaaaaatattaatcactgcagatctgcagacattctcctgaatgctccaagagcctgcattattaaccccatactaataattcaccaaacattggataattgttacgtgtcaggcactgtgctaggcactgaaaatattgagtaaatacctgctcctggggagcttatgggctaatggaagtgacagttacaaacaaaatgttacatcattaacaagagctttaatagaagaacgtataccatgatgtggcaatacagaggaggggcctagggagctgtgtgaggcttcaggaagacatctcattttagctaacgtgtgaggactgagttggaatttgatagacagtragggagtgtgtttaatgggatgctggaagggagactaactcaagggatggtctgtcttatccagggaatgccaaggagctgggtgtggcaagagcatggagtgtgcgtttggaggggcaggtggctgggggca

SEQ ID NO: 423163 - DNA, 514 bp, Homo sapiens
aaaaaaggaaaggaatgtgctcactgaagcctactgtgtataagtgacccttgctaattacacagaaggtatcttcatggtggaccttgcctccttatctatgcttgcagtctgatctttcaggctgttccttttttagacaaaaggaatcctacagaggacttatcctagctatctgcctaactggttcctttctttctttttcctcattatggcatttataaccagtcttaaacaagatgaaatccacattttctccttttttcatgttttctttctaccctccttctccaagatgactcaaaatctatgccatggtctttarcaggcaacagtaatgtaggtctggactgtatttttgcttggtgattttgcttgattctgtagcgatgaagattctaaactttgtgaaaggagggccagtgtggtgataactttatgtgtcatattgacactttggacattgttaaatgtacagcatatgagaaacttgggtttgtattaattcagcctt

SEQ ID NO: 423164 - DNA, 609 bp, Homo sapiens
taacttactaaagtaagtttaaaactttcttgctggggatttaatcataagaggtggcttatcttgttcaaatatgggcatkaccatgcttatattgattcctacagttttagttcagacttattttcctgagcttcagggccatatatctagtgcttgtttatatttcctcttgggtatcctataatcatctccaccccatgtcatcatcacaatctgcttttcctcctgtgtaccactatcttccacctgccaagtcggaaacctgggaattactccagattcctctttttctttcatctctcacatccaatttctcttaagtctgtctacttcttagtaggctttccagtacattagctacaaatcttcctgactctggtgtttgccatccagtaattcttcatattaagactaagtgatttttaaaaggttcaagtctaattttgtaactcaccatgtaaaattttccccatggcctcaggacaaagatagcactcaagtatactttaatagggctatttatctccttagcacttgactcattttctttgaatgtttccatgcctttaatgtttcaggctcttcttgcatgctgttccccagcaa

SEQ ID NO: 423165 - DNA, 544 bp, Homo sapiens
gccatatatctagtgcttgtttatatttcctcttgggyatcctataatcatctccaccccatgtcatcatcacaatctgcttttcctcctgtgtaccactatcttccacctgccaagtcggaaacctgggaattactccagattcctctttttctttcatctctcacatccaatttctcttaagtctgtctacttcttagtaggctttccagtacattagctacaaatcttcctgactctggtgtttgccatccagtaattcttcatattaagactaagtgatttttaaaaggttcaagtctaattttgtaactcaccatgtaaaattttccccatggcctcaggacaaagatagcactcaagtatactttaatagggctatttatctccttagcacttgactcattttctttgaatgtttccatgcctttaatgtttcaggctcttcttgcatgctgttccccagcaatcccctcatcttcttctactacttttgacttggctaattagtatgggttctttaggactcagtttagagactcca

SEQ ID NO: 423166 - DNA, 613 bp, Homo sapiens
tttccaagtccatcagggatgggtatccaggaatctgtaaggaatcttagtgtacctgggctttggacaccctctagtgctgaaatagctgtaatgacacaggcttactgaactcaagactcagctgcctttgaattcttagaaggccttctgaaaaaggatgaggataaacaaggccagactatgaagactggaataaatacccaactcttcaatgccaagacatcaatgagcatccaaaagcatccagcacaaaacttcaggaaaatatgacctcaccaaacagactaaataaggggycaatggccaacattggagtggtggaaatatgtgatatctcagataggaaattcaaaatagatgttttgaggaagctcaatgaactttaagaaaacagacagaaaaaattcagaaatttattaaagacatttaacaaagacattgaaataataataataaaaaagaaatagaaatcctgtagctgaaaagtacaactgattaactgaaaaatgcataatcacagtgtctcaacagcagaactgatcaagcagaagaaagaatgagtgatttcaaagacaggctatttgaaaacacaaagtcagaggagaaaaaa

SEQ ID NO: 423167 - DNA, 583 bp, Homo sapiens
tatattaatagtttgtcctctaaaatataatagaaatttcaactttaactcattatgaccttgagtgtgtcattgttattaacttcccgttttaaggctactatccataacctagataaatgattttcagttctgggtctctttctactgttacaaattcaatgcaacatatcaggttaatctctctcacctacgatttgaagaggcagcagagcatagagattaatagggcgagctctggcatcacatggtttggatttaactctaggctccaccatttgcaagctctgagatcgcaggaaaatttcttaatttttctatacctcaatttcctcgtctgttaatatataaacyttataggattgccgtgaaaattaaatgggatactacatatacagtagtattacaaattaatataaataaagtgtctgggacatataacactcaacaaatgccagctctctgcataatctaccaggcaaaggcaatggcatagatggtattaagcgtagtgcatccagaccaccaccaggtggctctgtacttctaaagtacaaaagaagagtgtgtgggaagaatggat

SEQ ID NO: 423168 - DNA, 586 bp, Homo sapiens
ttcacaggtattcagaacggttctataattctgaagcagggtagsttcttttaaagcagagccttgttacttgttaacaataataatacacatttaaacagttaatctagaattatttaccccatagccaaccttaagtaacatactaaaatgtcatttgtgactggtaattattggttataattatttgttaacttgagttagacacccaggaagtctgctgaactttttacctatcagtacccgtttcaaagtcactgatgagtgtttcttctgtttcagatctttggcatgatattcagcatggtcctctgctgtgcgatacgaaactcacgagatgtgatatgaagctacttctacatgaaaattgcaatctaaagctttcataccaaatgtcacaggagctgtctcccagctcatttttaacactgaaatgacattaggatctaaaataatttgctgtcaattgtacatttgcatgagtacgtatgtttggctcattactggtttaccccttgagtgaatgcctgtttatgatgactgagagcatattcatgtgtgatctgcgtgtttctggaatatgctt

SEQ ID NO: 423169 - DNA, 554 bp, Homo sapiens
ttggctattgtgaatagtgctgcaataaatatgaacatgcagacatctctttgatatactgattttctttcttttggatatatacccagcagtaggattgctgagtcatatggtagttttctgaggaacctccaaactgttttgcatagtggctgttgattgtttcctttgttgtgcagaaactttttagcttgatgtaatcctatttgtcaatttttactttggttgtctgagcttaggaggttttaccccgaaaatatttgcccaccccagtttcctgaagcattttcccagtgttttcttctagtagtttcatagtttcaggtcttayatttaagtctttaatacatttgaattttgtgtagggtgagaaataggggtctggtctcattcttctgcatgtagataaccagttttctcagcactatttgttgaagagactgttctttccccagtgtaagttcttggtgcctttgtcaaaagtgagttagctgtaaatacatggatttatttctgggttctctattctgttccattggtctatgtgtttgttt

SEQ ID NO: 423170 - DNA, 572 bp, Homo sapiens
gtctctcatcaagttgcagtcaagatactgtcttaggattgcagtcatttgaagacttaataagggctgaakatctacttccaagatggctcagttacattgttgataagttggttctgactgttggcaggaggtctctgtcctttgccatttggactgctccacagttgctgtcatttgagtgtttttgtgacttgatggctgacttccctcatagcaagtgattcaactgagcaagatgagagtggaatgtcttttatgacagctttaggaatcacataacttcaattctgctccaatctgaagatcacacagacatatcaaatcctggtattacacaatgggtgggtattacacaatgacacaagtacgaggaattgaggatcattggtaccatcttggaggttggctaccattgttaccatcttggaggttggctaccatggtttctattgctgtgtctttaagtgtactgatattttcttctgaacaatccactctgtttttcagttcattcagtgacttttcttttttcattttggatactgtatttttaatctctagaagttcca

SEQ ID NO: 423171 - DNA, 572 bp, Homo sapiens
gtctctcatcaagttgcagtcaagatactgtcttaggattgcagtcatttgaagacttaataagggctgaagatctacttccaagatggctcagttacattgttgataagttggttctgactgttggcaggaggtctctgtcctttgccatttggactgctccacagttgctgtcatttgagtgtttttgtgacttgatggctgacttccctcatagcaagtgattcaactgagcaagatgaragtggaatgtcttttatgacagctttaggaatcacataacttcaattctgctccaatctgaagatcacacagacatatcaaatcctggtattacacaatgggtgggtattacacaatgacacaagtacgaggaattgaggatcattggtaccatcttggaggttggctaccattgttaccatcttggaggttggctaccatggtttctattgctgtgtctttaagtgtactgatattttcttctgaacaatccactctgtttttcagttcattcagtgacttttcttttttcattttggatactgtatttttaatctctagaagttcca

SEQ ID NO: 423172 - DNA, 340 bp, Homo sapiens
acaagtacgaggaattgaggatcattggtaccatcttggaggttggctaccattgttaccatcttggaggttggctaccatggtttctattgctgtgtctttaagtgtactgatattttcttctgaacaatccactctgtttttcagttcattcagtgacttttcttttttcattttggatactgtatttttaatctctagaagttccatttgggtcttttattataccttwtatttctcttttcctcatattcatgttttcatttagattcttaaacgtattaaaaatgtttgtaaaagctctattaaggttcttgtctgtgaatttcattatttctgc

SEQ ID NO: 423173 - DNA, 552 bp, Homo sapiens
gaggaactgccatactgttctccatagtggctgtactactttatattcccaccaatagtgtacgaggcttcccctttctccagatccttgccagcatttgctattctttctccctttgataatagtcattctagctggggtaagatatggaacatgttcccaggcaattccatcactcttttcttaggtttcagagtcttcttttaagctagaaacatcattttagttaacataaaaatgagagagaacctcctaacggcctactgggataaactcayttaaaaatgtggttccccccttttagggactggacgtggtcatcaattttaatggctttctagcagcagatggttttacataatctgctaatgaccatttttttatttgaaatttttttatgtccctacatttatgtcccttcagtatcccctgaatgcatataataatgcaaatatctagaatattgaatgcaacttagtttttgggaagggcaagtgtttcagatttaggatgttttcacattttggaatgtttgcattacactggttgagc

SEQ ID NO: 423174 - DNA, 568 bp, Homo sapiens
taaagtccaaaaaaggtcaactgaaattacaactggtgttaaggggctaactcagaaatctaggaaccccctgatcccacttccaaacccttaggatatccctttaaggtggaaatatgtacagctgggacaaattaaagattattttacacagaacaggtatgtaatttgttctcaaaaagattaacaggcaaaaaaaaaaaaaaggttgacacaattagaagaatacaatcaaggatgacagctccattatgggttagccaggaatattaaataatttttggatgcatggaagaaaatagaggatccacagtgcctcaggcagaaacagaacatgcatctcaatagagcctgcgtgatgaagaacttgttcaatatcaattggatatcattatcaatatgtattgattggatatagttatattggatatgatatcatattggatatakcatatcaatatgatattgatatgatattgatattgatatcattatccctctggataatgttatgacataattattttaggtctactactgaggaagggtaattaaatttcagactttt

SEQ ID NO: 423175 - DNA, 568 bp, Homo sapiens
taaagtccaaaaaaggtcaactgaaattacaactggtgttaaggggctaactcagaaatctaggaaccccctgatcccacttccaaacccttaggatatccctttaaggtggaaatatgtacagctgggacaaattaaagattattttacacagaacaggtatgtaatttgttctcaaaaagattaacaggcaaaaaaaaaaaaaaggttgacacaattagaagaatacaatcaaggatgacagctccattatgggttagccaggaatattaaataatttttggatgcatggaagaaaatagaggatccacagtgcctcaggcagaaacagaacatgcatctcaatagagcctgcgtgatgaagaacttgttcaatatcaattggatatcattatcaatatgtattgattggatatagttatattggatatgatatcatattggatatatcatatcaatatgatattgatatgatattgatattgatatcattatccctctggataatgttatgacataattattttagktctactactgaggaagggtaattaaatttcagactttt

SEQ ID NO: 423176 - DNA, 564 bp, Homo sapiens
aaatgataaaatggtgaaagtgaaaaaaaatagcttaagaacatatcatttcacagagccttctcactatagacacctaccttactttgcattggtgagcagatgctgtggtgacccaaactaaaagctcttggttcattttatacccttcaggataatccctctgatcttcttgtttatacaattgcatttgattyactgctttcttatctgaaaagcatctattgaaaattcatactgaattccaaataaaatgtatttagacaaacaagctcacaatatctttacctggaaactgacattattaaagcatgcattttcctctcttctgtttcaaaataaaattaccttttaaatatattctttattaatatttatttattaatattaataaaagatagatacagaatgggaaaaaccaaattcaaaaaacactctaacatcatctaaataagtcttgggaataaaaatttatttggggcttgagggcttcaagttttacctaaatgttcatgtaaagatatataaaattattcctcatctaaaaattttgtttagaacaaa

SEQ ID NO: 423177 - DNA, 494 bp, Homo sapiens
aaaaattttgtttagaacaaaatgtgtagttcaaaatatttttgggggattttaagatattaagtaaaatttacacatgtgaaagaatgactctgaggaacayggccacatctgacaggatgtcaagctgacctgagataaaattttggccctgccatttacttgccatatgacattggcatgcttgacctcttcagtttctattaaaaggtaatatcacttctctaatgatttgtggtgtgagcattttttcatatgcttattggccatgtatatatcttcttttgaaaagtgtctgtttatgtcttttgcccactttttaacggggttcttcagtttttgcttataaattgtttaagctccttatagattctggatattagacctttgtcagatgcatagtttgcaaatattttctcccattctgtaggttgtgtgtttattatgttgatagtttcttttcctgttacatcaggtaacaaaagtacacgatc

SEQ ID NO: 423178 - DNA, 641 bp, Homo sapiens
attccactcctcagtatttatctaagagaaataataagatatatccatacatgaacttgtacataaacatttatagcatctttatttttaatagccccaaactggaaacaacctgaatgtccatccacaggtgataaacaaatatgtcatatatatgcagtagaatatgtgtcagcagtaaataggaataaactactgacacagcagtgacatgaacatcaataattatgttataatcttaatgttattaagacagaccaaaacagagtacatgccatataattcagtttatataaaataccagaaaatacaaattagtgtaagwcagcagactaatgattgcctggggatgaggaaaggcaaggaaggggaagaaagagggatttccaaggggcacaggaaatatttaggaggtgaaaaatgtgttcattatcttgattgtgatgatggttttacaggatatacatatgttaaaacctaccaaaatatatgcagggttaggggttgaattatgtacccccaaaattcaaatgttgaagttctaacctgtagtatatcagaatgtgaacttatttggaaataagttcattacaaatgaaattaattaatatgaaataatactggagtaaagtaggccacta

SEQ ID NO: 423179 - DNA, 641 bp, Homo sapiens
attccactcctcagtatttatctaagagaaataataagatatatccatacatgaacttgtacataaacatttatagcatctttatttttaatagccccaaactggaaacaacctgaatgtccatccacaggtgataaacaaatatgtcatatatatgcagtagaatatgtgtcagcagtaaataggaataaactactgacacagcagtgacatgaacatcaataattatgttataatcttaatgttattaagacagaccaaaacagagtacatgccatataattcagtttatataaaataccagaaaatacaaattagtgtaagacagcagactaatgattgcctggggatgaggaaaggcaaggaaggggaagaaagagggatttccaaggggcacaggaaatatttaggaggtgaaaaatgtgttcattatcttgattgtgatgatggttttacaggatatacatrtgttaaaacctaccaaaatatatgcagggttaggggttgaattatgtacccccaaaattcaaatgttgaagttctaacctgtagtatatcagaatgtgaacttatttggaaataagttcattacaaatgaaattaattaatatgaaataatactggagtaaagtaggccacta

SEQ ID NO: 423180 - DNA, 641 bp, Homo sapiens
attccactcctcagtatttatctaagagaaataataagatatatccatacatgaacttgtacataaacatttatagcatctttatttttaatagccccaaactggaaacaacctgaatgtccatccacaggtgataaacaaatatgtcatatatatgcagtagaatatgtgtcagcagtaaataggaataaactactgacacagcagtgacatgaacatcaataattatgttataatcttaatgttattaagacagaccaaaacagagtacatgccatataattcagtttatataaaataccagaaaatacaaattagtgtaagacagcagactaatgattgcctggggatgaggaaaggcaaggaaggggaagaaagagggatttccaaggggcacaggaaatatttaggaggtgaaaaatgtgttcattatcttgattgtgatgatggttttacaggatatacatatgttaaaacctaccaaaatatatgcagggttaggggttgaattatgtacccycaaaattcaaatgttgaagttctaacctgtagtatatcagaatgtgaacttatttggaaataagttcattacaaatgaaattaattaatatgaaataatactggagtaaagtaggccacta

SEQ ID NO: 423181 - DNA, 553 bp, Homo sapiens
ttcatacagaagcaaaagttggactttgatgttaatcctttaaaatacacttattgagcaactactatgagtcagaagccaaggtttcagagatgaggaaagtccagtccttcttctggggctcaaggagacgctaatccccactgggtggcccaggagggaatccaaccctgcaggtgggaagtcaatccagaggcagcccaccagaatgcacatgagaaattgccagaaagcaccattttttgagtcctccctccctttttttttttttgacaaggtctcactctgtcacccaggctggagtacagtggtgccatcacagctcactgcagcctcaacttcccgggctctagcgatccaccacctcagccctccaagtagctgggaatacaggcacacaccatcacactagctaatttttgtattttttgtagagatggggttttaccatgttgcctaagctagtctcgaactcctggactcaagtgatctgcycacctcagcctctcaaagtactaggattacaagtatgagccaccgtgcccagcctcat

SEQ ID NO: 423182 - DNA, 519 bp, Homo sapiens
gggacactcggggccaatgacagtttggcacattggtcagccgactgaaagctgtgatttggctcctgccttcctgactcactcygcccccaccaggcttcactcgggctaactgcggttctcagaactcccttggaggccttgttctctccagctctgtgcttttgcgcatgctgtcttcctggactgatcttttccgcctgggctccgtcttctagaccagatcaggcccctctccttagcaatgccttttctggttaaggcagtcaggccaggcacacctgtctagcacccagcccttctctcctcaccctatttgcttacagatctgtctccaacaccagagactgtggttctgggcctggctgtctcctcattgttgagtccctggggcttgctactatgtctggcctataataggcactcaaagttttgctgaatttatgcataagctctccgaattttgctttcttgtctcccccatactgtctgccaccacatattgtagacacttagtca

SEQ ID NO: 423183 - DNA, 519 bp, Homo sapiens
gggacactcggggccaatgacagtttggcacattggtcagccgactgaaagctgtgatttggctcctgccttcctgactcactctgcccccaccaggcttcactcgggctaactgcggttctcagaactcccttggaggccttgttctctccagcyctgtgcttttgcgcatgctgtcttcctggactgatcttttccgcctgggctccgtcttctagaccagatcaggcccctctccttagcaatgccttttctggttaaggcagtcaggccaggcacacctgtctagcacccagcccttctctcctcaccctatttgcttacagatctgtctccaacaccagagactgtggttctgggcctggctgtctcctcattgttgagtccctggggcttgctactatgtctggcctataataggcactcaaagttttgctgaatttatgcataagctctccgaattttgctttcttgtctcccccatactgtctgccaccacatattgtagacacttagtca

SEQ ID NO: 423184 - DNA, 529 bp, Homo sapiens
gggctatgggccctgtgcaaatctgaaacccagagggcagttattaaatcttaagccttcaaaataatctccttggaccacacatctcatatccagggcacactggtacaaggggtggtctcccaaagccttgggcagctctgtggctttccaggacctgtgactgctctcatgggctggtgctgagtaccttcagcttttccaggtgatgggtgcaagctgttgccatatctaccgttctgrggtctggaggacaatggccctcttctcacagctccactaggcactgccccagtggggattctgtgtgggggttttaaccccacattttccctctgcaatgccctaatagaggttctccatgagggctccatccctgcattaggcttttgcctggatatccaggcttttccgtacatcctctgaaatctaggtggaggctcccaagcctcaagtcttgtactctgcatactcacagtctttaataccatgtggaaactgccaaaacttatggcttgtaccctccaga

SEQ ID NO: 423185 - DNA, 551 bp, Homo sapiens
tgtctgcttagggtcttatagacctgggtctcctctgaatcctggttccttgctgctagaccatggcatgtcccatagtcttatacctgcagctgttgtctcagaagcaagaagtacagggagtgagcactggtcttcagtcagtaggcctgactttctgtggcactatgcttggcctatggttggttactgattgtrtgagtaaacgagtgaccttgggcaagtgactttacctttctgtgctttggtttcctcatctgcacaatgcaagtgttgagttggataacctctgacatctaagccccatccagttccagttttaagtatctatattttctgattaaatccaaacttcctaggacctgccaaagaagctgttcctttcttcccagttcactcatcctggtttcccagcacagactctctgacatgacctttcctgatacctaccttgccttagtggagtgagtggagtgcagggtgtgccagcccaaggcctgctttgccttgcatctccacatagtgcccaggctgggttgcccaaacaaaac

SEQ ID NO: 423186 - DNA, 575 bp, Homo sapiens
ggctctgcaaactccaaaatgctgcagaaagaccagacgcagtcccttctacgggggacggaatcgcaacctgacaggtgtggctggactctgtagactgtgaagtgctttgataactgtgaccaacatttcttgagcaccrgctaaatgccagccattgtgacgttttatgtttagcataaataaatgtggacacaggtctctctgactccagagtccgaattcttacctatgagaatgtgcccctgcccacattaccactaaatgttagctcatggctcaggacactctgctgtgaccacctgctgtttagaaagaaatgagctgaggtcagactcagtgactgtagggtgtggagtatcagggcaacatctaaatgggtgtcggactccctggcctctgggccaaaaaagtgtggggagacaagtgaggttggggccagcttgaggttcaagcccaagggttaacatcaaaaaaaagttgggccctccactcataagcttagaaaacgcccatacccagctacaggctctgatgttcctccagtaccgttggttgtcagagtagctggtttc

SEQ ID NO: 423187 - DNA, 579 bp, Homo sapiens
tatggatgtggcattacatctagttcaaagtcccatcaaatgaatatactacaggaagaaagggtttcatttgagaaaattcaagctaccacatacttagtttgctgyttaaccttttttatgtatctttttttttttttaccatgaaaaagaaaatagcttttaaagattacctttccctcagaaacgatctgaatgcgtgtaatttaagcttgtgttgaacatgtgaaatgttaacatttcatcactgttataatcctgccctcctgtctttctccagtgcaggagacttcctccttgctcagcttcatgggtcatttctttttacagcccaagggcttgactttccaccccctcgagagaaatgaactcaggtgaggtcaggcagccgggagattccaattcatggctcctaggactttccatatgcggatcatcatagctaccatcgcctgaggtcctactgtgcaccagcactgtgtcaggtgccttttaattcatcgtctctaaccctcccgcttccacgctgattctgtgcgctgtcacccactgtcgggatgattgccagagatgccggat

SEQ ID NO: 423188 - DNA, 592 bp, Homo sapiens
gggtttgtgataaaggattaattttcttaattgctatattttgcaagaatcgatattattatctttaaagcaaaactaggaatgcttctgttctcaagatatcaggctatcaggacactcctgtcttggtctgtttagtaaacaatatcaattttttctcttaactgtaaacatctagaggctaggactacctaactttctgggaatgcagccaagcaaatcccagcctcatttttcctatccttcactcaagacggagtcgctgtggttcgaacgcctctaacacgctgacacatcagcacttaaaagcagagaaaattttatttaatttggccaaagcatgagggcaggagaggcaactcttcaatctgacctatctttgaaartaactgggggcttctgtgagtaaggtaggtttgcaggaggtgagatctccgatgatcaaagttgcttgcgtccctcattccatcaaacttctggctgccatcaaggaggtctgtatgacctaaagatcattgttctttgaaagaaaaacaatttcattaatcttgcaggcagcccgggggtggtcaggatatgaagttaattatta

SEQ ID NO: 423189 - DNA, 437 bp, Homo sapiens
gagcgtgtggcccagacttggccaccaagatatgaggggaaatctgttggtggagggagtgcttctggaaaatatttttttctgcctcaccctgcaaacttcttctygacttgaaggctgtagcgtgagacatgatgtttggagctgcagcagtcatcttgcaaccatgaggcaacaagctaaggacaaaaagcccacatagccaaggatggtaaagatggaagagggaaagtgcttgggtctttgtcaacatccctgcgcatctgactaagctgcaaccacttctctccagacgtgtggcgatgccagagcattctactttctcatcgcttgagcactgttgttaggttgtctgttacatgttgcccaacgcgtcctaactgagggaagtgcctgctatgtgccaagcacacatctgcctcataggatcatagcca

SEQ ID NO: 423190 - DNA, 437 bp, Homo sapiens
gagcgtgtggcccagacttggccaccaagatatgaggggaaatctgttggtggagggagtgcttctggaaaatatttttttctgcctcaccctgcaaacttcttcttgacttgaaggctgtagcgtgagacatgatgtttggagctgcagcagtcatcttgcaaccatgaggcaacaagctaaggacaaaaagcccacatagccaaggatggtaaagatggaagagggaaagtgcttgggtctttgtcaacatccctgcrcatctgactaagctgcaaccacttctctccagacgtgtggcgatgccagagcattctactttctcatcgcttgagcactgttgttaggttgtctgttacatgttgcccaacgcgtcctaactgagggaagtgcctgctatgtgccaagcacacatctgcctcataggatcatagcca

SEQ ID NO: 423191 - DNA, 593 bp, Homo sapiens
tgcaaccacttctctccagacgtgtggcgatgccagagcattctactttctcatcgcttgagcactgttgttaggttgtctgttacatgttgcccaacgcgtcctaactgagggaagtgcctgctatgtgccaagcacacatctgcctcataggatcatagccatttgtccatacttcatcttcccttttagactctggaatcctaaaggtggagattatgtctgggtcacatcccagtcatcacatggggatgggacagtgtcccatagtgaaacycaatcaccatgactttgacaatatgaaggaaggaaggaaggaaggaaggaaggaaggaaggaaggaaggaaggaaggaaagagcaattaacaaataaatgatcatggtgaatgtggaaatgctttgtaccctgtaaagtactgagcccaaaggcaggctgagactctggcagggggacacagacacgggatagaaggaggtacaggcgtaaggagcagagatcagagaaaaagcggcagctcctcccacccccacttcagcaggggtgagggcgcagttatcctcccagatgctcctcctgctcacacagacttca

SEQ ID NO: 423192 - DNA, 593 bp, Homo sapiens
tgcaaccacttctctccagacgtgtggcgatgccagagcattctactttctcatcgcttgagcactgttgttaggttgtctgttacatgttgcccaacgcgtcctaactgagggaagtgcctgctatgtgccaagcacacatctgcctcataggatcatagccatttgtccatacttcatcttcccttttagactctggaatcctaaaggtggagattatgtctgggtcacatcccagtcatcacatggggatgggacagtgtcccatagtgaaacccaatcaccatgactttgacaatatgaaggaaggaaggaaggaaggaaggaaggaaggaaggaaggaaggaaggaaggaaagagcaattaacaaataaatgatcatggtgaatgtggaaatgctttgtaccctgtaaagtactgagcccaaaggcaggctgagactctggyagggggacacagacacgggatagaaggaggtacaggcgtaaggagcagagatcagagaaaaagcggcagctcctcccacccccacttcagcaggggtgagggcgcagttatcctcccagatgctcctcctgctcacacagacttca

SEQ ID NO: 423193 - DNA, 557 bp, Homo sapiens
gaagaccttgttccaggtctctctccttttctggcaatctggggttcctttgcttggagatgcctcaccctgatctctgctttgatgatcacatggtgctctccctgtgtgcatgtctctctgcaaaatctcttttataggaggacaccagttgatatggtttggatgttttgtcccctccaaatctcatgttaaaatgtgatcttcacactgtagaaggtggaaccaggtgggaggtgattggatcatgggggtggatcmttcataagtggtttagcaccatctccttggtgatgagtgagttcacatgagatctggttgtttagatgtctgatgccttcctcatctctcttgctcccgctctcaccatgtgatatgctggctctcctttgccttccactatgattgtagcttccagaggcctcaccaaaagcagatgctggtgccatgcttcctgtatagcctgcagaaccacaagccaagtaaacctctcttctttatacattacccagcctcaggtattccttttagtaatgcaaaaacagcctaccacaccc

SEQ ID NO: 423194 - DNA, 643 bp, Homo sapiens
tattttaaaaatattcatttgttaaaaaaatgaaataaatagtggaaaatattgttaaaagcagaaataataaaactcgcctygtggagggtttgtaagaattcagtgacacagtcatagatgtatcaggtctgaggggtctcggcgccagctcctggccgctctccccgtggctgcccatgcactccgctctgcaaggccacactgtgcccgccactctaccgtctacacagccacacgctatggtgtacaaaaccttctggaatccatgtcatcccatttgtagctgagagagtcctgcattcatcctgctttatggataagggggactgaggcctggagcagacacagggaacaggagctgaaaaccaggtctgcgtgagggcagagcctcttagccactggccgcagcatctctcagggatactgtgatgtgccacccggacgctcggtccaggaaggaactcgctgccccagtggacagggttgactgtcaccacacagcctttaactgtctccactttaggggctgccccagtggcaaacagcacttctaccactgccacaccctcccagagtaccccgtgctacgattgactgacagaggtggggtatgcgtgccagttggtcaggccccaggcag

SEQ ID NO: 423195 - DNA, 576 bp, Homo sapiens
aaaagcacacaggtcacaattctgcaaacagccattccagtacctcagaacccccccgggccttctcccttggtcactrccctctatgggtaaccactgctgacttctaacagtatagacttcctgtgcctgttctagaacgttgttgttgttgtttgagatggagtctggctctattgcccaggctggagtgcagtggtgcgatttcagctcactgtgacctctgcctcatgggtccaagcgattctcctgcttcagcctcccgactagctgggattacaggtgagtgccaccacgcccggctaatttttttgtatttttagtggagatggggtttcaccacattggccaggctgttcttgaactcctgacctcaagtgatccgccgtcccagccttccaaattgctgggattacaggcgtgagccaccgtgcccggtcttgttctagaactttgaacaagtggactcacaccgtctgtgttcctacatatgcagtccctttgagcagctctatgatcctgagactcatccatgctgttgcattaagttgtacattatttattcttattggttgg

SEQ ID NO: 423196 - DNA, 576 bp, Homo sapiens
aaaagcacacaggtcacaattctgcaaacagccattccagtacctcagaacccccccgggccttctcccttggtcactgccctctatgggtaaccactgctgacttctaacagtatagacttcctgtgcctgttctagaacgttgttgttgttgtttgagatggagtctggctctattgcccaggctggagtgcagtggtgcgatttcagctcactgtgacctctgcctcatgggtccaagcgattctcctgcttcagcctcccgactagctgggattacaggtgagtgccaccacgcccggctaatttttttgtatttttagtggagatggggtttcaccacattggccaggctgttcttgaactcctgacctcaagtgatccgccgtcccagcctyccaaattgctgggattacaggcgtgagccaccgtgcccggtcttgttctagaactttgaacaagtggactcacaccgtctgtgttcctacatatgcagtccctttgagcagctctatgatcctgagactcatccatgctgttgcattaagttgtacattatttattcttattggttgg

SEQ ID NO: 423197 - DNA, 576 bp, Homo sapiens
aaaagcacacaggtcacaattctgcaaacagccattccagtacctcagaacccccccgggccttctcccttggtcactgccctctatgggtaaccactgctgacttctaacagtatagacttcctgtgcctgttctagaacgttgttgttgttgtttgagatggagtctggctctattgcccaggctggagtgcagtggtgcgatttcagctcactgtgacctctgcctcatgggtccaagcgattctcctgcttcagcctcccgactagctgggattacaggtgagtgccaccacgcccggctaatttttttgtatttttagtggagatggggtttcaccacattggccaggctgttcttgaactcctgacctcaagtgatccgccgtcccagccttccaaattgctgggattacaggcgtgagccaccgtgcccggycttgttctagaactttgaacaagtggactcacaccgtctgtgttcctacatatgcagtccctttgagcagctctatgatcctgagactcatccatgctgttgcattaagttgtacattatttattcttattggttgg

SEQ ID NO: 423198 - DNA, 576 bp, Homo sapiens
aaaagcacacaggtcacaattctgcaaacagccattccagtacctcagaacccccccgggccttctcccttggtcactgccctctatgggtaaccactgctgacttctaacagtatagacttcctgtgcctgttctagaacgttgttgttgttgtttgagatggagtctggctctattgcccaggctggagtgcagtggtgcgatttcagctcactgtgacctctgcctcatgggtccaagcgattctcctgcttcagcctcccgactagctgggattacaggtgagtgccaccacgcccggctaatttttttgtatttttagtggagatggggtttcaccacattggccaggctgttcttgaactcctgacctcaagtgatccgccgtcccagccttccaaattgctgggattacaggcgtgagccaccgtgcccggtcttgttctagaactttgaacaagtggactcacaccrtctgtgttcctacatatgcagtccctttgagcagctctatgatcctgagactcatccatgctgttgcattaagttgtacattatttattcttattggttgg

SEQ ID NO: 423199 - DNA, 596 bp, Homo sapiens
gtacttaacatacgcacatatttgagtgtattttttgattcttcattatttgtctgctctgttgttttgaaaatcrtgccctgcatctcttgcgttgataagcttttcaattactgtgactcgtttctcaagtctatcaatatctgctttgatttaatttcttctgtaggacttttcctatctattctcacatagtcactcttccatacaaatttaagacaattgtatgaataagtgtctaccttatttatcctctctctaaggactaagctctgattttttttcttatcttgtccaaattcctatctaaggggtctagggagtcatgccatacaaaccataagttctcctcagatgggttttatttaaccctgtatattgtgacttactttccaatctgactctggtgtaacatgatgtgacaaagaagaaaatcaaaatattttaccccaaaacatgtttcttttccacattttgaaatgaccctgcaaagctgtccttcgtggggaaaatttacatctgtaaagaatctctattaacataggtagagctttttcttccaggccctcccaatcctgaagagattaactaagagt

SEQ ID NO: 423200 - DNA, 596 bp, Homo sapiens
gtacttaacatacgcacatatttgagtgtattttttgattcttcattatttgtctgctctgttgttttgaaaatcgtgccctgcatctcttgcgttgataagcttttcaattactgtgactcrtttctcaagtctatcaatatctgctttgatttaatttcttctgtaggacttttcctatctattctcacatagtcactcttccatacaaatttaagacaattgtatgaataagtgtctaccttatttatcctctctctaaggactaagctctgattttttttcttatcttgtccaaattcctatctaaggggtctagggagtcatgccatacaaaccataagttctcctcagatgggttttatttaaccctgtatattgtgacttactttccaatctgactctggtgtaacatgatgtgacaaagaagaaaatcaaaatattttaccccaaaacatgtttcttttccacattttgaaatgaccctgcaaagctgtccttcgtggggaaaatttacatctgtaaagaatctctattaacataggtagagctttttcttccaggccctcccaatcctgaagagattaactaagagt

SEQ ID NO: 423201 - DNA, 597 bp, Homo sapiens
tggtgagcccacctcaatagcagctttcactcaagatcatacttagctgaaaaaggagcaaccagaaagctttgcaagaatcccttgggtttcttgtttcttctgggtgttctcatagaacatagtttgggggtgggtgtgtagattgcacatgataaaccatgcccaacactcctatatctctaagcctttggattccctctctacaccatcccaggaagctgtagcatctcaaatgtagtcactgttaaatataactttcaagaaaccaaccaaccaagaaaattgctagacctaccttcacttgcagacattaaatctggaatygctggtaagtgcttacatatcaataaatttggcctgatcttggtatattttctccttggtcttatacccatagaatccactcattctctatgttttccaggttttcttcaatatatgccagcaaagtcttgcttttgttgtgtgaactatttcctcccaggtcatagtttgcacctgtctctttggagtatgctgagacttcatcatagctatgggtccagaggcaacagggggtggttgtggtggatcttgaggtgagcaagcatctca

SEQ ID NO: 423202 - DNA, 595 bp, Homo sapiens
cagtttctggataacagggaaccatgtcttcctaccctcattttgttttcatttccacaaattgaaggtaaaggtatttcccttccacttcatgccaagaagtcaatgcttgctgctgcatccccagaagagtgtgacacgtattaggagctcaagaaayatttcctaaataaataaacaatcccaaggcttgtgctctttccactgtgccaacttccttttgcatcttgatccttctcacatggcaacaccttttcaacaccttttctgggtagggaccttccccctcactaaccacccagaggttagactcctcttgggagtcagaagattgtgctgcttgctcaagatccagatggcttgcactgtgcagctcacagtagatctctgtcatgccttccagctgtcaaaatcccagtgggatactctggctggtccacttccagcttctttccctgtctgaccccctttataggctatatgcctgggatctccttgctcatgtcaaagtggggaagacgtggcttctgtggacttgatggtcctactgagaaaagccagatgaaacttcgcttgaaagactagggataagaaa

SEQ ID NO: 423203 - DNA, 579 bp, Homo sapiens
atattggttgttgttcatggtgtctactgggtgtcaatctggtagagagacagagtgtttgcatccctgtctagagaagtgaagagaagagaggggacactgctgagtggagttcagagatagaaccagccaggcttgtgtctcgagcttggccaccaggagctggagaagccactttgaaatgctctgataagtctctatcattcaccatgggctgagaggggccattctttttacttagtatggagaaaaaaaatgaacaaccaagagttatcaamcaatcaactaatataaaagtcttctaaagatctagcagctgctgttggccaggagaattagaaagttagagtgaaaaaaatcacccaaaagaatcttgaggataattatatctttttaaaaaaattaagtagtgagttgtatggttcagaaccagggcactaatgacatttggaagaggtgaggcttagtgcatcataatatgctcatgaaaggcttttggaaagggagggagcttgcattgggttttcaaaaatgggttggatgttttgaaagcctcttggctattcttgagccctatca

SEQ ID NO: 423204 - DNA, 648 bp, Homo sapiens
aggcagctgggctcatttccccttctcctggccagcctcactcttggccatcctctagaaggagggcagctcatctcaaggccagaagctggtctcagcaggtcctgagaatctccaaaattcattttgtctctattttccctgaaatcatcctctctggaacttgttttcttctttagggcatctcagcctaatcttggaaaaagccctttcacaagcagccctgcaagaactacagagaaatattgtggccccagagtcaggaaatcagggtaccttaacctgggagaatctcagctcctctatgggcctcagttttcccttttgtaaaattacaaggttggatagagaatctggaaggtcccttctggcttgaaaacatacaatgcaccatccatctactagcagtcatactctaagtatactacattggtgtcaaacacattatatctagaacacagaagcttgtcgaggtagagcattttacctgtcaatctccccctccccaattcccactatgtttcataggcatttctggtgatasttttagtggttttaaaataggttcacaaaattttgacaccctccctctaatatgtgaagcttaattccccttccaaagttaggtcataaaaggcatcacagctt

SEQ ID NO: 423205 - DNA, 459 bp, Homo sapiens
atatttcttcccttccccagcacacttctggcagtatttcattcatttttatccatgtgtggcccctcctacatgggaagccagttttcayagcttcactgtcttctgacctgcccctcttccttgagccctgggggtggtggtggttttctgtggtcaccttatgatttcttttttgtttgtttgtttgccttaatttaaaaatactttactgctaaaaatgctaagaatcatctcagcctttagcaaggtgtaatctttttgcaggaagaggctcttgccttgatgttgaaggcctgctgatcacaatggtgactgctgaaggttggactggctatggaaatttcttaaaataagacaacaatgaagtttgccacactgatcgattctccctttcatgaaagatttctctgtagcatgcaatgctgtttgatagcattttgcccacagtagaacctg

SEQ ID NO: 423206 - DNA, 600 bp, Homo sapiens
gaagagctcaatctgtgtaaagttcaccgacagctgttaaggatttgaatttagttccgttccaccaaggtctgaggcagtgccccccacaatgggctacatgaatgaataaggagtcagagttcagagaccctcattcaaacacatgttttaaggtgcccattacatgcctgacactatggggataaggaagcaacaggagtggagtccctgtctcaagagttgattggggaagacatcacacgatatcatatttgtttgtttacctgggacagagggaagcacaaaacgttgtgagaattgaggcctgagcttaacctatgatgggcaatcagggaaagcttcttggaggagggaatacctaaactgaggcctcttacagagaggttgaagttagacaaacaagaggagtgaagggtgtcaaggtgtatgtacaagccaggtttaagagagctgggyattcttcagagccttgctcctccaaatgtgcttccaggctggagcggcagctctggcatcccttgggagtttgttaggtttggtccaccccagatctacagaatcaggatcataatcaggtggtttacctgcacatttaaa

SEQ ID NO: 423207 - DNA, 554 bp, Homo sapiens
caatacagtaaaatgatgaaaagctctactacttaccatctgtgtggcctcgacaaatgacttaactactctttgcctcattttccttatttgtataaaataaggatgatgataataactcaaaaggttagtgtgaggattaaatgtgttaacacatgtgaaggcaatcaggctgctagaggattaaagaaagagatgcatacagaatgctcagaactgtgtctggcacctggctctcatgcaatcacggtgagcacttatgagtcttttagaaggctttcctggactcctactttcctttaactcagctaatcagattacggtgttagtgttatgtggcctctgagcaccaaagttcagattcattagatttgggttgggattcagatatgccagtccctttttggcaggcattccaggcratttgagtggttcccacttagttcgtctgggatggtatttctcaattcttcactataagatacgaggctattttctccagaccctgaactctgtgagggcaggagctgcccctgtgttttttttaatcagtg

SEQ ID NO: 423208 - DNA, 554 bp, Homo sapiens
caatacagtaaaatgatgaaaagctctactacttaccatctgtgtggcctcgacaaatgacttaactactctttgcctcattttccttatttgtataaaataaggatgatgataataactcaaaaggttagtgtgaggattaaatgtgttaacacatgtgaaggcaatcaggctgctagaggattaaagaaagagatgcatacagaatgctcagaactgtgtctggcacctggctctcatgcaatcacggtgagcacttatgagtcttttagaaggctttcctggactcctactttcctttaactcagctaatcagattacggtgttagtgttatgtggcctctgagcaccaaagttcagattcattagatttgggttgggattcagatatgccagtccctttttggcaggcattccaggcaatttgagtggttcccacttagttcgtctgggatggtatttctcaattcttcactrtaagatacgaggctattttctccagaccctgaactctgtgagggcaggagctgcccctgtgttttttttaatcagtg

SEQ ID NO: 423209 - DNA, 555 bp, Homo sapiens
gaataactactcagggctctatatggtcttgggaacgcttgaagtagatcattgggtgctcacaagtggtcaaagaggtcagggctcttgtggttaaataaaaatgatagtgataatgaatgcgattagtaatagctaacatatttactacatgcttaggcattgtttcaagtattttatatttacatatactaactgatttaatctttacaataaccttatgaggtcaataccattattatccccatgttatagataaagaaatcgaggcacaaggaggttaaataacttgcccatgctgtagaatttttctactggagcatggagccttaccttgtrtcctaatgttttggtagaaagataccacagggatatgtggtctcttgcccttagactttacctctggttattaaactggccaccaaaattctctttaattagaatgtctataaaatttatcatccaaacagggacacttttgagaatgaaaaagggtattattaatagttatgttgggacattagtcataaatggaataatgatgtgggacaaacc

SEQ ID NO: 423210 - DNA, 647 bp, Homo sapiens
acagtgcctgacatgtgacctaaaaagttaacaaataataataataattattattattactctatcagttcttcattataaactgtggctcgcacgctcagtggacatcttctgtgcttttccgagactaaccactatttctttagagcagattcctagaagtgtaaagactggattaggaccagagacatttttgacattggtgactccagatttgtgtttggaaggtgaccatgcaacagctgaacaggcggagtgtaagctctgtagccagtatcaacrtaggtaaatcccatgaatgttttcaatgccatatagagccttgtgcttccaagatgcacctacggcataagcagtcaccatgatccttgcccctgaattacggtgagcagtgcagaatgatggacaagcacccttttacctgtctgtctctttaggaagatcagtggctcacgtctggtgtctcaatggctaaacagtcaaatttttcttccaaacatattctattttgttgacacaatgtgaaaaattgaatctgaatgtcattgattggggcatgggatctcccttctccataggctcctggctcttctatattttcttctatgatggctttctgtgaagaagttgtccactaagcccccgtg

SEQ ID NO: 423211 - DNA, 627 bp, Homo sapiens
gaggatgctggcagcaccaaagaaaagaggaaagcaggctgagtccccaggacccaggcaggaaagtgtagagggcctcaggagaattagaggcttgagaacatgagaaagtccctgctattctctcggatgacatttgagctgttgaaatgtgctacattgaaaagaaccattctcatctgacccatctagaggctggggaaaaggagctcagctcagctcagttcttttctcagcacagcaggtctggttttcagtgagtttccagcttcagagaaaacagtgcctctaagcaaaggtgctaactttacgagtcttggacaaggagttgctttcattttctgttgggtgtcagaatatgtgtcctctgtgagatatgcaggagaccttcaggtttgcatcttctgaagcagaagactgtgtttacggagcagttaaaacctggagtgactgtgtattgtgactgtccaaagtgtccattttaaatgctcgtgtgctcatttcttagaagagctatttcacacagagattaaagaaaaaagcacktacttcagagtccatccgatttcagctattttacttacttcttctctgtgggtcttgactgtagtgtctgaaaaatgaggc

SEQ ID NO: 423212 - DNA, 627 bp, Homo sapiens
gaggatgctggcagcaccaaagaaaagaggaaagcaggctgagtccccaggacccaggcaggaaagtgtagagggcctcaggagaattagaggcttgagaacatgagaaagtccctgctattctctcggatgacatttgagctgttgaaatgtgctacattgaaaagaaccattctcatctgacccatctagaggctggggaaaaggagctcagctcagctcagttcttttctcagcacagcaggtctggttttcagtgagtttccagcttcagagaaaacagtgcctctaagcaaaggtgctaactttacgagtcttggacaaggagttgctttcattttctgttgggtgtcagaatatgtgtcctctgtgagatatgcaggagaccttcaggtttgcatcttctgaagcagaagactgtgtttacggagcagttaaaacctggagtgactgtgtattgtgactgtccaaagtgtccattttaaatgctcgtgtgctcatttcttagaagagctatttcacacagagattaaagaaaaaagcactwacttcagagtccatccgatttcagctattttacttacttcttctctgtgggtcttgactgtagtgtctgaaaaatgaggc

SEQ ID NO: 423213 - DNA, 619 bp, Homo sapiens
tatatgtttatatttgtgttcacagaaacatgtgttcatatattaagtcatgtaagctgttttgcaccaagctgggatgaaaaatggggaggtgatattaatagtcataatttatatttaactggcttttatctctatgtggaattataggtctcatgtccttctcctcttacaaagtcctgctgagttatttctgggaagttctaagagatttctcagatgaactcaggagctacttgtctatctccttcacttycacagctgtggcccttacagtggtgtctactctgaggcctccatgtctctgaatgtgctttccctttgtggcctggcccaccatgaaaactttttctactgggtattgtcatatcttacagctgccaggcactcttgcttctcctagtacctggagccttcctccaggtatagaaacatgattgtgctttttggatcctgtagggcaccaaagccaggctgggatcactgtagaggtgggagtctcagcctccgttggcttgtaatttgcggcacaggtctgctttttgtcttatgtagcaatgttttcagagctcttcatagaaaacagttgtggtgaataggcttgggggagggctgcccc

SEQ ID NO: 423214 - DNA, 633 bp, Homo sapiens
ctagatcaaggaaggcaaacagacttgtttcttgtgccaactctgacccattggtaacagctgcccaactgctgtgtcgagaaggatcctgaagttaagtcagatctaggagaaacaggtttgtgactaattagccaagtttgccaaggacatgggagttagrgagatgaggggtgtggtggctcatgtgctatatattatatttgagttgttcctgccagataattgaaacaaaaacaaaaacacatgttctccagtgcttatttgtattcaggaaacccagccttgcttttagtcaataccagctagagtcaattctaaattatataaaatggagtcatttgaaggacatggagtcctctcctcatcacagctcctacaatgtaaacctctccaatcacttgggacaatgactgacattctcaccttctttagggtagggcatctaaggccctggcagatgaagatgctacgaaagaagaggaatcaactcatcattaaggcatcatgagtcaaaggcgtcagctacatgcaaggcccagctcttaggaggggaagagcatacacagctcagtaagaaattgcaatagtgaaaactattggttagaaaactatcttttctatccaagtagc

SEQ ID NO: 423215 - DNA, 600 bp, Homo sapiens
gatttattgccttttttcagttttaaatgctaccttgcagaaccttgctgataaatgatagcttattatttttcagagtgcttgggcttatgaagattttgagagaaggaaggggttaactctttccaggctggaccatttcccttcatcagacgtgcacacttctggttgtttttatttttaattgctgaagtgacatgccaaaatcctgtcttggctccttgtacctcaacgatacagcacaaacttctcagtgtggcattcaagacctgcctctgacttccctttctagctcccattattttcttttccacacgctctgctcctgagtcctaaatgatctggcccatgtctaccctaccagcctcattttgtgtccgtctgccacccctgccttcttctagccctttgaacatccaaactccttcctgycttggggactttgcacatactgttccctctgcctggaactctcttctctccatccttcctttggctaagcatcttccttgtttcagcatgaataccatttcttgacccctaatatttattagatactcctgtcatggcgccaagaactttctccttctagcactttcc

SEQ ID NO: 423216 - DNA, 598 bp, Homo sapiens
cagagagaaaagaaggtagcttttgttgagggcctactccgtgaggaacaaagcacatgcctggagcaaatactttctcttttaattcttccaacaatcctgagaaataggtgttatgacccccgtttttatagatgagaaaatgaggcttagggtagctagaaaatgtgtccagctagtggctggcagaaccttggtctgtttattcccactcctgctgttgcaactttccctggccttttgctttacatagcacccagagtacagtgattctttggtatatgtgctgttgctctagtagaccgtcagttcatatagtgctcagtcggcactgaggatttcttttattaggtactcaatacatgtctgccaattggcccagtagcttctaaaatstacaattaacccatcagtcactagagggcattatagatttataatgtggagtgaaattaagagttacagatgatttcattcacccagctattgtttccttccttccttctttccttcctcccacccatcaatcattcacttattgacaaaaaaaattgctaaatgctttacatgtactaggcttgggacactgagtgaaaaa

SEQ ID NO: 423217 - DNA, 531 bp, Homo sapiens
gagtttgagatcagcctgggaaacttggcaaaatctcatctctactaaaaacacacacacacacacaaaattaattgggcatcgtagtgcatgcttatagtcccagctacctgggaggctgaggtgggaggatcacctgaacctaggaggtcgaggctgcagtgagctgtgatcacgtcactgcagtccagcctgggcaacagagtgagaccttgtctcagaaaaaaataaaaaataaaactactaattcccttayccccagcccctggtaactagtattctgtcttttgtctctgtgaatctgacaattctaggtacctcacataagtggaatcatgtgtttttccttttgcatctggcttatttcacttagtataatgttttcaaggttcatcatattgtaacatgtatcaaattttcattccttttttatttttatttatttatattttaatttttatttttgagatagagtcttgctctgtcacgaagctggagtgcaatggtgtgatcttggctcaccacaactgc

SEQ ID NO: 423218 - DNA, 567 bp, Homo sapiens
ataaagtagctttaataagtgaaatagctacaacaataaaccttccttcacatgaagtgaaaaaawttttttttaatttttctatttgaggaagtgaaatacatttacactaagacagagtaagcaaaagaaaaagtgcaagcaatagcctgcagaaaataaaatgtaacattctgtagctccaattacagaactgctaatacaaaagaaatggccgggcgtggtcgctcaggcctgtaatcccagcacttgggaggccgaggcaggtggatcacctgaggtcaggagttcgagaccagcctggccaacatggtgaaaccccgtctctactaaaaaatacaaaattagccgagcatggtggtgggtgcctgtaatcccaactacttgggaggctgaggcatgagaattgcttgaacccaggaggtggaggttgcagtgagctgagatcgcaccattggactccagcctgggcgacaagagcaaaactcttcaaaaaataaaaaaaaagaaataaataaattagacacaacaaatataaatactttatagctcttatattcaatgctt

SEQ ID NO: 423219 - DNA, 582 bp, Homo sapiens
agcacctaaatgtcataatcataagtgttcttacaagaaggagagagcaagagattatactacacagaggagcaggccatgtgatgctggcagcagcaattggagtgatgcacctgggagaggaggaaggggtcacaagccaaggaacatgggagccattagaagctaaaaacatcaaggaaacggattttctgttggaggctccagaaggaatcggcactgccaataccttgatttaggtccagtgaaactgattttggacttctgacctcaagaattataaaagaggcccaggcgggtagatcacttgaggtcaggagttcgagaccagcctggccaatwtggtgaaaccccgtctctactaaaaatacaaaaattaaccaggcatggtggcaagcacctgttaatccttgctactcaggaggctgaggcaagagaatcacttgaacccaggaggcagaagttgcagtgagccaagattgcgccactgcactccagcctgggtgacagagcaagattccatttttttttttaaataaagatgaaaacagatactgatacacagtttcctttcctttaata

SEQ ID NO: 423220 - DNA, 499 bp, Homo sapiens
atcaagcactctctcagaaccatggtagaataaaactggaaatcaactccaaaaagaaccttcmaaaccatgcaaatacatggaaattaaataacctgctcctgaaagagcactgggtcaaaaacaaaatcaagatggaaattaaacaattctccgaactgaatgacaatagtgacacagcctatgataacctctaggatacagcaaaggcggtgctaagaggaaagttcatagccataaacgcccatatcaaaaagtgtgaaagagcataaacagacaatctaaggttacacctcaaggaaccagacaaacaagaacaaacaaaacccaaacccagcagaagaaaggaaataaccaagatcagagcagaactaaatgaaattcaaaaccaaaaaaatacaaaagataaatgaaacaaaaagctggttctttgaaaagataaataaaaaggaaagaccattagcaagattaaacaagaaaagaagagagaaaatccaaa

SEQ ID NO: 423221 - DNA, 606 bp, Homo sapiens
attccttcctcaagcagaggacaacaaacttgtgttccttctcttatgttcaggtgtataatggcccctgctttggctagaatctctctgcaacaaaggagtgggtctttcaggcataattagaaagccatgtgaaaagagtaaacttcctcttttctaagaaactaggaaagagcaaagtaaatctaaataatacaaaaagaatgaagagtagagcagacataaatagaatagaggacagaaaaaaatagataaaggtcaatgaaaccaaaagtttttgaaaaaaaaatcaacaaatttgacaaaacgttagctgcaatgaccaagaaagaaaaagatataggactcaaatcactaatatcaggaataartgaggggacattactaatgacctaggaaattaaagataattatagggaataccgtgaacaactgcctaccaacaagttacataatttagatgcgatagacaagttcttagaagacgcaaattactgaaagtgactcaagaagcagaaaagctgaatagaacaataacaactaaagagattgaattcatatttaaaaaaaaacttttttactaaaaattccatacccagatgccct

SEQ ID NO: 423222 - DNA, 632 bp, Homo sapiens
atctgaataaaatcagggatgtgttacaaagtagaaatggagataaagggtgttaggtccccattaaactatgtccactaccataatgtttaaaatatgcatgtgtttctctattcctcacccccaaccagagacttcaaggtcacctatcagaggcatctgtaaccatttttctaatgaaaatttgaatacagggtgaaaaatagagaattattacattaatcccaaagtagctgtccatctgcaaaaaaartaagcttattctgttaagatgtagaaaattagaaggggaacttagagtaagatgaaaattctaaggagtcctggctcaatataaggagaacttacaaagaaatggagcagactataatcaaaacagtctgttttacatgttagtgagctcccagacatatctaaggactcactgaatgacccttaggcttggagactacagaggagatttatctgttaggtaggacgttagaagaaaagactgcaaaggtcacttccaactctactatgttataattctatgatggatctgtgattcaactcaaaataaattgacaaacacctctcagtaaactaatgaaggcatattttgagagacatagtctgtcaatgagatagat

SEQ ID NO: 423223 - DNA, 632 bp, Homo sapiens
atctgaataaaatcagggatgtgttacaaagtagaaatggagataaagggtgttaggtccccattaaactatgtccactaccataatgtttaaaatatgcatgtgtttctctattcctcacccccaaccagagacttcaaggtcacctatcagaggcatctgtaaccatttttctaatgaaaatttgaatacagggtgaaaaatagagaattattacattaatcccaaagtagctgtccatctgcaaaaaaagtaagcttattctgttaagatgtagaaaattagaaggggaacttagagtaagatgaaaattctaaggagtcctggctcaatataaggagaacttacaaagaaatggagcagactataatcaaaacagyctgttttacatgttagtgagctcccagacatatctaaggactcactgaatgacccttaggcttggagactacagaggagatttatctgttaggtaggacgttagaagaaaagactgcaaaggtcacttccaactctactatgttataattctatgatggatctgtgattcaactcaaaataaattgacaaacacctctcagtaaactaatgaaggcatattttgagagacatagtctgtcaatgagatagat

SEQ ID NO: 423224 - DNA, 632 bp, Homo sapiens
atctgaataaaatcagggatgtgttacaaagtagaaatggagataaagggtgttaggtccccattaaactatgtccactaccataatgtttaaaatatgcatgtgtttctctattcctcacccccaaccagagacttcaaggtcacctatcagaggcatctgtaaccatttttctaatgaaaatttgaatacagggtgaaaaatagagaattattacattaatcccaaagtagctgtccatctgcaaaaaaagtaagcttattctgttaagatgtagaaaattagaaggggaacttagagtaagatgaaaattctaaggagtcctggctcaatataaggagaacttacaaagaaatggagcagactataatcaaaacagtctgttttacatgttagtgagctcccagacatatctaaggactcactgaatgacccttaggcttggagactacagaggagatttatctgttaggtaggasgttagaagaaaagactgcaaaggtcacttccaactctactatgttataattctatgatggatctgtgattcaactcaaaataaattgacaaacacctctcagtaaactaatgaaggcatattttgagagacatagtctgtcaatgagatagat

SEQ ID NO: 423225 - DNA, 281 bp, Homo sapiens
tattcctatatatacatatattcctatatatakagagagagagaggaattgttcctatatattatctttcaatgtttaatagagttgttcctatatattatctttcaatgtctaataaagttgataactgtctgataagaaaccctctgtaattcattctatgaagccaagatcaccctaataccaaaaccaggaaaggacaaaaccaagaaagaaaactacagaccaatatcgctgatgaacatagatgctaaaatccttaataaaatactagctaaatt

SEQ ID NO: 423226 - DNA, 575 bp, Homo sapiens
cttctatctgctgaggttcaggcatcgtttttggaggctgcgatgtaaaccctgcttagggaaggtagaatttcataataacagaggattactgctgcctcatgagtaaacagaaaatgtaggtgagggaaaaggtgttggactctggaagaacagaaaaacagtatttccaaggaaggggaaatyctttgctttaaagattgagaattctttctgtatttttttagaatgggaaatttctctactttctgcagagaggagaaaaagctaacagaaaaggaaattggggaggtaatagtcatttgttttttcttgttgcgtgtgagttttgtgataaaagtgacatttacataattaatttgctatggcaagaaaatgtctaaagagtctttttcgttggtagaaagcttgtgaaagatcagggaaaagatctaacataacgggaatggtgattacagctgcttttctatttaagatgtgcaattttggtagcatgtgttttgggccaatacattgtttctagacacttggagtcattttgggtggcctttttttttcctttggtagccaaaata

SEQ ID NO: 423227 - DNA, 538 bp, Homo sapiens
tatcccccccaagcccccaccccctggcaggccctggtgtatgatgttcccctccctgtttccatgtgttctcattgttcaactcccacttatgagtgagaacatgcagtgtttggttttctcttcttgtgttactttgctgagaatgatggtttccagtttcatccatgtccttgaaaaggacatgmactcatccttttttatggctgcatagtattccatggtgtatatgtgccacattttctttattcagtctgtcattgatgggcatttgggttggaatttcagtattcttaaaagaatatttgatttggatggagagggagctgacttttcttagaggttccaaagaatgatgggaatgattaggcaaactagattctttgtttaggtggcttttaattgcattccttgggatgcttgctatttatttacttgatcttttctcttgtgctaaaagcaggaaggaaacctgtcttaataaagacttaggatactttggtttaaaatgatgaaggggaaattataacttttgtat

SEQ ID NO: 423228 - DNA, 540 bp, Homo sapiens
agtctggcaacagaaaaaaaaactttatgaattagatattattttatctctatgtttgaggagtgtactttttatttatagtaaatgatacatactaagaggtagatatattaaacattaaatatgtattagaagtctttggctaagtaaatagattaagtactcctaaagaaaattcaaactttcagttccaaagaatcaattcattaagtcttatttgaatactggtacatcacagttgtttacagcttgcaattaaaacaaatttaaactgcaaatattaggaggtcaaagtcaaaattccatcaaacctggtatttcaacctgcttttagtcacataggtaaggattctacttatgtcctaaaaaagcaacagctgtaacttggtaagttgtaactgaggtcaaagttggtggttcaattcccatttgtttaarttagttacattagttttcgtggacatagtctgtaaccctaacctcagccagctattttacaattgcaggtcccagtggaacctgaataatagaatatggata

SEQ ID NO: 423229 - DNA, 597 bp, Homo sapiens
agccattgggcattaagtgaacatcagtggtaccctggcagtacccaccgtgggactgtggttgtgatggacatggggagagactcctccttcttctccagaacagggaggaaagagtgggaaggactttgtcttgtggttttggtgccagtttagctgcagtagagtagagcactaggcagatttctaacatttccaactccagcatctttggacctgcccagggcctgggagatctcactaccctgaaggaaaagacacaagatgggctggcttgmccccccgctgattataaagacctagggccttgaacaaacataggcggtagccaggtagtggtcacagcaggccttgagcaagacccagtgctgtgctggcttcaggtctgacacagtgtaatacgagtgggtggtggccacagaagtgcttgtgtcactctaccccagctccaggaggatcagaacagagagagagagagagaaagagagactctgtttgtttgggagaaagtaagggaagagaaagagtctctgcctggcaatccagagcattcttccagatctaatccaagaccaccaaggtggtatctacaagtct

SEQ ID NO: 423230 - DNA, 517 bp, Homo sapiens
ttaaccagccttatacctttttctttttacatagttattatgatgatgactggcagaccaaaaatattttggtgctttggggtgaaatgtactagacacagaagatacaaatcatcaaaaataaaactggaaagaaagaagcttatccactgaattcagttttcaaggaagaaaaccaaacatcttattgagactaagttgtctactgtgttgatstgaactataggcatgctattttctctgaagcgggagtaaacaacactcttgtggtctttaacacactagagttgttgtggaaacatcacatcccactttgattcatgtactctgggctaggaaaatgaatttggaaaaaaccaaagcactctctatttaactttccaatgaaactacactctctttgtgtgtccccattacttgactttgaatggaggtaaccaaactctcttcctaaggctccacaggattagaaaaactcacagcttccaggttgtcttagcttgacccaggcaatcac

SEQ ID NO: 423231 - DNA, 524 bp, Homo sapiens
ggaacccattttactacctctgaccatttgacggttgcttaggtttggaagctgtctaatatctgtgcccagggcaaaccactggagttaaaatgtacagaggaaagagaatgtggtttattgaatgctaaactaaagtgaaagtcagcargcctcagttctatttctggcttctctttggacaaatcgtaccttccttgaccttgagcaagtcatttactatcactgtatcccagatggtacaataagatctcattataagaaaacaccaataccacatttttccatagcgtaatttataaggtaaggaataaatgtgaaatggattaattgaagaattgcttattggaaatgtctcaagccccactgtctaatggtactatcaaaagtacagctaaaaacaaacttcagaacagcagtgggatacatggctctttatgtcctcaggtgagatctgaggtacagttatggggggaaaagaaaagaaagacccaggacaaagatttagttactctccccacttc

SEQ ID NO: 423232 - DNA, 524 bp, Homo sapiens
ggaacccattttactacctctgaccatttgacggttgcttaggtttggaagctgtctaatatctgtgcccagggcaaaccactggagttaaaatgtacagaggaaagagaatgtggtttattgaatgctaaactaaagtgaaagtcagcaagcctcagttctatttctggcttctctttggacaaaycgtaccttccttgaccttgagcaagtcatttactatcactgtatcccagatggtacaataagatctcattataagaaaacaccaataccacatttttccatagcgtaatttataaggtaaggaataaatgtgaaatggattaattgaagaattgcttattggaaatgtctcaagccccactgtctaatggtactatcaaaagtacagctaaaaacaaacttcagaacagcagtgggatacatggctctttatgtcctcaggtgagatctgaggtacagttatggggggaaaagaaaagaaagacccaggacaaagatttagttactctccccacttc

SEQ ID NO: 423233 - DNA, 524 bp, Homo sapiens
ggaacccattttactacctctgaccatttgacggttgcttaggtttggaagctgtctaatatctgtgcccagggcaaaccactggagttaaaatgtacagaggaaagagaatgtggtttattgaatgctaaactaaagtgaaagtcagcaagcctcagttctatttctggcttctctttggacaaatcgtaccttccttgaccttgagcaagtcatttactatcactgtatcccagatggtacaataagayctcattataagaaaacaccaataccacatttttccatagcgtaatttataaggtaaggaataaatgtgaaatggattaattgaagaattgcttattggaaatgtctcaagccccactgtctaatggtactatcaaaagtacagctaaaaacaaacttcagaacagcagtgggatacatggctctttatgtcctcaggtgagatctgaggtacagttatggggggaaaagaaaagaaagacccaggacaaagatttagttactctccccacttc

SEQ ID NO: 423234 - DNA, 258 bp, Homo sapiens
atatttataactttattttcctcaataacatcttaatgccttgtatatttatttgcaagaagaatctttatttttctaactttgtttcaaattttcaataatggaaaatatycatgtggaaattaggcatatttttataaaacccctaagaataaataaaattattaagtagtgatctgtagggaagtaacatttgttgtattttttaatatgttactgtaagagtatagatttgttgtacaacaatgtgaatatgcc

SEQ ID NO: 423235 - DNA, 595 bp, Homo sapiens
atctgccacctgttggaccccgcccacccaaaggattcgtggggctgaaaaatgccggtgctacttgttacatgaattctgtgattcagcaactctacatgattccttccattaggaacggtattcttgccattgaaggcacaggtagtgatgtagatgatgatatgtctggggatgagaagcaggacaatgaggtaaatttgagttaccatttctgttttctgtgtttcaagttatgataccagatactattctctcttaagagagtgttatrctttcatcaaacgtattaaagtatatttgaaagttagggatgggccgagcacacacctgtggtctcagctactcaggaaactgaggcaggaggattgcttgagcctgggagctggaggctgcagtgagccatgatcatgccactgcactccagcctgggttacagagtgagaccctgtctcagaagaaaaagaaaaagtaagtagggatggacttctcccagccagcatgaactgctacctcttaacatagtatagttctcactacctaccagaatttaaactgcagataatttttagaatggtttgtacatttctaaagc

SEQ ID NO: 423236 - DNA, 589 bp, Homo sapiens
ctatttttattttattatttattatttttttcagacagagtctcactctgtcacacaggctggagtgcagtggtgctatctcagctcactgcaacctctgcctcctgggttcaagcgattctcctgcctcagcctcccgagtagctgggactacaggcacgcaccaccataccccgctaatttttgtatttttagtagagatgggatttcaccatattggccaggctggtctcgaactcctgatttcaggtgatccacccaccttggcctcccaaagtgctgggattataggcatgagccaccataygcggccaaattttttgaggaactgttttctagagtgactgcaccattttacattcctaccagcattgcacaagagctccaatttctccatatccttgccaacacttgttatactcactcgttctggtagttgacaccctaattgagtgtgaggtagtatctcatggttttgatttgcatttaccaaatggttaacgattttgagcatctttagctgtgcttattattggccacttgttgatcttctttgtctatttttaaattgagttgtgttgttgagttt

SEQ ID NO: 423237 - DNA, 525 bp, Homo sapiens
cctgttccattacagggctggctgggtgctgagcagagagcagcaggcggaagaggcagggtcctagtgaggaggggagctggaatgacctgggtgggctctttgtctacacaggcatcgtgtggagccctgaaacccagaacactgcattcccatagtgctcctggggacatgagcgcccagctgaaacaccccacacaggaagagatcctccgaggattctgtcaggcaaagggttgggcccctgcaaggtggctcacrcctgtaatcccagcactttgggaggatgaagtgggaggatcgcttgaggccaggtggtcgaggctgcagtgagccgtgatcgtgccactgcactccagcctaggcaacagagcaagaccctgtctcaaaaaaaggagcgggagtgggggcagggttcgtcctaggctattgtaagaccaggggatactctgggatgggagtctctggttgtgagttcctgctgggccacaccctatcctggtccccagtgactaatcggccctg

SEQ ID NO: 423238 - DNA, 604 bp, Homo sapiens
gcgcgtctcggggctgggtggagctcccgaaggtggcctttctccctgggcttccacgccggcttcggccatcgatacgggccgtgttggtctcgttcaggagctgaggaaccctccatcactcctgtttcgaccccagggtttggacctcttccccttcyaccccatcccctgtctcgaaagaagcaacccccgtgcgggcccgagacgcgtcccgggtgcctggcccggcctggagaagcatcagaacaaagaaggcacgcgggctgggggctgggagagcctgtgacgcgcccccggggaccgcagcctctgctcccggtctccatggaggcggtcgccatggcagcgagatgcgcctcgctcagcaccgcggggtgggatgtgggcgcctgcaatgagccgaggagcgagaggcgtggccctccggtctgcgggggttcttgccggtgctctccgcccgccggttcgcgaacaccccacctatacttcgcccgtggggacggattccccaaagtgccctcagtaagccgtccggagcacgcagcgccttgcttccaacggaactagagagacggcctgggcggccgaaggccagcctccc

SEQ ID NO: 423239 - DNA, 557 bp, Homo sapiens
aaataactcaaatgtccataaatagaagacttcttaaataaatttggtacagacaatataatgttatatggctttaaaaagaaaaaaaaaaaagaggaagttttcaatgtcctcccaagtagccaggattacaggcgtgagccaccatgccgggataatttttgtatttttagtagagatggggttttgccatgttatacaagctggtctcgaactcctggcctcaagcgatccacccacctcagcctcccaaaatgctaggattacaggcatgagctaccgtgcccagcctgctaaggaaagattttgtattagctaggattctccrgagaaacagaactaggaaagagggcagataggaaagactgacatattataaggaattgactcacacaattatggagtctgaccagtcccaagagctgcaggttgggttggcaagttggagacccaggagagccaatggtttagttccagtctgagtcccaatgcctgagagccaggaaagtcaatgatgtatctccagtccaaagggcagcaggtttgagaccaaggaa

SEQ ID NO: 423240 - DNA, 519 bp, Homo sapiens
gctgggctctgtcccagagcaccgcaggaggtgattaagctggagagcgacaggatcagatttgcattcactgtaaagccaggtgcagtggcttacacctgtaatcccagcactttggaaggctgaggtgggaggctcgcttgaggccaggagttcaagaccagtctgggcaacataaggagacctcatctctgcaacaacaagaaagaaagatcactttaaacactaaagacattactgcttgtacatagaggatggctgaacataattaccgtgaggtagagagttttctccatggggtcctagctttaagctctggacaattgactgaaggagacagcccttaggagagaaaataaaagctgaaagtgacctgagttttactacaattggttatgttactctatgactccacacagctcctgtctacttccaccaaaayggcaccaccttcctgttcctagggattccccctaagacagagggtggcaatgttacttccttccattccgttagagg

SEQ ID NO: 423241 - DNA, 578 bp, Homo sapiens
atttctgctcactacttcctgtatattccctgcctaatcccaggcctgtgtatatgatggattttacgctcataatgaggtggtgttgtatggctcagttgaccgcaagatagggagattttccaggtgggcctgaccatatcacagcagcctttcaaggctgggggttttctctggctagttgcagaagaagtcagagagtcaaagtccaagaaggattcaatgtgtcattgctggatggaaaatgaagagggccatgtggtaaggaatataggtagcctctgggaactgagagctgatccagacaagaacaccacctgatcaacaccttggtttcagccttgtaataccctgaacccagagcccagcaacagcctaccaggcttttgacaracagatctgtgagctcactgagtattttaagctgctaaatgtatgatgatttgttacatagcaaaacaaatgaatacaggtgtaaaataacttataaataatattcaatattttattacataaaataagttcaccacttttaagtggctagctcaatgagttttaacaaatttattaggttgtgc

SEQ ID NO: 423242 - DNA, 570 bp, Homo sapiens
cactgcagcctagtgaattgaatggtgacatggttctcagtggtttatagcacgttgccatgtgaaaggtgccctgtcttgtggcatgagcattttttccctggtggtagagccttacagaggaaatggctgaataaggctatcagagtttgaaagcacttttcatgccctgttccacaacttgtgctctgatctctcttatactcaccaagtaacaagtaacttgttatccccagtatagcactccacagtttacaaacctcgagggtttttgctctttgtcttaatatgagaggccgttggagttacatgcaccatcaagtgcaatctaacattgatttcctgttcaagagaatattgagtggagagaacaaaggcatcatggagccatggctctcgctgtggtcagggagaggaagcaggagcccaaggaagggaagcaaatggctcattagagtgggtggttaggatragagcaaacggagcttaatggactgaaatggtcaagctatgaggagaaaatagcatccgagaatgacaagggcaaaaccaataaagagtcaaggtcag

SEQ ID NO: 423243 - DNA, 633 bp, Homo sapiens
acactgttaagtgttacaatgcaaatattattacttgcctcacccaccccacagcccagcctttaataatatattagggacttgaaaaaaaatagatatgtcattcaatttggggatcaaatttttttgtgagtgtcattttttaaaggggggactatgttattcgttttttgttttttttgtttagacagggtctcactctgtcacccaggctggagtgcagtagcacaatcttggctcactgcaacctctgccccctggggttaagcaattctcgtgccttcgcctcccaagtagctgggagcttgtgccaccatgcctgtctaatttttctatttttagtagagacagggtttcgccatgctggccaagctggtcttgaactcctgacctcaagtgatccacccgcctcggccttccagagtgcttggattacaggcatgagccacgacatccagccaagggatatgtcattctcaacaacagctaatacacagagactgtagaaccagaaggaatttttttttttyctgagacagagtgttgctctgttgcccaggctggagtgcagtggcaacatcttgcctcactgcaacctccacctcccaggttcgagcaattctcctgccgcag

SEQ ID NO: 423244 - DNA, 477 bp, Homo sapiens
catacttattcaactcactatcttctcaatgaccttgaaactagttcattaactggagttcacagatacaggtaagcaaaacaacattaagggaatgaacagaatacacaaaatagattgctcatagtcattgttctaacaaaattttcaattttcttctgttttctattcatattacmaagtctctgttattataactcctgaggtacaccaactatatgtctgtttgtgagggtagatgatgagaactgatttaggggacaaagcctattataagtctatcggcattcagttaaatgttgccaataagataattcatggaaatctgttagcacaattcctagcacatgataagcatgcagtaaatggtagtagttgtttttgttactgctgctgttttttaggttttcattttattctccaaaatataacatttttattagaggctcttggagaaaaaaagtaaaggctatttat

SEQ ID NO: 423245 - DNA, 537 bp, Homo sapiens
cttttttttattacaagagagaatgggattttatagacgtattttgtttagtttcattctttctgttgcttcttttaattttttctataaaaagcarattttaggaactaaacaagggtcagatgtatctttaatttttttagagcatcattctcatgttttattgccctctttttcatttctttaaattctaccttcttgcttgtattgttttgttattttatgtttctttgcacttagatatcagaggcacctaagtaaagattgttttttctagaacttgttcatatgaaatagttgtaatattagcacaggccctttattctttttggtcacaaatatgaggacttcagtgatactctccttactcctgcatcaactatttttatattttaagcaagaaatcttagttttcaaaacacataagtttcattcctttaagtttcctaattttgaacatattacttttctcatcaggctaaaaatgtgaaactgttttatggggaattaaaaatttctataaaaatgtcattattt

SEQ ID NO: 423246 - DNA, 411 bp, Homo sapiens
gcctctgttgcagtgagtaggcaatgtagcatattcctatctgttcccacagtcaccattagctgaaagggacaattcttaatgtgtaaagctagcgatagccttagggatgagggagacagtaatcaaatctgagcagtaatccagggaacagcagtaggtggcactgagggtgtttaggctgtcagctacttatactacactggcagcttccagaactggcctggattttaagagttccagagagtgcagcttctttttagcattcacaacttttttcatgctacactgaaaaaaacrtagctaaatttaggtgcttttagtattttttcatacctttatgtattactagtccactgctttgagtttaaacggaagggagagtgcttagaaattttgttttattttggt

SEQ ID NO: 423247 - DNA, 378 bp, Homo sapiens
aatgaatgggtgactttcaagagttttgaaatttgctgtgctgggggkcactgggtacctgaattgggggtgagtgagagattcacccctcctaggcatagcttcttctaccaacccagggcagggatggctgatgcctttcccagcttagagacaccccagggtgcacatggctgacctctccctaagcttatgctcagagcctcagtgttgtgaattttaaaagaaatcaaatatctaaaattgattaatgtgaagattcacattaatgattttgtcaaaatgggaggtagacatttaatgccctgaaatttctctgaagaaacctcaaggatccttagaaaaattttaaaaacattgctctgaccaatggcaaag

SEQ ID NO: 423248 - DNA, 617 bp, Homo sapiens
  misc_feature (1)...(617): n = A,T,C or G
atggtgatatggtacattagattctacagagcaagaagaaggcttggggcaacttaatcagacccctatgctggaaaatgatacatatcataaakagctactttttgctaggatataagtaataagtaatatcgtattaccactggtgtctatcccctatagttcaacaaagcagagtgtacccatttcttgtctggtctggtgcatgtttctttttgcagtagtattgcaaatgtgaaaaattaggtttgatgatttcaatctgtcaagcttcctaaaagcttgtgctccatatattttgaacagttaatagaagagttgccaataaaaaaaaaaaaaangctatgttaatttcttcccaagcttgagttttgtctgatggtgctcatccgcaatgtgttttgaaatctaaaagttaacacagatagaaagtcaaaacaaacagaaaagggcaaaaacatgaacatattttattgtggttttaaaaagcacataatgtgagagctacactcaacaaatttttacgtgtacactgttaactataaacacaatgttatacagtaggtctgtctctagaactttctcattttgaatgattgagaactctaaacccactg

SEQ ID NO: 423249 - DNA, 540 bp, Homo sapiens
cttttaacaatttagtatactcctatgaataaaatttggagcatatttgtttctctcagcctgatttctccagaatttggagactatttgtgtttttaacttatggcaatactgttatttgcataagtgcaataagaatctgttytcatttgtaacagggcacagttggagaaactggttgttttactatggctttgactggaatggtgtgcttttctttaagaaatcaaacttgacatatggagccaagaaaagccactgggaaaactgaacatatttcatgtacacagtccctgtacatgaacatatttcatgtacacagtccctgtagagggtttctgacctatggtaagtaaagaatgttactttctgacaggcccaggagccccaggtttatattgaaatctcaagaggagaggatcacccaacctcatagatatttgatggcacaaaaacatggctggactgggcttttaaaaagttttatctgaggtcctttctatggaacaaacttccagcaaagcctatttaaaaacctat

SEQ ID NO: 423250 - DNA, 489 bp, Homo sapiens
cttgctttttaaatcttgtttcaggatgttggagcaaggtggtggaatagaaagctccaccgatcatcctccccagaaagacrtcaatgtaacaactatctacacagatgaaacactttcataagaaccaaaaatcaaatgagtacttatagcacctggttttagcttcatattgctgaaagaggcactgaagagataaacagtcctgaatctctgatgctacccttcccccatgccctgcagtggtgttgtggtgtctagagcatctttgggcactgagggagggagaacacagaaattgtaaggcactgaatgcggtgctatcctgttagagcagtaaggaaagtcagaccaaattcagctgatgcctgcctaaaggataatttaaaccagccctagccagttggttgcctgtgaaagaatatagacccagaattttttctttagttggagatttttgtgtaaaatttttaaaatggatatgaaact

SEQ ID NO: 423251 - DNA, 571 bp, Homo sapiens
gttttccaagtttcttattcttttttcttctctttcaagaatgccagcaagttgtagatttggtctctttacatactcccatatttcttgaaggtttcgtttattttttaaaattattttttctttttttttgtctgagtttattcaaagaattggtcttcaagctctgagatttttcttctgcttgacctattctgctatggatgcttgcaattgtattgtgaaatttttgaagagaattttttagttccagaatttcaattttattttttcttaaaatgactattttaactcrtggattgttttactaagcttttttttttttattgggttccatctttttcctggctcttgatgatcttcattgccatccagattcagaatcctatgtccatcatatcagttatctcaatcttgctaagaaccatttctgggggaatttgtgtgctttttggaggtaagaggacacactggctttttgagttgccaaaaattcttgtgttaattctttctcatacatgagggcttttattcctttaactgtggtgtaatttgagtatgatcagttgat

SEQ ID NO: 423252 - DNA, 602 bp, Homo sapiens
tatgaatagtattgtacatgtcctctggtgaatatatgtaagtgtttctcttcagtctaaaacaaggagtgaaaatactcatatggtatatgagtattcaatttataagataatagcaaacatttttccaaagtgaccaaactatttaacaatcctaccagcaatatgtgtgacatacttgatccacatcttcggcaacgttgattattaagagatattcttttaggtatatgtaaatattatagtcttttaattttttattatttttatatcttgatggcttttataatgtcttcttttagttctagaaagttacagttttttggacatttttgtagcgtgagattactgacttttctctttctccaattttcctcttttctcttttttgggtcttaatattccataataaaacctctcttcaaatattttatgaaacttgggtattcgtttatagttaagagtgatacactaaaacccaatcaaaagcttcatgtgcttggtcaagatctgtgtgttttgacaggctccaccataacacarttgagtacaaacctggccatttcaccagagacttccaatcatcagtctttttgggggtc

SEQ ID NO: 423253 - DNA, 602 bp, Homo sapiens
tatgaatagtattgtacatgtcctctggtgaatatatgtaagtgtttctcttcagtctaaaacaaggagtgaaaatactcatatggtatatgagtattcaatttataagataatagcaaacatttttccaaagtgaccaaactatttaacaatcctaccagcaatatgtgtgacatacttgatccacatcttcggcaacgttgattattaagagatattcttttaggtatatgtaaatattatagtcttttaattttttattatttttatatcttgatggcttttataatgtcttcttttagttctagaaagttacagttttttggacatttttgtagcgtgagattactgacttttctctttctccaattttcctcttttctcttttttgggtcttaatattccataataaaacctctcttcaaatattttatgaaacttgggtattcgtttatagttaagagtgatacactaaaacccaatcaaaagcttcatgtgcttggtcaagatctgtgtgttttgacaggctccaccataacacaattgagtacaaaccyggccatttcaccagagacttccaatcatcagtctttttgggggtc

SEQ ID NO: 423254 - DNA, 522 bp, Homo sapiens
tttcctgctagagttttatagttttgggtcttaagtttaagttttaaaccattttaagttgatctttgtttatggtgtaagatgagaatccaatttcattattttgcatatggttatccagttttcctgatatcatttgttgaagagawtatcctttccctattgtgtagtctttgcaccctggttgaagatcatacgacagtatatgggtgggcttatttctgggcattctattctattccattggtctctatgtttacttttatgccagtaccatactgttttattattttagcactataatatgttttagactccagaagtgtgacttctccacttgactcttttttctcaggataattttggttatcccaaaataattgtgattccatatacattttacgattgtttttctatttttgctaaaaatgccattgagattttgatagagaatacatagtatctatagattgtttttggtagcatggacattttaatgatattaagtcttccaatccatga

SEQ ID NO: 423255 - DNA, 522 bp, Homo sapiens
tttcctgctagagttttatagttttgggtcttaagtttaagttttaaaccattttaagttgatctttgtttatggtgtaagatgagaatccaatttcattattttgcatatggttatccagttttcctgatatcatttgttgaagagattatcctttccctattgtgtagtctttgcaccctggttgaagatcataygacagtatatgggtgggcttatttctgggcattctattctattccattggtctctatgtttacttttatgccagtaccatactgttttattattttagcactataatatgttttagactccagaagtgtgacttctccacttgactcttttttctcaggataattttggttatcccaaaataattgtgattccatatacattttacgattgtttttctatttttgctaaaaatgccattgagattttgatagagaatacatagtatctatagattgtttttggtagcatggacattttaatgatattaagtcttccaatccatga

SEQ ID NO: 423256 - DNA, 625 bp, Homo sapiens
ggatgtggaattactaaaaaagcacatattaaaatttactaaatagatagtgtaatcaagacagtatgatatttgtgtagagatagagacatagatcaaaagaacaatattgggaacctagaaattgacctacataaataaggtcaatgaattttttacaaaaaagcaaaagtaatttaatgaaggaaagatagccttttgaatgaaaagtgctgaagcaattggaaatccataggcaaaaagcaaactttaacctaaatctcagatctaatataaaaatttacttaagtgaataatagacaaatgtaaaatagaagactataaaactttcagaaacaagacattgtaaacattctttggaactagagctatgagaaaagttcttagatttgacaccaaaagcatgatccataggaggaaaaaatggtaaattcaagctaatcgaaatgaaaaacttkctctgtaaagaacttgtgaggaggttcaaaatataaactagaaactgggagaaaatatttgcacactacgtagcgaaccaaagagtagtatatagaatatagaaaagactctccaaactcaagaataagaaagaaatccagttagaaagtgggcataagacacaatt

SEQ ID NO: 423257 - DNA, 610 bp, Homo sapiens
atacattgcatgcctgtatcaaaacacctcatgtaccccataaatatatatacctactaatatatccacaaaaaataaaataaattttaaaagaatatgaagaataatttaatgcaaatattattatacaaatttccagtgataccaacgaggaaacaaagaaattgtaagagaccaagtgaacaaaatggttccatgctaatgtctcgttttcatatacataagttaaacagcctgtaattccagataactagaaagtatgtgttcatatttcaaataaaaggatgtgtattgcccaaatcacaaataagacatgtaaaagcaataaagaaaccactgttcttatatcaaaaaatagaaaacagaggtaaaaataaaaatgtgtaaaacaaaattacacaactaaagctctccagcatagaaattgtaaaaataaatgcaagtgggtcgaactggcctactggaagacagastctcaaatttaataaaacacaatattcaattatagatctttataagatatgcagctacaaaaatatgccttaggaaacaaaaatgtatatggcccaagttgtattaggaaaatgcaaataaaataaccaacaggtca

SEQ ID NO: 423258 - DNA, 358 bp, Homo sapiens
attcagattttctatgtattcatgagtcagtcttagtagactgaatgatgtagaaatttttccatttcttctaggttatccaatttattggaatatgattattcatagtattctcaaatgaacctttttatttctctggcattagttgtaatgtctccttctacttttagtyacttgaatctttcttttcctatagtctagctatgtgtttgccaattttgaccatcctttcaaacactaacttttagttttcttgatttgtcattattttctgttctctatttcatttatttctgctttaatcttaataatttaattccttctgccaacgttaggctcagcttgttctttttctagt

SEQ ID NO: 423259 - DNA, 614 bp, Homo sapiens
tagtttctttctggactctcagtttaacaccattgatgtatgtgcctgaggatattttgatgatttcataaatgaagtagtttcttaattttattttcagatcgttgcttrtagagttatcttaagatcccacaaattaaatacatatatatttgattaaacaatatgtgtaatctttgcattcaaaattgtattaagtgctaatatattgaatatacacagtcaggatggggcagtgagactatcaagtctggagatgagaggcaagtgaatttcacttccactggccaaggctgttgcactggaactgccccctctccctatgctgagaactcagcagagcagcactgatcctcagtctggtattttgccacaagcctgaagacgatcctgccccccgcccccatcaaggtagatgcctgcatctgccatcggggggcatgagtgcaggtttccaaggtccagctctacccggcttagtcaaccttctctgagacagaggatgccacccaggcccctgagcattccttggtctgactcaccacctgggacaccagagcacttctcctgcttaacaaagatcaagcataaaacctattgtgaccaccacagct

SEQ ID NO: 423260 - DNA, 614 bp, Homo sapiens
tagtttctttctggactctcagtttaacaccattgatgtatgtgcctgaggatattttgatgatttcataaatgaagtagtttcttaattttattttcagatcgttgcttatagagttatcttaagatcccacaaattaaatacatatatatttgattaaacaatatrtgtaatctttgcattcaaaattgtattaagtgctaatatattgaatatacacagtcaggatggggcagtgagactatcaagtctggagatgagaggcaagtgaatttcacttccactggccaaggctgttgcactggaactgccccctctccctatgctgagaactcagcagagcagcactgatcctcagtctggtattttgccacaagcctgaagacgatcctgccccccgcccccatcaaggtagatgcctgcatctgccatcggggggcatgagtgcaggtttccaaggtccagctctacccggcttagtcaaccttctctgagacagaggatgccacccaggcccctgagcattccttggtctgactcaccacctgggacaccagagcacttctcctgcttaacaaagatcaagcataaaacctattgtgaccaccacagct

SEQ ID NO: 423261 - DNA, 643 bp, Homo sapiens
gaggttcaatggtacaagagaaatctgaaagccaatatagagaaatcataaaatcaacttgggatacgaataagaaatttaccaaacagataaattccaaacaaaaaacaaaagcaaaaacaaaaacaaaaaacaaaaaaaatctgaaaaatagtaattatkaaagaaattacaaaatacacttgaaagcttggacaaccgactagacaaagcaaaagacagaatctgagtatttgaaaacaggccttttgaattaattcagtcagacaaaaataaagtaaaaagaatataaaataataaacagggggttagagacatatgagactatatcaagtaaatttaagaattattggtgttcccaaggaggaagaaaactttttaagtttacaaaatctatttaaagtaataattgatgaaaacttcccaagtctgacatgagatatacacattcagatacatgaggcctagtgatcctcagacacataaatgagaagatggacttcaccatgccatatagacattatactgtctaaaatccacatgatggaaaaattctaaaatcaccaaaagaaaagtatctagtcagacgaacagaaatccatcagacaaacgagatcttctcaacagaaaccttactagccag

SEQ ID NO: 423262 - DNA, 414 bp, Homo sapiens
gttttcttgatttgtcattattttctgttctctatttcatttatttctgctttaatcttaataatttaattccttctgccaacgttaggctcagcttgttctttttctagttccttgaggtgtaatgttatgttctttatttggaatctttcttaatattaaagtaggtatttattgccataaattttctgcttaaactccttttgctgaatcccataagttttggtatatttcgtttccattttcatttgcctcctacattttccttttatttatttttatttttatttattttttttttttgctttgttgtttgtttgggagcatgttgcttaacttctgcatatttggaaattctctgaaaattcctcctrctattgatttctagtttcacaccatggtggtcagaaaata

SEQ ID NO: 423263 - DNA, 439 bp, Homo sapiens
ctataaaactattttgtgaaaacattggggaaagtctccaggacattagtctgggcaaaacattttgagcaataccccacaagcacaggcaaccgaagcaaaaatacacaaatgggatcacatcaagttaaaaagcttctgcacagcaaaggaaacaatcaacaaggcaaagggacaacccacagaatgggagaaaatgtatgcaaaccacccatcttacaagggattaataaccagaatatacaaggagctcaagtaactaactctttagraaaaaatctaatagtctgattaaaaaatgagcaaaagatttgaatagacatgtttcagaagaagacattcaaatagcaaactagtatataaaatggtgctcaacatcgattgtcagagaaatgtaaatcacagctgaaatgagatatcgtctcaccccagttaaagt

SEQ ID NO: 423264 - DNA, 606 bp, Homo sapiens
catatctaatctaaatcctgatgagtcttcattcacatatacatcaaagttaccatttttcctttataaacctcaagtttttaaaatctatttaaataatggcartcatttttaggttctctgaatttcttgctatatttaacactctaggattcaaagaaatatgtgaagatgtgaatagttattatttccagttgtgtaattacttccattattccataagttggcaaattcatccggttaggaaaatgtgggctagtatataaatcaggttttcactaattatttcagtgtcagggaggaaaatgaaaggtgtaaaatagataacaggttttgcttatttttataactttgtgctctatttttttcattttatttttcatttattcacacaagcatgaatcactgttgcaatttgataaaataaaaatattattaaaaacaaattcactcataccttcatgaggtattttcaagcacctacaaaaccctgtaatatatagtggtgaacaagacgatatggcccttttttatgtaacttacagcagtaataaattctctgaagaagtataatagagacccctgacataagcagtgtttcccata

SEQ ID NO: 423265 - DNA, 593 bp, Homo sapiens
ccaaaaaaacactgctgaaagaaatcagagatgacaccaacaaatttgaaaatattccatactcacggactagaagaatycatattgttaatatggccagactggtcttttgagaaaaatggcagctagttagcagggaggactaacttgcagctcctactcagatagatggaacagcatgtggagattcacattgtgaacttttgcttcaaggactaccacaggaacatagcaggaaaaccaaaagaattcacagaacctttgaaggaagcagcttgccactgcaagcttcctgtgacagccaaaaaactgtgagtgcccaaggtgtgagagaagaaaggtccacttctgaacacaaatcatccctggggaacctgaaaatccacatcatggagaaggatttaatcttccctagagctaaaacaaatttagagtgtgaagcaaaatataaaggtagaagaagcagcagaaagagccctgtgggtactcgcaatccccaatgaagccatttttgactttgtctcatggggctccttgggtaaggctgccagtgaaattggggcaggatcacaggaagaaggaaacttccagct

SEQ ID NO: 423266 - DNA, 580 bp, Homo sapiens
gagatgaattccacttggtcatgatgaaaaatctttttactgtattgttaaattccatttgatagtgttttgttcagaatttttgcatcaaaattcatcagagatattggctggttgttttctttatttgacgtgtctttgtctagtttcagtatcagggtaccactggctttgtagaatgagtttgtaatatagtcttctcctcttttcagaatagtctggraaggactggtattattatttcttaaatgtttggtagcattcagcagtgaagtcgtcaggtcccaggcttttctttactggaaaactttttattatggctttgaatccattacttgttattagtctgttcaggttttggatttcttgctggttcaatattggtgggttgtgtttgtctagaaacttgtccatttcttatagattttccaatttattggcatatagttgttcatagcacccactaataattctttcattttctaaagtatcagttgcaatgttatctttttcatctctgattgttttttatttgggtcttttctcctttttatagctaaaggtgtgtttattttgttta

SEQ ID NO: 423267 - DNA, 580 bp, Homo sapiens
gagatgaattccacttggtcatgatgaaaaatctttttactgtattgttaaattccatttgatagtgttttgttcagaatttttgcatcaaaattcatcagagatattggctggttgttttctttatttgacgtgtctttgtctagtttcagtatcagggtaccactggctttgtagaatgagtttgtaatatagtcttctcctcttttcagaatagtctgggaaggactggtattattatttcttaaatgtttggtagcattcagcagtgaagtcgtcaggtcccaggcttttctttactggaaaactttttattatggctttgaatccattacttgttattagtctgttcaggttttggatttcttsctggttcaatattggtgggttgtgtttgtctagaaacttgtccatttcttatagattttccaatttattggcatatagttgttcatagcacccactaataattctttcattttctaaagtatcagttgcaatgttatctttttcatctctgattgttttttatttgggtcttttctcctttttatagctaaaggtgtgtttattttgttta

SEQ ID NO: 423268 - DNA, 596 bp, Homo sapiens
cccttgtcaaaaataacttgaccatatatatgaaagtttatttctggcctttctattccatttcactggtctataagacttcctttatgccaataccacactgttaaattactgtaactctgtaataagttttaacatgaggaagtgtgacrtctccagctttgtttttctcaaaattggtctgactattaaggatccctttagattccatataaattttagaataaatttggtatttaaaaaatcattggaaaatttgataggaattacattaaatttgtagatctcttttgctggcatttccagcttaacaacattaattattcaactcatgaacatgaatgtctttccatttatttgtgtcttccttaatttggggggtcaatattttgcagttttcagtgtaaaagtattttgcctccttggtgaagtttatttctaagtatttttttcatgctattatgaaatggaattgtttccttaatttctttttcttattgttgattattgacatagagaaatgcacctaattttttcaagctgattttatgttctgcaacttcactgaatttgttgattcattccagaagagtttt

SEQ ID NO: 423269 - DNA, 607 bp, Homo sapiens
attaatgttactctacttcatatgtattaatagcgagaaagacaccatgtagatccagtttttaactgttattgtttgtgctattacttttttgtcttatttgtacagcacaatatattgttactactgttactttaaaaattcagttacttttagtaaagtcaaacataagaaataatattttatataatgatatttttatcttctctggagcttttcatttctttgtgtatattcaaattcctgcttgatatcatgctccttctgctttaagaacttcctttgtcatttcttttagtgcatctctcctgatagaaaatctctcagctgtttttatctaaaagtatatgtgatttcatcttccttattaaaaatgttcaataagcatagaattctagattgacagttttattgtatttatacatcaaaaatgacaatttatttatttmtttttttcattgtttctggggagaagtctgtaataattctcacattttttactctgagtgtaatttgatctttctctttggtttgtagcagacagagagaaagagacgggaaatgagagaaaaagaaacagagagatggagttatgtatcttgcttgc

SEQ ID NO: 423270 - DNA, 607 bp, Homo sapiens
attaatgttactctacttcatatgtattaatagcgagaaagacaccatgtagatccagtttttaactgttattgtttgtgctattacttttttgtcttatttgtacagcacaatatattgttactactgttactttaaaaattcagttacttttagtaaagtcaaacataagaaataatattttatataatgatatttttatcttctctggagcttttcatttctttgtgtatattcaaattcctgcttgatatcatgctccttctgctttaagaacttcctttgtcatttcttttagtgcatctctcctgatagaaaatctctcagctgtttttatctaaaagtatatgtgatttcatcttccttattaaaaatgttcaataagcatagaattctagattgacagttttattgtatttatacatcaaaaatgacaatttatttatttatttttttcattgtttctggggagaagtctgtaataattctcacattttttactctgagtgtaatttgatytttctctttggtttgtagcagacagagagaaagagacgggaaatgagagaaaaagaaacagagagatggagttatgtatcttgcttgc

SEQ ID NO: 423271 - DNA, 446 bp, Homo sapiens
taaattgttttgggtagtgtattagtccattttcatattgctatgaaaaaatacttgagattgggtaatttataaagaaaaaaaggtttaatggactcacagttccacataactgagaaggcctcacaatcatggcaacaagcaaaggaggagcaaaggcacatcttacacggaggcaggcaagagagggtgtgcagggaaacggtcctttataaaatcatcacatcttgtgagacttaattcactatcatgagaaaagcataggaaaaccagcccccattattcaattacctcccactgggtgcctcctattacaagtggggattatgggaactacaattcaatatgagatttgggtggggacactgccaaaccatatcattccacygcagcacctcccaaatctcatgtcctcacatttcaaaaccaatcttgccttcccagca

SEQ ID NO: 423272 - DNA, 537 bp, Homo sapiens
tttcacaggctggcattgagtgtctgcagtttttccaggcacatggtgcaagccgtcagtggatctacaattttggcatctggaggatggtggccttcctctgacagctccatgaggcagtgccccagtggggcctctgtgtggaggctcccaccccacatttcccttctgaaytgccctagcagaggctctccatgaaggctgtacccccgtagcagacttctgcctggacatccaggcattttcatacatccttagaaatctaagcagaggttcccaaacctcaattcttgacttatctgtacccacagacccaacacgatgtggaagctgccaaggtgtgggtcttggaccctctgaagcaatggactgaactgtacattgaccccttttagccatggctggagcgcctgggatgcagggcaccaagtcccaaggggatgcagggcacacagcatgggggccctgaaccctgcccatgaaatcatttttccctcctaggtctctgggcctgtgatggaaggggctgccgtgtag

SEQ ID NO: 423273 - DNA, 537 bp, Homo sapiens
tttcacaggctggcattgagtgtctgcagtttttccaggcacatggtgcaagccgtcagtggatctacaattttggcatctggaggatggtggccttcctctgacagctccatgaggcagtgccccagtggggcctctgtgtggaggctcccaccccacatttcccttctgaactgccctagcagaggctctccatgaaggctgtacccccgtagcagacttctgcctggacatccaggcattttcatacatccttagaaatctaagcagaggttcccaaacctcaattcttgacttatctgtacccacagacccaacacgatgtggaagctgccaaggtgtgggtcttggaccctctgaagcaatggactgaactgtacattgaccccttttagccatggctggagcgcctgggatgcagggcaccaagtcccaaggggatgcagggcacacagcatgggggccctgaaccctgcccaygaaatcatttttccctcctaggtctctgggcctgtgatggaaggggctgccgtgtag

SEQ ID NO: 423274 - DNA, 475 bp, Homo sapiens
gaggaaagagaatgggaaaatattaaagcaaggaggtagatgagcatgcacacatatggatcctatggcacagggcaattgctagagctcggctcaaatttgcctcaaacattacagtgacgcaaataaggtgggagtcaatccaaaaaaaaaaaaaaccctagtattatcaataggacttaaacattagtacaatasacattgttggcaagacaattcttagttgttcaagtcaattttgagcgctcgcagatcatttagcatcctggccactttcctataaatcatggtagttgactggagcagtgcccaggctttgtgacaactaccatgccttcacccatttccatattttcccacttgaggacaactgagttacaagatttacattgctcatcattttctatttagaaaaccataaccaattagagtaggtcagattctcagtgatgacaattgttttaattagaatgtt

SEQ ID NO: 423275 - DNA, 475 bp, Homo sapiens
gaggaaagagaatgggaaaatattaaagcaaggaggtagatgagcatgcacacatatggatcctatggcacagggcaattgctagagctcggctcaaatttgcctcaaacattacagtgacgcaaataaggtgggagtcaatccaaaaaaaaaaaaaaccctagtattatcaataggacttaaacattagtacaatagacattgttggcaagacaattcttagttgttcaagtcaattttgagcrctcgcagatcatttagcatcctggccactttcctataaatcatggtagttgactggagcagtgcccaggctttgtgacaactaccatgccttcacccatttccatattttcccacttgaggacaactgagttacaagatttacattgctcatcattttctatttagaaaaccataaccaattagagtaggtcagattctcagtgatgacaattgttttaattagaatgtt

SEQ ID NO: 423276 - DNA, 475 bp, Homo sapiens
gaggaaagagaatgggaaaatattaaagcaaggaggtagatgagcatgcacacatatggatcctatggcacagggcaattgctagagctcggctcaaatttgcctcaaacattacagtgacgcaaataaggtgggagtcaatccaaaaaaaaaaaaaaccctagtattatcaataggacttaaacattagtacaatagacattgttggcaagacaattcttagttgttcaagtcaattttgagcgctcgcagawcatttagcatcctggccactttcctataaatcatggtagttgactggagcagtgcccaggctttgtgacaactaccatgccttcacccatttccatattttcccacttgaggacaactgagttacaagatttacattgctcatcattttctatttagaaaaccataaccaattagagtaggtcagattctcagtgatgacaattgttttaattagaatgtt

SEQ ID NO: 423277 - DNA, 475 bp, Homo sapiens
gaggaaagagaatgggaaaatattaaagcaaggaggtagatgagcatgcacacatatggatcctatggcacagggcaattgctagagctcggctcaaatttgcctcaaacattacagtgacgcaaataaggtgggagtcaatccaaaaaaaaaaaaaaccctagtattatcaataggacttaaacattagtacaatagacattgttggcaagacaattcttagttgttcaagtcaattttgagcgctcgcagatcatttagcatcctggccactttcctataaatcatggtagttgactggagcagtgcccaggctttgtgacaactaccatgccttcacccatttccatattttcccacttgaggacaactgagttacaagayttacattgctcatcattttctatttagaaaaccataaccaattagagtaggtcagattctcagtgatgacaattgttttaattagaatgtt

SEQ ID NO: 423278 - DNA, 466 bp, Homo sapiens
tgaccttcacttggtgcaaacatttcacttccatgtaatgcccacacctaatctttcctccctagttcgaggccaagtagtagcacttgatgccaacacaattataccactagacccaggcactgacatcatgtggcaacattcaatacaaagatggttagccgggaattcgaaaggtctccaaatgacattattttcacagatttactctcttcattaatggaatttttctaaatgatcatcaattatttctgtcatttgtcctatgtacgtgcaacctaaaatacagttaagttctttrcaataatatatagcagcttttcaattaaaaaaaaagtatatgctaaaaagctacataagtttatttttctgataggggcatatcttaccctaaatactgtattgtcattttcatcagacacatagataatgtggtaagcattatttgtctctttacatatgtctt

SEQ ID NO: 423279 - DNA, 540 bp, Homo sapiens
taaaagtgaaacaaggagagcattccaggcccaggcatgatacagcagtgtgggacctagaaattttactctgttatttctatcgcacaaagtataagaaggacaatggtagatggaactgcagaaagcactgttcttttataacaaatacttgcagtctctttaaaatgttgccttgctcatctttcatttcacactttcattttcagctggtgagcctgtgaattcatacatcaactgtgcaagttataatcatgaaagttaatygtactacgtgcccagcagcattctatagtctttccattttataattcatctacttttcacaactttttcaggtagattccagtaatgtcacttcacaaataagaaagtccagccaggaagctgtaaaatggcttgtccaaggttatgaaaccagtcaatgacagagcagagatgggcctcagagtctattctctttcccttgctctcctactcgggccccctttccctagtatcttttttcacccacctgtttcccctagcagaatgtaacat

SEQ ID NO: 423280 - DNA, 505 bp, Homo sapiens
ccactacctgtacaacctgtagaaccctgagccaattaaacctcttttctttacaaattaracagtctcaagtatttatagcaggctgagaacagactaattaactgctacaggatccacagtggagtccacatgtggtggcttcattaccaggggcttcagtgggcatgggtgccgcctggtcctgaatggactggattgcctccaagaccttgatcagtagggctgatatggggccaagtgtccactttagggtccgcatttagatctacaggtggtgggactatttccaggtgcacagatgggtgtggctcattctaggtcccagggaaggctcccgctgtgccactgagtgtgtccctgggaagtcagaactgtcactctactatggatgacagagaattgaaccaagtcaaagggctgcttcatggttcacagccaagaccaaagtctgcaggccttcctcttggggcacatataggtgtgcctcctgctgggttcctgg

SEQ ID NO: 423281 - DNA, 581 bp, Homo sapiens
tcccaggtggtggtgagacaagttggtggattcttacgccatttctcccccagaccaaggctttatgtatcatcagagagaagtggtttagaagtgtatgtaggacaactgaagtatgatagcatcaaagctgttggacctaaaggcaggatttactgaaagtaagtgctcttacacaaggaacaatagataacactggaaatcttagaggccttcttgaaataggagttaatcaggaaccaatgtagtggattagcatccaatggagttgytttagcctccacaaagaagaaaagaaagttataaaatcaatgatccaggtattcacttttagaggctaaaaatgatataattaaagccaaaataagtataatgaagaaaacaataaagacacaatcaaaaaccaaaaacataaaattgatcaacagtaggaaaaaattactatgacatgcattggttctctaaaaatatgaatgctattttttaaaccctagtaaaactactaaaaataaagagaataaaattaaactatcaatgtcaggaataaaagaggctctatagatattaaaagtttaataaga

SEQ ID NO: 423282 - DNA, 659 bp, Homo sapiens
tctatgtttgctttcacactactcatatagccgatagagactaaaatatttattatatgttgttttaaagaaaaagttaaccaatccctttacccacaaaaatccacagctaatacattaagtggtaatatacattgaatgaattttttcctgagatcagatcggtaccagggcaaaaatatcttttttattacttctctttaacattgtactagaggtattgccagggtagtaaggcaaggaaaataaagaagctactcataattacaaagaaataaacaaacattatttgaatacaacttgattatttacatcaatagatactagaataagtgaatttagtaatctgtcaatatgaaatgtcaatgtacaaaaagcaacatcacttctctataatatcaaggcacaatagaaaataaaagtttgaaaacctactattcaataatataaaaatataagatatttatgataaatttaataaaagagatgccaaccctctacaatgaaaactaygaaacatcactcagagaaattatagaagacttaaacaaatggaaatgtacaatgtgctcatatattggaaaactcaaaatgataagaggtcaattggtttcaaattgatgtatagatttacacaaactctccccgcaaagaaacca

SEQ ID NO: 423283 - DNA, 520 bp, Homo sapiens
actcaccgggggttaatttttcattattttaagtgggaaaaatataatgcatttaatatcaaacccaaactcataatcaactttctgagcacatatataaataagagctatcgtgtagcatgtaaaatggttaaaacatttctgattatcaaataactaaaatgtttttattattgctattattttaacagaaaaatcataattttattgcatttataaaatacaatgttatgctttgatatatgtataccatgtggataattaaatcaagccaattaacctgtccatcaccttgcttacttaacaatttttttttgtgtggtgatactttgaaatttactctgytaactattttgaaatactaaaatggttttgcaaagttgcagtgtatgcagtaacatggcttctctttgcacaatctacttttgtggcttggataccctctgttgacacagtatagtttttaagatatctatatgtggctctgacattccacagatttgtatctggagtgtaacct

SEQ ID NO: 423284 - DNA, 575 bp, Homo sapiens
accatttctagcatttgatttaaaatgagaaatgtatggtcttttcacttgaacacttagagtccattttagcattattaattggcctagttgcagtagttttttgtctcagggaataggaatgcacaagaagagggagagagacaggaattggttggctggtggagtagtcagaacacacacaacattcatctattgagttcatcgtatatgggcatgtttcagggtatctcgaaacaattacaatagtaagatygaagatcactgatcacagatcacaataacagatataatagtaatgaaaaagtttaccttactgtgaaaataaatgtaacacggagacacaaagtgaacacaggctgttggaaaaaggcacctatagacttgctcaatgcaaggttgccacaaaccttcagtttgtaaaaagtactatttgtgatgtgaaataaagtgaagtacagtaaaatgaggtatgctatgtaagaaaacatctacagtaaagccaggaagttacctcaaagagcactgtcaggtaaaatccatatttggtcatattgaaagaaaaaaatattact

SEQ ID NO: 423285 - DNA, 575 bp, Homo sapiens
accatttctagcatttgatttaaaatgagaaatgtatggtcttttcacttgaacacttagagtccattttagcattattaattggcctagttgcagtagttttttgtctcagggaataggaatgcacaagaagagggagagagacaggaattggttggctggtggagtagtcagaacacacacaacattcatctattgagttcatcgtatatgggcatgtttcagggtatctcgaaacaattacaatagtaagattgaagatcactgatcacagatcacaataacagatataatagtaatgaaaaagtttaycttactgtgaaaataaatgtaacacggagacacaaagtgaacacaggctgttggaaaaaggcacctatagacttgctcaatgcaaggttgccacaaaccttcagtttgtaaaaagtactatttgtgatgtgaaataaagtgaagtacagtaaaatgaggtatgctatgtaagaaaacatctacagtaaagccaggaagttacctcaaagagcactgtcaggtaaaatccatatttggtcatattgaaagaaaaaaatattact

SEQ ID NO: 423286 - DNA, 573 bp, Homo sapiens
tgagcaacattatatgctaaaaggtagtggaatacagtctaagttgttttgaatctgtaaagttagtaactaatgagtgctataaccaactggtcattgggctcatgtgcaaagacttatgtgtgaagatatgcaaggactcaagaaatatattatcactgtgccattaatgaaaaacattaaccagagatgtaattcagcaacctgataaattactaagaaacaatgcttgcataaaaatgtaacgatatgggaagattggtaaggagcactcaatctatttaaacagaactaatcctaaaatttgacttatttttatttaaatgtaagtragtgttatcaacttgtaaaaacaacgaattaatgaagtaaatactggtttccttacttccatcctttcccccttacagtctattctcaacaaagcatttagagtgattcttaaaacgtgagtcaagttatctttccaatctgctgaaacctgctttctttctgcctccgtatctcactttgagttaaaaataaggttttatgcaatagcttacaaaacttccccgtgaccttttaaatttc

SEQ ID NO: 423287 - DNA, 573 bp, Homo sapiens
tgagcaacattatatgctaaaaggtagtggaatacagtctaagttgttttgaatctgtaaagttagtaactaatgagtgctataaccaactggtcattgggctcatgtgcaaagacttatgtgtgaagatatgcaaggactcaagaaatatattatcactgtgccattaatgaaaaacattaaccagagatgtaattcagcaacctgataaattactaagaaacaatgcttgcataaaaatgtaacgatatgggaagattggtaaggagcactcaatctatttaaacagaactaatcctaaaatttgacttatttttatttaaatgtaagtgagtgttatcaacttgtaaaaacaacgaattaatgaagtaaatactggtttccttacttccatcctttcccccttacagtctattctcaacaaagcakttagagtgattcttaaaacgtgagtcaagttatctttccaatctgctgaaacctgctttctttctgcctccgtatctcactttgagttaaaaataaggttttatgcaatagcttacaaaacttccccgtgaccttttaaatttc

SEQ ID NO: 423288 - DNA, 592 bp, Homo sapiens
atcttactgaatacatgctgatctgggcccagtggcaactgtttacaggactcagcagggagcctgtaagcggcttggaccctcagctggactggcagagcagaatatctgtgtgtcagtgtactttattcatccgtcactrggtaagaggtctgcaagtgacagactccccacagctggtgcccctaccaggggaccgctgccacacccatgcagagaacttaaagatgaggaggttttccagctccatgactaggcacaactttggctgcttgtttgccatccactaaattctccttcagtgcaggtgcttaggccggccactgggggacctgtaggctagctgccccatccagcccattcatcaggactcccaccccctggggctaagcagggagctcagagactgtgcattccaagagtcagcccattgcctgaggcaacagagggcttcctcaagtaaacaaaaatcacctgtacattcagtagcattgactcttaccataagcaccatctactgacttgtaggctgaactatacagccaatataaaatctgctgaaagaagtgcataggactatagaagcaaagcc

SEQ ID NO: 423289 - DNA, 539 bp, Homo sapiens
ttctccctttctatttatttataactcttattttagagcaagcttgtctaaaccgcagcctgtgggccacatggagcccagaaaagctttgaaagtggcccaatgcaaattcataaaytttcctaaaacattgtgagatttttttgcatttttttagtgcattggctatcattagtgttagtgtattttctctccttccaatgtgacacaaggtagccaaaagattggacacccgttttagagctttgtctaattacattagcttgttcgtctagataaacacacacacatacacatgtatacatatgtatatatgtttacatatgaaagtgttcagacaaaaagttaagactagaaaatccagaaacaaaccaagtccatgataaaataactggaaaaagaataaagcaattcactaatggtattagaaaaattagctaactatgttaaagttaagtaaagtttctacttgataatttttttatgataaatctcatgtgttgaatactgctaaatataaaaagtcagaacaaaaaaaa

SEQ ID NO: 423290 - DNA, 548 bp, Homo sapiens
atgcttctgtgaacatctgtggttttgttttaattttaaaaaactaaaaattggattttttgtatagatgaagtctcattattttgcccaggttaatctggaactcctggactcaaatkatcctcttaccttggccttccaaaatgctgggattacaggtaagagccactgcacctggcctgtatgtttttaattctactgtatatataacaaggggtggaattgctaagtcatctggtaaatctatgtttaactttttgaagaaatgctaacctatttcaaagggcttgcattattttacattcctatcagcaatgtatgggggcttcgatttgctacatcctcacccacacttattattgtctgatgtttattatagccaccattgtgggtgtgaaataatagctcattgtggtttctatttgcatttcaccaataagacatttcatgtgttaataagccatctgtcttgccctttgaagtgctcatctctgggtcctcaagtgaattttattgtttacatacccttaattttaaaccagtacatc

SEQ ID NO: 423291 - DNA, 492 bp, Homo sapiens
atagtatatactatgattacatttacgttccttaaaactgtttttgttttgaaggaatcaataatgaccttgctcctacatatattttagtacattttattacatacataaaattatatcatatataatatacatatatacatacataagcagctgtccttatatacccatgggaattggcttcgggatgtatttgcgtataccctctattctcccatatactttaaataatctctaggttacttataatatttaagttttgctttttggaactttgtgaaaattttctttaatatttttgcttggcagttggttgactccaagaatgcagaacccacagatacagagrgccaactgtatataatatataatatattataaataatattatatatacatatacctgcacacaataagcataggcctcttcctaatctaatcccaaaatctcttccagagattaaacccttttattacaatcaaacaaataag

SEQ ID NO: 423292 - DNA, 534 bp, Homo sapiens
ccagttttctccttcccactacgagcccctggaaactaccattttactttctgtttctatgaatttgattacaagcatatttatgaggtatttgtttttttgtgtgattggcttatttcacatagcacaatggccttaaggttcatccatttgtagcatatgacacaatttccctctaaacaaactgctttataacagaacataaataagtttttaaggctgaataatattctactgcatatttctccacatccttgccaacacttgttattttctgcttgcttgcttgttttttaacagtagccattctaacaggtgtgaggtgatatcccattgtggttttgtttcacatttccattataattagtaatttrgggcatcattttctataattattggccgtttgtatatctttggagaaatgtctactcaagtcctttgatcattttaaaatcaggttattttttgttattattgagttgtaagagttctttatacattctggatattaataccttatctgatgtatggttt

SEQ ID NO: 423293 - DNA, 568 bp, Homo sapiens
gattatatatgtactaagtaaaatactttactgatttgacaccaggatatttggtgctaacctggatcttattttcataatccattttcttcattaaacttattttaacacagaatggtcagtgtcataataatcactcgcactattcccttcaggagcttttaatttggcaccacggtagtgtgattcctcactgcccccacctcccccctcaccatttcttctaaaggcagttaaaaataaatagaaaagtcatcattgaataaaatgctatttttggaggaaacatagaatcccaaaagtgttaactctatacaactaggaactatagaggtttctgcagataatgggcactcacataygtgcccagatgtcacagaaaaatgatttccttgtttaaataaagtgctacctaacacttgccttccccttttccttcaacatttaaaagaagaaaggaagggagaagacaaggaagtaaggaggaagacagggaaggaagttaaaagaggaggaagctattttcatcaattcttgctatgttctttctccatgtaatgtagaagtt

SEQ ID NO: 423294 - DNA, 619 bp, Homo sapiens
atagccacccctggctatgaggagtactgcccaactagcactgatatttccttaagtcacaaggtcttttcaattgtttggaatagtttcagtataaatggtacaggttcctttttgtacctctggtgagaaacctgtatttaagagcacctgtcagagtcctatagtttgttataaaccatcttttgaaaaggattaaaccaagacaaaaattgtctgtgaattacaatatgtccagggtagttacagttagaaatacaattgacaaagtagtttggttatttccatggtttacaataacttaacataataaacttaattatgattaatagaatatacgtagacawtagaatttcagaaatcctgtacaattttggaccatattagtattattcaccaaaatataacttaaagtagattgtacactattttggtaatctcatataactaaatatgtcaaataatcctgtttttctctcttctagaggctccaggggccctccaaagccttcaaaaagacaggtgtcaagaaagatgattttgaacctacagttttattttgggaatcatgttaaatatgttggaaatttaaaacacttgatgctatgaaatagaattc

SEQ ID NO: 423295 - DNA, 619 bp, Homo sapiens
atagccacccctggctatgaggagtactgcccaactagcactgatatttccttaagtcacaaggtcttttcaattgtttggaatagtttcagtataaatggtacaggttcctttttgtacctctggtgagaaacctgtatttaagagcacctgtcagagtcctatagtttgttataaaccatcttttgaaaaggattaaaccaagacaaaaattgtctgtgaattacaatatgtccagggtagttacagttagaaatacaattgacaaagtagtttggttatttccatggtttacaataacttaacataataaacttaattatgattaatagaatatacgtagacattagaatttcagaaatcctgtacaattttggaccatattagtattattcaccaaaatataacttaaagtagattgtacactattttggtaatctcatataactaaatatgtcaaataatcctgtttttctctcttctasaggctccaggggccctccaaagccttcaaaaagacaggtgtcaagaaagatgattttgaacctacagttttattttgggaatcatgttaaatatgttggaaatttaaaacacttgatgctatgaaatagaattc

SEQ ID NO: 423296 - DNA, 616 bp, Homo sapiens
acaatatgtagtaatacattgaatcattattttctgataacacattagcaccacttagtcaaggattttgcttatttctaattgtttggagttagggtagaatggagcagaggaagacatagtaggtaggtgtagcctggaaacaatcctrggaatgtaatcaagtatataatagttcccaatttgatcccaatatggaagcaactatgaagtaaggtttctaccacaattggaaaatcattttctctccttgtctcttattttccctagtgctttgttctgaggtacatgaaagagctttgtagaggaggaaggagtgtattgttctttaattatcattgaataataccaccatattaattctagagtaaaatgcactgtcaattcccaaagaatttactatgcatgtgacagtggcattttgcaggtggtgcctggtattttaaatatttatgtaatccattttattcaatctctgtcatcctatatttcccaaccaaatattattttttgattattgttaattcataaaatgcattttcttttccaaagttttgctcttaggagtaaatgaataatccatcttttgaattggaagaaatagtagacacatctg

SEQ ID NO: 423297 - DNA, 506 bp, Homo sapiens
gacatcttgacaccaaatttttccccaactttgcctactgagctcagataactactgcgaattctgtctcagtaagacttacctagtgaagcactgagttgtgggctgattctttctaccaattgccattgatttctccactctgagatacctcttttgaatttagagacagctgcatatgttctacaatggaatttccaattcacacagcaaaaacaaaagtactatagcagtagacattcaataaccatttatcgaatgaaatataaatacacaaaatagaaggctatagaaataggcagtcatatgtttcactctcttgatwtctggacttgtctaggatcaacagcattattttaatgatcagggcttgataattaccaggaattttagaacatattaaaaaattatcccaatgctttatcatctatgaatgcattctcatttggttcatataatataaattaaatgttaagattggcagtaaactctccatttgcactgtg

SEQ ID NO: 423298 - DNA, 506 bp, Homo sapiens
gacatcttgacaccaaatttttccccaactttgcctactgagctcagataactactgcgaattctgtctcagtaagacttacctagtgaagcactgagttgtgggctgattctttctaccaattgccattgatttctccactctgagatacctcttttgaatttagagacagctgcatatgttctacaatggaatttccaattcacacagcaaaaacaaaagtactatagcagtagacattcaataaccatttatcgaatgaaatataaatacacaaaatagaaggctatagaaataggcagtcatatgtttcactctcttgatatctggacttgtctaggatcaacagcattattttaatgatcagggcttgataattaccaggaattttagaacatattaaaaaattatcccaatgctttatcatctatgaaygcattctcatttggttcatataatataaattaaatgttaagattggcagtaaactctccatttgcactgtg

SEQ ID NO: 423299 - DNA, 594 bp, Homo sapiens
attttcattctttgtgggagctgatgatggcagctgcttctagtcagacatcttagaccctccccctgtagtgtagttttaagttaagaaacataatgtctccagctttgttctttttgcttagaattaccttggctatttgagttattttttggttttataagaattttaacatagttcttttctagttctgtgcaaaatgtcattggtggtgtgatatgaatagcactgaacctgcaaattgctttggacagtataaccatcttaattatattgattcttcttatccatgagtattgaatgtttttctatttacttatgtcaactctgatttctctgagcagtattttgtaattgtagagatatttcayctccctagttaactgtattaataggtgttttattgttttgggggttaatactattgagttttgcacatcaattttgtcttctgaaactttgctgaagttgtttatcagctaaaggagctttttgaccaagactatgggtttaaattttataaatatacttttctgcatccatgaagataattatgtgattttttgtctttatttctgtttatgtgatgatcat

SEQ ID NO: 423300 - DNA, 546 bp, Homo sapiens
attcaagtatgtattacataataaatgccagkttgcaaaaatatgaactcattcaaacttaaagacttaaatctggattgcactgacctgctttatgctgtgattcttactgtgctatctgcatttctcataagactaaacagatttttactttctcctcagaataattcttttgccaaaagggtcctagaatgcttgtgctgctataacagtggccaagccgaactcagaggtggaggtgggtgacaggaggaggtgagaaatttatggccttgagggtgcttaaaatggtcctaagcaatttcagagccccagggatccatgcccttgactctagaatctcaatactgattttttttttttttccagggttggggttgggcagagtcttgctctgttacccaggctggagtgcagtggcatgatctcagctcgctgcaacctctacttcttggattcaagtgattcttgtgcttcagcctcccaagtagctgggattacaggcgtctgccacaacacctggctaagttttgtatttttagtaga

SEQ ID NO: 423301 - DNA, 546 bp, Homo sapiens
attcaagtatgtattacataataaatgccagtttgcaaaaatatgaactcattcaaacttaaagacttaaatctggattgcactgacctgctttatgctgtgattcttactgtgctatctgcatttctcataagactaaacagatttttactttctcctcagaataattcttttgccaaaagggtcctagaatgcttgtgctgctataacagtggccaagccgaactcagaggtggaggtgggtgacaggaggaggtgagaaatttatggccttgagggtgcttaaaatggtcctaagcaatttcagagccccagggatccaygcccttgactctagaatctcaatactgattttttttttttttccagggttggggttgggcagagtcttgctctgttacccaggctggagtgcagtggcatgatctcagctcgctgcaacctctacttcttggattcaagtgattcttgtgcttcagcctcccaagtagctgggattacaggcgtctgccacaacacctggctaagttttgtatttttagtaga

SEQ ID NO: 423302 - DNA, 546 bp, Homo sapiens
attcaagtatgtattacataataaatgccagtttgcaaaaatatgaactcattcaaacttaaagacttaaatctggattgcactgacctgctttatgctgtgattcttactgtgctatctgcatttctcataagactaaacagatttttactttctcctcagaataattcttttgccaaaagggtcctagaatgcttgtgctgctataacagtggccaagccgaactcagaggtggaggtgggtgacaggaggaggtgagaaatttatggccttgagggtgcttaaaatggtcctaagcaatttcagagccccagggatccatgcccttgactctagaatctcaatactgattttttttttttttccagggttggggttgggcagagtcttgctctgttacccaggctggagtgcagtggcatgatctcagctcrctgcaacctctacttcttggattcaagtgattcttgtgcttcagcctcccaagtagctgggattacaggcgtctgccacaacacctggctaagttttgtatttttagtaga

SEQ ID NO: 423303 - DNA, 250 bp, Homo sapiens
aaatacttatattgctaaagtatgtttttcaaattcatttgcagagtatataaagatattcagatatgaatttccttgtggtgaaccaaagagcataggctttgaagttagaccttactttgcatcttgactctatgtgaacttccatagaatattgaatactctgaatctcagtccttcatgtgtcaaataaggttaatagttatctcaagggattgttgtaagaattawgtaaaataaagtttagaaa

SEQ ID NO: 423304 - DNA, 600 bp, Homo sapiens
cttctctccctgtctctgtatttgcctttctctctatctcctcatgacgtgaagatacaaagaaacagctgtctgcaaaccaggaagaataccctcaccagacacccaatctgctggaactttgatcttggacttcctggcctcgagaattgtgagaaacaaatttctgttgtttaagccacccaggctatggtgtgctgttgtagcagcccatactaagacagaaattagtaatgagcagtggggtgctgctgtaacaagtacttgaatatgtggcagtggctttggaatttgttaatgggtagaggctggaagagtttggaagtgcatgctagaaaatgctgacattgccatgaaggagattttaaaggtgactttggtgagggctyaaaaagaaaagagaaaagcttccattttcttagagactccataaataatgatgaacaaaatgttggtagaaatatggatggtaagggccattctgatgagatctcagatggaagtaaataacatgttattggaaactggaggaaaggtggtgcttgttataaaatgtcaaagaacttggcttaattgtgtttgtgttttagtattttgtgg

SEQ ID NO: 423305 - DNA, 553 bp, Homo sapiens
agcatatcaataattcttaaaaggaatgtaagggagtttctaataactacctttaaaacatagtttaaaagagtaaccagccccggatagatttacaaataagttgttttaagctttcatggaacaaattgttctcatgcaatataatatcaattaaattaaaaagtaaacagcttttcagttctttttataagctggcatagtcttaaaagccaaagtctggaaaaataaagaagcttacaagctaatcttacctatgacttcaggatttttcacaaatttaaaataaaataccaatcaacactagactagtacaagtttacaacagccaaataaaaccatcaagaaattaaaggtttctatatgttattataactcattacccataggtcaaaaaggattaaaatgttgtaattattttaacagctgcaatactgataaatctgataaatttaacaactattattgataagaactataataaaactacataaagataataytttcttaatgtgataaagaatattggccaggtacggtggctcgtgcctgt

SEQ ID NO: 423306 - DNA, 616 bp, Homo sapiens
attatacatttgatttataagattagttatacacaaatcctgtcctcaactgatcttgactttcttttctagtttatttgtctcttgtcatattttttgaagtttccattttattatataaaatttttttatttggctgaggtataactaaattataaattctgctatctagaagcagatagaattgtaggatagataaaatggatataaagtttccttctaggctgacagggacctggataagggtgttctataactcactgaagactgagatacaattacttttaccacagtttctaaggaggatccaagtatcagttattctactcctaagcttccctagaagtaggtgttaaaaaccactaagagtctgagatttgaccctacttacgagctaacaagtttgcctgccacggtttcatcaatgstggcagctttcttccagatatctctacctgaatgtttagatgcctatgggcatctaaaacttaacatctatgaaataaatcccagcccttctcactttgatcctcttatccaccccaatctccttttcttcacttggtctctgcctaagtacaaagcactacaatgcacctagttaccaagacccaaa

SEQ ID NO: 423307 - DNA, 592 bp, Homo sapiens
aatattgctaaccgtctcatctgaggtcaagcagtccatattaagcttagggagctgtatgagacatcagaacctggtctaatttattacatcttcagatgagaaaactgaaggccacagagtaccctattagtgtaatagaaatagctagggcagagtggaggcaagaatccaggaatatcaacccaaagctccctttatttatttatttatttatttatttatttatttatttatttatttattttaaaaattgagtagatgggtcaggcacagtggcttatgcctgtaatcccagcactttgggaggccgaggcgggcagatcacttgaggtcaggagttcaagaccagcctggccaacatactgaaaccctgtctctactaaaaatacaaaaattagctgtgcgtggtgycacatgcttgtaatcccagcgatttgggaggctgaggagggatcgcttgaacccaggaggcagaggttgcagtgagccaagatggcacgccactgtgctccagcctgggtgacagagtaagactctgtctcaaaaagaaaaaaaaaattgtgtagatgaccatgcattcagtatactt

SEQ ID NO: 423308 - DNA, 558 bp, Homo sapiens
ccctggttctaaggatggagaaagttatctatgttaggccaatgagatcacaacaccctgaccacagtgactggctcagggagaagcaggtgactaatgggaggccagtcagggcccagacaattttattccgggactttgagccttcagggaagaagacttcctcttctagtctgcctgttatgacaatttgagccttatgctatgsgagccactatgaagatcctaagagtggagtcaatccaggggaagaaaactgagagctggacctgggcagtatcatttgagcccagggtcaagcgatcactgaacttagagctactctagacctcttcagctaacatgatccagtaagttctctttgtgtataaaccagtctgatttatttttctatagaagtaagcctagagactgataatatgctcaacaaatatttgtcaaatgaaaggaaaccataaaatggatagattaactatctcagagggctggtctgagaagtaaatgatttaccagtcatttacttttgctaggccaagcacagtgcctagcaaaaagcag

SEQ ID NO: 423309 - DNA, 585 bp, Homo sapiens
aaggagttcctcctgtggacttcgacctacactgagttggccacaacagtgtcacatgtctactctgtctggatgggaacctggcagaagggcattgtaaatggagttggataccgtcatccaacagtrtctgccatagttgctagctgtgtaatcttagaagagttatttagccttgctgagcctcagcctcctgtgaaatgaggataattaatgccacaaagcttataaaaaagcaaattataggaagtgacttgcatataggaaatgcttagaattaagtacaacacaaaatgatgtcttagtcccttcaggtgactatgacaaagcacctagactgcgtaatttgtaaaaaacagaaattcgttgctcacagttctggaggctaggaagtcccagatcaagtgtcaacagattttgaaggtctgttcttcatagatggtgacttctatatgttctcacatagtagaaggggccaggcagctcccttcaacctcttttataggggcactaaattgattcatgagggaaaagccctcatgacttaaccactttctaaaggccccacctcttaatactattaca

SEQ ID NO: 423310 - DNA, 558 bp, Homo sapiens
taatgctgctataagtgtttctgctacagtgtttctctaataaaacaaattaagagcttaattactttgtagtcctatctcctaaagaagaaccttatgagaaatacaaagtacagatgtgaagaagatgcttttctggccaacatgtagagttgcaccatacagtaagaactcacraacagaaaccatagtctaatggtctgtcttcagacctccagctctgttgtgttacctggggctgatgtgactctcaagatttcttatctgtaaaatgagatcattagaatcgcttcatgggctaatttagaaccttgctcatcaaagtgcagtccttgggccagcagtgtcagcatcatctggagcttgctagaaaagcagaatttcaagcccgagacctccagaataacaatatctgagggtaaaatccagcaatctatgctttcacaacctctccaggtagctcttatgcatgctgaggttcgaacactgctggttagagaactaaatgaatcagatataattacaaacactgctttccatgagttcattatcattagg

SEQ ID NO: 423311 - DNA, 558 bp, Homo sapiens
taatgctgctataagtgtttctgctacagtgtttctctaataaaacaaattaagagcttaattactttgtagtcctatctcctaaagaagaaccttatgagaaatacaaagtacagatgtgaagaagatgcttttctggccaacatgtagagttgcaccatacagtaagaactcacaaacagaaaccatagtctaatggtctgtcttcagacctccagctctgttgtgttacctggggctgatgtgactctcaagatttcttatctgtaaaatragatcattagaatcgcttcatgggctaatttagaaccttgctcatcaaagtgcagtccttgggccagcagtgtcagcatcatctggagcttgctagaaaagcagaatttcaagcccgagacctccagaataacaatatctgagggtaaaatccagcaatctatgctttcacaacctctccaggtagctcttatgcatgctgaggttcgaacactgctggttagagaactaaatgaatcagatataattacaaacactgctttccatgagttcattatcattagg

SEQ ID NO: 423312 - DNA, 558 bp, Homo sapiens
taatgctgctataagtgtttctgctacagtgtttctctaataaaacaaattaagagcttaattactttgtagtcctatctcctaaagaagaaccttatgagaaatacaaagtacagatgtgaagaagatgcttttctggccaacatgtagagttgcaccatacagtaagaactcacaaacagaaaccatagtctaatggtctgtcttcagacctccagctctgttgtgttacctggggctgatgtgactctcaagatttcttatctgtaaaatgagatcattagaatcgcttcatgggctaatttagaaccttgctcatcaaagtgcagtccttgggccagcagtgtcagcatcatctggagcttgctagaaaagcagaatttcaagcmcgagacctccagaataacaatatctgagggtaaaatccagcaatctatgctttcacaacctctccaggtagctcttatgcatgctgaggttcgaacactgctggttagagaactaaatgaatcagatataattacaaacactgctttccatgagttcattatcattagg

SEQ ID NO: 423313 - DNA, 606 bp, Homo sapiens
ttttctataggtttataagcttttccagtgtcttcacaaagctagatattggcttcgtttatcctttttgctttcgttttcactgaattcttttttctgttaattcttcatagcttgtttggttactttttaataaatactttaatgctgtactatttcctcttgagtagagtttttcccatgttccagaagctttggtagttattactgcacattttaaaatattataatgtcaaaaactgatcagattaatattcaaggactcttgcattgytggtgatagtttaaaattgttgaataacctttgtatgaggcagtttatctattttcatcagtaaagcttgcatttgctttaacccagcaagcccacatcatagattttttttcctgttaaaagcagacaaaaacggatatatgtttaggtttatcattttcacaattgaggactggtttttatacatgtggtacatgcatttagtggaatagtaggcagccattcaaaatgaatgggtcgttgtgtcgggagaggacattatacggtatgacagttgtgggggaaaagcaaaatatataaaacagtgtaacctcatttatgtaaaaatatgc

SEQ ID NO: 423314 - DNA, 574 bp, Homo sapiens
tggtccctgtgttgtgtcttggagtctggagcgatgaagacctctgtgctcttaggcaagtccttcctcttttctttattgttttggaattcttctggactcgatccagcaataatttcaacagttggtttgactattgaatagtttcaatagtttctgatgattggttgttagaatgaaaataaggccctttgataacacagaaattagaattggggacatgcrcctgggagataactgtcctgtcatttaactcactgttgtcatttaactttgagttttcttatactgtcacttcttgtgggatcaagaaaattatgttccaaagaaacgatgctgccatgttcttggagatcacttatacaccaaagttggatactacctatccaaaccttaacagtggtttgctttgtgaagaggcttaaatttccatctgtgatgcattttgaaatgagtgggtttgatgtcaacccactgaaagatatccctcaaaaaacaaaaggacaagagtcatcagctcccacacaaagtaaaaaatgtgaacctaattttagcagtgttaataaggagcaat

SEQ ID NO: 423315 - DNA, 577 bp, Homo sapiens
tgaatgactaccatgtgaaagccactctgcctggcattagggacacaaagattaagtccctcactatgacctcaaggagttttacagtccagttggaggatacttataagtaaacttaagtagcaatagtgaaatgtgtgtttgaagagatatctgcaatgggtgttaagtgagaaatgggaaagagcaccaaaaagcacctaggatttgcatcaagggggtttagggaaaacgtcttggagggaacaaataggctttgttctgaaggattaattggatttagcttggcaatgttccaatgtaataaatagcatagccgtctgttctgggacacaaaagtactgcagaatgacctgaatataaaggacaagaaatagagaaaggcagtgggtagaaatgagattggagaggtaagcagggctaggacactggatgcaagtcattccaaagacaggcaggtaacattgtgcgaggaagyctggtttaaaacagacagctttgtgagttttggaccgcaatgaattggggacctcataaccaatgaaaacaaattcaaatttaattagaagaaaaaaac

SEQ ID NO: 423316 - DNA, 590 bp, Homo sapiens
ttcttttgtaaagagaagaatctttgtataaaacaaatgattgtttcctagattatattaataaaatacrgatttttcacacattacttttgcataaacatagttctagctaaatacatatttgatataaacatgccaaaatgaaatttgatcttatattgtgcttcatattactaataaaaaaggattgaataatagttttttccttgaataaatgtcatttgttggatttgcactaaaatgtgcttttgtaggcttatctacagtaagaataatattcttttaggcagtaggttgaggttcaatatgtaacacaatagtatattattttgttataaaattcattaggtaaatgctagagttctacttaagtgccaaaatcagtattttatgattctgaaataaattatctgaaaataacaaagtttagagagataacttaaaaacttacagttgaaagacaaactagtctttgaaaaaaatatttttctgtaacaccaggtaaaatacttatttcctgtagttaatataatgctaatgaggtcttgatcccagattcattgtaatttgtgctgtgtccctaaacactc

SEQ ID NO: 423317 - DNA, 547 bp, Homo sapiens
ttaagtgcacttcagccaccagagtagctaaaacaggcatgtaccaccacacccagctaattttttaaattttttgtagagatgaggtctcactatgtcrcccaggctagtctcaaattcctgagctcaagcaatcctccctccttggactcccaaagttctaggattacaggcatgagccactgcagctagcctaaaacagcatttttaaaagaataaaagttattagaaattatcaaaatgcatagcatgtgctaagaatgtttcttttgatcaactgtttcatttataagtaaacacacacaaacactacacacacagttgttgaaatgtaaaatttatttcttataaattcacacacataaatacacatagctaatgcaatgtgaaatctattttactatgggtcacaaacaaaaaccttgaaaagccattgctatcaagacatgttcctcactccctcatctacacttccactgtacttccactgcgcacacactgcacaaaggtgtgcatgaccagtccacccctttatgtacttaattcc

SEQ ID NO: 423318 - DNA, 604 bp, Homo sapiens
atataattcccaatctgcccttccaggggaatatgaattatgagtgtagaaaaagagttagattagaagactgaatcactactactataatgataggcctttataagtaaatttgaaaatttagattaaatggacacttttctagaaraacatatctgaccaaaaccatcaaagaaattgaaccagtagttacaaaccgatctctctccaaaacaaaaagaagcacgaccaaaaagacaaaatctacagctactcaatggcttcacagcacagtgtgacgaaacattcaggggacagattattacagcatcataagacctgtctctgggacagaaaaactcttgagattagtctgtaaccttgataccaaaacccagatgaggacgctataggcctaaatcacccagaaaagtacatgaaaaacttcaaatatcagcaaaacaaattcttcaatgtgttacaaaatattacctcactactcagtgggatctgtctcaggaatgcaaagatggtttaacattaggaattctaataatgaaattcgcccattactagattagggggtgggagtgaatatatagacattgaaaagggaatgggaggg

SEQ ID NO: 423319 - DNA, 604 bp, Homo sapiens
atataattcccaatctgcccttccaggggaatatgaattatgagtgtagaaaaagagttagattagaagactgaatcactactactataatgataggcctttataagtaaatttgaaaatttagattaaatggacacttttctagaagaacatatctgaccaaaaccatcaaagaaattgaaccagtagttacaaaccgatctctctccaaaacaaaaagaagcacgaccaaaaagacaaaatctacagctactcaatggcttcacagcacagtgtgaygaaacattcaggggacagattattacagcatcataagacctgtctctgggacagaaaaactcttgagattagtctgtaaccttgataccaaaacccagatgaggacgctataggcctaaatcacccagaaaagtacatgaaaaacttcaaatatcagcaaaacaaattcttcaatgtgttacaaaatattacctcactactcagtgggatctgtctcaggaatgcaaagatggtttaacattaggaattctaataatgaaattcgcccattactagattagggggtgggagtgaatatatagacattgaaaagggaatgggaggg

SEQ ID NO: 423320 - DNA, 429 bp, Homo sapiens
aaaaatattccaatttaatcccagacaaacactgcgtcctttctctgtatttcaaaagctcagagaaagtcctttaatcagcctcctcgacctggggctctaagctgggctgaaaaccccgcagcccggcccagctctgggtctggtaggaagggccctgcctgtcacstttaggtccaagcattcacatcccgatacaatcagcttgttaggaagaaaaattgtggatttatccaaagtgggatctcagccctgtctgtggagcaggagcccttcctcacacgatggccacgctcagccacagatctcatctgaggattgggaggaaccgtctttgctaaactccagagtggacagctaccgcccccaccactcccgatgtctagtgtgggacggaatctcccagctgtctctgttcctgagccaggt

SEQ ID NO: 423321 - DNA, 574 bp, Homo sapiens
tcttttgaaaaaactacagatttgtatcacttacctcaatgcatggcattctcccagaaaaattagcagatgtatagccaaatgtgacatttgctatcagcttaagtcccaactgacgcgcatcaagcattcgtgacagggctctgtcttgcttgtaagccttcattgactgcttcaccataaatctagtcttcaaaatttcttcaagcattcttggtagtacaccttttcttactgaaggctatcataaagaaaaaaaatgtttaaaacccctcaaacattatagatttacataattaagaaggaagcataaaacataataatggccaactgtcaggaattgaaacatgctaacaacagagtgaccatagtattagtggccgtcaatataaaatcatcacattttatttcttggaagaggatttctcctaaatggttcctgcaatgtttataaawctaacagagcacttctatgtgagttcagagacctccagggaggaggatgtcaactagtgcataagtgaccatacaacaacttcagagggaaattttgttcgaaactttgacagaaacc

SEQ ID NO: 423322 - DNA, 614 bp, Homo sapiens
cattacagtgtggccacagttgaccttgatcttaagaatcgggaagattcctggagttcctatcacatagttacctatcacatatcacatagttacacagctacaacatgaagaggatgccagatgattacacaggccttctgttttaaatgttataaagacagttcttctaatttcttcatctgaatctttctcatttatgcaacatcttgttattgcaagacttattccagtcagctatttgttctgttgtggcaactragggagttggctacgtacactttttttaaaaaaaataatgtattgaaaataacttcgtctcagataaaaagctgtctatttttataaactgctacagctcagaaatgactgctgaaaaaagttaccctgcgcttctcagatttatttcacagattttgtccctttagaagaattgtaaagttgtttcaggcattttttcagatatattacatatatatttattttttgacccggaggatgtttagtctggaggatgtaagagactcttttaaagctgataaaacacctgttttcaagttcaaaagccaaaggattccatttttcctctctaaaaacatttggagacaataaca

SEQ ID NO: 423323 - DNA, 566 bp, Homo sapiens
ttattttaatgccccatgaagccttctgtccttcaaggagatgacacaaacttttcagattcctttcctctcctaatcttaaaataaattttccattattaccacatatgaataaaaacaatgaatttatcattcaaatactatgtccctrgatattattcatagcttcttcctatattctccagtatctgtagtttaacaaagccagtcaattcaaatgaatcttcgtactctcaaattcccttaaacattaaaaaaaataccaactgaggtaaattactctaattctttcttcccattccatggcagggattaacactgacataacttaggagctggcagagcccacaggatgcatggcttaaatgttaccaatgcatgaatatgtgggaaatcactaatgaaaacagtctggtttcatttccaatagttataaatattaagtgaaacctctgtctttctccaatcccttgatactatttctgcttactacagcaacataaaataattctacttcttcatgttaactttattatggatataaagttaattcatagttttttcaa

SEQ ID NO: 423324 - DNA, 546 bp, Homo sapiens
acacttttttttgctattttcagcattcgagaggggaaagtcccacagtcgaagagagagcctgcaacaatggaagaaggctgcagcctgtataaaaaaaatatttttacatgtgttagacatgcagttaaaatgtgcacacacaaataagccagataaagagccatctgactcaataattagtgtaaatataacactaattttagtcctgtgtgaaattcctcaaaatttgtgattaaataacatgcagtacaacccatttgttcttcagccaacatataccaagtgytaattgtgtgctaggcattgtgcaatgtgcgctcttgccctcatggatctgacagtcaagtgggcatgacagtcgaatcagggaactgcccaggagagaatgtgaggctgcacctttgatggagagttccatggtaccagagagcatctcagagtgggatatactctcttaggaggaacaggaaaggctctgagaaatctctcctgacaaattatgtttcttgagaaacaaaaatcctacggttaagattgctattg

SEQ ID NO: 423325 - DNA, 529 bp, Homo sapiens
ccttttttagttcaggttctaccctatttctttcatgttcaaagcatgtaattatctgctagaagttattctgcatctcccaggcaaattatatactttttgcatgattgtagagtttctcctttttcttttccttaaaaggtaaaaaacttaaatgtagataacacaattataatagggtaaaactttcagcacaatgctagataaaaacaaatattttaaataaatatatgttcaaaatatatgttcaaaatctgtgtgtggaaacaaatatggaattaagaaatgacagggataaatgacmtacatgatggaaaactcgcttatgatggagacctctaggaagactgcatgatttctcctggaaaaaaaaaaaatcccataatttgcatccccacatctgtagaatttccctgttacatccagtttaagtctgacatctttaacttctgatccaagagtgacagcatgtacaactgctactaacatatatgtccgttttgaagtagctcctgcctttatgtacttg

SEQ ID NO: 423326 - DNA, 632 bp, Homo sapiens
tctgccctcggccttctccctttctggactgctgaccacctatgctcaggaccttactgtgcctccataatcagagggatcccctaaggtgcaaccaaattgtataatttaaaaaactccacatcttggagagcaggcagttcattgtgagatgatgaaactgtggtgcagagatgcaaagacacaagatgtgttcacatcaccagccagtggcagggacagggcctgacagcagatatctacaactcaacatacawaatacagaaaaaggacactagcacttggtggcacttgttacaagccagagactaggcagggagccttcacattctttatctgagtccaaacctgacattaatcctgtgagctggactaagaagttaagccactttcccaaaatcttgcagccagtaatgatgccgatgagattcattcccaggtctgattgcaaagcctgttcttccttctagcctgtactgccaaaagatttcagggtgaaggaagctgatggagtagttaactcatgagatgggttcctctttgtggctgtatacctgctcgtggtctagtgaaaggagaacagttaatgaatggtatgaatggcagtgcactggaattctggaagatgaagc

SEQ ID NO: 423327 - DNA, 546 bp, Homo sapiens
tctacaaatgaactgacagatttcaaaatcttgactataaacaaacacatctatgtaaatatgcatgctaagtctcactctgtcaccaggctggagtacggtggcgtgatcttggctcactgcaacctctgcctcctgggttcaagtgattctcctgcctcagcctcccgagtagctgggactacaggtgcatgccaccacgcccagctaatttttatatttttagcagagagagggtttcaccatgttggccaggatggtcaccatctcttgacctcatgatctgcccatctcagcctcccaaagtgccrggattacaggcgtgagccaccgtgcctggccctttttttttttttttcaggacgggtcttgcagtattacccaggctggtcttgaactcctgggcttaagtgatcctcctgtctcagcctcccaagtatcagactgcaaggatatgccatgacatttgttgatatctgaacacatcagccacatatgcataagaatgtcaaaatcatgcacagacatgtatgttttatactatac

SEQ ID NO: 423328 - DNA, 546 bp, Homo sapiens
tctacaaatgaactgacagatttcaaaatcttgactataaacaaacacatctatgtaaatatgcatgctaagtctcactctgtcaccaggctggagtacggtggcgtgatcttggctcactgcaacctctgcctcctgggttcaagtgattctcctgcctcagcctcccgagtagctgggactacaggtgcatgccaccacgcccagctaatttttatatttttagcagagagagggtttcaccatgttggccaggatggtcaccatctcttgacctcatgatctgcccatctcagcctcccaaagtgccaggattacaggcgtgagccaccgtgcctggccctttttttttttttttcaggaygggtcttgcagtattacccaggctggtcttgaactcctgggcttaagtgatcctcctgtctcagcctcccaagtatcagactgcaaggatatgccatgacatttgttgatatctgaacacatcagccacatatgcataagaatgtcaaaatcatgcacagacatgtatgttttatactatac

SEQ ID NO: 423329 - DNA, 515 bp, Homo sapiens
agcctcagatttgttgtactatattgtggacatcatatatgacaaatttcacattcctatctactaagtgataatgtttctctctttttagggtttgtggatatagaaacccccacattgtttaagaggaccccaggggtatgtatattccttcaatcagtctattaataatgtcctattagttataaagctagactactttgcttttatattcacttggtccacttttatttactgcctcaggatggtcatattaactaggtttttytgaagaattgagaaaattatttgggtattttgagtcagaatcattttattccacataaattttctttcctttgagtttttttgtttttttttttttttttttttttttggtttgttttgggtttttttttttgttttttttttttttttgagacagtctcactccatcacccaggctggagtgcagtggcatgatctcagctaattgcaacctctgcctactggatccaagcgattctcatggctca

SEQ ID NO: 423330 - DNA, 611 bp, Homo sapiens
gagccacaatatgcaaacaacactattgttctaaaaaacagttctgaataagaggcatgtttattattctatcttgaaacatctagatagaccttatgacatggcctaccttgtgggttgactctggagacaggaggctgactagcagctggggacctcctgtggagacagagaaaagaaggactgagtctgtgtatcaaaactgcccattccacccccgacaccccaccctcatggttactgaggacttttccaggtcataatgaactatgtagtgacataatgccatctccggaaggcaagctcctgtaacccgggtagatgactgcaattctctcacatccagatggcctggaatttccctctgcaagtcctcaggatgctcagactctccaggaaggaagttgtttactccaggtcccaaaccagccccctgttttaagttttgctgttccaagaagccctgagaaaaagagtcacttgctcaggcatcactcgaaatgccagastgaatctcaattcctttgggcagtgctgtaaaaagttatagccagaggaacccttggcgatcaatcacttcaggcccctaatttttgtacctcaggagacag

SEQ ID NO: 423331 - DNA, 644 bp, Homo sapiens
ccttttttcttgtttcttttcctttctctgcccctaacctttcaatttcactgctcttacccttcttctcatgttttgcagaacttctaccagactctcctgtttcctgatgcactgctggaaaacttctcaggaatactattgagcggggctctcaaattttagggtgcatcagaatcacctggaagtcttattcagacacactgctgggccctacccccagagttgctgattcagtaggcctgggatgggcttaaaagtttgcccttataaaaagttcccaagtggtgctgatgctgctggtctgaggaccacattttcagaaacactggcattaaggattctctgctccactaaggagtaacagsacatttgcaatgagcaagagagtgagactctagtccagtggttctcaaacatggatacgcagccgactcatctggggagctattaaatttctttttccaaccctgaagagtctatttcagtatatccgagatgaggcctgggaatctgtagttttcacttctttttgcattctcttgcacaggcaagcgtgagaacgaagccaaattctaaatgacaaagaacagcctgcatcgttgttgctaaagaagagtcttcctactggtgtggccacagaa

SEQ ID NO: 423332 - DNA, 584 bp, Homo sapiens
atgtgccctctcttgaatttttgttggtgacaaggtagtacttgcaatcagtaacaggatcaactctgtacacatgggtatgaatttgagaaagatcattagatacaactatcttaccactggaggcctgctttktgtgataagcatggcttgctttggaccaagggtgacacaaggggccgtgatttgaagggtagtcctcagccagagtgtgggaagggctgtgcttcagctgtgctatggcaattatggtcttggggtacttggttcctaaaagttcacaaggaccaaaaccctcaagggtttggaaaggcctgattattgagaaagttgtttcagttggcacagcttattaatcagcagggttgggctgaatgttctgatactactaacagaggtaaaaaaccttcaaacccatgctaacaaataagaatgagaacaccaccacccaccccgccttctccctagtgctgtgcaatgtagtggttctcagtccagccatgcttaagaagcctttaaaatgtgtccatattaatcccttcctccccattgccatctccatcattctggtttagagctatacc

SEQ ID NO: 423333 - DNA, 583 bp, Homo sapiens
gtcttatgggtacaaagacgaataagacccagactaggttacttwtagtgttgtatgagttctaaaatactatggtgctccatcctgttttcaaattttattgtgtatattaacttagcttagaggacaattttccatgtaatagttgtatttttttaaatgctgctcaatattttttgcctttatgttagggattcaaactccacaaaaaagtcaatccttacttgttagatgtaccatgaaggtttgtcagtatagtgaagttgtttctcacacttcgcaagctggcaaggacctagaagaaaaatgttttaaacggttaaggacaaaagaagacaaatggccaggttcagacttagaaaccagcgacagtgaaagcaagccagggccagcataatacatacctgggcaaaaggagttacaatcaagtcatcgccgtgtctggtgaaaagagaaaaaaagaacctttagaaatttacttgaattataactgtgacatataagctataatattaaattttatcagtgttaacaacacaaatgttatacaagttcttctacctggatataagacaggactcac

SEQ ID NO: 423334 - DNA, 583 bp, Homo sapiens
gtcttatgggtacaaagacgaataagacccagactaggttacttatagtgttgtatgagttctaaaatactatggtgctccatcctgttttcaaattttattgtgtatattaacttagcttagaggacarttttccatgtaatagttgtatttttttaaatgctgctcaatattttttgcctttatgttagggattcaaactccacaaaaaagtcaatccttacttgttagatgtaccatgaaggtttgtcagtatagtgaagttgtttctcacacttcgcaagctggcaaggacctagaagaaaaatgttttaaacggttaaggacaaaagaagacaaatggccaggttcagacttagaaaccagcgacagtgaaagcaagccagggccagcataatacatacctgggcaaaaggagttacaatcaagtcatcgccgtgtctggtgaaaagagaaaaaaagaacctttagaaatttacttgaattataactgtgacatataagctataatattaaattttatcagtgttaacaacacaaatgttatacaagttcttctacctggatataagacaggactcac

SEQ ID NO: 423335 - DNA, 583 bp, Homo sapiens
gtcttatgggtacaaagacgaataagacccagactaggttacttatagtgttgtatgagttctaaaatactatggtgctccatcctgttttcaaattttattgtgtatattaacttagcttagaggacaattttccatgtaatagttgtatttttttaaatgctgctcaatattttttgcctttatgttagggattcaaactccacaaaaaagtcaatccttacttgttagatgtaccatgaaggtttgtcagtatagtgaagttgtttctcacacttcgcaagctggcaaggacctagaagaaaaatgttttaaacrgttaaggacaaaagaagacaaatggccaggttcagacttagaaaccagcgacagtgaaagcaagccagggccagcataatacatacctgggcaaaaggagttacaatcaagtcatcgccgtgtctggtgaaaagagaaaaaaagaacctttagaaatttacttgaattataactgtgacatataagctataatattaaattttatcagtgttaacaacacaaatgttatacaagttcttctacctggatataagacaggactcac

SEQ ID NO: 423336 - DNA, 556 bp, Homo sapiens
aaagcaagtgcaattgaattgagttggtaacatggtcaaagaagtaataatggacatgcaattgtccattaacgtctgcttaatcagctagtgttccataatgggtcatcttagcaaacaagttctgctgtactaacatctgcagcaaacctttggtgtgccagggaacaaacacagtgagatcattctcactgtccatgtgccaaatcagaaagaaactcttctaaacatgttagaattgagtgmttcttgtcttaactgctcagcaacgtagtaatcaataggtaagtatacaacgaaaaacaagcatgaatatatctaccattattctgcatcaaaaattatgatgaagcaacaatagaatcaattctacttgctagttagaggacaagtctctgctcaagtgacatattaaaaggcaaagcagggaaaaaccattaatgccttcatacagaattgaaaaatatcaaaagatcaaacaaatttgaatatagctgctctataactaatctcctaaatgagattagggcttgaacagctccccaaattattacat

SEQ ID NO: 423337 - DNA, 348 bp, Homo sapiens
tagtgtgactttatcctgcaaacccaagagcactggcaattagttgcctttgtgctccatgtttagtactgtagtatggctgcacctgaagaactggaaaaataagcctgcrtagccaggaggactcacttcctcatgatggttatctgtagccgacttcacaatgccttaagagaagaaggaccatctatcttccatttctatcttagcaaacatttactcaagtgctaagtcctaatgcttcattctaaaaaaaaagtactaatacacagggccactcttcaacaacagaatatccattttcacccagcagcacccaacctttgttctgcatataaaacagcccca

SEQ ID NO: 423338 - DNA, 607 bp, Homo sapiens
ttactgactgcgtctgtcaggaaggagacaggaaattgtagtcaccctcacagcagctgcgccattcctcctatcctcctctaatgacgttggttggctttggtgacacgaggtcaggaactgagccacagtgaaggtcaggaagataggtcactgtttatgccgttgttgggctggggaccctgctgaggctatttgctttcttcctttctatactgtttctctttccgttcctctttttataatggagagccaaagcatcctgttttcaaaacatctgactgttttgccactgaggaactcatgctctgatgcattttgctgaagtgtaagacaattcttctaattcaggaggtgatgaaaattgaaacacaaaattaatgarcaattctaagaaggcaatctgttgttaagcaaaacggctagctctaacatgtctaatcgaatttgggcagctggcaggaggttcactagccatccttttcatcttaaataacaataccattgccttgtaaaacttctgctgaacttattccatcttctagtaattcttggaggaaaataatttacaagactaacctacctggcagcaccattctctaaaatt

SEQ ID NO: 423339 - DNA, 476 bp, Homo sapiens
caaatacccctcagcataacacaatttcacctatcgctgttcttaagatcagacattgcaaacaaaacttagtggccacgtagctgaaacagaactaggaacacagagtttttgcaaaaatgtagtggataccactgataagtacactccctctataacatttcttcacatcacttccagatctgcaactcagagatttacactggctccttagttgataagggtaagcaaaatatggccaaataagactacatagtaaagggagtgatgatcaygataaagttttaagatgtcaacttggatggaaatctcagataatttcagcaacattgaaaactgaatatggaatatagtttttttttgccatggataattcagttcccaaagaactggtgtagatcaatttctttctggtggccacaaaaatgtttgcattgcattatctcgaactcctgggctcaagcaatcccaaagtg

SEQ ID NO: 423340 - DNA, 358 bp, Homo sapiens
cttcatgcagaggaaaaaagggatctgatttctattcaagcttgaccaaggaaatacatacagtaattatacccgcagaagtacaaaaaagagaaggactcttcatagatacaccagtgagctcattcattgtctactgcatggaacaagcactcaggtacttctagagttggtacaacgtgagatgtgggtgaacaggtaatggatatgaagagaccttgctccattgtcctctcttcttcagatcagccatcaaaatgtttaagcaaaaattaatacattttgaagcaatgttagttaggctagagtrtcactttccaaattcttaattcacagtcaagactttgtgtccacttta

SEQ ID NO: 423341 - DNA, 635 bp, Homo sapiens
tacacattgttgatgatatcggtatacacaaatgcattaatctatgaaggaagggagccacggccaccttctcagagttggtatggcaaatatgaatattgtttctccttgtttcagcatcattaattcttctgttctagatttttagttactacttcttcaacacattgcatcagttttataattttttaggagactaagcctctggatgcttattactaataagaaatatagagagtattttatatttctgtgatatcccccttggaatatagtgctctatatatacctagggtggcattgggcagttcagataagtaattgcatattgagaatatactatttaccggacactgaacaagayattttgagatacactgcatcccttagtagaaatacaatgaagaataagacatgattcctgccctgaaattctgttaattgctttacagttaaatacttttaatagtaagagatgtaaagggaaggttactctgatattagaaagcaaaacaagtagaaatgtcattcattttttataaatagctcagttaatggatgtgatacattttataaagaacctgttcaagtatgcagggtggtctaattacattaattttgtaagtatattgtat

SEQ ID NO: 423342 - DNA, 450 bp, Homo sapiens
gtccaaacacccatgggaagagactgtgatgcaaagaaaaaaagaagcaaaagtctggctgaaatcaaccccaaaggagcttaaagctcagtggaaagggtaagtaggagtaggtctgcgctcctcacaactctgacaatctgctgatcactcaagtattggggagacctatgcccctgcawctcagagcaacaatattggtggtgattagagatcttcatggaaacagagaactaggtggtcagctcgtgtggccatgccacctccctccttaaacccaggctgagacagcagatgccctactggttatgcactcattgtgccactgcctttcccaggaatcttttgcctttgagccactgcaccaccacaccacctgcagccataccccacaatccactctgagtttggcaaggatagaggactagtgagtccctagtgagttgtagg

SEQ ID NO: 423343 - DNA, 450 bp, Homo sapiens
gtccaaacacccatgggaagagactgtgatgcaaagaaaaaaagaagcaaaagtctggctgaaatcaaccccaaaggagcttaaagctcagtggaaagggtaagtaggagtaggtctgcgctcctcacaactctgacaatctgctgatcactcaagtattggggagacctatgcccctgcatctcagagcaacaatattggtggtgattagagatcttcatggaaacagagaactaggtggtcagctcgtgtggccatgccacctccctccttaaacccaggctgagacagcagatgccctactggttatgcactcattgtgccactgccyttcccaggaatcttttgcctttgagccactgcaccaccacaccacctgcagccataccccacaatccactctgagtttggcaaggatagaggactagtgagtccctagtgagttgtagg

SEQ ID NO: 423344 - DNA, 450 bp, Homo sapiens
gtccaaacacccatgggaagagactgtgatgcaaagaaaaaaagaagcaaaagtctggctgaaatcaaccccaaaggagcttaaagctcagtggaaagggtaagtaggagtaggtctgcgctcctcacaactctgacaatctgctgatcactcaagtattggggagacctatgcccctgcatctcagagcaacaatattggtggtgattagagatcttcatggaaacagagaactaggtggtcagctcgtgtggccatgccacctccctccttaaacccaggctgagacagcagatgccctactggttatgcactcattgtgccactgcctttcccakgaatcttttgcctttgagccactgcaccaccacaccacctgcagccataccccacaatccactctgagtttggcaaggatagaggactagtgagtccctagtgagttgtagg

SEQ ID NO: 423345 - DNA, 462 bp, Homo sapiens
gcaaaagccatccaaagcaaaagaaaaaatccagaggcatcacattccaaacacatacaaccaactgatttttgacaaaattggcagaaataaacagtgtggaatgaaaccctattcagtaagcagtgctgggaaaactggctaactataaggagaagaataaaactgggtccctacctctcattatatacaaaaatcaactcaagatggcataaaacttaaatttaagacctcaaacaataaaaatactagaagaaaatcaaggacaccctattctggaaamttccttaggcaaagaatttatgagtgagctctcaaaagcaaacgcaacaaaaacaaaaataaacacttgggatccaattaacctaaagagcttctgaacagcaaaagaaactatctaaggagtagatagacaacctacaaaatgggagaaaatatttgcaaactatgcttctgacaaag

SEQ ID NO: 423346 - DNA, 462 bp, Homo sapiens
gcaaaagccatccaaagcaaaagaaaaaatccagaggcatcacattccaaacacatacaaccaactgatttttgacaaaattggcagaaataaacagtgtggaatgaaaccctattcagtaagcagtgctgggaaaactggctaactataaggagaagaataaaactgggtccctacctctcattatatacaaaaatcaactcaagatggcataaaacttaaatttaagacctcaaacaataaaaatactagaagaaaatcaaggacaccctattctggaaaattccttaggcaaagaatttatgagtgagctctcaaaagcaaacgcaacaaaaacaaaaataaacacttgggwtccaattaacctaaagagcttctgaacagcaaaagaaactatctaaggagtagatagacaacctacaaaatgggagaaaatatttgcaaactatgcttctgacaaag

SEQ ID NO: 423347 - DNA, 509 bp, Homo sapiens
tgcagcctgcccatgtggcagaaaaraaaaaacaattctctggggaggaatggaaggtggctacagaaatttgcgtaaagaaaaagaagccaagtgcttcaaaggtaatacagtgacctttgtagcagccctccaatcacaggcctggaggtttaggatagaagaatggttctgtgggctgggtccagggcccctctgccctttgcagcctcaggacactgtttctcacatcccgactgttccaggtccagctgtggctcaaaggggcccaggtatatctagggctcctgcttcagagggtgcaaattgtaagccttggcagttctctcatggtgttgagcctgtgggtgcacagaatgcaagagctgatcttgggagcctttacctagatttcagaagatgtaaggaaaagcctgaatgcctgggcagaagcctgctacagaggtggatccctgatgaagaacctctactagggcattgcagaggggaaatgtggggttggagcaccc

SEQ ID NO: 423348 - DNA, 536 bp, Homo sapiens
tcagcacagctgccttgccaaattgtgaccagactgcttctttaagcaggaccccaatccattcctcctcactgggcaggacctctttacaggggtttcagccactccaacaaggtttctacggaccaaactctgatctctgcctgggatggatctaccagggatagaggctgctaccatctttgttgtttgatcaacccagatgctccagcctgctggctatgaagaattcaggcagtctagacagaaaaagggttccgcagaatgcagtacatctgctttaacaaaaaagatccagactgattctttgggcaggtccctgatcccatttcttctaactgggtaaggcctcccagtgtgggtctcctgccacctactatagctcagtcccccsctaaataaagattccagaggaaaaagctggttgtgccatctttgttgttttgcaggatttactggtgatacaggtatggaaaaaactgaggcaactggaatctggagttgaattccagaaacctgcagcagccctatggtag

SEQ ID NO: 423349 - DNA, 443 bp, Homo sapiens
tgtgtgttgaggaaactaaaataagttcaaggtaacacagaaaagaaattcagaattcttcagataaatttaacaaagaccttaagtaatttaaagcatgaagcagaaattctgtagctgaaaaatrcagttggtagaataccgtcagaagaagcatcagagttttttaacagcagaattatcaagaagaaaaagttagtgagcttgaagacaggctatttgaaaatatgcagtcagaggagaccaaagaaaaaaagaagaaaaacaatgaagcaagcaagtctaaaggatctagaaaataacttcaaaaggaaaaacttgagacttattggccttagagaggaggtagaaaaagagataggggtaaaaaaaatattcaaaggaataataacagagaacttttcaagcacaagcacttggcttatatatatacacacattcaa

SEQ ID NO: 423350 - DNA, 443 bp, Homo sapiens
tgtgtgttgaggaaactaaaataagttcaaggtaacacagaaaagaaattcagaattcttcagataaatttaacaaagaccttaagtaatttaaagcatgaagcagaaattctgtagctgaaaaatgcagttggtagaataccgtcagaagaagcatcagagttttttaayagcagaattatcaagaagaaaaagttagtgagcttgaagacaggctatttgaaaatatgcagtcagaggagaccaaagaaaaaaagaagaaaaacaatgaagcaagcaagtctaaaggatctagaaaataacttcaaaaggaaaaacttgagacttattggccttagagaggaggtagaaaaagagataggggtaaaaaaaatattcaaaggaataataacagagaacttttcaagcacaagcacttggcttatatatatacacacattcaa

SEQ ID NO: 423351 - DNA, 443 bp, Homo sapiens
tgtgtgttgaggaaactaaaataagttcaaggtaacacagaaaagaaattcagaattcttcagataaatttaacaaagaccttaagtaatttaaagcatgaagcagaaattctgtagctgaaaaatgcagttggtagaataccgtcagaagaagcatcagagttttttaacagcagaattatcaagaagaaaaagttagtgagcttgaagacaggctatttgaaaatatgcagtcagaggagaccaaagaaaaaaagaagaaaaacaatgaagcaagcaagtctaaaggatctagaaaataacttcaaaaggaaaaacttgagacttattggccttagagaggaggtagaaaaagagataggggtaaaaaaaatattcaaaggaataataacagagaacttttcaarcacaagcacttggcttatatatatacacacattcaa

SEQ ID NO: 423352 - DNA, 600 bp, Homo sapiens
ccatacagataattaacaaagaaacgtttgactgaatctgcactataaaccaaattaatctaatagatatttacacatttcatccagtggctgcagaatacacattcttcttctcagccctttgatcattctcaaggataaactatatgttaggtctcaaaacaagtcttaaaactttgaaaaaaacattgaaacaatgtcaagcatcttttctgatgacaataaaataacactaggatcagtaacaagaagacytttgaaactacacaaatacatggaaattaaacaatatgctcctgaattaccagtgggtcaatgaaaaaactaagaaaaaaattaaaatattttgaaacaagtgataatggaagcacaacacaccaaaacctattgaatataccaaaatcagtactcagagagaaaattacagctatgagtgcctgcatcaaaaaaagaaaacaattgcaaataaacaatgtaacaatgcctcttaaagaagtaaaaatgcaaaagcaaaccaaaccaaatattagtagtagaaaataaatattaaaaatcatagcagaaataaatttgaaaaaaatacaaaaaattaattaaata

SEQ ID NO: 423353 - DNA, 591 bp, Homo sapiens
ttttttttcctgtaatttagatcccacaagtgtgtgagaacatgcaaagtttatctttctgtatttgacttattttactcaatgtaataactactagttccatccatgttgttacaaataacagaatcttgtgcttttttatagctaagtagaatttcattttgtatatgcaacacattttatttatccgtttatctgttaatgaacatttaggatgcttccaaatctggactattgtgaatagtgctgcaataaacttaagagtgcaaatatcccttcactatagtgatttcctatatagagggtrtatacctaactatgggattacaagatcatatggtagctctattcttagttttttgaagaatctccaaactgttctccatagtggttgtactaatttacatctccaacaacagtgtacaaagattcccttttcttcgcttctttgccagcatttgttattgtctgtcttttggacataagccatttcaactggggtgagatgatatctcattatagctttgatttgcatgtatctgatgatcagtgatgtttagcaccttatcatatgtctttttgtcatttgta

SEQ ID NO: 423354 - DNA, 578 bp, Homo sapiens
tttgtgtgtgactgacctttgcctagctcccagaatgctcttagaactttgcatattctcaagaagatcctttttgtgtgaccggcctttgcctggctscttgaatgtcctgataggaatgttctgcatgcttggtttttggaaatattgtacttgcttgtttagatagtttatgtaaaaaatataatttatggtggacatctgcttttttttttctgggggtttggaagttcagtgactgacacccccttccccgcaaaaaaggcccctgggtttctatgtgcaggcgagctggtaggcaacaattctcatgtgttgtcacagttcattgttggaggaattaggtgtgtcctgtgtgacttcactgggaaagtgcttttagaagctcctgcctggttttctccagacttcaccccgtgtggttttcccctttgctgactttgctttgtgtcctttcactgtaacaaactgtaattgagcataacttattctgagtcctctgagtctttctagtgacctatcaaacctgagagtgatcttggaaactcccgacatagtactcaacctacaaactctgt

SEQ ID NO: 423355 - DNA, 578 bp, Homo sapiens
tttgtgtgtgactgacctttgcctagctcccagaatgctcttagaactttgcatattctcaagaagatcctttttgtgtgaccggcctttgcctggctccttgaatgtcctgataggratgttctgcatgcttggtttttggaaatattgtacttgcttgtttagatagtttatgtaaaaaatataatttatggtggacatctgcttttttttttctgggggtttggaagttcagtgactgacacccccttccccgcaaaaaaggcccctgggtttctatgtgcaggcgagctggtaggcaacaattctcatgtgttgtcacagttcattgttggaggaattaggtgtgtcctgtgtgacttcactgggaaagtgcttttagaagctcctgcctggttttctccagacttcaccccgtgtggttttcccctttgctgactttgctttgtgtcctttcactgtaacaaactgtaattgagcataacttattctgagtcctctgagtctttctagtgacctatcaaacctgagagtgatcttggaaactcccgacatagtactcaacctacaaactctgt

SEQ ID NO: 423356 - DNA, 553 bp, Homo sapiens
cagctactggtagccaccattctactatctacttctataaattctagtcttttagagtcacctataaaaartaaaaaatataaatgctttggtttattaagttgccactttgctttcagatgaatactttacagatatttttcaaaacctataaattactctgcatgttaggtttaattatctttgttttatgagtaagtaaactgaggttataatgctattatttgcttggcagagcaaggatttgtggttatcctattgggtgtgaagaagtatctcattgtggttttgatttgcatttcattaatcactaattgtgttgaatatcttttaatgtatttgttttccatttgtatatattttttattttttattgggtcattgatatttttattattaactgtaagagttctttatatgtgctggatataagtctttaaaattattttcctattctgtggcttgtgttttcattttcttcatagtatcacttgttgcacagaatttggatgaagtcaaatttatcgtttttaaattttgttacttgtgctat

SEQ ID NO: 423357 - DNA, 576 bp, Homo sapiens
ttttgtctctgatcattcatggacaaaaatgttattttgcctacatgttactgcatctttgcatattgattctctctctgtgtctcttttttctctgtgtctttctgtatttgtctgtctgtttccctctcttttacccccttttttccctctccctctttctctgtcactcttcctctctaattccctccgtctttcccctgtctctgtcacacatacacacatataaggcatcataagcagatagaatttttaaaaaaataaataataytaaactagtaactgattctctgcctaaagggtttcattttttttttcagagaaataaatgtttcaacccaagcaaacaggccagagaaatcaacagtgtataattcttttacactgaaattcaccccaggggtgttgatttgtcaatactccattaagagatgaccaaaaaagggttctgatgtggttgattgctacagttgtttctaaacacagggtactgtgtgcgacacaatgtttctggaggttaattttaaaaatcaaaatgagcgatgttaaaatgttttttggtttggtgctgatact

SEQ ID NO: 423358 - DNA, 403 bp, Homo sapiens
ttgaattatttatattatagttgttatttcatgcatttgtaaggaaactgaaatgtttctgcctttctgtattgaggtttacttgatgtctattgaaaatgtttccttagttagaacataataatggattagaccctcaccaaattactaaaagtttactttgtttctattttatgttcttcttctactttaaaacaatgctaatgtcctttctttttctcttgttttggtyaattttctgtaaaacaattattcaataataaagataatataaataacgaaagtaaatacatataccaaattcccttttacttataataaagaatatagagtttttttgttacattggaaagttgagtgaagaatattaaactttaatttctgccatcaatttctgtactac

SEQ ID NO: 423359 - DNA, 403 bp, Homo sapiens
ttgaattatttatattatagttgttatttcatgcatttgtaaggaaactgaaatgtttctgcctttctgtattgaggtttacttgatgtctattgaaaatgtttccttagttagaacataataatggattagaccctcaccaaattactaaaagtttactttgtttctattttatgttcttcttctactttaaaacaatgctaatgtcctttctttttctcttgttttggtcaattttctgtaaaacaattattcaataataaagataatataaataacgaaagtaaatacatrtaccaaattcccttttacttataataaagaatatagagtttttttgttacattggaaagttgagtgaagaatattaaactttaatttctgccatcaatttctgtactac

SEQ ID NO: 423360 - DNA, 568 bp, Homo sapiens
ttttatgttcttcttctactttaaaacaatgctaatgtcctttctttttctcttgttttggtcaattttctgtaaaacaattattcaataataaagataatataaataacgaaagtaaatacatataccaaattcccttttacttataataaagaatatagagtttttttgttacattggaaagttgagtgaagaatattaaactttaatttctgccatcaatttctgtactactccatttcccactgaaagcatcgagtgttccgataatatatcaattcttaacatgataaatcatggcaataataaggaaatatgacttcctttatcttccacacaagakcaaatttttatttatgtttccctctgtcaattgggtacttcacaatatgttcatagttgtgcttatattcaatggaaataaaaaatcacaccttacattttaaattttgcagtcattttctacattttgtacagtgaaatttaactaagtcctctccacttttcatgtgcctaatctttaggatctatttacattttactgcaatgtgaaaatacaagaaaaatt

SEQ ID NO: 423361 - DNA, 568 bp, Homo sapiens
ttttatgttcttcttctactttaaaacaatgctaatgtcctttctttttctcttgttttggtcaattttctgtaaaacaattattcaataataaagataatataaataacgaaagtaaatacatataccaaattcccttttacttataataaagaatatagagtttttttgttacattggaaagttgagtgaagaatattaaactttaatttctgccatcaatttctgtactactccatttcccactgaaagcatcgagtgttccgataatatatcaattcttaacatgataaatcatggcaataataaggaaatatgacttcctttatcttccacacaagatcaaatttttatttatgtttccctctgtcaattgggtacytcacaatatgttcatagttgtgcttatattcaatggaaataaaaaatcacaccttacattttaaattttgcagtcattttctacattttgtacagtgaaatttaactaagtcctctccacttttcatgtgcctaatctttaggatctatttacattttactgcaatgtgaaaatacaagaaaaatt

SEQ ID NO: 423362 - DNA, 578 bp, Homo sapiens
cattgttaatttacataatgccactaaattttacacttcaaatgataaaaaatggtaaattttatgtcaggtgtattttaaccccaataagaaatttaaaaatacatataaccactgatagctacatgaggcagtataaacaccttctgcatccagacagtttaaggaaaatgagaattctagtaggctatgttctagcaaaggttttacacataaatgtttttaggggcaagctggtaacaagcgtacaatggaaaatggtggggactttttgaaaacttactaaaaagtttttcaaattttattgctataaggtatgctggatttttatcataaatgagtgctagatttggttattttgtttcatcaattgatatgatcacatgatgtttycttcttaagcccgtggatatgctgcattaaattgattgattttcaaatattgaactagccttgaataactggactatatcctacttggtcatggtgtataatttcttttatgcatgattgcatttaatttcctaatattttgttaataattctaataacagactattttgttagtaatattttat

SEQ ID NO: 423363 - DNA, 578 bp, Homo sapiens
cattgttaatttacataatgccactaaattttacacttcaaatgataaaaaatggtaaattttatgtcaggtgtattttaaccccaataagaaatttaaaaatacatataaccactgatagctacatgaggcagtataaacaccttctgcatccagacagtttaaggaaaatgagaattctagtaggctatgttctagcaaaggttttacacataaatgtttttaggggcaagctggtaacaagcgtacaatggaaaatggtggggactttttgaaaacttactaaaaagtttttcaaattttattgctataaggtatgctggatttttatcataaatgagtgctagatttggttattttgtttcatcaattgatatgatcacatgatgttttcttcttaagcccrtggatatgctgcattaaattgattgattttcaaatattgaactagccttgaataactggactatatcctacttggtcatggtgtataatttcttttatgcatgattgcatttaatttcctaatattttgttaataattctaataacagactattttgttagtaatattttat

SEQ ID NO: 423364 - DNA, 596 bp, Homo sapiens
tttgatttaattggagtttattttgctgctcttgcttgcttttattcaatttcatcaacttttgcccttatctttattatttctttacttcctctctttggtttatttttatcttattttcctagtttcctaatatagattaatattttgagcctgcaagcttgggcaacatagtgagatcctgtctctagaaaatattgaaaaattagccaggcataattgtgtgcacctgtagtcccaactactccagaggctgaagctggaggatcacttgaggccgcactaagccatgattgggacactgcactccagcctgggtgacagaataagaccttrtctctaataacataataataataataataataataataataaataatgtgatgctatagtatactatgagacatactgtgactataagattaataataatcatgaggcccaattgaacatctcataggacctaccctacgtgttaactaataatatgaaatatcctagctgggggattttcagcactatagccctgaagattactcgttctctttcacaatggggccaaaaaacactggttgccctagagaaaaggccac

SEQ ID NO: 423365 - DNA, 596 bp, Homo sapiens
tttgatttaattggagtttattttgctgctcttgcttgcttttattcaatttcatcaacttttgcccttatctttattatttctttacttcctctctttggtttatttttatcttattttcctagtttcctaatatagattaatattttgagcctgcaagcttgggcaacatagtgagatcctgtctctagaaaatattgaaaaattagccaggcataattgtgtgcacctgtagtcccaactactccagaggctgaagctggaggatcacttgaggccgcactaagccatgattgggacactgcactccagcctgggtgacagaataagaccttatctctaataacataataataataataataataataataataaataatgtgatgctatagtatactatgagacatactgtgactataagattaataataatcatgaggcccaattgaacatctcataggacctaccctacgtgttaactaataatatgaaatatcctrgctgggggattttcagcactatagccctgaagattactcgttctctttcacaatggggccaaaaaacactggttgccctagagaaaaggccac

SEQ ID NO: 423366 - DNA, 587 bp, Homo sapiens
aagacttacagtctagaaaggcaggttttatttctggttcttctgtgaacctatttgggataacccccaccccccgagacctcagttccctcataaagatgagcctagactacctcataaaaatggcccagagtgtctccatggcccccgatagtctctgactttgccatttggttgaatcagttttcattaastcacggggaatatttgatctgctcatctcatagggatatagcaaaggcaatttgttgagtgttgggggaatggataaaggtgagtaacaagcactaagttcctatttgataagcgtcattactgagaacttaatgccacctaacaccaaactgggaaaagtacaaaaaaatgcactaaaataaataataggcaagttgcaacatttgaatttcacgtatcttcattttcatttttatatcttatttactcttttgctccacaatttgagtcgaacatgtgatgagagttctaacctgatatgcttacttcagtcccaaacatagtcatctttgatcttttctcagatttggcctaaaactcatagtttcattgattttttttaaactaggcat

SEQ ID NO: 423367 - DNA, 587 bp, Homo sapiens
aagacttacagtctagaaaggcaggttttatttctggttcttctgtgaacctatttgggataacccccaccccccgagacctcagttccctcataaagatgagcctagactacctcataaaaatggcccagagtgtctccatggcccccgatagtctctgactttgccatttggttgaatcagttttcattaactcacggggaatatttgatctgctcatctcatagggatatagcaaaggcaatttgttgagtgttgggggaatggataaargtgagtaacaagcactaagttcctatttgataagcgtcattactgagaacttaatgccacctaacaccaaactgggaaaagtacaaaaaaatgcactaaaataaataataggcaagttgcaacatttgaatttcacgtatcttcattttcatttttatatcttatttactcttttgctccacaatttgagtcgaacatgtgatgagagttctaacctgatatgcttacttcagtcccaaacatagtcatctttgatcttttctcagatttggcctaaaactcatagtttcattgattttttttaaactaggcat

SEQ ID NO: 423368 - DNA, 587 bp, Homo sapiens
aagacttacagtctagaaaggcaggttttatttctggttcttctgtgaacctatttgggataacccccaccccccgagacctcagttccctcataaagatgagcctagactacctcataaaaatggcccagagtgtctccatggcccccgatagtctctgactttgccatttggttgaatcagttttcattaactcacggggaatatttgatctgctcatctcatagggatatagcaaaggcaatttgttgagtgttgggggaatggataaaggtgagtaacaagcactaagttcctatttgataagcgtcattactgagaacttaatgccacctaacaccaaactgggaaaagtacaaaaaaatgcactaaaataaataataggcaagttgcaacatttgaatttcacgtatcttcattttcatttttatatcttatttactcttttgctccacaatttgagtcgaacatgtgatgagagttctaacctgatatgcttacttcagtcccaaacrtagtcatctttgatcttttctcagatttggcctaaaactcatagtttcattgattttttttaaactaggcat

SEQ ID NO: 423369 - DNA, 527 bp, Homo sapiens
tttccaataggtatgcagttccaacagtgcggagggaccctactgagttgtgagattatgaacgcaaggttaaaagtcccaaagttttgcttcaacgtggatagccagggcagtctttctgatgttctcagaagagccagtctttgggttctagatggagaagtggttgattgttctcagtcagtgaaccatgaaaaactttctttacctggygaaaatacactgtggcataatgagctactattataacttcagccctctttcatgggaaagcttttatacaaccagaaaacatgcattgaaaatgacaattgaacaaaatcactctttaaatgtttaaatggcccatcaggtagcagaattcacctgaagttttgattttcttctcaggaatatgggtttgacaaaccaaactttggtcataaactattttagcaatttagaagtctgaactccaaatatctgagatagatctcagtcaatttaggaatttcatttcaccatagttaaggattcacatgtgtcca

SEQ ID NO: 423370 - DNA, 590 bp, Homo sapiens
attattatattctcattctcatgaaataaagcaagactggtagcattaagtggaaagcgtctatctcaattttaaatgttgaatctgtacttttccctggcttaagtctagagcaaccaggtagtatatatgctgtaaaacttctattttagtgttcaaagatatttaggaataaatcaattgacctctctattttagatgtgaaataaggaccagaaagcattgttcctctttccaggcagtgaaattcctgcctattcattaactggcaaaagagtagaggtgggagcccaatggtcttgggtggaatgtcctgcggaattccctgggattgaggaaccatgcagaaccctcaagaagaagccacactgggcaacaagagggtggccccatgtgagggacagggggaccgaatcgcttttcctgatttcctattttagcctcactctcttctctcctcaaaytcttaccactccctttatcctctctgactcacctcatggcccagttcattaaaggggacagaaggtggaggcagattgagaaaccagcagtgggcagacattttatttttaatgtgaaatgtctct

SEQ ID NO: 423371 - DNA, 590 bp, Homo sapiens
attattatattctcattctcatgaaataaagcaagactggtagcattaagtggaaagcgtctatctcaattttaaatgttgaatctgtacttttccctggcttaagtctagagcaaccaggtagtatatatgctgtaaaacttctattttagtgttcaaagatatttaggaataaatcaattgacctctctattttagatgtgaaataaggaccagaaagcattgttcctctttccaggcagtgaaattcctgcctattcattaactggcaaaagagtagaggtgggagcccaatggtcttgggtggaatgtcctgcggaattccctgggattgaggaaccatgcagaaccctcaagaagaagccacactgggcaacaagagggtggccccatgtgagggacagggggaccgaatcgcttttcctgatttcctattttagcctcactctcttctctcctcaaattcttaccactccctttatcctctctgactcacctcrtggcccagttcattaaaggggacagaaggtggaggcagattgagaaaccagcagtgggcagacattttatttttaatgtgaaatgtctct

SEQ ID NO: 423372 - DNA, 534 bp, Homo sapiens
cggccaacctgattttctatgagcccatgcttaacattggacttatattctcttgaataacagttgtttctccaatttaggtggatagcactgataactgatgaattagcataggtaatttgacttaaatcatggagtttattcaaattgtatatgtttagcatggaaatctggcaaagtgttttattgttattcagttaaatttgtcctgcttggtttaacccaagcagtctctagggttctaaattgagaagtggttgattgttctcagtcagtgaaccatgaaaaactttctttacctggtgaaaatacactatggcataatgagctactattataaagttccaggaattcttacccaggccaaacgatatgattctaaagytattagaaacctttactgaagagtgcttctcagggtaatttcatcctttcattaacctccttaaagacattatatgctaggattttgcatgcttgtgaagttttcagaaactgcatcagaattaagttataaactatggaaatgactgt

SEQ ID NO: 423373 - DNA, 489 bp, Homo sapiens
ctttcctcttcaaacacatatcttgcttttgtttatacactttgtatacaaaattgtttctctcatatctggtagtgttacaggaaagtggtcttgatctagaccccaagagagggttcttggatctcatgcaagaaataattcaggccaagtccatacagtaaagtgaaagcaaatttattaggaaaataaaggaataaaagaatgactactcctcagacasatcagacctgaggtctgctggtagcccatttttatgcttatttcttgatatgctaaacaggggatggattattcatgcttctccttttagaccatataaggtaacttcctgatgttgctatggcatttataagctgtcatggcactgatgggagtgtggcagtgagggcaaccagaggttactctcatcaccatcttggttttgatgggttttagccagcttctttactgtaacctgttttatcagcaaggtctttatgacctgta

SEQ ID NO: 423374 - DNA, 600 bp, Homo sapiens
gttgtgtctatcagctgcacccctgggtagcgacacaacctcgggaaggcctcagccccctcctcgtacagcactgcctgttggaaagcttgagggaggctatggatgtgcagcacttggcagagggtctggtcatggaagttaccagcaaatatgagctacttttatgattttattttatccaaaagaaagagaatgaaagaagaggggaggaaacaagactaatcaggaaagatgaaggtctaggggtgagggaaggagtaaggagacataaaggcaatgtggagcagctgaggggggaaatggctttcaccacttcccagcatctattgacattgcactctcaaatattttataagactctatattcaaggtaatgtttgaaccctgctgagccagtggcatgggtctctgagagaatcattaacttaatttgactatctggtttgtgggtgcgtttactctcatgtaagtcaacaaygtcctgggattgggacacactttctgggcactgctggccagtcccaaaatggaacataaggaagtggttcttctacttcttttatttctgaaatcaggtaagacatagtttttttaaat

SEQ ID NO: 423375 - DNA, 600 bp, Homo sapiens
gttgtgtctatcagctgcacccctgggtagcgacacaacctcgggaaggcctcagccccctcctcgtacagcactgcctgttggaaagcttgagggaggctatggatgtgcagcacttggcagagggtctggtcatggaagttaccagcaaatatgagctacttttatgattttattttatccaaaagaaagagaatgaaagaagaggggaggaaacaagactaatcaggaaagatgaaggtctaggggtgagggaaggagtaaggagacataaaggcaatgtggagcagctgaggggggaaatggctttcaccacttcccagcatctattgacattgcactctcaaatattttataagactctatattcaaggtaatgtttgaaccctgctgagccagtggcatgggtctctgagagaatcattaacttaatttgactatctggtttgtgggtgcgtttactctcatgtaagtcaacaatgtcctgggattgggacacactttctggrcactgctggccagtcccaaaatggaacataaggaagtggttcttctacttcttttatttctgaaatcaggtaagacatagtttttttaaat

SEQ ID NO: 423376 - DNA, 564 bp, Homo sapiens
ggctcttctcactttttcatctttgttccaacatttgaaaaaataaatctaaacacattccaatgtaactgaagagcaggttaattgtttgccacttgcagaatccaattaagaagagagaagtctggtataaagaaagtgatttgcttccaaagctagcttaggggaagaaatgcagcagtcctgccgtacyacttcactttaggagcagaaagtggcacttttaaaaggcaacagaggaggcgagcaaggattcaggggtccatgctagcttgggcaccttatccaccaggtagttgagcagttgcctgctggtgcctttgtgagcagggtgttgtcccttgaggcaaatctctggagggtgagagttttgtagtgggcatgctttggtttataaatcacctgtgaactcaggagttccatcttgaagcacatacatagttagatgaacttgccctgcagggagagtctgatgaaagggaggtagatgcttgcaatttaatctataaattaccagataaaattttacaagttgactttaaagtcaaacacatttgaatttag

SEQ ID NO: 423377 - DNA, 665 bp, Homo sapiens
aagcttggctatcttcattttattagcctcttttggcctctcaccctgtgaaaatcactacattttgtgccagagatggagctggcatctccaggcttggaagagggctgctgaagctcagccaggtgtcctaaggagcctcaggacaggggatgctcagtagccttgcaatgggaacacagctgagccccacttggccaccctttgccacaaccaggcagaaagcagcttttgaacagatttgttgcctcagatttgatctcaaagaaaaatcgtgggcagtattggtcccaggttctgcttttttacaatttcctctgaaatctggatgcctatcaacaccttggaaaaactgaattctccccaactaatagtggtgtgtcactgtagtaagcctagtacaaaaatgrccttctttgtggaggagcttcatatcctccattttttttttgcttaatttttgcccaagatgagaacataatttagttcactttttatttattcccaacatcatccatgcaccaacatttttgtaactaaaggagggaccattcagaagatgcttatcaactgtcaaagtgacagtgttacaaccaatgcacatattgtaagaaatcaaacaatggcctccaaggttcatttctacacagggattagcagatcaa

SEQ ID NO: 423378 - DNA, 593 bp, Homo sapiens
cttaacccttcagctttatcctaacttaaaacagtcctttaactctctaaacttagggaagaaatccatattcccatgccttcttataatcttttatcaaatgtacattctactttccttacacaccttgaacataaagctgtttcttcagtagtctcaattacatgttataatgtcaactcttttttttttttttcagacagagtcttgctttgttgccaggctggagtgcatacaatgttaactcttagcaacttttatttttggtgaaaaacctggttagtaagtgatttgaactatgtaccaggtgtggagcctaggacccagacagaagtgcagataagatccgactctttccagcatagctagtgagtgtggctagctccacatggttcyagggcttatctagaatccaaagctccaaagtaggtaaaatgaacaattttcaaaagtcaaagaagcagtttatgaccttaaatcacttagaaaacctaatatctgacccacataatttagaccaaatgtttacattttaaagatttttattttaccaataatctttaaaactgtctttatatcccaaagattactta

SEQ ID NO: 423379 - DNA, 471 bp, Homo sapiens
ctcaggggttgacccgcagggtgttgaatttcaggatatagcagagagagctcagtatgttggattatcccaagctgtgggattttgaaaaacagccaccatacagtccatatctggtcgacaaggagaccatcggagtggaaaggggataatctgggcctcaggcctacggtgtgtacaagtataataatcgcttttatttaaagtgcgaatggattatttagtccatttcagccaggcatttgcatcttgatattttgtcttgatggctaaggtctgttttrgatctcttatttttacaatagacaccctagctttattagatgtaggagcaactgttgtgggatctagatctgaggctaccgaagaaggggaagatggcggaataatatatatttttaaaatacctggggtcggggagtcttttctatttatgtcaattcttataccatagaagtgactaagggcagg

SEQ ID NO: 423380 - DNA, 623 bp, Homo sapiens
taaacttaattataataaaatcttgtagacattatccagttttaatgtctgactataaggtaaaacttttatagactttttttaactttttgtaatttttgttaaagagcagtttagtgctttaagaaaaatatattgtgcttttattttaatgtccagttcacagaaaaactggatgatacccatttaactttagccaatatgtttacacacagaatttcctttacamttaacattttaaaacttgcttaaacctttaaaacaaaattttttttaaactttaatgtaggtaaaaatccatattcttatgcctccttataatcctgttattaaaagtatattttatttttcttacataccttgtacataaactattttttaataatttatattcaggaggtgtaattacttttaaattatacaatatttcttgcataaattcccttttatagtttttcttatgactttcacagacaatcttcaacatgtcttaactttctgcattctttttacactatttcttttcctagtttcaccctctgtgtctttctttgatttctgtctcttctggtttctctcttacttactctttccctctatttctctctctctcatttgcactc

SEQ ID NO: 423381 - DNA, 623 bp, Homo sapiens
taaacttaattataataaaatcttgtagacattatccagttttaatgtctgactataaggtaaaacttttatagactttttttaactttttgtaatttttgttaaagagcagtttagtgctttaagaaaaatatattgtgcttttattttaatgtccagttcacagaaaaactggatgatacccatttaactttagccaatatgtttacacacagaatttcctttacaattaacrttttaaaacttgcttaaacctttaaaacaaaattttttttaaactttaatgtaggtaaaaatccatattcttatgcctccttataatcctgttattaaaagtatattttatttttcttacataccttgtacataaactattttttaataatttatattcaggaggtgtaattacttttaaattatacaatatttcttgcataaattcccttttatagtttttcttatgactttcacagacaatcttcaacatgtcttaactttctgcattctttttacactatttcttttcctagtttcaccctctgtgtctttctttgatttctgtctcttctggtttctctcttacttactctttccctctatttctctctctctcatttgcactc

SEQ ID NO: 423382 - DNA, 568 bp, Homo sapiens
tttatttaaatccttgaacacaattatgatatatatatatttcaaatcttcttgccaatttcttcattttggggtttatttgtwttgagtgctttttctcctggttatggatcacagtaaatgctttttgtatgtctggtaaagttataaatttaggtcacacattgtggatgccacataactgagcaacttgattttgttgtttgcctctaaagggttgaattttcttctggcaatcagttaatttacttggagatcgtgttgatttttttagacttgcttttcagctttactatgctgtttctggagtggcctttattataggaatacactaatcctactcccaaagtttggctttatgtggtgactactgaatgcccaagatgttcagcgaggtctctcctcaggctggtcagaactcaaatatcccccagtgctatgtgagctctggcatctccattgagctcactgttcccctgcagtttttctttccccagtagctgttctttatcctattttctctctggaacctctccctgtgcatatgcagctttctatttagccaaag

SEQ ID NO: 423383 - DNA, 568 bp, Homo sapiens
tttatttaaatccttgaacacaattatgatatatatatatttcaaatcttcttgccaatttcttcattttggggtttatttgttttgagtgctttttctcctggttatggatcacagtaaatgctttttgtatgtctggtaaagttataaatttaggtcacacattgtggatgccacataactgagcaacttgattttgttgtttgcctctaaagggttgaattttcttctggcaatcagttaatttacttggagatcgtgttgatttttttagacttgcttttcagctttactatgctgtttctggagtgrcctttattataggaatacactaatcctactcccaaagtttggctttatgtggtgactactgaatgcccaagatgttcagcgaggtctctcctcaggctggtcagaactcaaatatcccccagtgctatgtgagctctggcatctccattgagctcactgttcccctgcagtttttctttccccagtagctgttctttatcctattttctctctggaacctctccctgtgcatatgcagctttctatttagccaaag

SEQ ID NO: 423384 - DNA, 568 bp, Homo sapiens
tttatttaaatccttgaacacaattatgatatatatatatttcaaatcttcttgccaatttcttcattttggggtttatttgttttgagtgctttttctcctggttatggatcacagtaaatgctttttgtatgtctggtaaagttataaatttaggtcacacattgtggatgccacataactgagcaacttgattttgttgtttgcctctaaagggttgaattttcttctggcaatcagttaatttacttggagatcgtgttgatttttttagacttgcttttcagctttactatgctgtttctggagtggcctttattataggaatacactaatcctactcccaaagtttggctttatgtggtgactactgaatgcccaagatgttcagcgaggtctctcctcaggctggtcagaactcaaatatcccccagtgctatgtgagctctggcatctccattgagctcactgttcccctgcrgtttttctttccccagtagctgttctttatcctattttctctctggaacctctccctgtgcatatgcagctttctatttagccaaag

SEQ ID NO: 423385 - DNA, 568 bp, Homo sapiens
tttatttaaatccttgaacacaattatgatatatatatatttcaaatcttcttgccaatttcttcattttggggtttatttgttttgagtgctttttctcctggttatggatcacagtaaatgctttttgtatgtctggtaaagttataaatttaggtcacacattgtggatgccacataactgagcaacttgattttgttgtttgcctctaaagggttgaattttcttctggcaatcagttaatttacttggagatcgtgttgatttttttagacttgcttttcagctttactatgctgtttctggagtggcctttattataggaatacactaatcctactcccaaagtttggctttatgtggtgactactgaatgcccaagatgttcagcgaggtctctcctcaggctggtcagaactcaaatatcccccagtgctatgtgagctctggcatctccattgagctcactgttcccctgcagtttttctttccccagtagctgttctttatcctattttctctctggaacytctccctgtgcatatgcagctttctatttagccaaag

SEQ ID NO: 423386 - DNA, 541 bp, Homo sapiens
tggcatctccattgagctcactgttcccctgcagtttttctttccccagtagctgttctttatcctattttctctctggaacctctccctgtgcatatgcagctttctatttagccaaagacttgaggacttttctatggacattcctggagctgctttcctccacaatgtttcctttcatgttattacctagcctagaaaatctcagctgttttagtaatcccaactccagtctccttcctcagttcagcaagactgctgtggtcggcttgggctccatctccttgttcttcagcccaggaagtctccaggaacaaagccaaggtagttattgggttgatctcatttgattccctttctaaattatctcagtttatctgttctccaatatgtaaaaatagttttttccatatattgtgtactcatttatggaagaaaagctgtccttgttagacctggttttctgttcatctaayggcctctttcgctgttcagcatctgcgtatcctgcttttgttcttcatgtcccagcaacccatat

SEQ ID NO: 423387 - DNA, 626 bp, Homo sapiens
atgataaaattgtttactccacatcatttctactaggtctgccatttcatcttctcctcttgaactcttccccacccccaccactcaccctctgctccccaaggtggaaaaactggacacccacagacctgaacattgtaaasaaagacactctttgtttacaaaacaactattagaactctggttgaaaatgaaatccatgtgtcagagagcatgggtctgatttccctttagcacagagagaataggatgaacaacacctaaagcctacatttcagtgaactcctgaggcagaagtttcagttgcaaagaaagaaaaacatgataaatggacgctctgatcaatcacccacagtaaccaataaccataactgttttaaaccagcaataaaataaagaccaataacatcccataggacttgtaggtcacttttcagaggctgcactcaggcactgacacatgttttcttttgatttcaagaacagggcaggtccaaatcctggaatctgggtgtgcatcatactcactgcagcgggggatgtcacaaagttcccagcgcttgttggggtcggtggtgaaacaccaaggccgcagctccctatcggggttacgacagtaattcttc

SEQ ID NO: 423388 - DNA, 626 bp, Homo sapiens
atgataaaattgtttactccacatcatttctactaggtctgccatttcatcttctcctcttgaactcttccccacccccaccactcaccctctgctccccaaggtggaaaaactggacacccacagacctgaacattgtaaacaaagacactctttgtttacaaaacaactattagaactctggttgaaaatgaaatccatgtgtcagagagcatgggtctgatttccctttagcacagagagaataggatgaacaacacctaaagcctacatttcagtgaactcctgaggcagaagtttcagttgcaaagaaagaaaaacatgataaatggacgctctgatcaatcacccacagtaaccaataaccataactgttttaaaccagcaataaaataaagaccaataacatcccataggacttgtaggtcacttttcagaggctgcactcaggcactgacacatgttttcttttgatttcaagaacagggcaggtccaaatcctggaatctgggtgtgcatcatactcactgcagcgggggatgtcrcaaagttcccagcgcttgttggggtcggtggtgaaacaccaaggccgcagctccctatcggggttacgacagtaattcttc

SEQ ID NO: 423389 - DNA, 559 bp, Homo sapiens
tggtctgggtgggtttctttgactgagttatccagattctcagagcctcaatatctttatctaaataatggagaaatagtatttaatattttggttgttgttaatgactgaataatatctgtactatttcaattattgttttgaaaatgtaattgctgccattccactatggtttgaatgtgtcctccaaagttcatgcattggaaactttttttctcaatgcaacagtgttgagaaatgggacctttaagaagtgattaggtcatgagagctctgccctcatgaattgattaatgtagttattgtagaagcaagtttgttgttgagagagtggatttgttataaaaacaagttaagctctctctctctctcaacatgtcatgccttttatcatgttatgatgcaggaagaagaccctyaccagatgtgaccccttgatcttggaattccaagcctccagaactgtgaggcactaaatttcttttcttaataaatcacccagtctcacgtatactgttagaatagcacaaaacagactaagacatattcactgcttaat

SEQ ID NO: 423390 - DNA, 558 bp, Homo sapiens
gtatatattgctggtgggcatttaagatgatacagtcacttagtgaaaaaatttggcagtatcttaaaaagtcaaacatacacatatgatacaaatgagccattctacttctacatttatacttgaaggaaatgaaagcatgtttgtacaaagacttttgcaaatgttcatcatagtaaaaaaaaatggtcaaatgtccctcaacatgctggtgggtaaacaaaattagtatatctatctaatgaatacarctcagcaataaagaggaagaaactactgatgtatgcagcaaaatgggtgaacctcaaaatcagtattctaagtaaaaacagccagacaaaaaaagtatctattttatatgatgccatgtctgtgacatttccaaatccatagagacagactgtaaatcagtggttgcatgggattcagggtgatacttttctaaagctggattgaagcagtgcaacaatttaaaaattattgagctatgcatttacagtgaatgaatttatggtttgtaaattctacctcaataatactgaaaagaaaattagaccc

SEQ ID NO: 423391 - DNA, 566 bp, Homo sapiens
ctaaaacagtgtaaaacagactagtgccaccctacctggtactgctcctaccagtgcctgagcatgccatatgggcacctggggattgattgaccaaccctgaatgtcaccaccggcatgtgtgtgcaccatcagaaggctgaaaactgacccagcacatctgctgcaaggatctgagtgtgctttctggggacccgggtttaacccaccccacctgctgtcactggcacccatatatagcttccagggtcctaaggacaggtctgaatagcctgctggtgcttgtacccatctgttggaggctgagggaccaacaagccctactactgcagcttgtgcctatgtgcactactgggggcctgaggacagaaccgcttcacctggtgtcattcctgccagttcccaagtgcatkgtctgggtgcctggggattgttctgccctgcattccactgatggcctgatggcacccacacattcctcctgggagcctgaagataggcctacccagcctgccatcaccaataacactggcatccacccacatacaccacctaggggcctgcgg

SEQ ID NO: 423392 - DNA, 499 bp, Homo sapiens
tttccctattgcttgtttttgttgggtttgtcaaagaccagatggttgtagatgtgtggtgttatttctgaggcctcagttttattccactggtctatatatctgttttggtaccagtaccatgctgtttcagttactgtagacttgtagtatagtttgaagtcaggtagcatgatgcctccagcctcgttcttattgcttgggattgtcttggctatatgagctcttttttggttccacatgaaatttaaagtagttttttctttttttatagcatacatatgtacacatgtgtaaaggcatgtcaattactcaatctacacaaaatrccaatatttttataaattcaagaatcctttgtgataaattcaggaccaccaggagctcaaaaattccaagtttttgtttgtttgttattttaaattggtggaggtttgtttgtttattttatttttaaatttcttccttcttttttgaattatactttatgttctgggat

SEQ ID NO: 423393 - DNA, 590 bp, Homo sapiens
tcattacactcataaggcttctctccagtgtgaattttctggtgtgtgatgagatgagagctccggctgaagcttttcccacaagcattgcattcatatggcttctctccagtgtgagttctctggtgctgaaccaagtgtgagatgcggctgaaattttccccacattcgttacagtggtatggcttctctcccgtgtgggctctgcgatgacgcacaaggtcggagttctgactgaarttcttcccacactcatcacacttgtagggcctctcccctgtgtggactcgatagtgtttgatgagatcagatctctcactgaagcctcggccacattcgttacattcataaggtttctcacccgtgtgggtcctctggtgctgagctaggtgagagctccggctgaagcttttcccacactcctcacactcatagggtttctcaccactgtgggtcctttggtgttggattaggtgagagagacggcagaaactttttccacactcattacatttgtgaggcttctctccagtgtggattgtctgatgctgaatcaggtgagaacttcttccaaaacttttcccacactc

SEQ ID NO: 423394 - DNA, 559 bp, Homo sapiens
acagaaaataatttttgttcttttttctggaataccagttgttggccccacctatagtcccgggctggagaaactattagcataaccagctagtgagtagtatcccagtttttcaaagaagcctaatgacatttacctaacatgactgcacagaacaagtaaaatccagaaggcagtacacagtggtgttatatatgagttctgggccaggtgcrgtggctcaaatctataatcccagcactttgggaggctgaggcaggaggatcgctttgagcccaggaattcgtgccactgcactccagcctgggcgacgaagtaagaccccatctcgtaaaacaaacaaaaaatgagttctggtatcagatctacctgggttcaatactagatgggcgacttctagttggcacgccttagactaaaatatgtgtgtctagtatccacatttatacttactttacagggttagtatgaagttcagtaagttaacataaggtatttaagacaatggcagcatgctggaaatactcagtattagtttgcttttgaatgaaattataac

SEQ ID NO: 423395 - DNA, 601 bp, Homo sapiens
ggatgcgataaatgccacatacatctgagggaccaacattatccacagacgtgcagggggatgttgctgagaaacccagatgtttcttaaactttaatataggtgagaattcactgggcattgtgctgaaatgcagattccaattcaatgggtctggggtgggccttgagattgttcawttctttctttctttttttctttttctttttttttttttttaagacagggtctcactctgttgcccagactggagtgcagtaatgccatcatggctcactgcagacttgaccttctaggctcaggcgatccttccacctcagctgctggagtagctgagactataggcatgcaccaccacgcctggctaattttttattttttatagagatggggtctccctatgtagtcgaggctggtctcaaactcctgggctcaagcaatcctcctgcctcagcctcccaaagcgctgggattataggcatgagccaccgcacccagctgatttttcatttctaaccccaatgcagctggtccacagaccacactttgagtaggaaggccttagatgtccagatttttctctgtattatgtaatcctcca

SEQ ID NO: 423396 - DNA, 509 bp, Homo sapiens
tttacccacagtttctgggacaaaaaccaaggaatctctatggagatcagccttcaggcctcctgaagaatatctctcacagtgtcctattctcatgctgaggagcctgaagtccctgtgtgaggattagacagtggattgttatgtgtgtaggagaamcagcttaatatgactgtccatgtctgaacttattgcagaaattgaaaagtaccaagaagtggaagaagaccaagacccatcatgccccaggtaactttgagcaattatggatgcttaattctgtgttgacacctggagatgccaggtccagggaaaacaagagtgtgttcaatttcatgttttcaacggaggttgaattactcctactgccattgctgttggttttcattgcagtagatgtttaggtttccatttcttcctccccttatcatttactaacttactataggttgaccatacctcaaaggctgtatggcaactgcatggaatcttgagcaagtttatggaaa

SEQ ID NO: 423397 - DNA, 509 bp, Homo sapiens
tttacccacagtttctgggacaaaaaccaaggaatctctatggagatcagccttcaggcctcctgaagaatatctctcacagtgtcctattctcatgctgaggagcctgaagtccctgtgtgaggattagacagtggattgttatgtgtgtaggagaaacagcttaatatgwctgtccatgtctgaacttattgcagaaattgaaaagtaccaagaagtggaagaagaccaagacccatcatgccccaggtaactttgagcaattatggatgcttaattctgtgttgacacctggagatgccaggtccagggaaaacaagagtgtgttcaatttcatgttttcaacggaggttgaattactcctactgccattgctgttggttttcattgcagtagatgtttaggtttccatttcttcctccccttatcatttactaacttactataggttgaccatacctcaaaggctgtatggcaactgcatggaatcttgagcaagtttatggaaa

SEQ ID NO: 423398 - DNA, 400 bp, Homo sapiens
tccatgtctgaacttattgcagaaattgaaaagtaccaagaagtggaagaagaccaagacccatcatgccccaggtaactttgagcaattatggatgcttaattctgtgttgacacctggagatgccaggtccagggaaaacaagagtgtgttcaatttcatgttttcaacgraggttgaattactcctactgccattgctgttggttttcattgcagtagatgtttaggtttccatttcttcctccccttatcatttactaacttactataggttgaccatacctcaaaggctgtatggcaactgcatggaatcttgagcaagtttatggaaaattattgagcccactcttttcatgatcactgttcgctgtgtgtcccgagggcactaactcagagtg

SEQ ID NO: 423399 - DNA, 400 bp, Homo sapiens
tccatgtctgaacttattgcagaaattgaaaagtaccaagaagtggaagaagaccaagacccatcatgccccaggtaactttgagcaattatggatgcttaattctgtgttgacacctggagatgccaggtccagggaaaacaagagtgtgttcaatttcatgttttcaacggaggttgaattactcctactgmcattgctgttggttttcattgcagtagatgtttaggtttccatttcttcctccccttatcatttactaacttactataggttgaccatacctcaaaggctgtatggcaactgcatggaatcttgagcaagtttatggaaaattattgagcccactcttttcatgatcactgttcgctgtgtgtcccgagggcactaactcagagtg

SEQ ID NO: 423400 - DNA, 262 bp, Homo sapiens
attcgactccttcaggttatcttgaactgcctgacttaggccagccctacagcagtgctgtttactcattggaggaacagtaccttggcttggctcttgacktggacagtgagtaccttactatgaaggtgataagcctccacctggtcttccagataggggtgatattcctgttccaagtggcccttactgacctgagagatgtcattgccacaggcaggacctatgggcgcatataggttgtaatgaaactgtagtctca

SEQ ID NO: 423401 - DNA, 262 bp, Homo sapiens
attcgactccttcaggttatcttgaactgcctgacttaggccagccctacagcagtgctgtttactcattggaggaacagtaccttggcttggctcttgacttggacagtgagtaccttactatgaaggtgataagcctccacctggtcttccagataggggtgatattcctgttccaagtggcccttactgaccygagagatgtcattgccacaggcaggacctatgggcgcatataggttgtaatgaaactgtagtctca

SEQ ID NO: 423402 - DNA, 476 bp, Homo sapiens
aattgtgaacatctacttctgtgttgacatctggagactcctggttcagggaaaacagagcgggctgacattatcgattacatcttttcaagcaagcctgaattattcctactaacattgctgttggttttcattgcagtagatatttaggtttccatttcttcctccccttatcatttactaacctactgtaggtggaccagacttcaaaaactgtattctcatggcgactgcatggaaacttgagcacattttatggaaaattattgagcacagtcttttcatgatcmctgtatgctgtgtgtcctgagggcactaactcagagtgtcctgttactccctcatcagtgtgtcacctggacaattcactgagctcgttctctctctctctctctctctgtgtgtgtgtgtgtgtgtgtgtgtgtgtgtgtgtgtgtgtctatctgtctttctctttcattcttttccatttggcc

SEQ ID NO: 423403 - DNA, 476 bp, Homo sapiens
aattgtgaacatctacttctgtgttgacatctggagactcctggttcagggaaaacagagcgggctgacattatcgattacatcttttcaagcaagcctgaattattcctactaacattgctgttggttttcattgcagtagatatttaggtttccatttcttcctccccttatcatttactaacctactgtaggtggaccagacttcaaaaactgtattctcatggcgactgcatggaaacttgagcacattttatggaaaattattgagcacagtcttttcatgatccctgtatgctgtgtgtcctgagggcactaactcagagtgtcctgttactccctcatcagtgtgtcacctggacaattcactgagctcgttctctctctctctctctctstgtgtgtgtgtgtgtgtgtgtgtgtgtgtgtgtgtgtgtgtctatctgtctttctctttcattcttttccatttggcc

SEQ ID NO: 423404 - DNA, 616 bp, Homo sapiens
cagagcgggctgacattatcgattacatcttttcaagcaagcctgaattattcctactaacattgctgttggttttcattgcagtagatatttaggtttccatttcttcctccccttatcatttactaacctactgtaggtggaccagacttcaaaaactgtattctcatggcgactgcatggaaacttgagcacattttatggaaaattattgagcacagtcttttcatgatccctgtatgctgtgtgtcctgagggcactaactcagagtgtcctgttactccctcatcagtgtgtcacctggacaattcactgagctcgttctctctctctctctctctctgtgtgtgtgtgtgtgtktgtgtgtgtgtgtgtgtgtgtgtctatctgtctttctctttcattcttttccatttggccctgttctgtcccaacatgaaggcaataatttgttacctcattaatggatctatccttttagttttttaaccacttccctatgctacccatgaaacctagttggggctctgttgtgtctgatttcccctggcttattctttactttttcctccttttccaggctcagcagggagctgctggaggtagtagagcctg

SEQ ID NO: 423405 - DNA, 540 bp, Homo sapiens
aagaagaccaaggcccaccatgccccaggtaactgagcaattgtgaacatctacttctgtgttgacatctggagactcctggttcagggaaaacagagcgggctgacattatcgattacatcttttcaagcaagcctgaattattcctactaacattgctgttggttttcattgcagtagatatttaggtttccatttcttcctccccttatcatttactaacctactgtaggtggaccagacttcaaaaactgtattctcatggcgactgcatggaaacttgagcacattttatggaaaattattgagcacagtcttttcatgatccctgtatgctgtgtgtcctgagggcactaactcagagtgtcctgttactccctcatcagtgtgtcacctggacaattcactgagctcgttctctctctctctctctctctgtgtgtgtgtgtgtgtgtgtgtgtgtgtgtgtgtgtgtgtctrtctgtctttctctttcattcttttccatttggccctgttctgtcccaacatgaaggcaat

SEQ ID NO: 423406 - DNA, 535 bp, Homo sapiens
ggtatttgctttaagttgattggaaaaatatggcgtaactgtttgcacaaacttgggacaaatgatattgggataacgatctactagaatagggacattttacccacagtttctgggagaaaaaccgaggaatttctatcatgaccagccttcaggcctcctgaaatatatctctcacagtgtcctattcttatgctgaggagcctgaggtccctgtgtgaggattagacagtggattgttatgtgtgtaggggaatcagcttaatgtgtctgtccatgtctgaatttattgcagaaattgaaaagaaggggaaggggaagaaaagaaggggaagaagatcaaagaaggaaagaagaaggggaagaaaagaaggggaagaagatcaaaacccaccatgccccaggtractttcagcaattgtggatgcttaattctgtgttaacacctggaggcaacagattcagggaaaccagattgtgtttgatgtcatgttttcaacgaaggctgaattactcctactgtcattgctgttgg

SEQ ID NO: 423407 - DNA, 535 bp, Homo sapiens
ggtatttgctttaagttgattggaaaaatatggcgtaactgtttgcacaaacttgggacaaatgatattgggataacgatctactagaatagggacattttacccacagtttctgggagaaaaaccgaggaatttctatcatgaccagccttcaggcctcctgaaatatatctctcacagtgtcctattcttatgctgaggagcctgaggtccctgtgtgaggattagacagtggattgttatgtgtgtaggggaatcagcttaatgtgtctgtccatgtctgaatttattgcagaaattgaaaagaaggggaaggggaagaaaagaaggggaagaagatcaaagaaggaaagaagaaggggaagaaaagaaggggaagaagatcaaaacccaccatgccccaggtgactttcagcaattgtggatgcttaattctgtgttaacacctggaggcaacagattcagggaaaccagattgtgtttgatktcatgttttcaacgaaggctgaattactcctactgtcattgctgttgg

SEQ ID NO: 423408 - DNA, 610 bp, Homo sapiens
tacagcctttgaggtatggtcaacctatagtaagttagtaaatgataaggggaggaagaaatggaaacctaaacatctactgcaatgaaaaccaacagcaatrtcaggaggagtaattcaaccttcgttgaaaacatgaaattgaacacactcttgttttccctggacctggcatctccaggtgtcaacacagaattaagcatccataattgctcaaagttacctggggcatgatgggtcttggtcttcttccacttcttggtacttttcaatttctgcaataagttcagacatggacagacatattaagctggttctcctacacacataacaatccactgtctaatcctcacacagggacttcaggctcctcagcatgagaataggacactgtgagagatagtcttcaggaggcctgaaggctgatcaccatagagattccttggtttttgtcccagaaactgtgggtaaaattccctattctggtagatcgttatcccaatatcatttgtcccaagtttgtgcaaatggttatgccatatttttccaatcgatttaaagcaaatgcccccaaatggttgctaggagaaaaactgcactattcagccct

SEQ ID NO: 423409 - DNA, 594 bp, Homo sapiens
actcaggcagggaatatggcattatggtctacacgtagagggagattttggcctgtgggtctggaaagcagggttatctaattctcaccaaagttaatctaggacaccctagaatattcctgtcagaatccttattcttgcactgagaatagttatgtccttgtgctatgactggacagtgatttgktcatatgtgaagtatgaattgcttaatgtgacctgcttctctgaatttatttacagaaaatgaaagtgatgatgaggaagaggaagaaaaagggccagtgtctcccaggtaatgttgtggaattgttggctgttaattcagtagtgacatctggagattgtagatttagggaaaatgaggaagtgatgaatagaactatttcttccattcacccagctacaaattgtgctgatttacaatgttgtatgttatttgtagcacttgtattggttttaatttcatagtcctctcaagataggaacttgccatcagatgagccaggtgaactagccaaacagggttttcttgttgatcttttcaaaaaaccagccctggattcattgatcttttgaagggttttttgtgtc

SEQ ID NO: 423410 - DNA, 594 bp, Homo sapiens
actcaggcagggaatatggcattatggtctacacgtagagggagattttggcctgtgggtctggaaagcagggttatctaattctcaccaaagttaatctaggacaccctagaatattcctgtcagaatccttattcttgcactgagaatagttatgtccttgtgctatgactggacagtgatttgttcatatgtgaagtatgaattgcttaatgtgacctgcttctctgaatttatttacagaaaatgaaagtgatgatgaggaagaggaagaaaaagggccagtgtctcccaggtaatgttgtggaattgttggctgttaattcagtagtracatctggagattgtagatttagggaaaatgaggaagtgatgaatagaactatttcttccattcacccagctacaaattgtgctgatttacaatgttgtatgttatttgtagcacttgtattggttttaatttcatagtcctctcaagataggaacttgccatcagatgagccaggtgaactagccaaacagggttttcttgttgatcttttcaaaaaaccagccctggattcattgatcttttgaagggttttttgtgtc

SEQ ID NO: 423411 - DNA, 594 bp, Homo sapiens
actcaggcagggaatatggcattatggtctacacgtagagggagattttggcctgtgggtctggaaagcagggttatctaattctcaccaaagttaatctaggacaccctagaatattcctgtcagaatccttattcttgcactgagaatagttatgtccttgtgctatgactggacagtgatttgttcatatgtgaagtatgaattgcttaatgtgacctgcttctctgaatttatttacagaaaatgaaagtgatgatgaggaagaggaagaaaaagggccagtgtctcccaggtaatgttgtggaattgttggctgttaattcagtagtgacatctggagattgtagatttagggaaaatgaggaagtgatgaatagaactatttcttccattcacccagctacaaattgtgctgatttacaatgttgtatgttatttgtrgcacttgtattggttttaatttcatagtcctctcaagataggaacttgccatcagatgagccaggtgaactagccaaacagggttttcttgttgatcttttcaaaaaaccagccctggattcattgatcttttgaagggttttttgtgtc

SEQ ID NO: 423412 - DNA, 595 bp, Homo sapiens
gtgcagtgaacaagctctgacactgtgatttcatccccaacccaaccaatcagctttgcacattccctagccccttgcctgccaaactatccaaaaaaaaaagaaaaagaaaaaagaaaaaaaaaaccctagtctttgaattttgggggaggcagatttgagtaataataaacccctgtcgtggtccctcagctgcytctgcatttattaaattctttctctattttagaaagcctgctgttctcagctccattggcttacctgggcaatgggcaagataaacctaccaggcagttacattaataaaagagaaacacaaatggtaagcatgcttgaaaagaaatataagtctgtgtatttctttggaagaaacacaaaaggaggaggaatgataagacaggcaataaatacactgtcctaaatattttcatgattctcctgcctccttcgtatccttcttatcccaacaacttctccccagaaaccttcaacttaaacatggtcctgccagaactgggtttgtccttccctttacattttcctctcacctaccctacaccccttccatatctaatctgttctttaacttccaggt

SEQ ID NO: 423413 - DNA, 641 bp, Homo sapiens
agcctgtccacccttcttcaaataatggcttgtaatgcgcagactaaaacatggaggattacacaagaaactggttcacttcacatcattatccttgtgatgtagcattctacttgaaattggaagccgttcgatatcagagaaaccatatctatgaaactagagaggctgctcagatgactgcaaaccagccatccttacttgttttaccactagtagtgttataaggacggtggtccaatttcaggaatcttgtagggttctttcaaatacagcaatgtacaaatatgctgccccagcagagcacactggacactcrggcatgatgctggagtttgtcatctcttccacggccttctccagaccttagcacttacctcatgttagcactttatgttctgcaaagacagaaacaaagtggtccaaatttggaaaaaatatatatatatttgggggaaactttatttgaggtgcttaacagattacttttaatctgtagaatacaacaccaaactctgacaatactccacagactccaaatctatcaggcaagtttttcctgtcctttgctttcatataaactgaatcataaagtgtatagtgggttttgggggaatataactgcccaatgggttcatgtt

SEQ ID NO: 423414 - DNA, 570 bp, Homo sapiens
gttgaaagcttaacccccaacttgactgtatttagatatagagtctttaaggaggtaattaaggttaattagaccatacaagtggggccctaatctggtcagaatggtgtccatataagaagaggaagggcatcaaagaatctctctctttctccacacaggcacagaggaaaggctatgggagcacaaagcaagaaagtggccttctgcaagccaggaagagaggcctccccagaaaccaactctaccagcacatygatcttggacttttggcctctagaacattgagaaaataaaagtctgctgttaaaccacccaacctttggtatctttctatggcagcctgagctgactaacacccttggtaggtgggcagcattcaccttattgggctacatgatgagaagttaaagtaactttagcaataggcaccatttgatttcattgtatagatattgtgtcttttgcactgattttgccttttttagttgtgtgtatattgatgcctgggcctagcattacaagactagtcgaaatgggaagaaagaaaagaaagtgggaaagatacca

SEQ ID NO: 423415 - DNA, 523 bp, Homo sapiens
  misc_feature (1)...(523): n = A,T,C or G
nnnnnnnnnnnnnnnnnnnnnnnnnnnnnnnnntattatgtagaatactattgtttacatcatatcacgttggccctttaaatggcttaacgcttatgtaggtacgatccataaagttttcctggtaattaagtatacctaagaacaatgaagtataaaagagttactgccttgacaggaagattgtaaaaaytgtaaaaagataaataaataaagagtcaaaactgtagctctgtgaggctcaaataacatctaattcaagtcacaatgaacatctagcaatcactgtgaacaccacatacttcccttaatacattttccctgaatgcccaacacatctgaattaccaacacccgtatgtagccaagaaactgacaatcatttataaattatcacctatgactccatctgctctatgcacttattttttaaattttactcatttatttattatttttattttttgtagagatgggatctcactatattgcccaggttggtccagaaacagaaacagacccac

SEQ ID NO: 423416 - DNA, 437 bp, Homo sapiens
tcaaaatgtttttgagattcatccatsttgttttgtgtgtcaaaagtttgttcctttagccgttccatggaatgaatgtatcacagtttattgatccattcttgtattgatagatatttgaatgtttccagtttttcctattatgaataaaactgctatgaacattcttgtataaatcattttctggacatatgttttaatttctcttggataaatgcttaggaattagtgagtcatagaataggtagttgtttagttctgtaagaatatgccagacattttttcccaaagtgtttatactattgtacattccaaccattaatgtatgaaggtgagaaagcttttgctacttccaaagaggcttctctatatacatgtaattttttctaactggagacaggctgatgacttcagggacatgagcatgggatacctgt

SEQ ID NO: 423417 - DNA, 437 bp, Homo sapiens
tcaaaatgtttttgagattcatccatcttgttttgtgtgtcaaaagtttgttcctttagccrttccatggaatgaatgtatcacagtttattgatccattcttgtattgatagatatttgaatgtttccagtttttcctattatgaataaaactgctatgaacattcttgtataaatcattttctggacatatgttttaatttctcttggataaatgcttaggaattagtgagtcatagaataggtagttgtttagttctgtaagaatatgccagacattttttcccaaagtgtttatactattgtacattccaaccattaatgtatgaaggtgagaaagcttttgctacttccaaagaggcttctctatatacatgtaattttttctaactggagacaggctgatgacttcagggacatgagcatgggatacctgt

SEQ ID NO: 423418 - DNA, 437 bp, Homo sapiens
tcaaaatgtttttgagattcatccatcttgttttgtgtgtcaaaagtttgttcctttagccgttccatggaatgaatgtatcacagtttattgatccattcttgtattgatagatatttgaatgtttccagtttttcctattatgaataaaactgctatgaacattcttgtataaatcattttctggacatatgttttaatttctcttggataaatgcttaggaattagtgagtcatagaataggtagttgtttagttctgtaagaatatgccagacattttttcccaaagtgtttatactattgtacattccaaccattaatgtatgaaggtgagaaagcttttgctacttccaaagaggcytctctatatacatgtaattttttctaactggagacaggctgatgacttcagggacatgagcatgggatacctgt

SEQ ID NO: 423419 - DNA, 588 bp, Homo sapiens
cctgtttaagtttgaatttcagataagcaatgaatattaatagtttttagtatgagtataccctatgcaattatttgggatatacttatactaaagaattattgtttatctgaaatttaaatttaactgggtgtcagtcaggcatgatggctcacacctgtaatactagcactttgggaggcagaggagggtggatcacccgaggtcgggagtttgagcccagcctggtcaacatggtgaaaccctgtctctactaaaatacaaaaaattagccgggcatggtggygcacacctgtagtcctagctactcgggaggctgaggcacaagaattgcttgaacccgggaaggggaggttgcagtgagcagagatcacaccactgcactccagcctgggtgacagagtgagactccttcaagaaaaaagaactgtgtgtcctgtatttttagttgctaaatctggcaactctacgcctgaaagtactttctgataaaacttctgcacgtgacttttcatcttgagtctgtttctagggaacccagtctaagacagggaggctgaaatagagtaacagaaagatgaatgaggc

SEQ ID NO: 423420 - DNA, 484 bp, Homo sapiens
ctattattatgctcttatagctattattgtcactttgtgtaaagcagtgtacaaatagaacagcagatgccttttcggaggctatagcctatctgagaaaacgagaataatacattaatgattattaaagaccatgacaggatattggtactaagtcgtattgtgtaggctttaagtgctatagttcactttgcacaaaactgaaccctataataatcatcctctgcactgcctccacacygttctccctgtagtattccttgtttcagttggagaactgccctccagcctgaaacctgggagttatctagactcccaggatgagagtcctgggtgggaagggatggggggttacaaaggactgtaatcctaaataatgctcaacactccctcccttgtggcccctctccactgtctgccttcacattgtctcttgcctgcaatcttctggctacttcctaatctttctaaatgaccaggcctc

SEQ ID NO: 423421 - DNA, 611 bp, Homo sapiens
atggtaacccttggttggctattcatttttataaatgaaggattaaattgattagttcagagcaactgcatgctgtctgtatatgagcaggtaatgttgtatcacacttctatttaagatgtgaagatgagaagatgcaggaagcctggatcttgccccaaaaataaaaggtatcaaccaacattctgtggacctagaatcttccagacagattatttcatccctttagaaatgatttaccttttttctttatggggcaaatgtcgctgttaagtgaagggctggtagaggtgaccttaaggaatttttctgcaatttaccctcttacactttctagatattcaaattatatacaaataatgagttttattcttactttttaatatgtatgctatttctttttcttrctttgctttggctcacacctgtagtacaatgttgattttaaaaaaatcctaaaaatatcctaaaaatcttcacaaaagatcatctaagagactctcaggttaattcttcctagggaaattttttttttcatttttctgtagatggtcatttaatcttgtagaacagtgttgttttccctgacatcacgcatctcttagtcctca

SEQ ID NO: 423422 - DNA, 588 bp, Homo sapiens
tgagaagatgcaggaagcctggatcttgccccaaaaataaaaggtatcaaccaacattctgtggacctagaatcttccagacagattatttcatccctttagaaatgatttaccttttttctttatggggcaaatgtcgctgttaagtgaagggctggtagaggtgaccttaaggaatttttctgcaatttaccctcttacactttctagatattcaaattatatacaaataatgagttttattcttactttttaatatgtatgctatttctttttcttactttgctttggctcacayctgtagtacaatgttgattttaaaaaaatcctaaaaatatcctaaaaatcttcacaaaagatcatctaagagactctcaggttaattcttcctagggaaattttttttttcatttttctgtagatggtcatttaatcttgtagaacagtgttgttttccctgacatcacgcatctcttagtcctcaagttggaagatgtatattctaaacttcatggccttgaagatctgcctcaaatatgatgaaataagtttatttaacctctagcagataataataaactgtaaaca

SEQ ID NO: 423423 - DNA, 624 bp, Homo sapiens
gtaaccgggaaggctgcagatcataacaactatggctgctgatttggcatcaaagatgtggcattgtcaaagccacaattgttgagaatggcaccaacatgctgcagctggagagagtgggtgaccaacattttgaagtggcatagttgtctggggtaattacccaaggtttgttgcctcacaccaagggaactgaggatgtggacacacaagaagtgggtttaggagtggaggtttactaggcaaaagaaagagaaaggaaaatagctctctctcctgagagagagagggttgccagagtggaacttctggttttgtggtgaagtgcacagggttttataggctggcttgaggaggcagtgtctgattcacatagggcccaaagattggttggaccaggtgtgacatttacatagcgctggaagaagttggccacccaaccctaatcttcttcttatgcaaatgggttttctactttactcatgccatgttgtctgctccttactgtacacgtggttagaaaggaaaagggaagatggagccaccatgttgaacatgcctaycccccaggtagccttgtcctattggcacagccgccagcagtcacctgtgcaagcttccagc

SEQ ID NO: 423424 - DNA, 567 bp, Homo sapiens
taaattttgtctgaagcatgtcagagaataacaacatgctataaaatttcacttgtgttcacccatgtgtcagctgagtattttgcattgttacatttttattttactgtattttattttattttttttttgaaatggggtctagctatgttgcaaactcctggcctcaaactcctgggcgcaagcaatcctcctgccttagcctcccaaaatgctaggattacaggtgtgagccactatgccctgcctattttgcattacttcaaagagaaggtgaggtcacacatttacttccaacagatcaacattatatcttcaagttagcaaaagcaattgaaagtaggtagtggcattctatatttccataaatgctcctttagacttgtaaaaaaattrtcattaattttggccaaaagcttattgatgtcataaaaccatactcagtttttacttggacacattctcctgctgttcctcatcaaccactttgtgggtttagtcattcaaagtatgtacttactagatttagattaattcaatggagatatgttgtgaattcaactgaaa

SEQ ID NO: 423425 - DNA, 477 bp, Homo sapiens
ttcaaagatgaaaatttttttaaatcagaaatctcacagagagtactcaatagggttggagtaaataccttgatgagccacttggggatgggggtggaaggtaagaccccaaggggtatgcctggrtgacaacagatggtccttctaaaaaggatagtcaagtgaactatgaggctgttgttttggagagaggttgtaagtttggggccagagttaaagccccttggattttggaggctttgcagctgatggtcctcctctttatcctttttctacagggcactgaggaactatttaaagaaaatacaacccaagtatctgcaggtctcattctggtccagccccaaagcagtgttagctgcaggggaaggccttaccctgaggagagggagataggatgtaccagctgatgtgggggagtgaggacacaggattagaggggagtggatactgtgaattgcacctagaaacaacagc

SEQ ID NO: 423426 - DNA, 477 bp, Homo sapiens
ttcaaagatgaaaatttttttaaatcagaaatctcacagagagtactcaatagggttggagtaaataccttgatgagccacttggggatgggggtggaaggtaagaccccaaggggtatgcctggatgacaacagatggtccttctaaaaaggatagtcaagtgaactatgaggctrttgttttggagagaggttgtaagtttggggccagagttaaagccccttggattttggaggctttgcagctgatggtcctcctctttatcctttttctacagggcactgaggaactatttaaagaaaatacaacccaagtatctgcaggtctcattctggtccagccccaaagcagtgttagctgcaggggaaggccttaccctgaggagagggagataggatgtaccagctgatgtgggggagtgaggacacaggattagaggggagtggatactgtgaattgcacctagaaacaacagc

SEQ ID NO: 423427 - DNA, 477 bp, Homo sapiens
ttcaaagatgaaaatttttttaaatcagaaatctcacagagagtactcaatagggttggagtaaataccttgatgagccacttggggatgggggtggaaggtaagaccccaaggggtatgcctggatgacaacagatggtccttctaaaaaggatagtcaagtgaactatgaggctgttgttttggagagaggttgtaagtttggggccagagttaaagccccttggattttggaggctktgcagctgatggtcctcctctttatcctttttctacagggcactgaggaactatttaaagaaaatacaacccaagtatctgcaggtctcattctggtccagccccaaagcagtgttagctgcaggggaaggccttaccctgaggagagggagataggatgtaccagctgatgtgggggagtgaggacacaggattagaggggagtggatactgtgaattgcacctagaaacaacagc

SEQ ID NO: 423428 - DNA, 463 bp, Homo sapiens
agatttttggaaacgttttccaggagggagtaatagcatttcctgaagcaccttttatcttggtttgtggcaaatgattctttcaatgccctcaggtcacttataccctaagaccctgcatgagtttattcaaccttcaaatcagtcacttctgccctcatctagggcacataacaatgtagttagttacccagcaggtatcscggctaagtaagaccataaataaatcatatgagcaggagcttttggagtcagtcttctgtctgagcacctctaaccggttatgctaccttaaacaaattacttaacttctctctgtctcacctgatttaccagtttaaaaaaaaaggaataataatggtacctacctcataggtttgttgtgaggagttaaacgtctaaagcacttagaacagtgtctggcatatggtaagtattcaataaacattagccttatattcta

SEQ ID NO: 423429 - DNA, 558 bp, Homo sapiens
tacaaatgcatgcaacatagacaatatatattactgtttagtggatttaaattttgtatagaatgttattacactacatattgttttctaatttgctttttcactcgtcatgtttttgaggttaatccatgttaacttgtgtagatttcgytcatttatttttacttctggagagtattccattttgtgaatttttaaaaatgttgcaaatacagcccattgctcatcccttcctcagctgcccatcttgcataggtggttcaaggcgacatgcacagggatgtgtagtgtgacattgttgaaacagtagaaataattaactgtttaccttgactgagggagatactggaatctaatctggcaagaatttagcatgtatctgatgctggtagggatacagatgtgtatcttattattttctataatcttttcgtgtttgaattgtttataatagaaaacgctaccccatccccacccccaccctaagaatgaatggtgttctgctccaggtaaatgtcatggaagagctgacaggaagagctgtaaggaattgcgagg

SEQ ID NO: 423430 - DNA, 607 bp, Homo sapiens
atcctgcattgagtaagtctaacagcatatgcttaccttgtgtctgttacattttsataattctctcaatatttcaacctttttcattattattatatatattatggtgatctgtgatctttgatgttactgttataattgtttcagggtgctatgaaccacacccacttaagaccacacccacttaagactgcaaacttaatcgataaatattttgtgtgttctgactgctccactgaccagctgttctctctctctttcctggggcctccctatttcctaagatacaacaatattgaaattgggccagttaatatccctacaatgacctctaagtgttcaagtgaaagagagtggcatgtctctcactgtaaatcaaaagctagaaatgattaagcatagtgaggaagacatattgaaagctgagacaggctgaaagttgggccttttatgcccaattgttagccaacttgtgactgcaaagaaaagttcttaaaggacataagaagtgctactccagtgaaaacaagaataaaaaagtgaaatagccttattgctgatatggagaaagttttagtgacctagatagaggattaaaccagccatg

SEQ ID NO: 423431 - DNA, 574 bp, Homo sapiens
  misc_feature (1)...(574): n = A,T,C or G
nnnttttatggatgagcaaagaaaatggtttcttgaggtgaaatctactcttgatgaagatgctgtaaatattgttgaaatgaaaacaaaggatttagaatattacataaacatagttggtaaagtagtarcagaatttgagaggattgactccaattttgaaagaggttctactatgtgtaaaattctatcaaatggcatcacatgctacagagaaatcttttgtgaaaggaagagtcaatccatgcggcaaacctcattgttgtcttattttaagaaactgccacagccatcctaacctccagcaaccaccaccctgatcagtttgcagtcatcaacatcaaggcaagaccctccaccagcaaaaagattatgacttgctgaaggttcagatgatcattagcagtttttagcaataaagcatttttttttttcttttttgagacagggtctcatattgttgcccaggctgaaatgcactggcatgatcacagctcactgcagcctctacctcccaaattcaagtgatcctcccacctcagcctcctgggtagctgggacgatagtatgcccc

SEQ ID NO: 423432 - DNA, 622 bp, Homo sapiens
tccgggttccttgtttctgatcctaaatcttcaatttaggacctcaacctcaaactgttgctttagtggctctgggaagaaagcactaactggcagcataggtaagtaaagttttaatctagggaagaaataagaagcagaatcagaattagaattagaagaaagaggaaatatgctataccagaatatcataggcaaaaaaagaagatgaagaaagaggaaatgaaaggacagaagrcaatgctaatggagttagttatttgtggctgttttttgtaaaagagtaatgatcagtcttgtaatcattataatactattatttgctttctaaaatgtctaaaatatttgaaggaatatatgatataaaaagatgaataatgcttgcagtcagtgtttcattgtttgggagaacccagtttcctcagttaatacattttcgtgtaatagctgtttaaggagtaacatggtttaaagacattttaatggctgaaatattaacatgttggtcttttgatgaagttcaaatagaggatttctttccccaattttccctggaaagattaaactgaagagaaaaatctggaaagtttgccccacctgttgggtctgggagtcattatga

SEQ ID NO: 423433 - DNA, 558 bp, Homo sapiens
atcacttgagcccaagaattcaatgccagcctgggcaacataagaagaccttgactctacaaaaaatataaaaattacccaagcctggtagtgcatgcctgtagtcccagccactcaggaggtgggacgatcgcttgagcacrggaggtcaagcctgcagcgagccatgatcatgccactgcactccagcctgagagacaaagcaagaccctgtctcaaaaaaattttttttcaaggaatagaaccactgcacatgctcctcctgatcccccaaagtgtaagattttcctgcaaatagctatctcccaggacttacattagtaaggtatctggatataaaaatcagtgttccctaaatcagctgtgtttccattatatcaaaaataaacttttagaaattaccatttgaattaacaaagatacacacacacacacgcacacacctagaaagaaatcccgtaagatttgtgcagggcatttatgaagaaaactgtgcaatttatgggaagttattaagaaagaccacataatttaatagatacattaagtttatggttt

SEQ ID NO: 423434 - DNA, 629 bp, Homo sapiens
atgagtaactctcaaagaggtggcctagaattttrgcttatgtagcatcttcaactaaaagaaagaaagaagggtgttgggaaaacaagctatgggaaagcgttcaggaaaatcaaacaagagtaaggtttattatgcagatttaaattggtgccttctccattggtaagagccttttgtgatttagtcctccttcttttcccagcccagagagggagatagccttagaaatggagatttcttttaaaaatgtaaatttcccttacagaagggtaacttctactgtgtttttagaattctcctgtgtctactgtttctcaaaataatcagctcaaaataatccttatgccaaaaagtcatattttagggtggcacatgcctgtctcctacaagttttcatcaagtttgaaaactttttggtcattctttgttcaaatattttttctatctgttaccaggaaggggtcccaatccagactgcgagagggttcttggatctcatgcaaggaagaagttggagtgagtccatagagtaaagtgaaagcaagtttatttaagaaagtaaagaaataaagaatgactactccataggcagaccagccccgagggttactggttggctatttttg

SEQ ID NO: 423435 - DNA, 629 bp, Homo sapiens
atgagtaactctcaaagaggtggcctagaattttggcttatgtagcatcttcaactaaaagaaagaaagaagggtgttgggaaarcaagctatgggaaagcgttcaggaaaatcaaacaagagtaaggtttattatgcagatttaaattggtgccttctccattggtaagagccttttgtgatttagtcctccttcttttcccagcccagagagggagatagccttagaaatggagatttcttttaaaaatgtaaatttcccttacagaagggtaacttctactgtgtttttagaattctcctgtgtctactgtttctcaaaataatcagctcaaaataatccttatgccaaaaagtcatattttagggtggcacatgcctgtctcctacaagttttcatcaagtttgaaaactttttggtcattctttgttcaaatattttttctatctgttaccaggaaggggtcccaatccagactgcgagagggttcttggatctcatgcaaggaagaagttggagtgagtccatagagtaaagtgaaagcaagtttatttaagaaagtaaagaaataaagaatgactactccataggcagaccagccccgagggttactggttggctatttttg

SEQ ID NO: 423436 - DNA, 629 bp, Homo sapiens
atgagtaactctcaaagaggtggcctagaattttggcttatgtagcatcttcaactaaaagaaagaaagaagggtgttgggaaaacaagctatgggaaagygttcaggaaaatcaaacaagagtaaggtttattatgcagatttaaattggtgccttctccattggtaagagccttttgtgatttagtcctccttcttttcccagcccagagagggagatagccttagaaatggagatttcttttaaaaatgtaaatttcccttacagaagggtaacttctactgtgtttttagaattctcctgtgtctactgtttctcaaaataatcagctcaaaataatccttatgccaaaaagtcatattttagggtggcacatgcctgtctcctacaagttttcatcaagtttgaaaactttttggtcattctttgttcaaatattttttctatctgttaccaggaaggggtcccaatccagactgcgagagggttcttggatctcatgcaaggaagaagttggagtgagtccatagagtaaagtgaaagcaagtttatttaagaaagtaaagaaataaagaatgactactccataggcagaccagccccgagggttactggttggctatttttg

SEQ ID NO: 423437 - DNA, 629 bp, Homo sapiens
atgagtaactctcaaagaggtggcctagaattttggcttatgtagcatcttcaactaaaagaaagaaagaagggtgttgggaaaacaagctatgggaaagcgttcaggaaaatcaaacaagagtaaggtttattatgcagatttaaattggtgccttctccattgrtaagagccttttgtgatttagtcctccttcttttcccagcccagagagggagatagccttagaaatggagatttcttttaaaaatgtaaatttcccttacagaagggtaacttctactgtgtttttagaattctcctgtgtctactgtttctcaaaataatcagctcaaaataatccttatgccaaaaagtcatattttagggtggcacatgcctgtctcctacaagttttcatcaagtttgaaaactttttggtcattctttgttcaaatattttttctatctgttaccaggaaggggtcccaatccagactgcgagagggttcttggatctcatgcaaggaagaagttggagtgagtccatagagtaaagtgaaagcaagtttatttaagaaagtaaagaaataaagaatgactactccataggcagaccagccccgagggttactggttggctatttttg

SEQ ID NO: 423438 - DNA, 544 bp, Homo sapiens
catcatgattttcattgtccatcaaatgctagaagactactctgcttttgttactatgtttgccccatttttctagctcttcttacatgaatttaaacctacatcaatggctatttcctcaacatttggaaacaacaatacttattagaaagaaagtattttatccttccaggctatagatcttacattcctcttacacaacaatcctaattccctcatgttatcctgatcaatgaaatgatttcacttatttttcaaagaagtagctattttactacaaagcaggaatcrcaaggcttggggtgggcactgttatactccatcagtgagtatgtaaaggaaatcaaactgtctgattttgaatcctgcttctattttttacaaccttggacaaattactgatttcctctttcactaggtttatcatttgtaaaatggagatactagtgtctactcatggattattgtgaggcttaaataagaaaacatgtatcaagcatatttgtctggcatgtaataagcactctaaaatttatgcagcgat

SEQ ID NO: 423439 - DNA, 530 bp, Homo sapiens
caggctatagatcttacattcctcttacacaacaatcctaattccctcatgttatcctgatcaatgaaatgatttcacttatttttcaaagaagtagctattttactacaaagcaggaatcgcaaggcwtggggtgggcactgttatactccatcagtgagtatgtaaaggaaatcaaactgtctgattttgaatcctgcttctattttttacaaccttggacaaattactgatttcctctttcactaggtttatcatttgtaaaatggagatactagtgtctactcatggattattgtgaggcttaaataagaaaacatgtatcaagcatatttgtctggcatgtaataagcactctaaaatttatgcagcgatgaggataatgatcctagacaatctgatagcatcttatccaaaggaaaaaatgcgcatttcctttgagtaagcactactgattctaggaatgtgtcctaaggaaaaaataagtcaaatgtttaaaggtagtcacaagactattttggtagtaagca

SEQ ID NO: 423440 - DNA, 544 bp, Homo sapiens
catcatgattttcattgtccatcaaatgctagaagactactctgcttttgttactatgtttgccccatttttctagctcttcttacatgaatttaaacctacatcaatggctatttcctcaacatttggaaacaacaatacttattagaaagaaagtattttatccttccaggctatagatcttacattcctcttacacaacaatcctaattccctcatgttatcctgatcaatgaaatgatttcacttatttttcaaagaagtagctattttactacaaagcaggaatcgcaaggcttggggtgggcactgttatactccatcagtgagtatgtaaaggaaatcaaactgtctgattttgaatcctgcttctatttttyacaaccttggacaaattactgatttcctctttcactaggtttatcatttgtaaaatggagatactagtgtctactcatggattattgtgaggcttaaataagaaaacatgtatcaagcatatttgtctggcatgtaataagcactctaaaatttatgcagcgat

SEQ ID NO: 423441 - DNA, 544 bp, Homo sapiens
catcatgattttcattgtccatcaaatgctagaagactactctgcttttgttactatgtttgccccatttttctagctcttcttacatgaatttaaacctacatcaatggctatttcctcaacatttggaaacaacaatacttattagaaagaaagtattttatccttccaggctatagatcttacattcctcttacacaacaatcctaattccctcatgttatcctgatcaatgaaatgatttcacttatttttcaaagaagtagctattttactacaaagcaggaatcgcaaggcttggggtgggcactgttatactccatcagtgagtatgtaaaggaaatcaaactgtctgattttgaatcctgcttctattttttacaaccttggacaaattactgatttcctctttcactaggtttatcatttgtaaaatggagatactagtgtctactcatggattattgtgaggcttaaataagaaaacatgtatcaagcatatttgtctggcwtgtaataagcactctaaaatttatgcagcgat

SEQ ID NO: 423442 - DNA, 573 bp, Homo sapiens
tcatggattattgtgaggcttaaataagaaaacatgtatcaagcatatttgtctggcatgtaataagcactctaaaatttatgcagygatgaggataatgatcctagacaatctgatagcatcttatccaaaggaaaaaatgcgcatttcctttgagtaagcactactgattctaggaatgtgtcctaaggaaaaaataagtcaaatgtttaaaggtagtcacaagactattttggtagtaagcagtcttttttactggtcacacagtaaaaaattagaaataacctacatgttcatgaagagaagttggtgaaataaattatggtacatgcatacagtagaaaactttggagacaaaatagtaaaatagttacagatataggctttgaatataaattttaacaagctgaggcttctctcgtctcttcagaacaccctgagttcttcccggcctttcttccttgcttttcatttgtgtcagtcagctcttgcttgtacagcaatcttcaaatctcagtagcatataaaggtaagcatttagttctcacttacaagtttgcagggcaggtgagg

SEQ ID NO: 423443 - DNA, 573 bp, Homo sapiens
tcatggattattgtgaggcttaaataagaaaacatgtatcaagcatatttgtctggcatgtaataagcactctaaaatttatgcagcgatgaggataatgatcmtagacaatctgatagcatcttatccaaaggaaaaaatgcgcatttcctttgagtaagcactactgattctaggaatgtgtcctaaggaaaaaataagtcaaatgtttaaaggtagtcacaagactattttggtagtaagcagtcttttttactggtcacacagtaaaaaattagaaataacctacatgttcatgaagagaagttggtgaaataaattatggtacatgcatacagtagaaaactttggagacaaaatagtaaaatagttacagatataggctttgaatataaattttaacaagctgaggcttctctcgtctcttcagaacaccctgagttcttcccggcctttcttccttgcttttcatttgtgtcagtcagctcttgcttgtacagcaatcttcaaatctcagtagcatataaaggtaagcatttagttctcacttacaagtttgcagggcaggtgagg

SEQ ID NO: 423444 - DNA, 573 bp, Homo sapiens
tcatggattattgtgaggcttaaataagaaaacatgtatcaagcatatttgtctggcatgtaataagcactctaaaatttatgcagcgatgaggataatgatcctagacaatctgatagcatcttatccaaaggaaaaaatgcgcatttcctttgagtaagcactactgattctaggaatgtgtcctaaggaaaaaataagtcaaatgtttaaaggtagtcacaagactattttggtagtaagcagtcttttttactggtcacacagtaaaaaattagaaataacctacatgttcatgaagagaagttggtgaaataaattatggtacatgcatacagtagaaaactttggagacaaaatagtaaaatagttacagatataggctttgaatataaattttaacaagctgaggcttctctcgtctcttcagaacacccygagttcttcccggcctttcttccttgcttttcatttgtgtcagtcagctcttgcttgtacagcaatcttcaaatctcagtagcatataaaggtaagcatttagttctcacttacaagtttgcagggcaggtgagg

SEQ ID NO: 423445 - DNA, 573 bp, Homo sapiens
tcatggattattgtgaggcttaaataagaaaacatgtatcaagcatatttgtctggcatgtaataagcactctaaaatttatgcagcgatgaggataatgatcctagacaatctgatagcatcttatccaaaggaaaaaatgcgcatttcctttgagtaagcactactgattctaggaatgtgtcctaaggaaaaaataagtcaaatgtttaaaggtagtcacaagactattttggtagtaagcagtcttttttactggtcacacagtaaaaaattagaaataacctacatgttcatgaagagaagttggtgaaataaattatggtacatgcatacagtagaaaactttggagacaaaatagtaaaatagttacagatataggctttgaatataaattttaacaagctgaggcttctctcgtctcttcagaacaccctgagttcttcccggcctttcttccttgcttttcatttgtgtcagtcagctcttgcttgtayagcaatcttcaaatctcagtagcatataaaggtaagcatttagttctcacttacaagtttgcagggcaggtgagg

SEQ ID NO: 423446 - DNA, 546 bp, Homo sapiens
atttcgctggccaatgaaagtctcatgatgagccacagtcaagagtcagagacgtaccctcatgaggctgtggagagagtgtagattcagggagcggtgagaaactggggccagtacaccaatctacagcatgatttgtcatcatttttcattctctgctagtaagattgccaaagtctctctgcactcattgaattcatcctagtttccatttagctctctttctctcttaccacaatacctaaaaatctttttatggggttacaactctgtctcaggagccacctcagtttggtggcacagagctccccacttgtactctgaaactcttttcttgaagatattgytatccatgtgcatgagttatttttcttctccatagcatccacattaaacaattaattaccttggatttagccaaaataaacactccaaattcatgatgtctttcaggaagagagtttgttttcttttttaaccaaaatgggagattgatcctgtctgtgtcccctagaggagcagaggctggtttgtattagggcagct

SEQ ID NO: 423447 - DNA, 528 bp, Homo sapiens
ttgttatccatgtgcatgagttatttttcttctccatagcatccacattaaacaattaattaccttggatttagccaaaataaacactccaaattcatgatgtctttcaggaagagagtttgttttcttttttaaccaaaatgggagattgatcctgtctgtgtcccctagaggagcagaggctggtttgtattagggcagctcttgtagatgagtaacttttcccatggcctcatagaggctgatatagawacttctggattcaaatgattgtttggaggcattagccaggcattgaaccaattataaagagtgaggttttgccatattctaaccgtaagaaacagaaacggtagagggtaaaaatagaatagaatgtcaacacaactttagccttttccctggattctgagagttcataacctgaaaatcagagattcaaactgggagagatgggctaacaggtatgagcatgggaaaagcatgtttcaaggatttgagatgtatttcccagaaaaggaacatgat

SEQ ID NO: 423448 - DNA, 528 bp, Homo sapiens
ttgttatccatgtgcatgagttatttttcttctccatagcatccacattaaacaattaattaccttggatttagccaaaataaacactccaaattcatgatgtctttcaggaagagagtttgttttcttttttaaccaaaatgggagattgatcctgtctgtgtcccctagaggagcagaggctggtttgtattagggcagctcttgtagatgagtaacttttcccatggcctcatagaggctgatatagatacttctggattcaaatgattgtttggaggcattagccaggcattgaaccaattataaagagtgaggttttgccatattctaaccstaagaaacagaaacggtagagggtaaaaatagaatagaatgtcaacacaactttagccttttccctggattctgagagttcataacctgaaaatcagagattcaaactgggagagatgggctaacaggtatgagcatgggaaaagcatgtttcaaggatttgagatgtatttcccagaaaaggaacatgat

SEQ ID NO: 423449 - DNA, 528 bp, Homo sapiens
ttgttatccatgtgcatgagttatttttcttctccatagcatccacattaaacaattaattaccttggatttagccaaaataaacactccaaattcatgatgtctttcaggaagagagtttgttttcttttttaaccaaaatgggagattgatcctgtctgtgtcccctagaggagcagaggctggtttgtattagggcagctcttgtagatgagtaacttttcccatggcctcatagaggctgatatagatacttctggattcaaatgattgtttggaggcattagccaggcattgaaccaattataaagagtgaggttttgccatattctaaccgtaagaaacagaaacggtagagggtaaaaatagaatagaatgtcaayacaactttagccttttccctggattctgagagttcataacctgaaaatcagagattcaaactgggagagatgggctaacaggtatgagcatgggaaaagcatgtttcaaggatttgagatgtatttcccagaaaaggaacatgat

SEQ ID NO: 423450 - DNA, 601 bp, Homo sapiens
acttttatcacttaaaataccttgaagttctgtttatattaatagaaatccactttaaaatgtctgctgcacagctgtaccagaattaatttaaccattctgcctattrgcaaatttataagatgtttccactcttttgattttacaagcattgctgcaataattatctttatacatacattccgggggcacatttcatagggtatctgtaagataatattctggacatggaattattgtcatattttaataagtggaagcagaaaagcccaccacccacttaaacctgtaaggagtttctattcatcaagagatggagactgcaatattcttcagggaaaaatgcttcattcaatatgcaagacaaaataaccaaatgtattatttagttattcagaagtgatgagtttaaacttctttaaaaatgataatgcaaaagttaatccacactggaggcaaaattgcctttatgcagacatggttgctgttagaggaaatgtgttttagccaaggaaatgttgagaatgtctgagggaaggcttgatgttcctcatgtgtcccttaggtctctgtaaataagttcttaggatggagaggttag

SEQ ID NO: 423451 - DNA, 601 bp, Homo sapiens
acttttatcacttaaaataccttgaagttctgtttatattaatagaaatccactttaaaatgtctgctgcacagctgtaccagaattaatttaaccattctgcctattagcaaatttrtaagatgtttccactcttttgattttacaagcattgctgcaataattatctttatacatacattccgggggcacatttcatagggtatctgtaagataatattctggacatggaattattgtcatattttaataagtggaagcagaaaagcccaccacccacttaaacctgtaaggagtttctattcatcaagagatggagactgcaatattcttcagggaaaaatgcttcattcaatatgcaagacaaaataaccaaatgtattatttagttattcagaagtgatgagtttaaacttctttaaaaatgataatgcaaaagttaatccacactggaggcaaaattgcctttatgcagacatggttgctgttagaggaaatgtgttttagccaaggaaatgttgagaatgtctgagggaaggcttgatgttcctcatgtgtcccttaggtctctgtaaataagttcttaggatggagaggttag

SEQ ID NO: 423452 - DNA, 601 bp, Homo sapiens
acttttatcacttaaaataccttgaagttctgtttatattaatagaaatccactttaaaatgtctgctgcacagctgtaccagaattaatttaaccattctgcctattagcaaatttataagatgtttccactcttttgattttacaagcattgctgcaataattatctttatacatacattccgggggcacatttcatagggtatctgtaagataatattctggacatggaattattgtcatattttaataartggaagcagaaaagcccaccacccacttaaacctgtaaggagtttctattcatcaagagatggagactgcaatattcttcagggaaaaatgcttcattcaatatgcaagacaaaataaccaaatgtattatttagttattcagaagtgatgagtttaaacttctttaaaaatgataatgcaaaagttaatccacactggaggcaaaattgcctttatgcagacatggttgctgttagaggaaatgtgttttagccaaggaaatgttgagaatgtctgagggaaggcttgatgttcctcatgtgtcccttaggtctctgtaaataagttcttaggatggagaggttag

SEQ ID NO: 423453 - DNA, 561 bp, Homo sapiens
agcatccagatctattttagacatttccagcacctcagaaactccttcttgcccatttctagtccacccctgacactgacttccagcaccataggttttttgcctatttttgaacttcatataaagggctacggtatggaacaggatgtactcttttgtgtctggttaatttttctcaacattatgattgtgaacwgtatacatgttgtaaattgaagttcatttgttcttattactgtatatttcatattttcccattctgctgaggggctcgggttgcttctggttttgaccacttacaaatagtaatgctgtggatatttttgtttacatgtttcaaatattttctaccattactaatgttcgacagtatctgatggaggtatgttacaatttcccactcttttggatatacaaatgcaaattaagcatttccctaatgactatgatattgaccatttttcacgtttattacctatttgggtatccttttttgtaagctctttttgataatttttctattgtctgtctttttcttactgacttataggagttatttat

SEQ ID NO: 423454 - DNA, 561 bp, Homo sapiens
agcatccagatctattttagacatttccagcacctcagaaactccttcttgcccatttctagtccacccctgacactgacttccagcaccataggttttttgcctatttttgaacttcatataaagggctacggtatggaacaggatgtactcttttgtgtctggttaatttttctcaacattatgattgtgaacagtatacatgttgtaaattgaagttcatttgttcttattactgtatatttcatattttcccattctgctgaggggctcgggttgcttctggttttgaccacttacaaatagtaatgctgtggatatttttgtttacatgtttcaaatattttctaccattactaatgttcracagtatctgatggaggtatgttacaatttcccactcttttggatatacaaatgcaaattaagcatttccctaatgactatgatattgaccatttttcacgtttattacctatttgggtatccttttttgtaagctctttttgataatttttctattgtctgtctttttcttactgacttataggagttatttat

SEQ ID NO: 423455 - DNA, 561 bp, Homo sapiens
agcatccagatctattttagacatttccagcacctcagaaactccttcttgcccatttctagtccacccctgacactgacttccagcaccataggttttttgcctatttttgaacttcatataaagggctacggtatggaacaggatgtactcttttgtgtctggttaatttttctcaacattatgattgtgaacagtatacatgttgtaaattgaagttcatttgttcttattactgtatatttcatattttcccattctgctgaggggctcgggttgcttctggttttgaccacttacaaatagtaatgctgtggatatttttgtttacatgtttcaaatattttctaccattactaatgttcgacagtatctgatggaggtatgttacaatttcccactcttttggatatacaaatgcaaattaagcatttccctaatgactatgatattgaccatttttcacrtttattacctatttgggtatccttttttgtaagctctttttgataatttttctattgtctgtctttttcttactgacttataggagttatttat

SEQ ID NO: 423456 - DNA, 533 bp, Homo sapiens
cgtggtcctattaacaaatttgtcaagagttggagtgtatttgttttctattgctgtgtaacaaatttagcaacaacatacatttaagatcttccagtttccatgggtcaggactcccatcacagcttagctgagtgctctgctgagagtcttccaaggctgcagttagggtgttgactttgctgtgtttctktttgcagctcttccaggctcacaaggtcactggcagaattcagttctttgtggttgtaggactgaggttcctgctttcttgctgcccatcagtggggggccactctcagctcctagaggcccttgccttgtggcactcttgtaggccctctcctggcgtggcagcttacctcttcaagttcaggaggagactttccatccagactgctaagatagagtcttacataatgtagcaatcccaagagtgacatttcatcacccttgtcatattctgttggctagaagcaagtcataggttccacccacactcaaggggattatgcaagggagtgagtcattgg

SEQ ID NO: 423457 - DNA, 443 bp, Homo sapiens
aaaaaaaaatctctgttaaaatgggatgcaaaacactttatacattgcttttacaaaagttagactaatttaaaggaaagtcttcaaaarcaatccgtgatcgataaaattacagaaaaaaatcaggaaagggggaaataataagggaagaaagattagcagaacaatcttccgccccagtaaagaggactgaattttaaccaatgagatcacaagtttgaaaatttccttttcaggcccaatcaagaggaggctatgtctataaatacgactgcctagaccctctcgtatcaatgagacagcatggcccgtactaagcagactgcccgcaagtcgaccggcggcaaggccccgaggaagcagctggctaccaaagcggcccgcaagagcgcgccggccacgggcggggtgaagaagccgcaccgctaccggcccggcaccgt

SEQ ID NO: 423458 - DNA, 443 bp, Homo sapiens
aaaaaaaaatctctgttaaaatgggatgcaaaacactttatacattgcttttacaaaagttagactaatttaaaggaaagtcttcaaaagcaatccgtgatcgataaaattacagaaaaaaatcaggaaagggggaaataataagggaagaaagattagcakaacaatcttccgccccagtaaagaggactgaattttaaccaatgagatcacaagtttgaaaatttccttttcaggcccaatcaagaggaggctatgtctataaatacgactgcctagaccctctcgtatcaatgagacagcatggcccgtactaagcagactgcccgcaagtcgaccggcggcaaggccccgaggaagcagctggctaccaaagcggcccgcaagagcgcgccggccacgggcggggtgaagaagccgcaccgctaccggcccggcaccgt

SEQ ID NO: 423459 - DNA, 443 bp, Homo sapiens
aaaaaaaaatctctgttaaaatgggatgcaaaacactttatacattgcttttacaaaagttagactaatttaaaggaaagtcttcaaaagcaatccgtgatcgataaaattacagaaaaaaatcaggaaagggggaaataataagggaagaaagattagcagaacaatcttccgccccagtaaagaggactgaattttaaccaatgagatcacaagtttgaaaatttccttttcaggcccaatcaagaggaggctatgtctataaataygactgcctagaccctctcgtatcaatgagacagcatggcccgtactaagcagactgcccgcaagtcgaccggcggcaaggccccgaggaagcagctggctaccaaagcggcccgcaagagcgcgccggccacgggcggggtgaagaagccgcaccgctaccggcccggcaccgt

SEQ ID NO: 423460 - DNA, 443 bp, Homo sapiens
aaaaaaaaatctctgttaaaatgggatgcaaaacactttatacattgcttttacaaaagttagactaatttaaaggaaagtcttcaaaagcaatccgtgatcgataaaattacagaaaaaaatcaggaaagggggaaataataagggaagaaagattagcagaacaatcttccgccccagtaaagaggactgaattttaaccaatgagatcacaagtttgaaaatttccttttcaggcccaatcaagaggaggctatgtctataaatacgactgcctagaccctctcstatcaatgagacagcatggcccgtactaagcagactgcccgcaagtcgaccggcggcaaggccccgaggaagcagctggctaccaaagcggcccgcaagagcgcgccggccacgggcggggtgaagaagccgcaccgctaccggcccggcaccgt

SEQ ID NO: 423461 - DNA, 415 bp, Homo sapiens
cgcgggagaggcgtcccgcctggcgcactacaacaagcgctccaccatcacgtcccgcgagatccagacggccgtgcgcctgctgctgcccggcgagctggccaagcacgccgtgtccgagggcaccaaggcggtcaccaagtacaccagctcgaagtaagagtgtgcaagggacgcaatagatcaaccacctaaccccaaaggctcttttcagagccacttcagtaatygagaaagcagctgtaaacacttgtcagagcgtttgatagcttttggtcaggtagggagtgttaccatggtcacggatgcattcgggtttaggactaaggagtttcctgtagtcctgtaatgagttggccctcagtcatccccgtctagtcttactgagttgcttgttatctgtgctacgagatta

SEQ ID NO: 423462 - DNA, 620 bp, Homo sapiens
ttttctctactttttttctaactttttttcttactcctttactatggatactctttttaattattgcccttcataattattggcccagttgaaacaactgttatagattcaaaaatcctcagagtggtaaagtactacacttggyatcttcccttgagccgatgtatctatgtagctaaaatgatgagattagagtggagctttctcaccctggtttgaggtgctgcagaaatggtctgcttttctagtgccttgaaaaaggatgagaagagaggtgcattccagaagacaaaaggtgtgtagtatcaggataaggggctttaaatatcagatccagagaacactgcacatgtagaaatgggcttggcctgggtcagggcattgagattggttacataatcttttcaaggattggtgaatgagttggagtatgtgtagaaacctacaaagatgacagtttaatctcatgtcataatttttagacaaataatgtattttaaaactgggtgcagttcctaaagctgttctaaaagtcaatgcaactgaatttggaatgtaagcataggacaacagatgggaaataagtacatgacctctgtgggataaagtgagagttatca

SEQ ID NO: 423463 - DNA, 620 bp, Homo sapiens
ttttctctactttttttctaactttttttcttactcctttactatggatactctttttaattattgcccttcataattattggcccagttgaaacaactgttatagattcaaaaatcctcagagtggtaaagtactacacttggcatcttcccttgagccratgtatctatgtagctaaaatgatgagattagagtggagctttctcaccctggtttgaggtgctgcagaaatggtctgcttttctagtgccttgaaaaaggatgagaagagaggtgcattccagaagacaaaaggtgtgtagtatcaggataaggggctttaaatatcagatccagagaacactgcacatgtagaaatgggcttggcctgggtcagggcattgagattggttacataatcttttcaaggattggtgaatgagttggagtatgtgtagaaacctacaaagatgacagtttaatctcatgtcataatttttagacaaataatgtattttaaaactgggtgcagttcctaaagctgttctaaaagtcaatgcaactgaatttggaatgtaagcataggacaacagatgggaaataagtacatgacctctgtgggataaagtgagagttatca

SEQ ID NO: 423464 - DNA, 620 bp, Homo sapiens
ttttctctactttttttctaactttttttcttactcctttactatggatactctttttaattattgcccttcataattattggcccagttgaaacaactgttatagattcaaaaatcctcagagtggtaaagtactacacttggcatcttcccttgagccgatgtatctatgtagctaaaatgatgagattagagtggagctttctcaccctggtttgaggtgctgcagaaatggtctgcttttctagtgccttgaaaaaggatgagaagagaggtgcattccagaaracaaaaggtgtgtagtatcaggataaggggctttaaatatcagatccagagaacactgcacatgtagaaatgggcttggcctgggtcagggcattgagattggttacataatcttttcaaggattggtgaatgagttggagtatgtgtagaaacctacaaagatgacagtttaatctcatgtcataatttttagacaaataatgtattttaaaactgggtgcagttcctaaagctgttctaaaagtcaatgcaactgaatttggaatgtaagcataggacaacagatgggaaataagtacatgacctctgtgggataaagtgagagttatca

SEQ ID NO: 423465 - DNA, 633 bp, Homo sapiens
ctcgtaactttttttttgggggggggayggagtctcgcgtctcgctctgttgtccaggctggagtgcagtggtgcaatctcggctcactgcaacctccacctcccgggttcaagcgattctcctgcctcagcctcccgagtagctgggactacaggcaagtgccaccacacccagctaattttttgtatttttagtagagatggggtttcactgtgttaggatggtctcgatctcctgaccttgtgatccacccacctcggcctcccaaagtgctgggattataggtgtgagccagtgcgcccggcctctcataattttcttaatttttctccatataccatctgaatactaatgtatttatttatttgtttatttctgaatgagactgatatccataaaaatgatctttccttgtatactctaactccctgctttctgggcgcttggcttctcaattaaaggctaatttaccagcttctcttgcatctgggtttgtccaaagtttggggccaatgagatgtgaatggaagttgcatgtattatttctagtttgtgccctaaaaaagaatatgtatgtgttacccttgccctcttaccctctccactggctggggtgcagatgtgatggcagg

SEQ ID NO: 423466 - DNA, 523 bp, Homo sapiens
attgagtttgaaatcttttgccctctaaattagggacagcacaacacagaatgaggatttgggtgaagttgcaaccaccgagttccacataccagtttagaagcctcagagtataagtcattgggtatttaaggaccttacctaagctaactcagaagcattatgaaggrcagtattgacattaactgccaggaatctcctaaaagagtcaagggattatacatgagtcatagaaggatacttgaagatggacaattatagtcccatcactttatggaagactatgagacccaaataagagaaatcccagtggtccacgaacttagctctggtaagtccccgataattatttaaattatttcaggttcaatatcactgattgctgtcaccattttcaaggctaatatctaatctgctttggttctgctaagatctccctgtttttttgtcgttgtttttttcctctagaaaaaacagaaaagagaactatctccagatgaatacagaagaggtggtaaaaaga

SEQ ID NO: 423467 - DNA, 523 bp, Homo sapiens
attgagtttgaaatcttttgccctctaaattagggacagcacaacacagaatgaggatttgggtgaagttgcaaccaccgagttccacataccagtttagaagcctcagagtataagtcattgggtatttaaggaccttacctaagctaactcagaagcattatgaaggacagtattgacattaactgccaggaatctcctaaaagagtcaagggattatacatgagtcatagaaggatacttgaagatggacaattatagtcccatcactttatggaagactatgagacccaaataagagaaatcccagtggtccacgaacttagctctggtaagtccccrataattatttaaattatttcaggttcaatatcactgattgctgtcaccattttcaaggctaatatctaatctgctttggttctgctaagatctccctgtttttttgtcgttgtttttttcctctagaaaaaacagaaaagagaactatctccagatgaatacagaagaggtggtaaaaaga

SEQ ID NO: 423468 - DNA, 523 bp, Homo sapiens
attgagtttgaaatcttttgccctctaaattagggacagcacaacacagaatgaggatttgggtgaagttgcaaccaccgagttccacataccagtttagaagcctcagagtataagtcattgggtatttaaggaccttacctaagctaactcagaagcattatgaaggacagtattgacattaactgccaggaatctcctaaaagagtcaagggattatacatgagtcatagaaggatacttgaagatggacaattatagtcccatcactttatggaagactatgagacccaaataagagaaatcccagtggtccacgaacttagctctggtaagtccccgataattatttaaattatttcaggttcaatatcactgattgctgtcaccattttcaaggctaatatctaatctgctttggttctgctaagatctccctgtttttttgtcgttgtttttttcctctagaaaaaacagaaaagagaactatctccagatgratacagaagaggtggtaaaaaga

SEQ ID NO: 423469 - DNA, 535 bp, Homo sapiens
cgtagaaccttcagtgtctgctatgtggcccattaggaaaataataaattaggaaacaaaagactttatagtgtctgttactagtgctctataaaggccgatataacatttggcaagtaccttctttttctatcagatgatgcttttaatacttcatgtcaatactttcagaaaaaagtgaaatcatttcattaaacacttctttcctatttctgatttttgagttgaaagctcttaattttgaggatttaacataagaacaagtcaagggaatagaaattatctagaaaactattagctagcatagagaaaaacaagacttacagccaaaagaagaatgtgcaaataatttgggaaatgtttaaatagaaatttaaaaatggggytggtggagtcatgttgatgatttcggagttaatcatttctgcgtattaaattgtttccagcattttctagctgaagttactgttgttgtcaactactcagcatccaaaattttcacaagaaaacaaggttttttctcttcaaattacag

SEQ ID NO: 423470 - DNA, 535 bp, Homo sapiens
cgtagaaccttcagtgtctgctatgtggcccattaggaaaataataaattaggaaacaaaagactttatagtgtctgttactagtgctctataaaggccgatataacatttggcaagtaccttctttttctatcagatgatgcttttaatacttcatgtcaatactttcagaaaaaagtgaaatcatttcattaaacacttctttcctatttctgatttttgagttgaaagctcttaattttgaggatttaacataagaacaagtcaagggaatagaaattatctagaaaactattagctagcatagagaaaaacaagacttacagccaaaagaagaatgtgcaaataatttgggaaatgtttaaatagaaatttaaaaatggggctggtggagtcatgttgatgatttyggagttaatcatttctgcgtattaaattgtttccagcattttctagctgaagttactgttgttgtcaactactcagcatccaaaattttcacaagaaaacaaggttttttctcttcaaattacag

SEQ ID NO: 423471 - DNA, 513 bp, Homo sapiens
tggtttctagtttgtgggattatcatttttcattgcattgaaggaaaattctttaggccaggagggagtctaagacttcagacacagcacagatacgatcctgggcaagggtcattcagtgttcttaagaaaattctaaatcctaaggtgtgatggttaatattaggtgtcaacttgataggattaaaggatgcctagatagctaagtattgtttctgggtgtgtctgtgagggtgttrccagaggagattaacatttgagtcagtggactaggagaggaagactcaccctcaatgggggttgacaccatccagtcggctgccagggtagctacaacaaaacaggagagagaaggtgggcgggctaagctggcttgcagagttctggctttcatccctctcctgtgctggatgcctccatccattcctcctgcctttggacatcagactccaggttctttggcctttggactcttggacttaacaccagtggcttgcctggggcttttgggcc

SEQ ID NO: 423472 - DNA, 582 bp, Homo sapiens
aaatttttctagactagtatgtgcaaataatttatagtggggaggggggaatttgagtctcaaagataaaagcrtagtgaaacagaactgtgactgttcttcctggcatgaggaaataacatatgaattacaagcatgcttgagtaatgtagattgagttgatgggtagaaatgtggccccttacagcacagagatgacaaagtaaatacatttggccctcctggcagggtagaagtataatgtgttcccaaaatcacccggatatgccatcgtatagtgtattagtaaagagttcaggcttctgagacggaccacctggagtgtaacttggctctgctctttaggatgtttttaatctgtgttttctcatcttaaaactgggactatagtaatgcttacttacttcataatgtttttatgaaggataattgcttaatgtttcctactaataaacaattcaataaatactagttggtgatcgtagggaagtcctgttaagtgctctgcaagtttcccgtctctaatgcacaggtgaaaaatagctactgattcaagattgtgtcctgaagatatgttgcttt

SEQ ID NO: 423473 - DNA, 582 bp, Homo sapiens
aaatttttctagactagtatgtgcaaataatttatagtggggaggggggaatttgagtctcaaagataaaagcatartgaaacagaactgtgactgttcttcctggcatgaggaaataacatatgaattacaagcatgcttgagtaatgtagattgagttgatgggtagaaatgtggccccttacagcacagagatgacaaagtaaatacatttggccctcctggcagggtagaagtataatgtgttcccaaaatcacccggatatgccatcgtatagtgtattagtaaagagttcaggcttctgagacggaccacctggagtgtaacttggctctgctctttaggatgtttttaatctgtgttttctcatcttaaaactgggactatagtaatgcttacttacttcataatgtttttatgaaggataattgcttaatgtttcctactaataaacaattcaataaatactagttggtgatcgtagggaagtcctgttaagtgctctgcaagtttcccgtctctaatgcacaggtgaaaaatagctactgattcaagattgtgtcctgaagatatgttgcttt

SEQ ID NO: 423474 - DNA, 582 bp, Homo sapiens
aaatttttctagactagtatgtgcaaataatttatagtggggaggggggaatttgagtctcaaagataaaagcatagtgaaacagaactgtgastgttcttcctggcatgaggaaataacatatgaattacaagcatgcttgagtaatgtagattgagttgatgggtagaaatgtggccccttacagcacagagatgacaaagtaaatacatttggccctcctggcagggtagaagtataatgtgttcccaaaatcacccggatatgccatcgtatagtgtattagtaaagagttcaggcttctgagacggaccacctggagtgtaacttggctctgctctttaggatgtttttaatctgtgttttctcatcttaaaactgggactatagtaatgcttacttacttcataatgtttttatgaaggataattgcttaatgtttcctactaataaacaattcaataaatactagttggtgatcgtagggaagtcctgttaagtgctctgcaagtttcccgtctctaatgcacaggtgaaaaatagctactgattcaagattgtgtcctgaagatatgttgcttt

SEQ ID NO: 423475 - DNA, 582 bp, Homo sapiens
aaatttttctagactagtatgtgcaaataatttatagtggggaggggggaatttgagtctcaaagataaaagcatagtgaaacagaactgtgactgttcttcctggcatgaggaaataacatatgaattacaagcatgcttgagtaatgtagattgagttgatgggtagaaatgtggccccttacagcacagagatgacaaagtaaatacatttggccctcctggcagggtagaagtataatgtgttcccaaaatcacccggatatgccatcgtatagtgtattagtaaagagttcaggcttctgagacggaccacctggagtgtaacttggctctgctctttargatgtttttaatctgtgttttctcatcttaaaactgggactatagtaatgcttacttacttcataatgtttttatgaaggataattgcttaatgtttcctactaataaacaattcaataaatactagttggtgatcgtagggaagtcctgttaagtgctctgcaagtttcccgtctctaatgcacaggtgaaaaatagctactgattcaagattgtgtcctgaagatatgttgcttt

SEQ ID NO: 423476 - DNA, 593 bp, Homo sapiens
tttttggtttcctattcttaaaaaaaccctataaggtacacccatttttcttcagttagtaatgtaaaaacgactgcattgatgtggttaaattcccaagaccctcagttcttcagagatggactaaatggctggtatcattgctttcaaaagcatcttgaacttgatggagattatgttgagaaatagtttatattttcaatttttatcttttaattccatttttccgtgaaccttttgtagctccccccatacaatggaatattatgcagtcttaaaaawagaaaaggagaccctgtcatttgccacaacatgggtggacttggaggacattaggctaagtggaataatccagatacagagagaaaaacattgcatgacctcacttatacatggcattttaaaaagggctcaaatacacagagagaatgaaacagtggttaccatgattgggtggtggggagaggaaatgagacactgtaagtcaaaggatacgaaatatgaaaagtctccacatctaaggtccaacatgaagactaaagttaaaaaaaactgtatcatattgggaatttgtgttaaataagtagatttta

SEQ ID NO: 423477 - DNA, 445 bp, Homo sapiens
caaataaatgaactgacttcaactgggatacatttggaaatgtggtcatcaaagatgacttgaaatgaggcctactctaaagaattcttgaaaaacttacaagtcaagcctagcctgataatcctattacatagtttgaaaaatagtattttatttctcagaacaaggtaaaaaggtgagtgggtgcatatgtacagaagattaagacagagaaacagacagaaagagacacacacacagycaggagtgggtagatttcagggagacaagagggaatagtatagacaataaggaaggaaatagtacttacaaatgactcctaagggactgtgagactgagagggctcacgcctctgtgttcaggatacttagttcatggcttttctctttgactttactaaaagagaatgtctccatacgcgttctaggcatacaagggggtaac

SEQ ID NO: 423478 - DNA, 607 bp, Homo sapiens
ctgaggcagaaatttaaaacaaataaataataagtactgcatttattcactccaagaaaagtaaaagctaaggcccagaatgtggcaaggcaagggttaaaaagaagagaacaagttttcctctgcctagcaagcttacttcaaggacagttataagataacgctgtccaaatagccaaggtcaaaggaataggctccagacacccctcccttccagagcaaggttggaggaagaaaaagagaaagattcttttactcttactctttccccaggcctcttaagcattatttacaaatgtctgtatttagccagtttttgtttttctttcgatgcaactacaaggtcaccagctatgcaaggtcacaagttatgttatgctatagattatgtgacctgtcactgtatgattaactgcttttgttttgtgtctgtaaggccgcttataaaaaccccactctgtctttgttcagtgctcagctttttagatgcaaacctgctgagccrtgtgtacctaaaataaacaacaatcctcctgtttttccatattggcctctcctttcctcagtttaccacaacatagccataatagtataaaaactgaaagac

SEQ ID NO: 423479 - DNA, 607 bp, Homo sapiens
ctgaggcagaaatttaaaacaaataaataataagtactgcatttattcactccaagaaaagtaaaagctaaggcccagaatgtggcaaggcaagggttaaaaagaagagaacaagttttcctctgcctagcaagcttacttcaaggacagttataagataacgctgtccaaatagccaaggtcaaaggaataggctccagacacccctcccttccagagcaaggttggaggaagaaaaagagaaagattcttttactcttactctttccccaggcctcttaagcattatttacaaatgtctgtatttagccagtttttgtttttctttcgatgcaactacaaggtcaccagctatgcaaggtcacaagttatgttatgctatagattatgtgacctgtcactgtatgattaactgcttttgttttgtgtctgtaaggccgcttataaaaaccccactctgtctttgttcagtgctcagctttttagatgcaaacctgctgagccgtgygtacctaaaataaacaacaatcctcctgtttttccatattggcctctcctttcctcagtttaccacaacatagccataatagtataaaaactgaaagac

SEQ ID NO: 423480 - DNA, 291 bp, Homo sapiens
atttcaggatatggctgaattaaaatcttggtcctgcacttaaatagctccttgaattgcaatttcttatyccaattattttatcctttcattccactgtgaaatctatatcatggcacttaatagtcaactttattattttaatttaacaaatgcttatttacctttcatgggttatttcatttagccttcataatatctcttgtcattgcctcacactcagtcggtggcttttaatactattctattattttgatcaatttgtataatatattctctcctcagtgtttg

SEQ ID NO: 423481 - DNA, 291 bp, Homo sapiens
atttcaggatatggctgaattaaaatcttggtcctgcacttaaatagctccttgaattgcaatttcttatcccaattattttatcctttcattccactgtgaaatctatatcatggcacttaatagtcaactttattattttaatttaacaaatgcttatttacctttcatgggttatttcatttagccttcataatatctsttgtcattgcctcacactcagtcggtggcttttaatactattctattattttgatcaatttgtataatatattctctcctcagtgtttg

SEQ ID NO: 423482 - DNA, 450 bp, Homo sapiens
gataagaggctgctatcagaagtgtgtacattagctgataaatgagacttaccagcccgtttctggattattgtcagtttctttactgacgataccctattccatcccgacgtgtccttgtttgaattgattgaaatctttcatttatttccactaatgccaaatgtgtagctgtgagtatacaatatatcaagtctataatataatatatattatataatcaaaacatcatattttgatagcagcctcctatctggtcttygagatagaggaagatttggggcatattttgaaagtagagctgacagtactctgatggattggaaatgaatatgagagaaagtgaggaagatgccaaggatgcagtcaacagtgacttcaaggttttatggtaatcatggtgctatttatggagatgaagaaggacaagtttggagagaaaattcaaga

SEQ ID NO: 423483 - DNA, 624 bp, Homo sapiens
gtaaccgggaaggctgcagatcataacaactatggctgctgatttggcatcaaagatgtggcattgtcaaagccacaattgttgagaatggcaccaacatgctgcagctggagagagtgggtgaccaacattttgaagtggcatagttgtctggggtaawtacccaaggtttgttgcctcacaccaagggaactgaggatgtggacacacaagaagtgggtttaggagtggaggtttactaggcaaaagaaagagaaaggaaaatagctctctctcctgagagagagagggttgccagagtggaacttctggttttgtggtgaagtgcacagggttttataggctggcttgaggaggcagtgtctgattcacatagggcccaaagattggttggaccaggtgtgacatttacatagcgctggaagaagttggccacccaaccctaatcttcttcttatgcaaatgggttttctactttactcatgccatgttgtctgctccttactgtacacgtggttagaaaggaaaagggaagatggagccaccatgttgaacatgcctatcccccaggtagccttgtcctattggcacagccgccagcagtcacctgtgcaagcttccagc

SEQ ID NO: 423484 - DNA, 624 bp, Homo sapiens
gtaaccgggaaggctgcagatcataacaactatggctgctgatttggcatcaaagatgtggcattgtcaaagccacaattgttgagaatggcaccaacatgctgcagctggagagagtgggtgaccaacattttgaagtggcatagttgtctggggtaattacccaasgtttgttgcctcacaccaagggaactgaggatgtggacacacaagaagtgggtttaggagtggaggtttactaggcaaaagaaagagaaaggaaaatagctctctctcctgagagagagagggttgccagagtggaacttctggttttgtggtgaagtgcacagggttttataggctggcttgaggaggcagtgtctgattcacatagggcccaaagattggttggaccaggtgtgacatttacatagcgctggaagaagttggccacccaaccctaatcttcttcttatgcaaatgggttttctactttactcatgccatgttgtctgctccttactgtacacgtggttagaaaggaaaagggaagatggagccaccatgttgaacatgcctatcccccaggtagccttgtcctattggcacagccgccagcagtcacctgtgcaagcttccagc

SEQ ID NO: 423485 - DNA, 483 bp, Homo sapiens
aatgctgattaagcctctgtaaagggaaaatgcccctccctgtttataccatcatttatacaagactgaattcttattgacagtgaacctgtatttctaaaatatataaatatgaaaatatgttcactcctrtctagtctgagattgtgaatcaaatgttgtgttggtggtaaaattctacagacatagtctcctcttttgcagttcagtggttgcaagagggcctgaagctgcagtagccatgtgctgtaataatgattgcattgattaagtgccaattacttctggagacttttcaaaggcctctgctgcagagttgaaactaggctttctgtctgatattagatacatctctaatgctaggtgatggctggtttgggatctctggcaattacttctgtcatgtactttaatcaacagcgtgcctactattataacaagtccccacacccactgtgaagcattactcagactctctttccc

SEQ ID NO: 423486 - DNA, 564 bp, Homo sapiens
ggatctctggcaattacttctgtcatgtactttaatcaacagcgtgcctactattataacaagtccccacacccactgtgaagcattactcagactctctttcccttaacccccaccctgctcacatgaacctgagcttctgatccgtagatgattaagttgctctggtgaatcaccctcagtgggatgggacagccttccaaccagagccagatctttaccacaaccaagtgcttgtctggagggatgatgaatcctacgggcccagccagaggtcaaattacctgtctagctattctgctgggtatcagtcttctggtaggcatcctatttagcacatgcttccattagcaaatatttaggaaggacctatgcttgcatatagttccccgaaaaattatttgcaactaagttttggatctaatcaccatcattggctgattttgccaccatctttgaaatagttggcagactgtgatagaacrttgatggactgaaagttgagctaaaagagtgactaagtcaccaacttgctgtgtgaccttgggcatttatttcaaaaca

SEQ ID NO: 423487 - DNA, 624 bp, Homo sapiens
gtaaccgggaaggctgcagatcataacaactatggctgctgatttggcatcaaagatgtggcattgtcaaagccacaattgttgagaatggcaccaacatgctgcagctggagagagtgggtgaccaacattttgaagtggcatagttgtctggggtaattacccaaggtttgttgcctcacaccaagggaactgaggatgtggacacacaagaagtgggtttaggagtggaggtttactaggcaaaagaaagagaaaggaaaatagctctctctcctgagagagagagggttgccagagtggaacttctggttttgtggtgaagtgcacagggttttataggctggcttgaggaggcagtgtctgattcacatagggcccaaagattggttggaccaggtgtgacatttacatagcgctggaagaagytggccacccaaccctaatcttcttcttatgcaaatgggttttctactttactcatgccatgttgtctgctccttactgtacacgtggttagaaaggaaaagggaagatggagccaccatgttgaacatgcctatcccccaggtagccttgtcctattggcacagccgccagcagtcacctgtgcaagcttccagc

SEQ ID NO: 423488 - DNA, 565 bp, Homo sapiens
ccatgtcctacagcatcattctttcgaccatgagccttgcatactcctgcctggccatataagtggcattcttaaaggttcatttggttcctcaaacgtattccacattaaataatatccacatgttggcttgttgagagaagaaggtaaacagttgggggcatcaacaaaaaatcaggtgaggggagaaaggagagatagtgagtgtggccccttaggcatgctgagttcagttacaacagtcacacttggactgtattcaaagttgcccactcatccaccacagctactcaaagacatttaactcgctagccattatccaaccgcatttaccagacgctcagtcttgagggaggagggtaacgcagtaggggatgcggagtattggtgtcatcctacaggttaaggacaaacatgcccactacaaggacagggatacatcaccaacttcaattcagcccagggttcatgtagtaaggggtgggtgattcactcctgtkggggaggcagggcgggggcggttgggggaggcggttaggaaaaaggaaaatcgtggaaagtccca

SEQ ID NO: 423489 - DNA, 559 bp, Homo sapiens
ctccacctccagccccagcctttctgtgggtagctccttctcatcttaaacctaaatgtcacctgcttatagcagttttctctggccactctatctgaagtagccccctttattttctgctagtcctttgttttcttctattcaaaacgctttaaattttgtttacctggcttttttctctcttgcaactagctggaaactccacaagagtagggatctctatgtctgtatcattcctaattttgtyccaagagtccaacactgtgctcagcttttacagtaggaactcataagaaatttgctgtatacacttaatgaatatttttaaagcagctgtgaggaacatcactgttcatttgtggacaacttgtcttagatatactttttcaaagtaaatttttattgaaacgtaatgtataaaagtgcatatttcattaacattttcagattttgaagtatatcttattccctacaggagaatttagggaaggggaaagtgaaagtatttcccaaaggaagtggagggaggaggaggggatgttatcactgggattagctg

SEQ ID NO: 423490 - DNA, 553 bp, Homo sapiens
catattatttaacccatagttatcatattgagaaattcttcacacactctgatgtcaataggtggtgactcgggtgrgcatcacttgacatagcaggctgacattccctgagcatgtggacaattcagttgtctcagtgtcacctgtttaaaagacaatctttttccctattgaatttgctattgtcaaaatcaattggccatatgaatttaggccattaacccacacataggcaaaacttccctcaaaataaaataaaggcctaaatttaagggctaaactatacacctcttagaagaaaacatagattattatattcatgatcttgaattaggcaaaaacccaacttttcctggttaaaaaatagttgaaaaatgaaacaggatcaaaactaaaaatgttggcgtttaaaagccaccaataagaaaatgaagagataaaccagagactgagaaaaaaaattcaaatcatatatttaatacaggactcatatccagaatatgaaatacacttacaactacgcaacaaaaagataaataacccaattttaaaa

SEQ ID NO: 423491 - DNA, 553 bp, Homo sapiens
catattatttaacccatagttatcatattgagaaattcttcacacactctgatgtcaataggtggtgactcgggtgagcaycacttgacatagcaggctgacattccctgagcatgtggacaattcagttgtctcagtgtcacctgtttaaaagacaatctttttccctattgaatttgctattgtcaaaatcaattggccatatgaatttaggccattaacccacacataggcaaaacttccctcaaaataaaataaaggcctaaatttaagggctaaactatacacctcttagaagaaaacatagattattatattcatgatcttgaattaggcaaaaacccaacttttcctggttaaaaaatagttgaaaaatgaaacaggatcaaaactaaaaatgttggcgtttaaaagccaccaataagaaaatgaagagataaaccagagactgagaaaaaaaattcaaatcatatatttaatacaggactcatatccagaatatgaaatacacttacaactacgcaacaaaaagataaataacccaattttaaaa

SEQ ID NO: 423492 - DNA, 553 bp, Homo sapiens
catattatttaacccatagttatcatattgagaaattcttcacacactctgatgtcaataggtggtgactcgggtgagcatcacttgacatagcaggctgacattccctgagcatgtggacaattcagttgtctcagtgtcacytgtttaaaagacaatctttttccctattgaatttgctattgtcaaaatcaattggccatatgaatttaggccattaacccacacataggcaaaacttccctcaaaataaaataaaggcctaaatttaagggctaaactatacacctcttagaagaaaacatagattattatattcatgatcttgaattaggcaaaaacccaacttttcctggttaaaaaatagttgaaaaatgaaacaggatcaaaactaaaaatgttggcgtttaaaagccaccaataagaaaatgaagagataaaccagagactgagaaaaaaaattcaaatcatatatttaatacaggactcatatccagaatatgaaatacacttacaactacgcaacaaaaagataaataacccaattttaaaa

SEQ ID NO: 423493 - DNA, 553 bp, Homo sapiens
catattatttaacccatagttatcatattgagaaattcttcacacactctgatgtcaataggtggtgactcgggtgagcatcacttgacatagcaggctgacattccctgagcatgtggacaattcagttgtctcagtgtcacctgtttaaaagacaatctttttccctattgaatttgctattgtcaaaatcaattggccatatgaatttaggccattaacccacacataggcaaaacttccctcaaaataaaataaaggcctaaatttaagggctaaactatacacctcttagaagaaaacatagattattatattcatgatcttgaattaggcaaaaacccaacttttcctggttaaaaaatagttgaaaaatgaaacaggatcaaaactaaaaatgttggcrtttaaaagccaccaataagaaaatgaagagataaaccagagactgagaaaaaaaattcaaatcatatatttaatacaggactcatatccagaatatgaaatacacttacaactacgcaacaaaaagataaataacccaattttaaaa

SEQ ID NO: 423494 - DNA, 605 bp, Homo sapiens
ctgagaaaaaaaattcaaatcatatatttaatacaggactcatatccagaatatgaaatacacttacaactacgcaacaaaaagataaataacccaattttaaaataggcaaaatatttgaataaccatttcatcaaaaaggtgtaggaatagacaataaaatacatgaaaagatggtcagcatcatcagtcagcagggacatgcaaatcaaaactacagtgagacaccacttcttacccactagaatgctataataaaaaaggacagcaacacctgggggaagtgaaataatgacgtggaaaaactaaaayactcacgcattgttgatgggacatgtagtcacgttggaaaccagtttggcagtatcttaaaatgttgagatatatttaccatatgacctagcactatcacttctagctgtctacccagaagaaaaaaacctatgtccacacaacacatgaatgtgaatattcatagcaactttatccataattgtccataaagtggaaacactcaaatatgtatcaactgataaatgaataaactaatgggagctatccatccaatttaataggatttgtcacctaacaggattaaaatattg

SEQ ID NO: 423495 - DNA, 605 bp, Homo sapiens
ctgagaaaaaaaattcaaatcatatatttaatacaggactcatatccagaatatgaaatacacttacaactacgcaacaaaaagataaataacccaattttaaaataggcaaaatatttgaataaccatttcatcaaaaaggtgtaggaatagacaataaaatacatgaaaagatggtcagcatcatcagtcagcagggacatgcaaatcaaaactacagtgagacaccacttcttacccactagaatgctataataaaaaaggacagcaacacctgggggaagtgaaataatgacgtggaaaaactaaaatactcacgcattgttgatgggacatgtagtcacgttggaaaccagtttggcagtatcttaaaatgttgagatatatttaccatatgacctagcactatcacttctagctrtctacccagaagaaaaaaacctatgtccacacaacacatgaatgtgaatattcatagcaactttatccataattgtccataaagtggaaacactcaaatatgtatcaactgataaatgaataaactaatgggagctatccatccaatttaataggatttgtcacctaacaggattaaaatattg

SEQ ID NO: 423496 - DNA, 605 bp, Homo sapiens
ctgagaaaaaaaattcaaatcatatatttaatacaggactcatatccagaatatgaaatacacttacaactacgcaacaaaaagataaataacccaattttaaaataggcaaaatatttgaataaccatttcatcaaaaaggtgtaggaatagacaataaaatacatgaaaagatggtcagcatcatcagtcagcagggacatgcaaatcaaaactacagtgagacaccacttcttacccactagaatgctataataaaaaaggacagcaacacctgggggaagtgaaataatgacgtggaaaaactaaaatactcacgcattgttgatgggacatgtagtcacgttggaaaccagtttggcagtatcttaaaatgttgagatatatttaccatatgacctagcactatcacttctagctgtctacccagaagaaaaaaacctatgtccacacaayacatgaatgtgaatattcatagcaactttatccataattgtccataaagtggaaacactcaaatatgtatcaactgataaatgaataaactaatgggagctatccatccaatttaataggatttgtcacctaacaggattaaaatattg

SEQ ID NO: 423497 - DNA, 605 bp, Homo sapiens
ctgagaaaaaaaattcaaatcatatatttaatacaggactcatatccagaatatgaaatacacttacaactacgcaacaaaaagataaataacccaattttaaaataggcaaaatatttgaataaccatttcatcaaaaaggtgtaggaatagacaataaaatacatgaaaagatggtcagcatcatcagtcagcagggacatgcaaatcaaaactacagtgagacaccacttcttacccactagaatgctataataaaaaaggacagcaacacctgggggaagtgaaataatgacgtggaaaaactaaaatactcacgcattgttgatgggacatgtagtcacgttggaaaccagtttggcagtatcttaaaatgttgagatatatttaccatatgacctagcactatcacttctagctgtctacccagaagaaaaaaacctatgtccacacaacacatgaatgtgaatattcatagcaactttatccataattgtccataaagtggaaacactcaaatatgtatcaactgataaatgaataaactaatgggagctatccatmcaatttaataggatttgtcacctaacaggattaaaatattg

SEQ ID NO: 423498 - DNA, 263 bp, Homo sapiens
taaggtgcactctagcatgtgctatagcaggcaaaggtgtgtgatgcacctgggtggttcagatagtgctccacatgtctcagcaagacccagggcctgtagctatcrgagaacaagctgctacatcttgcagcacagggccaaccttttctaggcaagtgggtttgaagcattggtagtcaggtcccaagtagcagttgaatgttttcaacatgggaggagggcaagacctagagtggggtttcaaagcaaatcatttgtag

SEQ ID NO: 423499 - DNA, 579 bp, Homo sapiens
agcaggaagtgcagaggtggaaatacaaccagagaaaattccactctcaggctgttacccgcatcctccccagcagcctcttccctgcctccccaaactgcagggcctccttggaggtgcctggcaataggaaggggctgggagtagacaaaacatggcaaaggcattaggagagtaaatggtcctgtctgaacccctggaaggaattgctccggtcttgaatttttcgctctgaattttactctcactgttctttggcctttgttgccaatttcagttgacctggtttattcttactctttctcagaaaagtttattctaaacagctaggcctgtacccggtgtacagagtacaacacttagaggtggggtgggcaagtttgagtctccactagaaacgtgaccttagatctgtcccttaacctctctgatcctcagtttcctcacaataaagtgggactcagaaaacctrtctcatgagattgttgtaaaatgaaataagcaagctgtgagtcatatgcagattataaagcacaaacaagtgtagagtatttatccaagctccaggtaccacggttt

SEQ ID NO: 423500 - DNA, 568 bp, Homo sapiens
tcagctgagactgaccatagcatgcatgtgttgacactactggaggccaaggaaaaacctgcaagtattagagggagcaatctctaaagctcacacaggcaaggaaacattcctattctcaccagccagactgaaaactgaaaccctcataatttatgggccactgggccttgcctcagtaaaagggaaaaattagctccaaactaagcatggcttacctcccgtctaacaaagcttgaaagaaattcctgaaaggatcaaactgttcccaattaacttgactatgtcccagaacaacttgagaatagaaatatatgtataaatacaatgaaagccagcatgcaacaagataaaattctcaatatatagaattcaattttaaaaattaccaaacatgcggttccaagatggaagaacaagaacagcaatkgtctgcagctcccagtgtgatagacccagaagatgggtgatttctgcatttctaactgaggtacctggctcatctcattgtgactggtgggacagtgggtgcagcccacagagggccagctgaagcagggcagggtgt

SEQ ID NO: 423501 - DNA, 508 bp, Homo sapiens
taaggttctgagccagtctgataatcatgtgtgactcatattcttgtttcattccacatttatgaagttcaaactctcctctagggaaggtagcttctccgtggcttcctctactttcttaactcctaactaaataggtactgttmccaagctgtgtcgcatggacccacagtgagacttaatatctctttgagttgtcccaaaaggatatttactcttacaaaacgtttatgaggaatacacattttatctaagatttcatagagcagaagagaagatgagttatcctaggaacaaaaacaatttttaatggtcaccttagacattgctgatttaaaaatatcagttggaatcccccaactttgaagtttcactaacttttcagtttagcgcagccaatcaccatctttcttgctcctcacatctgctgttttcatagttcttctcctgttcttttcttctcaccctttcaaaaacaaaatgtcaacgttcctctccctagttctgt

SEQ ID NO: 423502 - DNA, 508 bp, Homo sapiens
taaggttctgagccagtctgataatcatgtgtgactcatattcttgtttcattccacatttatgaagttcaaactctcctctagggaaggtagcttctccgtggcttcctctactttcttaactcctaactaaataggtactgttcccaagctgtgtcgcatggacccacagtgagacttaatatctctttgagttgtcccaaaaggatatttactcttacaaaacgtttatgaggaatacacattttatctaagatttcatagagcagaagagaagatgagttatcctaggaacaaaaacaakttttaatggtcaccttagacattgctgatttaaaaatatcagttggaatcccccaactttgaagtttcactaacttttcagtttagcgcagccaatcaccatctttcttgctcctcacatctgctgttttcatagttcttctcctgttcttttcttctcaccctttcaaaaacaaaatgtcaacgttcctctccctagttctgt

SEQ ID NO: 423503 - DNA, 548 bp, Homo sapiens
acttcttgttttggagcgagaccagctgagtgataggagattccatttacagataggagattacatttacagggatgaagaagactggggacagatgagatttttggagggaatcaaagtcttcccccaaccccctaacaagcagacctgtatatgtggtaataccttcaaattgggtgcctatatatgaaacattaaatgtatttgtctaagagtaaagagygagtcatatttgatatggaatgggaagtgagcatcatccctcacaaatgatagataggtgggaagtaaaagaactggaaggtgagaattctttgcctgccagtcacttacttttcctagggctcaacaatcaaagacatttcttgttttccttaacaatctatgtcccttttttctttcctggttcatatcccccaaaatagtcactgttccttggcactgtgtaatacattaaattctgctgataaagctcttgggaaaaagaggaaatgaaaagtaagagcttatagaaggcatcagtgaggacaataaaagtagcaaaccaa

SEQ ID NO: 423504 - DNA, 548 bp, Homo sapiens
acttcttgttttggagcgagaccagctgagtgataggagattccatttacagataggagattacatttacagggatgaagaagactggggacagatgagatttttggagggaatcaaagtcttcccccaaccccctaacaagcagacctgtatatgtggtaataccttcaaattgggtgcctatatatgaaacattaaatgtatttgtctaagagtaaagagcgagtcatrtttgatatggaatgggaagtgagcatcatccctcacaaatgatagataggtgggaagtaaaagaactggaaggtgagaattctttgcctgccagtcacttacttttcctagggctcaacaatcaaagacatttcttgttttccttaacaatctatgtcccttttttctttcctggttcatatcccccaaaatagtcactgttccttggcactgtgtaatacattaaattctgctgataaagctcttgggaaaaagaggaaatgaaaagtaagagcttatagaaggcatcagtgaggacaataaaagtagcaaaccaa

SEQ ID NO: 423505 - DNA, 548 bp, Homo sapiens
acttcttgttttggagcgagaccagctgagtgataggagattccatttacagataggagattacatttacagggatgaagaagactggggacagatgagatttttggagggaatcaaagtcttcccccaaccccctaacaagcagacctgtatatgtggtaataccttcaaattgggtgcctatatatgaaacattaaatgtatttgtctaagagtaaagagcgagtcatatttgatatggaatgggaagtgagcatcatccctcacaaatgatagataggtgggaagtaaaagaactggaaggtgagaattctttgcctgccagtcacttacktttcctagggctcaacaatcaaagacatttcttgttttccttaacaatctatgtcccttttttctttcctggttcatatcccccaaaatagtcactgttccttggcactgtgtaatacattaaattctgctgataaagctcttgggaaaaagaggaaatgaaaagtaagagcttatagaaggcatcagtgaggacaataaaagtagcaaaccaa

SEQ ID NO: 423506 - DNA, 575 bp, Homo sapiens
cacctggagcagccactgcagaaatgccagctgcagcaggggaagcacgcttagggctgtgtgctccgcagagccagtggaagctgggaacaggagggagccatgacccattccgagttggccaggtgggagccccaccttcctgggcacagctgtagccgcccagctgcggctgcagacccaggcatccctgtgctcttggggcgagaaaccctcccatcccgcaggcttggaagtgcctgctcccactgcctggcctctcccagcacctggtactgtgattttggagcaaaactgaggtggagcctgggcactgttgcaacccagctggtgtgtgtgcacttagggtggtgctgacatgccagcyccctgctgcctcagcccctctggactttgggcactgacgagcatgggagggaggccgagggggtactgaggatggctcaatgcaggcctgcaggtgccactccacatgaacagcctggggaccatggatgacatgtagatggcagcaggaggcagacaggctcctgggtggaaaggggcaggtccccactgaaaccccaccttcaagc

SEQ ID NO: 423507 - DNA, 595 bp, Homo sapiens
agttcttagttttcttttgtcccaggctttacaaggttggaaggggcctattcccatctttactctggaggtctcatcttctaatgctgggcattgggtagatgcttatgggtctgggcagcatccttgttctcaagcagtaagaggattccaaaggccattttaggtgttattcagcaggcactgacttgcaagatgccaagagcccacaagagaaagcaagatgacctgaagaaatggatgttccttcattctccacttgcctgaagacaaactgagatttaggtgaagctcacatctatttctgctaataacaatcccactgctaattatgggatgtggtagttatagtgataagagaggagctatattcagaggggtttagaaaaggttgcaatgtacagaggggtttttaatttgtattaatatttctcagtttacttcctcyatttagatttaagatttactcattaattcaataaacatttattgagtgtctgctatgtaccaggcactgttctattggctggggataacagcaatgaacaccacaaacaaaacccttgctctcatggagtttgtactttagtggagg

SEQ ID NO: 423508 - DNA, 586 bp, Homo sapiens
tcccaaagtgctgggattacaggcgtgagcygctgcgcccagcccattgtatttattaatttgatgttttattatttcacttaccagtgaactttagtacttggcagcagcctcacaattatacatctgttgtgtttactttgtaatctagaccttataggaactggtcccagattgattcatatttagtcctctgtcaaattagagaaataactggcaaattctaaataaaaattaggctgggtatggcagctcacacctgtaaacccaacactttggaaggacaaggtggccggctcccttgagcccaggagttttgagacgagcctgggcaacatagtgagaccctgtctctacaaaaaatgcaaaaattagccagctatggtggcatgcacctgaaatccaagctacttaggaggcttaggtgggaggatcattgagcccgggaaatcaaggctgcagtgagcagaaattgcgccactgtactcaagcctgggtgacagagcgagaccctgtcttaaataaataaatattcaaaaactgcctggtaagcaaggcattactaaggcataccaaattcttttaa

SEQ ID NO: 423509 - DNA, 586 bp, Homo sapiens
tcccaaagtgctgggattacaggcgtgagctgctgcgcccagcccattgtatttattaatttgatgttttattatttcacttaccagtgaactttagtacttggcagcagcctcacaattatacatctgttgtgtttactttgtaatctagaccttataggaactggtcccagattgattcatatttagtcctctgtcaaattagagaaataactggcaaattctaaataaaaattaggctgggtatggcagctcacacctgtaaacccaacactttggaaggacaaggtggccggctcccttgagcccaggagttttgagacgagcctgggcaacatagtgagaccctgtctctacaaaaaatgcaaaaattagccagctatggtggcatgcrcctgaaatccaagctacttaggaggcttaggtgggaggatcattgagcccgggaaatcaaggctgcagtgagcagaaattgcgccactgtactcaagcctgggtgacagagcgagaccctgtcttaaataaataaatattcaaaaactgcctggtaagcaaggcattactaaggcataccaaattcttttaa

SEQ ID NO: 423510 - DNA, 586 bp, Homo sapiens
tcccaaagtgctgggattacaggcgtgagctgctgcgcccagcccattgtatttattaatttgatgttttattatttcacttaccagtgaactttagtacttggcagcagcctcacaattatacatctgttgtgtttactttgtaatctagaccttataggaactggtcccagattgattcatatttagtcctctgtcaaattagagaaataactggcaaattctaaataaaaattaggctgggtatggcagctcacacctgtaaacccaacactttggaaggacaaggtggccggctcccttgagcccaggagttttgagacgagcctgggcaacatagtgagaccctgtctctacaaaaaatgcaaaaattagccagctatggtggcatgcacctgaaatccaagctacttaggaggcttaggtgggaggatcattgagcccgggaaatcaaggctgcagtgagcagaaattgcrccactgtactcaagcctgggtgacagagcgagaccctgtcttaaataaataaatattcaaaaactgcctggtaagcaaggcattactaaggcataccaaattcttttaa

SEQ ID NO: 423511 - DNA, 598 bp, Homo sapiens
aggttaatggctaagtaattttcactttttctgaccttcctgtagcagtctgtggtatttcccttagtgcacctgtagtcccagctactcaggaggctgaggcaggagaatcgcttgaacccaggaggcggaggttgcagtgagctgatatcgcgctactgcactccagcctggtgacagagcaagactctgtctcaagaaaaaaacaactctgttttctgaatgtttccttgtaccaggaacttgcacccatggtgacaactacgatttatttcattgttttcctatttgtgcccacttcctaaatactgtgttttgaggtttgatgcttccttccgttccctcttctttttcctttaggactagaattttaggttatattttctaaagtctctaggctagaccactctttaaatttccagattcttgatttcaacttcttcaatgtcctataggtaccttaaactcaatttttgtgaatatgtcacctctgattaagataccttttttttttgtctcctaatrtggctgaagttctagttataggagtgggaaaaatattggttccccattttctgttcacttgtgcttacattaa
